United States Patent Application Publication US 2004/0214272 A1 - sequence listing, part 34

SEQ ID NO: 140602 - DNA, 1374 bp, Zea mays
  Clone ID: MRT4577_59712C.1
gcacgaggaagcgctcgtcgcaaaagctgtggcactgccgcactggcacagtggcacgcgattcctttccttccgcgtccgcgtccttctcggctgtctgtgcagttgtgctcgcttgctccccacgcccacgtcattccccgtccgctgcggctcacctccagcctcccggtcccgcgaccgctcgctatggccgacgcgtactggaggtacgcggccgccgccccgcgccagcagcagcagcagcagcagccgccgccctccgccggcgggggcgtcgcgcaccccggcatgggcgtcggcgcaccgcagatggcccccgccggggggcagcagcagcccatgaagcggccccgccccaccgaattctcagatgtacccggtgcacctgacacggctggctattatccacgcgatgaagaaagggcagggtatcgtgctgctagagataccgagtctcttaacgcgtcctacgaacgttttctacgtactgggcaaattcaatcctttggtggtggacatgctggagaacctattaggcctgctgtgggtggcaatgctgcctacccagttgatgatcgttcaatgatggctgctaggggtatggatagcagaaatattggtttcgttggtggaatgccagagccaccccttccacctgatgcctcaaacaccttatatatagaaggcgttccatctgactgtacacgtcgagaagtttcacacatcttccgaccatttgttggctttcgtgaggttagacttgtaaacaaagaaccgaaacatcctggtggtgaccctattgtcctttgttttgttgattttgcggaacctacacaatctgctattgcattggatgctttgcaaggctataagtttgacgagcatgatcgcaattcacccaatctgcggctgcagtttgctcgtttcgcaggtccaaaggggaattcaggacctggtggtcgtggtaggcgataagttattggcgttcctttttgccaggccagttccgtggtgaatacccatgtggatttgatattgcaccataggaataggattggtagttttggccttgtgcatccagcgttgcgacccttgtttcgctagatgttttttaggcagaatgcactagctggacataataggtccaaacatttgtagcatcgtgcattcgtgcaggcgtaaatcgtaatgtgttatattgctggagttgtttgtaatgtgctgttttgtatctctgaggcagtttggctgtcaaatccgtgggcttgacgaatatcaacaacctggctgctgttaccttttagaacttattcctgaagttgtttggtaatgggtgtaaaaaatagaggcagctcgcgatctagaactagt

SEQ ID NO: 140603 - DNA, 691 bp, Zea mays
  Clone ID: MRT4577_59713C.1
caggcaggccacagtataactgacactagcggtagcagcagcgctgccagcgcccgtcgtagcaaaaccagcagaaccatggcgaggctgttcctcgcgtgcatgctggtcctgctgctcggcattgcaacggcggcgagaacgacggccgacgacccgccggcgggcgactgcgaccaggacctgcaggacctgatgtccagctgccagcagtacgtgcacttcccggccgaccccaagatcccgccgtcgccggcctgctgcagcgtggtccagcgggtgaacatcccgtgcctctgctccaaggtcaccccgacggtggaggcgctcatctgcatggacaaggtcgtctacgtcgctagctactgcaagaggcccctccagcctggctccacgtgcggaagctatcacgttcctggtgcgcttgcttaatgctcttcgtgtgttgatccattgttctgacgaacactgggatgttctgttcctacttgaacaagtgttgtgtgtacatcttcatgggtcctcgatcggcactgtctctagctagaataaatctgtgaactttgtatgcgttgcatttgcttgtagtgtgatatatatgagttatcctgtcactctatttctttgctctccctatcttctctaatctaattataatattaaacagagtgggaccgtgggaggtttatgg

SEQ ID NO: 140604 - DNA, 1980 bp, Zea mays
  Clone ID: MRT4577_59714C.1
cctctccttttttttctttttttttttaggtccagcaaagaaattatctaatcattcatttgtatgagtttggtcatggggtgataacggaaaaatcaactttgggtcagggttcactaacgaagaacatggcctaattttcggtttaagcaaacaacccactgaccttctatcggcacatcaagtacaagagctaacgcatatagcacctaaacatattacctaaagaatggaggacaactatttcattagggttcataatacaacattacaccacattacctacaatcaccaactactggaataaaggtgagaaaagcattttgggtgtataggtgaaaaacatgatgcaacaatcaggatgcatgctcgtcctattgcgtcctcacagattttgccaacatactatggcaatagcgttctatatcggtggcatacttacgactctcacggtattttgctagtcgtcagctacaaatacgtttcagggttagtgtacctgcagaaaattttcatcacagcccaatttcccatgatgcagttcaaacatgacagtttatcacagtttatactccatatattgctatatggaggccagctcatcattaagcgtcgagccacgcataggcgtcgttgccacactttaaccatagggcaactcattatggtaactcacctttttacctgagcgtaggtgcgtcgttgcaagtacattacatttctcagtattcccatgtctgtatacccatacacctccatggggtactgaattcccaaaaaaataattactccatattgcagccttcatatatacatatgtggaacatgtatataatcaagcgctttttacgcttttccctaaaccgacgtttgttcggtcatgctctcacatttaaccttaccttaagcgtcgatccattcaaaactgaatggcctaaaaaataacattacacatgtatgcaatacccccggttgtgggttagtggtttttagataagccacctaatagtccttaatttagggcttaacagaggatgtcgctaacattatagtttttcaaaactgtttttcaaagccaaacaatgtgtttagttgaaaataggtttttcgaaaccaaaacttttgttttgaaaatacgtatgtaaccgtatatacttaatcctgcttcgataccagctgtggcagaacctcccaaggtatcgggcccacatgcacttgtccttgtcccaaagacctcagacggctatgcatgtgcaccagataacttaacaggaaccgtccgattgccccaaggacatcggataaaccacttacaaccagaaccgcgggattaagtaacacaaatcacacaccaacatttttgcagcggaaatcttattaccaaattttacaggttacaaaaattttacattattttatcggagtgtctagaaaactataggtttgaaatatatgctagctcaagtgatcatcctcaataagaagtatagaagagttacttagacttataagaaggccgagcccaccggcacttaacaccatcatcagcagtacaaagatataacctgggtaacactaggttagtgttgttagatgacgtccacttgacgaccatccttgttctgatacttgtttcgtccatccatctttagattagttcatcaggtttatcctgaggattagcccgcgcttggggtcgacttggctttagttcttcgcatcacgtggtcaattatcgcaccagcatcaaacgtgactcaatacttgcgagtatgctgataaatcctggctcgagcttgtcgttgaacatctgacggtgtggtgcggcttcactttcttctccataccttccggtgatttctctcaaaccagcgacgatcgacgaggattgcgaacatgacgagagggtgaaaactatctatcacaataactctctctaccccgcaaacagcatctaaaacagccatatgaagtagtgcc

SEQ ID NO: 140605 - DNA, 352 bp, Zea mays
  Clone ID: MRT4577_59715C.1
gcttctcaggaagacgatgaagattaagaacatccactacaatctgacggaagatcaatggaaggggaagaatctgtcccaggtggtgttggcgggtcagctactgctgatgcattccatttggattaggatctgctactttaggtcttgtaagtttgattagctactgctgttcagattttagaggtgctattgcttctgctgtatgatgtttgagtttgatattcatatttcagacctgatgttgcttatatattgtctaatatctttaaaatctgattcagagaatcatatatattatatatcaagtatattatgtagtatataactatatactgtagtgtatatatat

SEQ ID NO: 140606 - DNA, 145 bp, Zea mays
  unsure (1)..(145): unsure at all n locations
  Clone ID: MRT4577_59716C.1
ggtcggtgatgtgttgcagggtagggtgaggggcaattggttgctgtcccgccttcggcggctaccacgtcgccaacggcggtggttggggcgaagggtgccgcgcaggacccgtgggccgctttctgagcgagcggcgagattn

SEQ ID NO: 140607 - DNA, 390 bp, Zea mays
  Clone ID: MRT4577_59717C.1
acgagccgcatcgaccggatgagacaggatgcacaaatcggaggcaggcaaaaacggggctcggaacggcacatttgaagagaatagagaacaatacataccgcgatgtgaccttttccaatggccgaaacgaaggggtgacaagggcctacgagagctgcagtcgctgacacaggaaggcctccaggaagagctgctgggcgtccagcatacgtctgggtgcgtttcatctccgattgcatacacaaacttctacatctgcagcgatagcttcagcctgcgctcctgcatacgcaggaacccgtacccgacagcccggagtgcggcagccacctacgccattgactgtgactcggagtcgacctcgctgccgatcctctctgacttcac

SEQ ID NO: 140608 - DNA, 647 bp, Zea mays
  unsure (1)..(647): unsure at all n locations
  Clone ID: MRT4577_59718C.1
gctcttgttctccagttgcctccagcagaagaaaaactctcgttcccattagagctcaacggtgcagaggggggagaggaagggggagggaagtgcgcagtggcccggtgcggaagttcgcgtgggcagggccacggggcggagctcatgcctttttgccgctgcgatactcgccagtggagttgcccttgccgggggtgtttcctgtgcgtacgacgttgggcggacacagctctaccaccgcgcgaagaagaccttgtggggctgccatagtgcgtagctgtttgtccctgtgccgaaccacgtgaggtttcgaggatttggagatcatcctggtaactggaatctcaagtgccaggtcaagaacaggtaccacaggatgaggcgcgtggaggatgttgtggcgagttcgtgagaggtctaggccgtcgtctcccagtcaactttgggttgctggaccgttgtctccttatgatgtaaatatttatttattttgtataaaactcctgttatgtagtaaagatgtgacattcgatccaaaaaaaaaaaaaaaaaaaaaaaaaaaaaaaaaanaaaaaaaaaaaaaaaaaaaaaaaaaaaaaaannnaanaaanccccaaaaaaaaaaaaaaagggcccctagggcc

SEQ ID NO: 140609 - DNA, 145 bp, Zea mays
  Clone ID: MRT4577_59719C.1
gaccaactactaactatataaagaacagtactggtccaagaatggcatccaaaacatgaggcctgatgatgctccttggtccttctgcatgccctggttccgctagcattctcgcctgatgcatcacacgactcacatagttaac

SEQ ID NO: 140610 - DNA, 484 bp, Zea mays
  Clone ID: MRT4577_5971C.1
gtccgtgcattcattgtactgggaagtgtttaatattattttttatgttcataaacggagggctgcataggggctatgggtgatccattaaaagcttcatatttgtgcattctattgttcgtttaatttcgtttgacctgttttgtccactcatagtattttttttatttttattaatatcttctctatctacccacctaataataaagaatgaagagtttcttccagcctgcattttttattctgaaaacacccttgggtcctccatgcgctgtatgtgacctggactcacgtcctatgctcatacgagttagaacgacctacatgcaatgatggtacggacccagacttcaagacgtagtgggtactgttgctgcgcatggtcacgtttgcacgtcatatgttgatgtccagttatttttttataaaagatgtttgtattcaatgaactagatccaattttttccaggctgtatggcttctt

SEQ ID NO: 140611 - DNA, 260 bp, Zea mays
  Clone ID: MRT4577_59720C.1
ggctatttccatgttatgaaaagaatacagaacacaaaggaagggctagagggggggtgcgataaaaaactcccaatatacataagagctgaacattcatgctcctagaactttaccctatatggcaactctccttcatcaaaactttagatatataattattttgaaggaagaagcctgaatcaagtgctttatgaaaagaatcaacaggtgaactattatgatcttattaacaattatcaacaaccgggtcaaagtaa

SEQ ID NO: 140612 - DNA, 380 bp, Zea mays
  Clone ID: MRT4577_59721C.1
tttttttttttttttttttacttccctatgacatgtttcatcagcatggccggtgacagaggaagttttagaatccacataggtaagcacataaacaacaattaacaatagagaacccacagaagtgagatgatcatgatgtttctattagagagattgggaaacacctcacactcctggggtatccctctctaatagttcctcctgttttagcctagaaacatcctgcattgagtaaatacaatgaaccctaggctcaatcatgtctttgtttcctccgtttataacagattgtacaggtaaaatacacaagcatgcactaagaactgcaatgcttggccctaaaatttgcctacaaaaaatggttaacaggatgacca

SEQ ID NO: 140613 - DNA, 785 bp, Zea mays
  Clone ID: MRT4577_59722C.1
ccctctcatcttcatcagccagggccgccatgaacggcaagggcggagacggcgggagcgaccacgacgacatggacatgcggaagccgctgctggtgaacacggggagctggtacaagatggggtcgagcctcacggcggggagctcctccatggccatcatctgcgagtcccacgtctccgccttgctctgcacgctcatcgtcgcgctcggcccaatccagttcggcttcaccggcggcttctcctccccgacgcaggacgccatcacccgcgacctcggcctctccatctccgagttctcggtgttcggctcgctctccaacatcggcgccatggtgggcgccatcgccagcggccagatggtggagcacgtcggccacaaaggggcgttgatgatcgctgctgttcctaacatcctcggctggctcgccatctccttggcaaaagacactacgtttctgtatacggggcgattgcttgaaggatttggtgttggtatcatatcctacacggtgcctgtatacatagcagagatttctcctcgtaacaagaggggcgctctaggctgtgtgaacccgttgtctgtaacacttggggatggtgttggcctatgtgctcggcatgcttgttccttggaggatgcttgcgctgataggaaccttgccatgcacaatattgatacctggcctactcttcattccagaatctccaagatggctggcaaagatgaacaagatggatgatttcgagcctctttacaggttttgagaggatctgagacg

SEQ ID NO: 140614 - DNA, 271 bp, Zea mays
  Clone ID: MRT4577_59723C.1
catgacaccccggtgggcggtgtgtgtgtctgttgcacatggcagggaggggagcctccttctcatggggttgccatggtgatcattggtttttccatcaaaattgcatcttcatccatagattaccttccccttccctgacagtccataaccaaacctttaaacagaacaacctctttaaaaacttgtcttgtgtttaacactttcttcatgccaacgaaacagggtaaacatgctcaaaacattaacagtctaaacagatatccaaata

SEQ ID NO: 140615 - DNA, 1896 bp, Zea mays
  Clone ID: MRT4577_59724C.1
cggacgcgtgggcggacgcgtgggcgcagcagccgcgaaccgtagcagcagccaaaggccggtccactttatttactgctcgtctagtgcagcctgcagcgcagcaaaaccagcggcgcagtgacaaaagcccacagcttcttctccctactcctccagtcctccgtcatccgtttcgctctctgccgccgccaccgcacaagaagctagctcctgcctgtaccgccccggcatggcgatgctatcccgcgcagcctcctccgcggcccggcgcccgctgctgccgccgcctaggcttctggcggtgagggcgatggcgtcgtcgctcttcggccacgtcgagccggcgcccaaggaccccatcctcggcgtcaccgaggctttcctcgccgacccctcgtccgacaaagtgaacgtcggcgtcggcgcctaccgggacgacaacggccagcccgtcgtgctcagctgcgtgcgcgaggccgagcgccggatcgcgggcaacctcaacatggagtaccttccgatgggaggcagcgtcaagatgattgaagagtcactgaagctggcgtacggagaagattctgacttcatcaaagataagaggatagcagcggtgcaggcgctttcaggcactggtgcctgccggctctttgctgatttccaaaagcgttttttgccggattcgcagatctacataccaacaccaacgtggtccaaccatcacaatatttggagggatgctcaagtgccacagaagacattcacatactaccatccagagtcaagagggcttgatttctcaggattgatgaatgaaatcaagaatgctccagatggttcattctttttgcttcatgcatgtgctcataatcccaccggtgtagatcctacggaggaacaatggagagaaatatcccatcagttcaaggtgaaaaaacattttccattctttgacatggcataccaagggtttgccagtggtgatccagagagagatgccaaggcaatccgaattttccttgaagatggacaccaaattggatgtgctcagtcatacgcaaagaacatgggactttatggacaaagagcaggatgcctgagtattttgtgtgaggatgagatgcaagcagttgctgtcaagagccaactgcaacagatcgcaagaccaatgtacagcaacccacctgttcatggtgcactggttgtttctataatcctcagtgatccagaattgaagagtttgtggttaaaagaagtcaagggtatggctgatcgtatcattggaatgcggaaggcacttaaggaaaatcttgaaaagctaggttcacctttgtcatgggatcatatcactaatcagattggaatgttctgctacagtgggatgacacctgaacaagttgaccgtttaacaaatgaataccacatttacatgacccgcaatgggaggataagcatggctggtgtaacgacaggaaatgttggttacctagcaaatgcaattcatgaggttaccaaaccaaattgagttagggtgctaccttctttggtcgatggaagctgatggaatgagactgtgaagcggcgtttccccccctctgttcctgacagaaataagtttagcctgctgctaccatatacatggacacagactcacatgtagacactcaagttttgagagctgtgatcctgtttcatttaatcaaaaacaattttgtttttttttccatcttgtcatggcaaatgttacaccagctgcaaaataattacaataattgatctaaaaaaaaaaactggtgtgccctatctgctggcagcgttgcacgtcaaatgtttggtgttaataaggacaggctatgtatcctctgccagattgttgtacatatacattgtggtgat

SEQ ID NO: 140616 - DNA, 345 bp, Zea mays
  unsure (1)..(345): unsure at all n locations
  Clone ID: MRT4577_59725C.1
ggcatcgattganntctnaagcacgctcgcgtacgtcagctaagagttagcctcgagggaaggccctgagctgccgctgctagctgttcctatctcgatctgtcactgagcagatcttcacggaagacggaacctctgaatgctgtgctggcatacatattcatcggaatgctgatcactgagataaggaaaaataaatactgtacgcaagagataaggaaatgagcaggaccagatagaaagcggatgtggttaagcgatgggctgagtaaaacaaaaggacgaaacatttacctgctaaattgtcaagttnttcttttttttccgcgactctgtctaagcacg

SEQ ID NO: 140617 - DNA, 605 bp, Zea mays
  Clone ID: MRT4577_59726C.1
cacgcctgcgtgtaccgggcacctattacacggtcgacctacgctttcgtcaactagcaactataaaaagccctatattgttccagcaatggcacacacatatatacagactccttatgctcgatactattacttgtaagagacatgttacagagaccacaccccgcatgctcacaggctgatctctgttacgttcttcaaacgaacctgtcaccatggcagtatttggtgtatgaaaaccaagttgtcaaaccctacagcatccaacatgcaaaacgagatcacctgttaccttgataacactggatcctgcatacacacatcatacctattacaatagttacctttggtgcatctattgatcacaaaacatcatggcacaccaactacaacaacttgtgctaacaaaccttgctgcctactctcagcaacagcagattgttccattcaaccaactaactgcatagaactctgcttcttatttgcaacaacaacaactaccaatcagccagctacctgatgcctacccacgacagctacctccattcaaccaactggcagcacccaactctcctgcttcattacagcagcaacaactactacca

SEQ ID NO: 140618 - DNA, 633 bp, Zea mays
  Clone ID: MRT4577_59727C.1
gctgtttcagtgtgttgcaaagtgccagtctactagtcatgtgtgatccacatgaagaaagataatgagaataccatccggttggcgcgtcgatgtcgagcgcttgtgccatgtatgcaacattctagtggccaatgccgtggacacgagtcacgtcatgacagagatgcactctcggccgggggtcaagacgacgggatgaagaacctcatgagcgagatgataggagtactgattgacaagcccaagagcatgacgctcagtagggacatacctcggtcacccccaacaggttcaatactctgttgttgacgcgtacgtgtcctaaaacattggccggctagcgtgcgcaaaatactgtcggtgcaatgatctcgcaatatactatgatgcaacatcggccccgtttaaatgctctagagctaatatatactatgacgtgacttaggcatcgtttaaatgcatagagttaatagttagttaggtacaaagttgctagtggaattagctaactaacaaatagctacctaagtgttacacccggttttagaaggtaaaccaaatgcaaaccatgtacattacaggattagcaattcatgtacacaacaattacatagctggacatcatcacac

SEQ ID NO: 140619 - DNA, 396 bp, Zea mays
  Clone ID: MRT4577_59728C.1
atatttttttttttttttttttttttttttgggttttttttttttttttttttttttttttttttttttttttttttttttttttcttttggggggggggttaaaaaaccggtgccctcgccaaaaaatcccagggggccgcctaaaacctcgatgaaaacttttccccgggaatcgggggcccggaaccccaattaaaaccgcccttttttccatggggccctttaattttccaaccttttccccccggggggcccccccttgaaatttaaaatcccattggggacccccctttaaatttttccccttaaggccctaagaattggttacccccccccctcttttttgggtggggcttttctacccgggggattcccggggtcccccccgcggggg

SEQ ID NO: 140620 - DNA, 1045 bp, Zea mays
  Clone ID: MRT4577_5972C.1
aaaaaaaaaagcaccctgaaaacagttcacaaaattcgcattgccatgttcccaaaccaacctcaagaggagactataaatacctcgagccggccgggacatgcacacgcgacgcttataatacttacaacaaaagataagcccacgaatcagtagatcgaggtcccgcccagtccagcagaagcgcgatcagtagatcgaggtcccgtccagtccagcagaagcgcacacgatgtcccagctgagccctgctggccacatggctgcgacgctcctcctcatcctcctggcctccgcagcagcagcagcggtgtcagctgaccaacaggtctctgcctgccagaatgacatagacgcactgtggcgcagctgcaagcagttcgtccagaaggaggggcccaagatgcctccgtccgaggactgctgcaaaaccatcaaggccttagacgcgcacgcgtcctgcatctgcgactacgtcggctccccggacgccaggaataagctagacctggacaaggtgttcttcgttaccaaacagtgcggcgtcaccgtccccaagggctgcggatcaaagcaggactgaagagcggctgaatctgaatggagcaagttggctaacatacgcacggcagctacaaatacttataggaataaataaagttggtcaactgttggtttcatggtgttggagtacaacaactgtactgttcttatcctcatatatgaactctagttcatcacataatataaatctgtaagagagccgagaaaaaaaaaaaaaaaaaggaacgagtataatagctttagctgggcatggccaatgatcatttgagaacgacaatgacatgctggcccgctcacagtagcagccagagagggtcctgcatgtcgatgtcagtcagctcatgctccacgtggcgtgatcatggtggaataatattctgtaacctgatgactttttaccactgcacctgcacaaaaaataaactgttagatttttagatctcaggttagttatgggcccggccggcctcgaggtacccaa

SEQ ID NO: 140621 - DNA, 321 bp, Zea mays
  Clone ID: MRT4577_59730C.1
caacaacaccattttaaagtaaagcttaaactctcggatccactacctcgtacatgttacctgaataagtgatcaatctatctcacctaaaatcctcactacctaagatacccccataccacaattcatcttcacaaccataagaccaacaacaacatcagatccatggcctatgccaacgtcctcaagacctatttccttaccaacatcctccaatactgcaccaccaaacagctcacccgtctcaagaacaccaccgacatcaatcttatcctcgccaccgactacgtctataagctattctacaccccaaaatccatc

SEQ ID NO: 140622 - DNA, 535 bp, Zea mays
  Clone ID: MRT4577_59731C.1
aaacagaaaagcaaactcttctgccgcttaaccctcaatgataaaaactaacactaggggcgaccattcctcatatgtaaggcaatgaggacccgaatagctgaggtccgcatgatactttaccagaacacgggaaaagctgacttgggccccccaggctaaatgctgatactataccttaaagacgccttcggaactcatttgacacatggtacttttctaaactgacttcctctaactaaaaaactgactcggcaaactacattagacgtgttactgctccatagacagtaaaggaaacagccacaaaacctaactctcccacaacaatgggtctgatgagactgttgcgccatttgaaaccaagttattactacgacggtcatcctcttacccacactgtattcgaaaaatgcaccgcctaagaaacgcttaccgagaccttttgagacatagaatctcatggactgttgcgacgaatataccagaccttacaatgtcaccaaggcccatgatggagaatggcctttcacta

SEQ ID NO: 140623 - DNA, 435 bp, Zea mays
  unsure (1)..(435): unsure at all n locations
  Clone ID: MRT4577_59732C.1
ctcgnagnngccggcccgggnacgctactaaacgcactgcgatacccgcacagaaactagccgtgcacacaacagatgcacatgaaccacccttcgtatcctcactgcgtactctctgtctggcatcnatgccatgcgtgagtaaggaagagtcaaaggccatccatgctaaaacatccgggcctgcagcgccctcccacatcaccaagccgggcgcctcccgcaatgctcaaacacacagcacgaaagatgtgcagtaagaatgggcatcggcgtgcggcggaactgctaaacagactatcctcatacccaagggtgacttccttgtcggacaactctacttcacaggcccttgcaagggcgacgcgaccatccaaacgtatggcaatctgctggctaccacagacctaagtcctcacaaggaccatggtaatt

SEQ ID NO: 140624 - DNA, 212 bp, Zea mays
  Clone ID: MRT4577_59733C.1
cttctccagtaaatatgaaatccaacgggattcataggggatgaataggggacaaaaggagctactttataccgagggagggcaaagccttttttgcgcggtataaaaacaagaatattactaaaaagaatttcaaccaccactgtgcccctgcacaggttgagccttacaaatttgcaattttcctaaaatctaaaaaaaaaaaaagaaat

SEQ ID NO: 140625 - DNA, 468 bp, Zea mays
  Clone ID: MRT4577_59734C.1
gtatgaaaactacattttctgctacaaggaagtgtgagttgcattggtatgataatcttaatgcatgcttctgttctcagcacattaaggcatccaaaccttgtcacgctgattggtacatgcccagaagcttttggtctattatacgagttgtttccaaatggaatccttgaagattgcttgggatgcaagaacaacacgcgaccactaacatggcagacccgcactcgaataattggagagatgtgttctgctctcatttttcttcattcaaacaaacctcaccctgtggtacacggtgatctaaagccagaccacattcttcttgatgccaattattctagcaaattaggagattttggaatttctcgattgttgatacagacaaacacctgcagcacaaatttttaccgaacaacaaacccaagagaaaccttctcttatatggatcctgaatttctgaccact

SEQ ID NO: 140626 - DNA, 506 bp, Zea mays
  Clone ID: MRT4577_59735C.1
aaaaaaaaaaaaaataccctcttttttaaattaaaaatcgattttaaatatccacccccaaagggggaaaagggttttttccccccattttgcccagggcccacggcccccttgggaaacggcccatgaccccaaaaccaaaaaatccttcaaaattgggacccaaaaaaatggtttaaccggcccccaaaaaggtaaaaaacagaaagtaaatccggggaaaacccccaaaatttattattttttttaacaggaaaaaagctaggcggggcccccttttaaaaccggggggccaaaacagaatggaattaagttttcccccccaccacccatgctttggaaaaagggggggggaaaaaaaaatatgcggtggaaaggaaccccggaaaaggcggccaaaaaaaaggaagggaaaagggttgaaaaaaccacaaaaacggggccaaaaaaccccaaccccaaaggaaaccaagggttttccccaaaaaaccccttttccgggtttg

SEQ ID NO: 140627 - DNA, 1001 bp, Zea mays
  Clone ID: MRT4577_59736C.1
caagttacaaaaattttatattattttatcggagtgattacaaaagtataagtttgaaatatatgctagctcaaatgaccatcctcagtaagaagataaagacgggttatacttatataagaaggccgagcccaccggcacttaacaccatcaaaagcagcacaaagttagaacctgaaaaacaacagggaataaaaccctgagtatggaattactcagcaagacttacccgactaaagaaaagactctcaagggtatgctggatttgggaatcaaggagaggctttagcaagaatcaacttagatacttttgcagaaatagcttactaaagtgagtccttactttcaatattttaacgccagattaaatattaatagactctatttgcatctggtctaatttcaccatctcatcaatacaacatcatttttattcatgaggttcacatcctgacttaggttgcaggtcagtgatcaagtctccactctccggggatataacggcgatccgaatcgatttactcagctgaggatctctaaccacacgacatatgtttcttgtaactcttgcatatgtctaccattcccacggatcctccactgcatgaacaggtccgcgccacccgagagcacaccaccacttttttggcaatcttttgccaggaggacgagcaagtcattgaggatcctggtgcccagcaggtagaagttgctgagtaggagctcgttgaaggagaagaacaagtggtcgaagaagagccgcctaacactgaggctatgtaataagtatatttatgatatttatctctatgcactctattatatgtgttgttttctctggcgcatatatgagatgcacccggctttgttccttaaatacaggtgtggcaatgtgttagatgaattaaagatggattagtaataaccattgttatcaatatcagaagtagttggatgatcaatttcattgttctcattgctatccaaaaaaaaaaaaaaaa

SEQ ID NO: 140628 - DNA, 741 bp, Zea mays
  Clone ID: MRT4577_59737C.1
gcagcggaaatcttattaccaaattttacaggttacaaaaattttacattattttatcggagtgattacaaaagtataagtttgaaatatatgctagctcaagtgaccatcctcattaagaagtatagaagaagtacatagacttataagaaggccgagcccaccggcacttaacaccatcacagcagcacaaagttatatcctgagtaacactaggttagtgttgttagatgacgtccacttgacgatcagcctttattccgatactcgcttcgtctgtccatctccagtttcgttcatcagcaccgtcttgtggttgactcagttctggttctccgcatcgcgtggttaattcacgtaccgtttccacagctgacacgaatccacgagatcggtagcgcttttccgattcaggcaatttatcgagcgcttagggaatatcgcgctgctagcttcgtcttcacccgattcttggtttttttgctgacgcgcggaacgacgacgacacaggagagtgatgtatatagagctgcacccgcgacgcgagacgctaaccggtggaatagacgacgcgattgggaattaaagccgagcgagccaagagggcgcaccggcgagcagaaaacctgcgagtacaagacagggaaaacgatgggctcgacaatacgcgaaacggcgacagtcgaatcggaacaaagtgttggcgaatttgatgaacatgaccacagtcgcgagctgaca

SEQ ID NO: 140629 - DNA, 258 bp, Zea mays
  Clone ID: MRT4577_59738C.1
ctcggaattcggctcgagggacgatcgcacccaattcatcgcccccaccgcccagagaaacaaagggggggcctgatgaaaccacaggggctttacaccccccccccacacaagcaagacatgcaaagcacgacagaccagacactcagacgaccgcagcacaaggcacggagcgaaagggggaaacaaatacaacagggcggagctccaaaacagacagacctccacaagcagaaacagacaaagccacggcccgag

SEQ ID NO: 140630 - DNA, 757 bp, Zea mays
  Clone ID: MRT4577_59739C.1
cgcataacatttttgcagcggaaatcttattaccaaattttacgggttacaaaaaatttacattattttatcggagtgattacaaaagtataagtttgaaatatatgctagctcaagtgaccatcctcaataagaagtatagaagaggtacttagacttataagaaggccgagcccaccggcacttaacaccatcacagcagcacaaagttatatcctagaataaacactacgttagtgtttgttagacgacgaccacttggcgatcatccttttgttctgatacttgcttcgtctgtccatcttcagtttcgtccgtcagcatcatcttgtggagaaactcacgcgcgacgacatcttgtggtcgactcagttctgatcctccgtatcacgtagtcaataaacgtaccacgaagctgtgtgaacttgcgaagatctcccgctatacaaagatcatcggcagcgcatcacgacgaactccaaaaaccacgacggcgatgacgcaaagtgcggagacatgctacaaggatttgaagctgttggccacggcgagcagcaggagcgagggagcatcgcggcaatggaagagaggggaacgccggccatggaaggtgacggccgtggagaagcaatagtgaagaatcgtccctcgacgacacgctggtggccagccagaaagacaactcgagttgcgactaggggcgccagcagaagcacgttgccgcggctgatggaggcgaagaaaccggcgagcgtgc

SEQ ID NO: 140631 - DNA, 559 bp, Zea mays
  Clone ID: MRT4577_5973C.1
ccggccgggatccagccacagccatggcgaactccccgtgctccctgtctgcagatctaccatgtgcaaggcgacgatccacccacctgacaggcgcggaggagcttccggctcgtcgtcgccaggatcgacgacgaagccatgccaatccttgtggaccctctcgactagacgaatgatcgtgtacctcgacttcaccaacagcctcgcccacgacgagcgtcggtacgccatctacgaccgctgacttcgccactcgagaagaactgccataagatttgatcttctgtctgtactcactgggcaccctgatacatgaccgcacccggaggaagatgctctgcgcctagactccaatgaccagctgaggactgagctggacggtatcactcgtgagatccgggccaccgaccccaacaatatgactctcgacatcgtcaagaaccgtaccagctgatcctgatcctcctactatgactacacacgatcgaccaccgcctctatcatataggcatcattattactatccgctataaatgtcagacccgcccactggtaa

SEQ ID NO: 140632 - DNA, 1355 bp, Zea mays
  Clone ID: MRT4577_59740C.1
aaattatactacatctttataagtgataaaaatattccatcaccccacaggcctactaatattctacccggtatactaatttaactaattgatcggaatagcgagataactcgctataactgaacatggctcgataatcgcaagaactgcgaagtcgacgagagtttcgtgacttacgcaatttatcgagcaccctaatgagcatcacactagtacattaatttatttaacgatcgaaccattctaaacaatttatcagcttaccgtttccacagctgacacgaatccacgagatcggtagcgcttttccgattcaggcaatttatcgagcgcttagggaatatcgcgctgctagcttcgtcttcacccgattcttggtttttttgctgacgcgcggaacgacgacgacacaggagagtgatgtatatagagctgcacccgcgacgcgagacgctaaccggtggaatagacgacgcgattgggaattaaagccgagcgagccaagagggcgcaccggcgagcagaaaaccatgcgagtacaagacagggaaaacgatgggctcgacaatacgcgaaacggcgacagtcgaatcggcaacaaagtgttggcgaatttgatgaacatgaccacagtcgcgagctgacacggtcaagataactggggtcaacgagcttgtgacagaagcgatgatggtgcgggaactcgacatgctgtgggagcagatgaaattcgtgcgcgcggcaaataagaaaagagcgagctatgcgtgagcagagaggtcgacgagcggcgcgcgcgcacggacaacagcgaagagctcggcgcgcagcgagttggaactggagcgtcgcgatgggcgaagtggagcacggtcagcgggcgtctaccaaagaactcgcgcggtacacagggagaacaggcggccaccagggagagcgtccaggcgcgcgcgacgagcagagagcctgccatggaaacagagggagcagggcacgacgagctggagtaccgcggccatggaaccgagcagatagagcgccgtgaaatggagctgggcagtggagagctcggctgggcgagcagggacgccgcgagcagaggcaaacagccatggacggagcaggagagaaagagccgcgagcgctgagagagagaagcaggggggggggggggcgcggccatgggagtggcaggaccgagcgccggccgagctccggccatgaagggagttccggccacagagggacgcagggagcgcaggaagctccaagcggaggagacgcgcagggaagaatcgagcacggtaggattttcttctcgaggctcccggccgggcctcggagggggtacccaa

SEQ ID NO: 140633 - DNA, 414 bp, Zea mays
  Clone ID: MRT4577_59741C.1
gcagcggaaatcttattaccaaattttacaggttacaaaaattttacattattttatcggagtgattacaaaagtataagtttgaaatatataccatcctcattaagaagtatagaagaactacttagacttataagaaggtcgagcccaccggcacttaacaacatcatcagcagcacaaaactataccctgggtaacactatgttagtgtttgttagacgacgtccacttgacgatcatccttgtcctaacacttgatcaggcaggttcgtccttcaacatcaccgtgtggattagcccgtgcttggggtcgacttggttcgtcttccttaccacgagattatttatcgtacctcatgagatacacgatgcacatgtatagtacgagtataaatagtacaagatagatcccg

SEQ ID NO: 140634 - DNA, 1450 bp, Zea mays
  Clone ID: MRT4577_59742C.1
atcatatgttttatccactgatattacgggcttaaatccatactcgttgtcgagcggtatttaaacaccaggggtgttacacctgcagctttaacgaaccatcaaaagacattcgccatacttctgcagtttctgggtaatctggaacttgttggtcggcccactccaatacaaagtcaaccggggcttgagttttaatggcagtgcgaggtcaaaattcaatgtcatgagtttccggacggcagtgcagtatttacccatggaatcggttgaacaatcccattctttgtttatcggacttatgactaccaaagaatctccatataccataagtctcttgatgcccagcgatatagcaatgttcagtccatgaatcagagcttcatattctgttgcattgttaaaggctggaaataacaactgtagggcatatctgaggtgctcgcctccatgtgcagtaaagaggatccttgcgcctgctccctgctgtggcagaacctcccaagttattgggcccacatgcacctgtccttgtctcaaagacctcggacggctatgcatgtgcaccagataacttaaccggatctgtccgattgccccaaggacatcggataaaccacttacaaccagaaccgcgggattaagtaacacaaatcacacacaccaatattgttacagcggaaatcttactaccaaattttacaggttacaaaaattttacattattttatcggagtgattacaaaaatataagtttgaaatatatgctagctcaaacgaccatcctcaataagaagtatagacggagtatacttagacttataagaaggccgagcccaccggcacttaacaccatcacagcagcacaaagttatatcctggaataaacactatgttagtgtttgttagatgacgtccacttgacgagtatccctcgaccgagcacttgcttgatttaaccatcttcttgatggtccatcagcttcaccatgcggagtagtccacgcttggggtcaacttgactcaagttctccgcatctcgtggttaatcaacgtaccacatcacaactcgatttggtagttgcctgaacgacgacgaccttcagctaaagtccttgatcgaacatctggcgagcgtgaccgacgagctaaggctaaggcgaagctcgacgacgagatcgtgtttgaagcgagctggtgaggtggggtttgagcagaggatgacaggttcgacgacttgacggcaaacgacgagatcgacgacgcgattgggaattaaagtcgagcgagccgagagggcgcactggcgagcaggaaacaggacgcgactgcgtgcagaggagcgggtcggactcagtggccgagcagacccgacccagtagcgagaacaaacagagggggagctggagtatggatagagccaagctgggcgactgggtgagatccggcc

SEQ ID NO: 140635 - DNA, 694 bp, Zea mays
  Clone ID: MRT4577_59743C.1
agagtgcagtttcttcggttacattttgatacaatcaatattcaattatacaaaaatagtgaatccatatagacttgaatgattaatggcctacaactgagaaaatgtttaaactggtacgattctgaattcaaataacataggtgcttttatacatccacctaagtctagtacactatcacagaactccataagtagcaccttgaatgaacttagaacatgctaaaatgcacagatatgattctcaaatttcctaggcaaaagtacattcattacctaaaaaggaatgaaagtcaaaatatcattggccttcgtttggtagtgcaccctgcaaaggccaaatcattttcgtgagcaagaaatatgagcagcagagttcagttgtgggcctatggccagaatagttgtttattacttctggccgtcaagccacatctcagtggacaacgtttccccggggtagacatgcagaaggaagcgactgaagatgctcttcaccgccgtcggttcgccgttgcagaaagattttatgacggtgcgagcagcgaatcctagggtgcagaggtcgtgcaggattggatgggtgaacctgggattgctttgtctagtcgtcgcatactgcagaaggtgccgaatttggaatagaaatgcgagaaacttgataagcaggataggtagcatatgagtacgggtc

SEQ ID NO: 140636 - DNA, 755 bp, Zea mays
  unsure (1)..(755): unsure at all n locations
  Clone ID: MRT4577_59744C.1
ttctgctcgcccagcgtgttgtcgaactcccgcaccatcatcgcctctgtcacaagctcgttagccacagatcagcacccgactgtggtcatgttcatcgaattcgccaacgctttgttgtcgattcgactatcgtcgcttcgcgtgttgtcgagcccgtcgttttccctgtcttgtactcgcgtcctgtttcctgctcaccagcgtgccctctcggctcgctcgactttaaaatccctatctcgtcgtcgacctcgccacgacttagttcgtccgtcgtgctagtcactattccatattgtgcctattagctcggatcctgtcccagctcgtcgttgtgtcattcacagtcgagtcgtcaaacccgtcatctcctgctcaaccccacctcaccagcccgctcaaaactgcaatcgaaggtcgtcgtcaatccgtatgtcatcaagcaatctcaagaatcgggtgaagatgaagttagcagcgcgatattccctaagcgctcgacaaattgcctgggtcgggaaatcgctaccaatctcgtggattcgtgtcagctgttaaaacggtacgttaattaatcgcgtgttgcggaagacgagccaagtcgaccccaagtatggactaatccgcaggatgatgctgatgaacaaacctgaagatgatcngccgagtggacgtcatctaacaacactaacgtagtgtttattccagatcatctctgtcatgcgcccatgggctgtctngtcggtactgag

SEQ ID NO: 140637 - DNA, 734 bp, Zea mays
  unsure (1)..(734): unsure at all n locations
  Clone ID: MRT4577_59745C.1
gggacagaaatccagtcggcggggctgccgcctgccgtatcctcccctcgcccaccgtcgacgacttgatcccctcccaccgttgaggccgcctcctcacggcagcgagccagcgactcctctcttcgtctcctacaagtagccagacaccactccgactttgccggcaacccgtcgacagcgacgaggcgcagcataaggcatacgggcacggcggccatggcgaccagctccaaacccgccgcgcccgtggaccccatggtcgtgctcgcccacgagttccccgaggtgtcattcgactacgacgagagggatgtagcgttgtacgcgctcggggttggtgcctgcggcgatgacgccgtcgacgagaaggagcttcacttcgtgtaccacagggatgggcagccacacattaagctttgatgcaagccttctactgcatggtcaacaataccatagagatctataggccaatcccttcgtatgccagtgttgtaaacagggttaaagtagctggtttgcacgacaagggtacctgctcccactcatcctgaattgataatttttttactgactggatgatacatatacttttttatcaccatgctccttggtattntttcatccttaaaattattgtccatgtttccctatttcaacttcttttttatggtagctctaactcatggtatttcttgatatgaaatatttaaaaatttggttgactagggggg

SEQ ID NO: 140638 - DNA, 712 bp, Zea mays
  Clone ID: MRT4577_59746C.1
ttaacctgcgtgctacaacatatcggaaggatacgtcacggctagttgataaatgtatgtggctgctggtatcgacctttttgactccacatacatttaccaacttactatgggtggtttcgcactgatcttccctgttgacatggttgaaagagaaatgcagaatggtgtactcaacactactgatggcgattcaacaaagattaacctgcgtgctacaacatatcggaaggatacgtcacggctagttgatagctgtaattgcttcacatgccaaaatcacacccgtgcgtacctcaatcatttgctcaatgtccatgagatgttggctcaaattcttctggagatacacaatacccatcattatcttcgtttcttccattccatacgggaggcgatcaaggttggagagtttgatcttttccgacaggagttcgttaagaaaagacgcacccatttcgctgctgttgtggtctagacgtgaccaagagttcatctggctgtcctcccaagattaacttatcaattaatcagacttgtgtacacctgaatccttactagtcaactttcacgtctatgattgacaagtctgaaaagattcatacattaagtgatagaagttgtgtgctaaacaactgatgcattttcttcattggaaaattaattaccattccttgttacctgatttattcaaacaagttttctgatgctt

SEQ ID NO: 140639 - DNA, 756 bp, Zea mays
  Clone ID: MRT4577_59747C.1
aatatccgtgcaggtagagatcatccttcctcaggatcaacctgagctaggcataagtgcaaaggacaaactctatctgcctataagcagggctaagcattttttttgtaaatcatattttgatacttcaccagaagtatctataaaagggatggatttcaaggtaggcaatgcatcgaagggtttccaagcaacttctataaacctaatgcacatttcactagacttaaagtgtgcaaaaataatttaaaaacacaaggaaggggttgcatgcaccggggcttgtctggaagaaacactaggttagtgttgttagacgatgtccacttgacgatcatccttgttctgatacttgtttcgtctatccaccttccggattgtccatcaacatcatcctgcggattagcccgcgcttgggatcgacttggttcgtcttccgcatcgcgtgattaattaacgtacctgaatgaaatggattatgcacatgaatgcatatcgacaagaatatcacacacctaaatagtgctacgcgatagcggaacacctagcggcgaggcgttgtacaagttcatacggaaatactagttatcgatattcgactacgcgtaataattacgcttctttaaattaaacgaacctaacgcaaacatcatgaaacaacaaataatacatatttaatataattagcctaattttggctacacgatagtgaatcgaatatctagtgacgaggcacaaataacatttaaacccggc

SEQ ID NO: 140640 - DNA, 1379 bp, Zea mays
  Clone ID: MRT4577_59748C.1
aaaaaaaaaaaaaaaaaaaaaaaaaaaaaaaaaaaaatccaaagaggaaaggcttgcggtggatacctaggcacccagagacgaggaagggcgtagcaagcgacgaaatgcttcggggagttgaaaataagcatagatccggacttgatccccttccaccgttgagccgttccacgtaacctcctcacggcagcgagccagcggctcctctcttcttcgtctcctacaagtagccagacaccactccgactttgccggcaacccgtcgacagcgacgaggcgcagcataaggcatacgggcacggcggccatggcgaccagctccaaacccgccgcgcccgtggaccccatggtcgtgctcgcccacgagttccccgaggtgtcattcaactacgacgagagggatgtagcgttgtacgcgctcggggttggtgcctgcggcgatgacgccgtcgacgagaaggagcttcacttcgtgtaccaagggatgggcagccacacattaagacccttcctacttttgtttctttatttcccaacaagaacagcaatgggcttggatttgttgatgtgcctggccttaactttgatgcaagccttctactgcatggtcaacaatacatagagatctataggccaatcccttcgtatgccagtgttgtaaacagggttaaagtagctggtttgcacgacaaggggaaagcaactattcttgagctcgaaactaccacaagcctcaaagagtcaggggaaattttatgcatgaacaggagtactatctacttgcgtggtgctggagggttttcagactcttcacagccatactcatatgctacctatcctgcttatcaagtttctcgcatttctattccaaattcggcaccttctgcagtatgcgacgactagacaaagcaatcccaggcattgttatacaggctatctggggattacaatcctttgcattcagacctagatattgcacaacttgctggcctcttctttcttagcacttgtccaagttaagcatttgtggcaatgtagataatctcagaaccaggttcacccatccaatcctgcacgacctctgcaccctaggattcgctgctcgcaccgtcataaaatctttctgcaacggcgaaccgacggcggtgaagagcatcttcagtcgtttccttctgcacgtctaccccggggaaacgttgtccactgagatgtggcttgacggccagaaggtgcactaccaaacgaaggccaatgatattttgactttcattcctttttaggtttgagcaaaagggagctgcagcctgcagggcttgattcaagaaggtgcaaaggtgctggtcagggcatcgagcgttaagttggatgctcgtgtt

SEQ ID NO: 140641 - DNA, 1641 bp, Zea mays
  Clone ID: MRT4577_59749C.1
taggggccttttttttttttttttttgtaataacagagtgtatagagataaatgtcataaaacatcagagtaattattacatagcggaagacttattaaaaaataaaatgataaatgtaaaacgaactaaggatcgccggcgcaaatgtcaactgagaaacgccacctagatcagatcatactcctcgccttgtggctcctccagaaccacctgctcttctcctggcacttgagattccaggtaccaacttgcttttcagatgacacgtgtcctcgcgcagcggggaaggcggtggcatggctagtcacggcggcatgcggccctgcggcggagctccattctcccagccaaactcgcatcatcccacgggccctgggcatgatccctgttgaccggtgaagcgccaaagccatcctccagtgcccagttggccacacaggcgggaatccatggtggcggggagagggcatggtctcccaatctctcacatcgctcggctcaatcgggcgtcgagagcaattccatgcggtggtgtgcgccccacgcgtccgcccacgcgtccgcccacgcgtccgcccacgcgtccgcccacgcgtccgcccacgcgtccgcccacgcgtccgcccacgcgtccggctcggttccgtttgccgcgcccctgcgctcgtcgcggtgctccagctcggattcagtcctgcacgcagccgcttttcatcttcctgctcagctcgctgcgccgaactgcccagggtcgcgcgcctagctcggccgtctctagctcgccttgctccctgctgctcgcccggtcgagctccctgatcgccgcgccgtgaattttcctgcgcttgcatgtctccttgcgcacgcccagcactctggatttccggatctcgcgcgcccctggctcctctgttggtcgcgcggttgtttcctgcttcctgcgcgcgcgagctcgccatctattttgctcgcctctgcttctgctcggaattcccatggccagagctttcccctagcccggatctcacccagtcgccgagctcggctctgtccatactccagctcgccccctctgtttgttctcgctgctgggtcgggtctgcttggccgccgagtccgatccgctcctctgcacgcagttcgccccaactccagtctgtagtggtcgccagtcgtcgatcatgctcggattccatctcgccagctcgctccagactcgatctcgtcgtaattccgtgcgtcatcaagaaatcccaagaatcgggtgaagacgaagctagcaacgcgatattcctcaagcgctccacaaatggcctggatcagaaaatcgctaccgatctcgcggattcgtgtcatctgttgaaacggtaagctgatgaattgtttagaatagttcgaacgttaaataaattaatgtgttagtgcgatgctcattacgtgctcgataaattgcgtgagtcacgaaactctcgtcgacttcgcggtttttacgagtatcgagccagattcagttatagcgagttatgtcgctattccggtcaattaactaaattagtataccgagtagaatattagtaggcctgtgtgataaagaaatatttgattaattgtagacatgtaaaatatgtgaggagtaaaat

SEQ ID NO: 140642 - DNA, 329 bp, Zea mays
  unsure (1)..(329): unsure at all n locations
  Clone ID: MRT4577_5974C.1
gggggccaccacagccatatcctgtcatgaacnnggattggaactcatttatcaatccaagaccganggaccgtangacatggattttatttctctcatcgaaagaaacattcaaacaccgggtagagcgtctaatcaatgtcaacggtctgccagcaagtcaaaactatcaaatgtacaccacacccacacatgccttatagcatcgaacatgtatcctcagatgtgagaccctacactcttattaaggtcattttgtaacgtcacctatctagtaccttgaatcttgtaatactaaatacttatacccaaaaaaaataataaataaa

SEQ ID NO: 140643 - DNA, 2477 bp, Zea mays
  unsure (1)..(2477): unsure at all n locations
  Clone ID: MRT4577_59750C.1
cattgcgaggtcgaccgggcggggaagaaatccagtcggcggggctgccgcctgccgcatcctcccctcgcccaccgtcgacgacttgatcccctcccaccgttgaggccgcctcctcacggcagcgagccagcgactcctctcttcgtctcctacaagtagccagacaccactccgactttgccggcaacccgtcgacagcgacgaggcgcagcataaggcatacgggcacggcggccatggcgaccagctccaaacccgccgcgcccgtggaccccatggtcgtgctcgcccacgagttccccgaggtgtcattcgactacgacgagagggatgtagcgttgtacgcgctcggggttggtgcctgcggcgatgacgccgtcgacgagaaggagcttcacttcgtgtaccacagggatgggcagccacacattaagacccttcctacttttgtttctttatttcccaacaagaacagcaatgggcttggatttgttgatgtgcctggccttaactttgatgcaagccttctactgcatggtcaacaatacatagagatctataggccaatcccttcgtatgccagtgttgtaaacagggttaaagtagctggtttgcacgacaagggtacctgctcccactcatcctgaattgataatttttttactgactggatgatacatatacttttttatcaccatgctccttgttattttttcatccttaaaattattgtccatgtttccctatttcaacttcttttttatggtagctctaactcatgttatttcttgatatgaaatatttaaaatttggtgaactaggggggtggttcagcattttgttatagactaacaattgtcaataactccatattgagataataagaaccacatattttattttttgcacatcaatgaatgaaacacatcataaggctacaaacatttcaaaaagtcatactggcgatcagaatcccgctgtcctgcggatgacaaccctttgcaaaacctgtttattatcatgtcagctttgttcttgtagagcattttgaagttggagctttgttcttggaggaatgaatggttattgtgaaaatatctttatttttcaactatatcacgtgtaactattaacttggtcctttcaactttatctctgttcttgaaagtccccgcacccactcctgccctacttttggtcaaactgacggagactacgtgctacttaaaactagatctaaatagtgggcacgtattttctctctagtaaaggtgctgcttgcacacatcacttcgtatttgtaagtaaaagttttgtttcttaaaattggtgcccgctgaaagcatttggcttgtctgtgataaattgagcacgaggtgggctgccactgtaatgatagccatgtatgggtctgcacataacacattcgtactgtattgataagaagcacgtactacctccgttctcaaatatttgtcgtccgctagttcatttttgaactaagatacgataaataaaaaaacggagggagtattcaattttattgaattgattctaccgatgcactattttaatgtgcagggaaagcaactattcttgagctcgaaactaccacaagcctcaaagagtcaggggaaattttatgcatgaacaggagtactatctacttgcgtggtgctggagggttttcagactcttcacggccatactcatatgctacctatcctgctaatcaagtttctcgcatttctattccaaattcggcaccttctgcagtatgcgacgaccagacaaagcaatcccaggcattgttatacaggctatctggggattacaatcctttgcattcagacccagatattgcacagcttgctgggttcacccgtccaatcctgcacggcctctgcaccctaggattcgctgctcgcgccgtcataaaatctttctgcaacggcgaaccgactgcggtgaagagcatcttcggccgtttccttctgcacgtctaccccggggaaacgttgtccactgagatgtggcttgacggccagaaggtgcactaccaaacgaaggccaaggagcggaaccgagctgtcctctctggatatgtgttgctccagcacatcccctcgtcattgtaagtaaaaagttttgttttctaaaattggtgcccgctgaaagcatttggcttggctgtgataaattgagcacgaggtgggctgccactgtaatgatagccatgtatgggtctgcacataacacattcgtactgtattgataagaagcacgtaccacttaaatacgcagaaaaaaaaaaaaaaaaaaaaaaaaaaaaaaaaaaaaaaaaaaaaaaaaaaaaaaaaaaaaaaaaaaaaaaaaaaaaaaaaaaaaanaaaaaaaaaaaaanaaaaaaaaaaaaaaaaaaaaaaaaaaaaaaagggggcggccttttaaggattcaaattttatttcccggg

SEQ ID NO: 140644 - DNA, 455 bp, Zea mays
  unsure (1)..(455): unsure at all n locations
  Clone ID: MRT4577_59751C.1
tctttatgaattgcggtctccaggtttttttttttttttttttttcttttttttttttacatttaatatacacgagcattgatggaagccatgtttgataactttacagaagtatataactacaatatgccgaaaaaaaggtgaaatcccagacgggaggtttttttttttttttttctgnagggtgcatctatcttcagcaccacaggactacagccaaaaccagcacagttatctcatcagtttgagaaactcggttctgtgctaggaagctttacatttatattagggtgtcgaaagagtccccgtttggcattgtactgtgcttaaccgtgtttgtacatactacatccttcgccgtcgtatgtgctaatcctcccacatcctgcctcgtcatcctaaggttttcttccaattcttccgtgctctttttcctttggcccaaccaaaaacca

SEQ ID NO: 140645 - DNA, 713 bp, Zea mays
  Clone ID: MRT4577_59752C.1
gcagcggaaatcttattaccaaattttacaggttacaaaaattttacattattttatcggagtgattacaaaagtataagtttgaaatatatgctagctcaagtgaccatcctcaataagaagtatagaagaagtacttagacttataagaaggccgagcccaccggcacttaacaccatcatcagcagcacaaaactatgacctgaaaaacaacaggggataaaaccctgagtatggaataactcagcaagacttacccgactaaagaaaagactctcaaggatatgctggatttgggaatcaaggagaggttttagcaagaatcaacttagatacttttgcagaattagctaactaaagtgagtccttactttcaatattttaatgccagattaaatattaatagactatgtttgcatctggtctaatttcaccatctcatcaatacaacatcatttttattcatgaggttcacatcctgacttaggttgcagggcagcgatcaagtctccactctccggggatataacggcgatccgaatcgatttacttcagctgaggatctctaaccacacgagttatgtagcacttagaagttgcatatgtctaccgttcccacggatcctctactgcatgaacaggtccgcgccactcgagagtgctccagatgttctaggcggtccttcgccaagaggctacgtgcggctcgaga

SEQ ID NO: 140646 - DNA, 308 bp, Zea mays
  Clone ID: MRT4577_59753C.1
atcttgacgggcttaaagggtatgggagggaattccttgggaaaaaggccgacgaacttggaaccccatacgtgggttctccagaaacatggtgacaacaggatttttttacccgttcccgtttttttttccaggaaggggcctacaacttccgttaaaaataaagttatttgtcttccgccattagccagggaagattgcccgggggccttaaattaataaccaacccccgcggaccttgaagggaaattgggagaatttggccacctggccgttggcctagagctccgccttgacaagaagggggg

SEQ ID NO: 140647 - DNA, 331 bp, Zea mays
  Clone ID: MRT4577_59754C.1
cacacgcgtcaggcgaagcaacagaacgtgaactaaaaggtaagaaagaggacaggtttacgagagaacgaagttgaaagaacaaagtgtaacgcggcgtcatcatagatatccgaaaggactacagcaccaaatatacaccacagagtgtaagagaagtcgccgtccggacaaacgtgcacggtacgccacgagcaccgcaacccacttcagtgtcatatccctcatcagactgaacacgatcctgagtaccggttacggagcgagtccacgtccggcaagagacggggcccaacgattcggatttcttcaccgatctcctgaagagggt

SEQ ID NO: 140648 - DNA, 495 bp, Zea mays
  Clone ID: MRT4577_59755C.1
ttactcatgatatggctggacgctgggctgttgcgcgttgccctcgtcctcatcgccgctgccgcgacctgggcggcggccctagacgacccggcggggcttctgcgacgggccaaggaggcggagttcatggactggatggtgggggtgcgccggcggatccacgagaaccctgagctcggctacgaggagtttgccaccagtgagctcgtgcggcgcgagctcgatgccatggagatcccctacaggcaccccttcgcggtcaccggcgtcgtcgccaccgtcggcacaggcggcccgcccttcgtcgcgcttcgggccgacatggacgcgctccctatgcaggaaagcgtggaatgggaacataagagcaaagtgcctgggaagatgcatggatgtggccatgatgcacatgttgctatgctattgggctctgctcagattcttcacgagcaccgcgacaagctcgagggtacttgtagcccttccttttcc

SEQ ID NO: 140649 - DNA, 295 bp, Zea mays
  Clone ID: MRT4577_59756C.1
ctccgatctgttgctgcgaacatactgctcgttgtcaacatattcgggggacactgcggattgaagatgagcttcatgatgatggttccagatgcaatacgatctattcggacggcagacatacaggcttggactttagcctgagacaagctggataccgcagtttctactcggtactcctgtcagctgcatgatactgacatggcacacatcgttatagctcacaattcatctgcgtcatgtcatacaagtctcgtggaggcgcttgctacaactaaggagctcacagccgctt

SEQ ID NO: 140650 - DNA, 219 bp, Zea mays
  Clone ID: MRT4577_59757C.1
aaaaaagaaaccctctttttttttctcgacccaagatggaaacaaacatccatccccggtggttttgggggcccaaaaacaaatgaaacgaattttcccaaacaataaacattttagattttggggtttcccccaaggaaagcagaactttcctaaatgggggtaacccctgttgttccccttcccaatgggtttaaattttttgcccccccggggggg

SEQ ID NO: 140651 - DNA, 432 bp, Zea mays
  Clone ID: MRT4577_59758C.1
gcagcagcagcctctcttttcttcatctggggattggaccttcgggtttgtggttgggttaagcaattcgccaaaatccaaaacgaaaagggtcaaaacatggatctttatatccccagaaaatgttcggccactaataggctgatcacctcgaaggatcatgcttctgtccagattaatgttgggcatttggatgagcttggcagatacactggaactttctccacttttgctctttgtggctttgtccgtgcccagggtgatgctgacagtgcacttgacaggctttggcagaagaagaaagctgaagtccgacagcagtagtgggaggtggattgctttttactaattgcttggtctctgaattttggagggaaaatggtgtttttttttaatcaatgacccttaaggtctagctttggtttttaaaat

SEQ ID NO: 140652 - DNA, 546 bp, Zea mays
  unsure (1)..(546): unsure at all n locations
  Clone ID: MRT4577_59759C.1
cttaaaaatgacttgtatgtgttgtgcagagcaccaaatttcaaaaatgaaactggaaccatccatttggttgtcccaagtagcagtttagtgaaccctaattgctgcctgttgaacaatctcaactatttcattgtacaacatttataatctgttgtcttgtcttcttatttgtgtctgaatttctcatgcactttggttctggatccactgtgttcctcacactgaagtatttcatgcttattcagtagtagatgatatttttttcatgaaaatcctcttgattaatatgtgcgtttccttgtatgatttgttacatatttcttttaattatgcgtcttggtcattaattgcatatgcatctataacttgtatagtctcttaagttgtttgatagtccatttgtttataaactatatggttgtcagctctgtataggtccatgtacaattttccaaatccttgtaccaagtttacaaaagcagacggtacctgttcagatgtacctaactgatgtgtgtttngtgtgtgtgtgtgggggggggg

SEQ ID NO: 140653 - DNA, 393 bp, Zea mays
  Clone ID: MRT4577_5975C.1
cggacgcgtggggtgagaggccaggatgagtttgagcatgagatgagccagcttggtaacctcagccaccccaatctggttgcttttcagggttactactggtcatcctcgatgcagttgcttctgtcggaatttgtggccagcgggagcttgtatgaccacctccacggtagccatcctcacgctttctctgagagcagcagcagaggtgctggaggtgaactgtcttgggaacagaggttcaacgtcgcacttggagcggcccgtgcacttgcttaccttcaccatgattgccggccacagatcctgcacctcaacatcaagtcatccaacattatgttagatgggaaatacgaagctaagctatctgactatggattggggaagctgttg

SEQ ID NO: 140654 - DNA, 893 bp, Zea mays
  Clone ID: MRT4577_59760C.1
tgggaccctcgaggccggccgggattcccggatcccctttctccttgagctttgacgtgaaccacagaacacagagtttcagaaacatcaaaactcacctctgagttttctcacccatccacgggaactcacatggaaagttttcttcctgcagccctaggagagctcatggctcgacacataaacttcgtcatcaacaagtgcttcaagccgcacacaatggccatggaggaaagcctacaaagggctcttctccgagcacaagtcatcgatgaggaggccatgggacggcacatcacaaatcaagccatgatccagcagctgggcatgctgagagatgccatgcaccgaggctattacgcgctcgatgccttcaggtaccagcctcactgtggagaggactgcaatgatccagctattaggggcatgctatccctatccaaggtaccctctccaaaggaaccctatttcttcagtcaaactgctcagtcccgggtacaactacaagatgcacttgacggattgagttccatgattgttgatctaaatgagtcagtcatgttcttgatgagctatcctcgtctgtaccgccaaccttacagcatgcatatcctactggctaactgcatgtttggtcgccatatggaagcagaacttgttgttaaatttctgttgcgcacaccccctcactgctctcgagaattggaggtcatgccaattgtggggccacccagagtcggcaagagtaccttagtagctcatgtttgcaaggacgaaagagtctgtgattatttctcagaaatcttgtggttgtgcgagtctgattttacaagtgatgagctagctgacagacagggatgtggaatgaaacgtcaaaatgtatgccaaacttg

SEQ ID NO: 140655 - DNA, 154 bp, Zea mays
  Clone ID: MRT4577_59761C.1
cggctgtctataagtcactggtggtggtggtggactggtcatggggagtcaggtgacgagcgtttgcgtgtgcaggtgccctccccgatcaagcgcagaacagagtgggcgtggcgcgtggtggaacggaatgatatgcgtgcagtttttttac

SEQ ID NO: 140656 - DNA, 378 bp, Zea mays
  Clone ID: MRT4577_59762C.1
cggacgcgtgggcgggcgcgtgggcacaactgcagtgtaagtagcgctacgcggccggggagagatcgggaaagcgggaagcaaggactatggcgtctctgctcagcctgtactgcggcgacgccgccggcggtcggatgacgatgagccgaggtcgcggcacagcgcctgcgccagtgaggcgtctgctgacgaagctgaggtccagcttcatcagaccgagcgctgctcggccgatgactaaggcggcagcgatgttcgcctactacctgcgcagctactcccagaacttcgacgactgcgtcatttcgtcgtcagctccggcggccactgctcgtgcgtacctgcgactccagtatgattctgcttcttctgtgt

SEQ ID NO: 140657 - DNA, 1090 bp, Zea mays
  Clone ID: MRT4577_59763C.1
ccaaactgaggaccctaatcccaaatcgagcggctgaagcgctgggctccagctactgctgctcgcctgcttcgggacggccgattgggtgccggtttgccaaggacatggaggatgcgagcggcagctcgtcgtctccagccgtcctacggaacaagtattgggtcctccgccacggccgcagcgtccccaacgagcgcggtctcatcgtctcatctctggagaacggcacgaagccggagttcgggctggccccgcagggggtcgagcaggcgcgcgcggccggcgaaaagttccggaaggagcttgacgagattggtgtgccggtgggttccgtcaagattcgttactcgccgttctcacggaccaccgagacggctagagtggtcgccggtgtgctcggcatcccctttgaagctcctagttgcgaagcggtgctgggacttcgtgagcgctactttgggccatcatatgagttactttcacatgataagtatgcagacatatggtcagtagatgaagcacatccctgtatggctcctgaaggtggcgagagcgtcgcagatgttgctagtagattttcagctgtgctgttatctgcagagacacagtttcatggctctgcaattcttattgtcagccatggggacccactacaaatctttcaagctgtcctcagtggagccaaggagaacatgtctttccttgacgatctcaccaacctgaaggtgaaagatactgacgatctcaccaacctggaagtgaaagacacgatggtggcatccattctgtcacagcatcgtaagtttgcgctcatcacaggagagctgcgccgagttgtgtaacttgctgctgcttgggtttaacgtcgcctgttaattgaccatatgtaaacctgcaatgattgcctagcacattcctccgtaacttgacagggatatgaaattcgtctcctatggaatgctataacctcagaagtcttaaattattttgaagaagcggcctaaatatttggttgcttgttgaattgtacgattgaaacccagctgccttttattttgcgaaaaaaaaaaaaaaaaaaggggcggcc

SEQ ID NO: 140658 - DNA, 2191 bp, Zea mays
  Clone ID: MRT4577_59764C.1
cgattgggtgccgggttgccaaggacatggaggattcgagcggctgctcgtcgtctccagccgtcctacggaacaagtactgggtcctccgccacggccgcagcgtccccaacgagcgcggtctcatcgtgtcatctctggagaacggcacgaagccggagttcgggctggccccgcagggagtcgagcaggcgcgcgcggccggcgaaaagttccggaaggagcttgacgagattggtgtgccggtgggttccgtcaagattcgttactcgccgttctcacggaccaccgagacggctagagtggtcgccggtgtgctcggcatcccctttgaagctcctagttgcgaagcggtgctgggacttcgtgagcgctactttgggccatcatatgagttactttcacatgataaggtgggtttccttctttggattcagttatattgtttcagtagaaatgaaaggacattcttgtcatatgagcatctactgaggtatttgatacaggttcaattctataatatgaattggtcggtgaaatctaagtggtgcattttcatctataatctaagaattattagtccttctacaatctcacggctctgcagttctaaaatgttagccatggggacccactacaaatctttcaagctgtcctcagtggagccaaggagaacatgtctttccttgacgatctccccaacctgaaggtgaaagatactgacgttctcaccaacctggaagtgaaagacaggatggtggcatccattctgtcacagcatcgtaagtttgcgctcatcacaggagagctgcgccgagttgtgtaacttgctgctgcttgggtttaacgtcgcctgtcaattgaccatatgtaaacctgcaatgtttgcctagcacattcctccgtaacttgacagggatatgaaattcgtctcctatggaatgctataacctcagaagtcttaaattattttgaagaagcggcctaaatatttggttttacgttgaattggaaaattgtttgtcccacaccaacagcactgatccactgatggttttattatgatttaacaggtctagtgatagagtccaagttgaaccacagctcttcctcagatatctataattcagttatcatagtaattgatagtgtagttgtgtttttttgtgtgccactataagtttcatttttttgtttctttccgttactgaatctgatattattaagtagtatgcagacatatggtcagtagatgaagcacatccctgtatggctcctgaaggtggcgagagcgtcgcagatgttgctagtagattttcagctgtgctgtcatctacagagacacattttcatggctctgcaattcttattgtcagccatggggacccactacaaatctttcaagctgtcctcagtggagccaaggagaacatgtctttccttcacgatctcaccaacctgaaggtgaaagatactgacgatctcaccaacctggaagtgaaagacacgatggtggcatccattctgtcacagcatcgtaagtttgcgctcatcacaggagagctgcgccgagttgtgtaacttgctgctgcttgggtttaacgtcgcctgtcagttgaccatatgtaaacctgcaatgtttgcctattacattcctccgtaacttgacagggatatgaaattcgtctcctacgtaatgctatctttcccattttccttccccgcagagtcttaaatattttgaagaagcggcctaaatatttggttgcttgttgaattgtaaaaaaaaaaaaaaaaaaaaaaaaaaaaaaaaaaaaaaaaaaaaaaaaaaaaaaaaaaaaaaaaaaaaaaaaaaaaaaaaaaaaaaaaaaaaaaaaaaaaaaaaaaaaaaaaaaaaaaaaaaaaaaaaaaaaaaaaaaaaaaaaaaaaggggggggcgcctttttgggagaaccaaattttctccccgcggggggggaaaaaaaaaaatttttttttttggggcccccaaaaaaaaaatccggggccggggtttaaacaccggcggcacggggaaaaacccgggggtaccccaaaataaacgccttgggaaaaaacccctttttcccagggggggaaaaaaggaaaaagccccccccccataccccttttcaaaaaatggcccccccctagggggaaaaagggccccccc

SEQ ID NO: 140659 - DNA, 792 bp, Zea mays
  unsure (1)..(792): unsure at all n locations
  Clone ID: MRT4577_59765C.1
gaacactactgggtcctccgccacggccgcagcgtccccaacgagcgcggtctcatcgtgtcatctctggagaacggcacgaagccggagttcgggctggccccgcagggagtcgagcaggcgcgcgcggccggcgaaaagttccggaaggagcttgacgagattggtgtgccggtgggttccgtcaagattcgttactcgccgttctcacggaccaccgagacggctagagtggtcgccggtgtgctcggcatcccctttgaagctcctagttgcgaagttggctcatagaaggacttttgcaggcggtgctgggacttcgtgagcgctactttgggccatcatatgagttactttcacatgataagtatgcagacatatggtcagtagatgaagcacatccctgtatggctcctgaaggtggcgagagcgtcgcagatgttgctagtagattttcagctgtgctgtcatctacagagacacattttcatggctctgcaattcttattgccagccatggggacccactacaaatctttcaagctgtcctcagtggagccaaggagaacatgtctttccttcacgatctcaccaacctgaaggcgaaagatactgacgatctcaccaacctggaagtggaagacacgatgggggcatccattctgtcacagcattgtaagtttgcgctcatcacaggagagctgcgccgagttgtgtaacttgctgctgcttgngtttaacgtcgcctgtcaattgacatatgtaaacctgcaatgtttgcctagcacattc

SEQ ID NO: 140660 - DNA, 364 bp, Zea mays
  Clone ID: MRT4577_59766C.1
tttgggttcatcaaccgaaaattctgaaacagctatctacaagaagcatcagatattatcggaggttcagactttcagcgcacgcatctgacaggaccttgctcttgctacattacatcaggaaataaaaccaggcagccagctgccgaagggggatttacaactgcacaacagctacgacatcagtaagacatccgcagcatcagcaaaagactacgatgtactaagacctacaatatctcttttttctccctcctcgcttgctacctcttttttttcagctgcattggcaaagactaggatgtactaagacctacaataacacctctttttttctccctcttcacttgctacctcttttttt

SEQ ID NO: 140661 - DNA, 1605 bp, Zea mays
  Clone ID: MRT4577_59767C.1
ccgcacgccccgcgcgtgggcaccgcgaactgctccctctcgtgatgcccgccgccgcgcgccttcctccttcctccccgcatcccgcgaactgctccctcccccgccccgcgaactgctcctcccgcccgcgcaccgcgaactgctccctcccacgcgcgcccactgccctcaccctcgccctcgccctcgacggcgctgccctctgtgatggcgggatccacggacgcatatcagtcaggcacccactatctgtcgatggaaggtgaggcacccactatctgtcgatggaaggtgatcgacgcagtgatggtctgcggtcaacatcgcaggcatcctcgccccacctccaggtcctcccgacccccgtccccgcgcgagtccgccgtcgttgttcccgaccgtcttccccgtcctctcggccaccgtcccctcgtggcctgccctgcagatgggaaggcatggcgtgtaggggcggcggtctgggaggtggggaggtggttgccgcgatgtaggatagccgccgccaccgcgagggccagatgctcgatatccgcaaggccaagcacgatgaaagcctccagaagaagcgtcacgattcctcgcatctgccgctggcgtcgtgctgctgatgggcagcacctccgtccccctgcctccacccgggtctccacgccgcgccgtcagaagacaccagcgcctccctccccctccctcccttcacccgctctccacgactgcaaacaaaggcagaaagggtgcttccgcgacatggagcccggtcgcatcccatggaggaacagtctccagtggaaatacagaaagagatcttccctgatggcatctttccaactggtggaaagtcagagatagagggcaaaaacaaatactttgagttgttccagttcaataagggcgcaacactttcggcccttttgatagactaccaaccacagtgcaggcaagtcaaagaaaatcccaattttagttgatgccaaaaagagggaggggttggacgagcttcttgattttacatcttagtgactgcatctaaactgtgagatgtggtcgaatcagatgccatgtccatgtaaccgaagaatttggttcgtggaagttttaatcataggaagtcttgcttaggctttctcaaaccttgaagcctttggtaaaggaaagaattgattatgagaatgccttgatcgtactcctagaacttgtttctgtatggatatgaagcattattcaacttccttggcattcttgggactgccttattccaaggttagcgatggatcaaggtgctccactttagatatgtgtgcaccagcgcctacgcttctcgcttctgatcatagatcgggtctcccttagtgttcagccatcgcaacttgtcctattcagattcacagctactattcattccatctactgaggttcttgtcaagtgcttgttttttattgcactttgtgcatagtccgagatcatattctcaaattattttgtgctcccaccacccttgtctttctagctcctcaagcacatctggtgtatataaggtttggatcttgctagctatcttctatcaaaatattttcatgtcc

SEQ ID NO: 140662 - DNA, 2897 bp, Zea mays
  Clone ID: MRT4577_59768C.1
ggccgctttttttttttttttttgcagcagaaatcttattaccaaattttacaagttacaaaaattttgcttcgtacatgatcagagtgattactacattgattcaaagaaagaaactttgaacggttataaattatttatagttttgaaatatatgctagctcgagtgaccatcctcaataagaagataaaggcggggtatacttatataagaaggccgagcccaccggcacttaacaccatcaacagcagcacaaaaactataacctgaaaaacaacagggaataaaaccctgagtatggaattactcagcaagacttacccgactaaagaaaagactctcaaggatatgctggatttgggaatcaaggagaggctttagcaagaatcaacttagatacttttgcagaaatagcttactaaagtgagtccttactttcaatattttaacgccagattaaatatttaatagactctgtttgcatctagtctaatttcatcatctcatcaatacaacatcatttttatccatagtgttcacatcttgacttaggttgtaggtcggagctcaagtctccactctccggggatataacggcgatccgaatcgatttactcagctgaggatctctaaccacacaacatatgtagcacttaacccttgcatacgtcaaccattcccacagatcctccactgcatgaacaggtccgcgccacccgagagcacaccacccattttaggcgatcccttgccaggagggtacgtgccactctcgccatctctccactcccagtgcgcgattgtcttttcatgtatggaatagccgggttcaagcttaccctgtcccattctcagggcatgtggctagataagatagtccttgatcaacaggcctacatacgcatccaatccttaattgacccgggcggagcatcacctgttcctagcccaagtctcgatttaagtacttccatccttaggattgtttctgttcctgaggatgaaaagagcatcacagggaactttgcagtaagatcccaccattgctccaaatgaaaatattcttgcaggtagaagtcatcctttctcgagctaggctaaggacaacctctatccacaagatctaagcagggctaagcatttttgtaaatcatattttgatacttcaccagaagtatctataaaggtatggatatcaaggaaagcaatgcatcaaagggtttcaagcaattcctataaacctaatgcacatttcactagacttaagtgtgcaaaaagtattttaaaaacacaaggaaggggttgcatgcaccggggcttgcctgggtaacactaggttagtgtttgttaggcgaccacttggcgagcatcctttggcttggcactcgttcagattatccatcttccggttcgtccatcagcatcatcctgcggattagcctgcgcttggggtcgacttgagtcatcttccgcatcacgtgattaattatcgcaccgtccattaaatccgacttcaagcttgcgagaatgtcgacagtctccgaataaaatcttcgatcaactcgctgacgagtatagaacggagcttcactttctcttcatattaagtagaactccgcataaacagcgatgattcttgtcctagcctttcgctgagcacttgggacatcgactaggggattgcttctccacatcttttgggatgcttttgtcggcgcgaacaccagtcggagacagcacatggggactggcatcaagatgagacgacgaaacaacgacgaactagcaagctgagctacggcgagcgatgtcgacaacaaggccgaggcgatacaaatctggggctgctgcacgcacgacgcgacgacgaacgacgacaaccggtgaggtcagcgacgcgatgggaattaaagttgagcgagccgagagggcgcgctggtgagcaggaaacaagacacgcgacgaggctcgacgaggaaactcgacgcggaagtttgacgcgcacgcaaagccatcaccagcgacaacacgacgatggcgatataagcgaatgcgaatcggcgtgggccaaacaccggacaaccatggcagcgacttgggcgagatccgaactaaagcagcagcacacaggcaagcagggacggctggcgaacttcggtttaagcgaatggaacacgacacagggagctgttgcgcgcgtagggactcgacgacggacaacggacatggacgacgtgccgcgcggacgggcgagcagtacatgaactggacagaaccgagcgcgcaggctccacggcgaaccgagaaaccggctgcgcgcagggggcagaggaccgcgcgcgcagagcgagcagcaaggcgacggcgcgcaggaacgcggtaagcagggattaggggcgagctcggcacggcgcgtgaggagctccacggcgagcagaggggaggcatagtccgagctccggccaacagagagcgagagggagaagcttgcgcgcggcagagagagaacggagggacgcgactcaggaagatgctccatggcgagggcgagcagagaccaagcgccggccataggaaaaatcaggaggactgccgacgatcctggtggcggtctgcaagaccagcaacagcacccacagcagaaaggtgccgatcttgccgaccaccgccaagaagccgctcatgccgatgaggagaaagaggatcacggtgagctcgacaggaaccaggcagggaaggcgatagagagaggaacgcctgcgtgctgcaggaaggggaggaccccgccgtccatggaagaagctggaaccagggcgagctccacatcttagccagggagaacgagcagggcggctggttgtaggagatcggaagggaggaagacgccagggaagga

SEQ ID NO: 140663 - DNA, 259 bp, Zea mays
  Clone ID: MRT4577_59769C.1
attccatgtcttgtcccaactgggtggtatccccctcttctaatgggtacatcccagccaacaaatgcatgtccaccaccccccaaaaaaaatcccccagcaccaattaattcgatttttgcgacacaattattggaaagcttaggtaaaaaaattggaacaaacttgtgttttccaaaaccaacttccatggtgcgaaagccgctggaatggtattacagagtccaacagtaattgcattttaacgggcaaccctttt

SEQ ID NO: 140664 - DNA, 700 bp, Zea mays
  unsure (1)..(700): unsure at all n locations
  Clone ID: MRT4577_5976C.1
gtccctatcccacccacacacatcgtccattatccacccacccatagattcacccagcatacacttggcgacatccagctagctagctctcgtcggcggcgacaatggcggggaggcggcaggcagtctggtgcctggtggtcatcgctctggcggtgatgctggcggtggcgtcagcgcagccagtgcagccgagggtgggcgggccggggaagaaaggcgccaagatgccgccgggcaagttcgagacggtgacgttcgccaagaacaacaagcgcaagtacgaggtggcctgcaccgacaaccgcggcccgccctgcgtcgtctcctgcccaaagacctgccccaacaagtgccttgccttctgcgagtactgcatgaccttctgcatgtgcgacatgttcccgggcacgtcgtgcggggacccgcgcttcacgggcggggacggcaacaccttctacttccacggcaagaaggaccaggaattctgcatcgtctccgacaaggacctccacatcaacgcgcacttcattggcaaccacaaccccaatatgaagcgtgacttcacgtgggtgcaggccctcggtgtcaccttcgtccatggcggcgccgaccaccgtctctacgtaggtgccaagaaggtcgtcgagtgngatgaggaggaggaccatgttcagatcaccctcgacggggtgcccgt

SEQ ID NO: 140665 - DNA, 1788 bp, Zea mays
  Clone ID: MRT4577_59770C.1
ggcccgcacggcatcggcgacctcggggacgaggcgcttgctttcctgcattggctccgcgacgccggctgcacgctctggcaggttctaccacttgttcctccaggtaggacggctggggaggatgggtctccttattctggacaggatgccaactgtggcaatacccttttgctatcccttgaggagcttgtaaaagatggtctactgatgtcagatgaacttcctgatcctgtggatacagagtatgttgaatttgacactgttgcaaatctgaaagaaccacttattgcaaaggcagcagagaggctcctactaagccatggagagctcagaacacaatatgactgcttcaaaaaaaatccaaatatatctcctagtggggaccctgggacggcagttctccagtttgctttcggaggtggttctgacaaccctcatttgccacacaaccatgaaatggatcaagttgtgtacactggaacacatgataacgatacagttcttggctggtggcaaaatttaccagaggaagaaaaattacttgggctaaagtagcgaccacgtaaatatgcacaagacactgcgtatcagcatcatgggtgacatgcctctatatgctggctaccatagcgcatatgtttgggcgaacaggaaatcatttttgctggacaaaaacggtttccccactttcgttagtggcgttccacctgatgcatttagtgaaacgggtcaactatggaacagtccattgtacgactggaaagctatggaagcagattgtttttcatggtggataaagaggattaaacgtgcccttgatttgtatgatgaattccgtattgaccatttccgggggcttgcgggtttttgggcagtcccttctgatgcaaaagtagcactggttggaagctggagggctggaccaaggaatagcttttttgacacgctcttcaaagctgttggtagaatagatataatagcagaagatctgggggtaattactgaagatgtcgttcagctaaggaaatccattggggcccctgggatggcagttctccagtttgctttcggaggtggttctgacaaccctcatttgccacacaaccatgaaatggatcaagttgtgtacactggaacacatgataacgatacagttcttggctggtggcaaaatttaccagaggaagaaaagaaaattgtgatcaagtatctaccagaagccgagaatattgacataacatggacactgattacggctgccctctcttccgtcgcgaggacttccgtggtaaccatgcaggacattcttggccttgacagttctgctagaatgaatactccagctacccagaaaggaaactggaggtggaggataccgagctctgttggcttcgacagcctcagccctgaagcagcaaagctgaaggagctgcttgcgctgtacaatcgacagtgaagtccgctattgccatcgaagttccttcaataaaataggcaacaaaatgtgagcggtttggttgccaagttctatggtacgcggccccgcacagaggttgtgttctggttggctggaaacttgcgtgcactgcaagttaagacttgaacatgaagcactattgtatgtgtgtgtattctcatttttttattaaccattttgtttttggtcgggtctatacaagtgttttcccccattgctttgcagcaaagcattaccaatttggatccgtttctttcacgtgacttaggtgtttactagtgtagtgtaatgtaactcgaattcctttt

SEQ ID NO: 140666 - DNA, 2017 bp, Zea mays
  Clone ID: MRT4577_59771C.1
gcagcggaaatcttattaccaaattttacaagttacaaaaattttacattattttatcggagtgattacaaaagtataagtttgaaatatatgctagctcaagggatcatcctcaataaaaagtatagaagggttacttagacttataagaaggccgagcccaccggcacttaacaccattaacaacagcacaaagttagaacctgaaaaacaacagggaataaaaccctgagtaacactaggttagtgtttgttaggcgaccacttggcgagtatcctttggcttggcactcattcagattatccatcttccggttggtccatcagcttcatcctgcggagtagttcgcgcttggggtccacttggcttgtcttccgcatcgcgcgattaattaacgtaccgtttcaacagcccacgaatccacgagatcggtagcgattttccgatccaggcaatttgtcgagcgcttagggaatatcgcgctgctagcttcgtcttcacctgattcttgggttttcttgctgacgcgcggaacgacgacgagattgaatatggagcgggctggcgaggacacgaatctagtgaggattctagcgacgacgaagttacgagcaagggaggacgggttcaacagctcgacgacaaacgcgagcacgcgtgaagcccgatggatgaggagcgaacgcacggatgggtcagactaggaccaaaggacgacgaacgacgcaacgacgggcagggagagatcacgggctgaggaaagactcggtgagcagtgacgcgaggagcaaagcgaggtcacggtcgggctcggacataagcacacgtagcgtttcaccgtgtccaacgcgcgcgtcacggactcgatatcgactgcaagcagtttcgcgcgcacgacaatgcgacgaaagcgaacagaacagagagctttgcggcagcacgcgtaggaacaacggaacgcgcgcgacgcagccatggaggaacaaggagcagggacgctggtgctggagacgcggcactgagcggcggagtttatgaacaatccaaggtggctgccatccatagttgaagacaggaggcgagctgggtgagctcgaccaccagagagggagacgcgacgtcggatccacgcgcgcagatcgatgttggggctgacgtcggggctgcacagatcgatgacacagggttgcaaatcgagtcgacgcacgcggcgcggaagaatctgaggcttgctgcttcgtgcacgacctcggcttgggttgagcagtgagccggccatgggaaaaacctcgggggggtcgcggccagcgagctggagatggccggagacgcgagcagggagccacgcgcaggagcttggggccgggcagaggagagagacgagcacgcgtgaggggctcggccagagcgctgaggcgagcacaacaaggactcccgagcgcgacgactggagagacaaagctccacgacgagcttggaacacaggagcgccgcgcagagaaggactgggagccgtggtagaggaggacgccgagctcagccagggcgcggtggagaagaaagctgcagaggcgagcgagctagtggccgagagggcgctcggccatggcacaagtacagaccggccatgggcaccggccggcgagcagagagagacgacacgcaagggaggaaaaaaatcaagtgcaggggtggtgctcttcgcagcgcgggagcttggcggagagcgcctcgagcgggaggcgctggtgcttgctcgcgagcttgttggcggcgtggatctcgacgtcgcagcgcgcgcacagcgcggcctcgtcggcgcagcacaccaccgtggcagccgcgccctcgcacgcgtcgcactggatcttcatggccgctccacttctcggtctctactcccagctcgccaacacccagccaacaacaaccagggaggcgagaacgaagaggataacgccactgatgactgtggtggaggaagaagtggacggcaaggtagggaggccgggaggg

SEQ ID NO: 140667 - DNA, 3614 bp, Zea mays
  unsure (1)..(3614): unsure at all n locations
  Clone ID: MRT4577_59772C.1
acaagttacaaaaattttatattattttatcggagtgattacaaaagtataagtttgaaatatatgctagctcaaatgaccatcctcagaaagaagataaagacgggttatacttatataagaaggccgagcccatcggcacttaacaccatcaaaagcagcacaaagttagaacctgaaaaacaacagggaataaaaccctgagtatggaattactcagcaagacttacccgactaaagaaaagactctcaagggtatgctggaattgggaatcaaggagaggctttagcaagaatcaacttagatacttttgcagaaatagcttactaaagtgagtccttactttcaatattttattaccaaattaagtattaatagactctgtttgcagctggtctaatttcaccatctcatcaatacaacatcatttttattcataatgttcacatccagacttaggttgtaggtcagtgaccaagtcttcataaccgcgaaggtacggcgatccgaatcgattatactcagctgaggatctccgatcacacgacatatgtagcacttaacccttgcatatgtcaacccgccaccggggttcttaagaccggatcaggttcacgcaaaccgaaagcacagatacaccaccgtctagcctcttgccacggagggtacacgctactctcgccaccgctccacgcccattgcgtgttatcttattctggtattagtctgccagaggcaaagcttacccatgacgaggcatgtgaccagttaaagggtcctcggtcagtaggcgtacatcgagaaggtccttaatcgactcagacggagactctacaccgagacttatttctcgtgcaagtcaaccgcccggtctcagctttattaatttcaacccaaagtctagtacctggcagaggtacatcttttccgatgttgaacccatcaaggcctttgacagatccaccatcaagttttatttttgaaaacattcccacccactgaagcatcacctttgttttaaagacatttttgtatgctaaagcaaggctaagcatcataaaattcttttcaaaacgggtatcaaggaagggaaatcaattttcaaggaaggaaatgcatcaacggtttagcacacaactcctatcacctaatgcatcaaacaaggtgataaagattttaaaacatcaaggaggtggcgaatgcaccggggcttgcctgaataacactaggttagtgtttgttaggcgacgtccacttgatgatcatcctttgtcttggtactcgttcaattatgcatcttcagattcgtccatcagcatcatcatgcggagtagcccacgcttggggtcgacttgggttgtcttccgcatcacgtgattaattatcgtacctaattgagatgcacgatgcacatgaatgcatatagaaaggaatatcacaaacctaaataatgctacacgacaacaaattaaacacctagcagcaaggcgttgcaccatttcgtacggaaacactagttatcgatatatgagtacgcgcaataattacgcttctctagattaactgaatctaacgcaaacattccgaaacaacccnaaactatacacatttaatacaattagcctaaacacaacnttatcagctaattaattaaattctaaacttatcactcgctttataaattataccacatcactcacaaagaactattttaattttattttacacctcacatattttacatgtcaacaattaatcaaacatttcaggtttaaccaccaaaatatcctacaaaatcaacgacgacagacttatcggataattgtttggattactaaatcaattcttcacattattaattctcctcactcctcagcaaagagccaatttaaacctatccgacatatgtatccaccacatattacttgcgatacattttaataatcatttaatataaccacaaccgtatttatcagctatacgatcaagacactagacatattattcatttaaccactcctcacacaataatcatttttaaacttgagtttcgcgtgacacgaccacttcatacttatgtacacaatctattcatcaaaccaataattaagctaacagaaatatgaattggcataccattctaaatctgacgtgttttccgtgaacacaacaaggattctggtttagcccttgtgtcgagcacttggtgaatatcacgctgctagcttcgtcttcacccgactcttgtttttattgatgatgcacggaacgacgacgagagcgagtctggagcgagctggtgaggtgtggtcgagcaggttagcgcgagctctagcgaggacacgaatccagtgaggactccgacgacggcgaggtcacgagctctagcgacacagcgacacggggtcaagcagcgaatgcgttcggtgtgcatacgtgagccgaaccgaaggcggggaaccgatgaagcaaagttcatcgataggcaccatggaggaatcagcgacgttgctacacacacgacgacgaacgacgcaacgacgggcagtgagagatcgcagactgagtaaagactcggcgagcaatgacgtgaggagcaaagcgaggtcatggccgggcaaactcaatggcgcggactgccccgcagccaggactagagacggacacgcggctagagacccaagcatccgaaaccgacgaacgacaacgcgaggagcaaggcgagctctacagcatcggcaacagcacagcatcgacaagaacaccgtgcataggcatgggcgacttgggcgagctgggcgacgacgcgcagaaacttgaatcagggagcaggagggcgcgctagacagccagacttgggacgcgaagatgaaaaacgacggtgccaggacggggaacaggagcaccgcgagaactccatggctgggcgcgcgtcacgagcagagggagctgggaaccgcgacttccatggtcgagcagagaaccggcagggcgcgacgtgctgacggagagccagagcgcgcgcgggatgaagggatcgagccgcggtgcgcaaagagcttcgcgcgcgcgtgggcacagagaagcaagcgcgtgggatgaaggagcagaggtccgcgcaaacacggctgggcacagggaggagcgccggcgagccggagccggaggctgagcaggtagggacgagcgccatgggaagcaggcagagggagctccgcgagcagagaggaattgggggaaggctgcagcgctgggagctcggctggacgcagcttccatgggagatggcggccatggcaaggagcttgggggatgggcgcgccgccatgggagagcgccaaagggtttcgcggtccgagcacaggaggtgcagagaaggcagtcacgcgcgcgtgagagagcttcagagagaagcagcggccgagtaggagccagggcgcgcgacccagggcgcggtgagcttgctgtgccagggagcaaggcgcggcatcaggggcgagcctctcgcgggtctcccactcctctctctctctctctcttctctctctcttctctctctctctctccccttcaagacgcaacgaagggaaccccggccgaacccgggggtacc

SEQ ID NO: 140668 - DNA, 260 bp, Zea mays
  Clone ID: MRT4577_59773C.1
gagcatctttaacggcttgactcttgtcatcttgggagtggttgctttgttcaccgtcccccttctgtacagacaacatcaggcccagattgaccagtatgtggggttggtgaccagccagttgagccacatcaaagctaagatccgagctaagatcccggggaccggaacccttgccccagcagcatcagtctccggatccaaagccaaagccgaatgataagggtgtctttacccgggtgaccctgccacagcccagg

SEQ ID NO: 140669 - DNA, 424 bp, Zea mays
  Clone ID: MRT4577_59774C.1
tcgcccacgcgtacggtctacacaagcctttacaaattgtcctcttagctttactcttaatctaactatagccctagccaaatccaagactaatgccagccctagggacaccaaccagcttggcagcgaccatggggaacccggagaagctgttgaatcagatcttcaacctcaagttcacctacaagtcgctgcacaggcaggcgcgcaagtgcaagaaggaggagatggagcacaagctcacggtcaagaaggcgatcgtgaagggcaccatggtcggcgcccggatctacaccgagaacgccatccggaagctcacctagctcatgaactactttcgcctcgactctggcctggacgccgtcgtggcccggctcgacacgcaggccatgatgcaggtcatgggcaagatcatgcagtccat

SEQ ID NO: 140670 - DNA, 1686 bp, Zea mays
  Clone ID: MRT4577_59775C.1
ggccgcttttttttttttttttttcagcggaaatcttattaccaaattttacaggttataaaaaaaaattacattattttatcggagtgattacaaaagtataagtttgaaatatatgctagctcaagggatcatcctcaataagaagtatagaagggttacttagacttataagaaggccgagcccaccggcacttaacaccatcaacaacagcacaaagttaaaacctgaaaaacaacagggaataaaaccctgagtatggaattactcagcaagtcttacccgactaaggaaaagactctcaagggtatgctggataaataggaatcaaggagaggctttagcaaaaatcaacttagatacttttgcagaaatagcttactaaagtgagtccttactttcaatattttaacgccatattaagtattaatagactctatttgcatctagtctaatttcaacatctcatcaatacaacatcatttttatccatagtgttcacatcctgactttaggttgcagggcagtgaccaagtcttcataaccgcgaaggtacggcgatccgaatcgattatactcagctgaggatctccaatcacacgacacatgtagcacttaacccttgcatatgtcaacccgccaccggggttcttaagaccagatcaggttcacgcaaaccgagagcacagatacaccaccgtccagcctcttgccacggagggtacacgctactctcgccaccgctccacacccatttcgtgttatcttattctggccttagtctgcccgaggcaaggcttacccatgacgaggcatgtgaccagttaaagggtcctcgatcatcaagcctacatacgcgttaatccttaatcaacctgggtagaacatcacctgttcctaacccaagtctcgatttacatacttccatccttaggattgtttctgttcccaaggatgaaaagagcatcacagggaactttgcagtaagatcccactattgctccaaatgaaaatattcttgcaggtagaagccatcctctcccgggttagactgaggacaacctctatccacaagatctaagcaaggctaagcatttttgtaaatcatattttgatacttcacagaagtatctataaaggtatggatatcaaggaaagcaatgcatcaaagggtttcaagcaactcctataaacctaatgcacatttcactagacttaagtgtgcgaaaagtatttaaaaacacaaggaaggggttgcatgcaccggggcttgcctttgttagtaggtgagtcaggctcggatccacaaatatcaaagtagaagcagtttcctgcccgagaatccgagggtggtggtgtcttctcttcagtgacttccacttcttcttcgcgttctaacataaccatatatgtacatatataagaatgaatgccatgtaatgcaaactatcacaaagagaggtggagaacagaaacactacaactaaagcacatggcaagaatacacctatttcttatcgctcgattaaagtgaccgaattgaaatcacttgggtaaaccagggaattaccccaaccaaggtctcaagcaaaagcttaaaactccataagtaacttcatccaaggatcaagatctcactagatcaacatgcctctgccccaaaagcacttagttccataattaag

SEQ ID NO: 140671 - DNA, 529 bp, Zea mays
  Clone ID: MRT4577_59776C.1
gggcaggacaaggctggcaggacagatgattatgggttccactctagagctgaggcagcaggcgctcgaccgcttcttggcgtatcagggtgtgacttcgaaggctaaaccgtgctatggatggactcccggcgaccataactactcctgggaccctgccctccacaagttccttccagagggaacatgaagagacattgtagagtgaattatgtgctggagacaggagccaaccagaaggatgccctgctgcgaattgaaaaactataataataaacccgttgcttgtcttgagggggtgcaggctggttatattgtaccctgaattgacagagatgcaagccctgtccattttaaaagctgctataacaatgaccaacaatggtgatcaagtgttaccaaaaataataaatgatcttgttggaacaccacaagaactgaggaattaagtgactataatccatcaagatagtgagaaagtgatctgcaatgatgacaagactatcgtgtacaaaggtgaaacaatgat

SEQ ID NO: 140672 - DNA, 1733 bp, Zea mays
  Clone ID: MRT4577_59777C.1
gttgcagcgggaaacttactaccaaattttacagattacaaaaattttacattattttatcggagtgattacaaaagtataagtttgaaatatatgctagctcaagtgaccatcctcattaagaagtatagaagaagtacgtagacttataagaaggccgagcccaccggcacttaacaccatcaacaacagcacaaagttaaaacctgggtaacactaggttagtgtttgttaggcgtcgatcacttgaaaatcctttgtcccgatacttgcttcgtctgtccatctccagttccattcatcaccaccatcttgtggtcgactcagttctggttctccgcatcacgtggttaattcacgtaccgtttcgacagctgacatgaatccgcgagatcggtagcgattttccgatccaagcaatttgtcgagcgcttgaggaatatcgtgctgctagcttcgtcttcacccgattcttgtgatttcttaatgacacacggatcgatgacgatcaggagggtgacgtatatagagctgtactcgcgacgcgacgacgaacgacgttaaccggcggaatcgacgacgtgcttgggaattaaagccgagcgagccgagagggcgcaccggcgagcaggaaaccacgcgagtacaagatatggaaaacgacgggctcgacaacacgtgaagcgacgacagtcgaatcggcaacaaagtgttggcttaattcgatgaactcgaccacagtcgcgtgctgacgcggtcaagataattgtggctagcaagcttgcgacagagcgatgatggcgcgacacgacaaactgaaatagggatacggcaacatgaggcttgattcaacgcgggggctcgacgcggaaactttttcgcgcgcgcactagaagagttcgacacacgcagcaggggcgagcagcaggcgccgagctgcgcgcaggcacgcgacggccacggcaaggaagctccgcgagctgggcgactgcgcgtccgtcaagcagagcagggcagtcgtgccatgggaagaagcagcgcgcggcgagggaagcagactccggcaaatcccagggcgcggccatgggagactcggtaggggcacgaccgagcagaaatggagctcggcaaactccatgggcgagcagagcgcagggcgctccggccaggcgagcagggagagcacaccatgactggaaacttggggaataaataaaaaaaacgcggcgcgcagagagaaacggccgccagacgccataggagacgggcgccgagcaagcagaggagacggggcgcgatccgagctccgtgacacataggaagatgaagaaaagcggctcggctaggagatccggccaggtacggccgtgaggagctcgcggctcacgcaaggagcaaggaggaagacgcggcagaggggatgagcagcggacgcggctggagcagagctgggaaacgcagagctcacgcgcagaaaaaaaaatggagcgccatggcaccactcgactggaagcataccagagagagaaaaaggagtggctgcgcgctagaggagagatcgagcgaccgggcgacgaggaacagggacgccgtggccaggaaaagcagggggcagagcgagcttgcggccatggcaggggctccaaatcctgcgcagagaaaaacaggacaggggcagggaagaagacgcctggaatccgagcaagggcttggccgggacgcgtcaagtcccg

SEQ ID NO: 140673 - DNA, 680 bp, Zea mays
  Clone ID: MRT4577_59778C.1
cattgggtacctcgaggccggccgggagtcgacgtcttctccctcacgccttctctttcttatcttctccctggatttttcttcacaggtgcttatctcctccccggagctccctgctcctctcttccccagccgtgcccagctcctctgctcgctggccgcgagcctctgtccatggccgcgcgtcttcctccgtctccctgttgtcgtgccctggagttccctacgcgcttctctgctcggtgccctgcttgctcccgatgccgcactcggtcgccatggcgtgcccaggctccagctcccctgcgcgcttgattcctgcgcgtgctcgccggccggagctctctggcgcgctcgcccatgccgcgcgcagccgagctcgccctgcgcaccccatctcccaggtgctcggccagctcgcccatggtcgcgcccttgacttcgccccagcgcccgaccgtcacttccatggcgcgcccatcccctgcgtcctcccctgcatcgtgccctcccatctccctgttgtcgcgcctggctcgccccctgcgcgtgtgtcctcgccgcgcccgagcgctctgctcactggtgccgcaaccccagccggagctcctggcttgcccctgcttccatgactgaccgcgcggctcctctgcgccgtcattctttgcgcccatgggtgg

SEQ ID NO: 140674 - DNA, 1162 bp, Zea mays
  Clone ID: MRT4577_59779C.1
ggccgcttttttttttttttttttgcagcgaaaatcttattaccaaattttacaagttacaaaaattttactccgtacatgatcggagtgattactatagtgattcaaagaaagaaaatttgaactgttataaattatttatagttttgaaatatatgctagctcaagtgaccatcctcaataagaagataaagacagggtatacttatataagaaggtcgagcccaccggcacttaacaccatcacagcagcacaaagttatatcctgaaaaacaaaagggaataaaaccctgggtaacactaggttagtgttgttaggtgacgtccatttgacgatcatccttgtcctagcacttgatcaggcaggttcgttcatcagcatctccatgcgaagtagcccgcgcttggggtcaacttggctcgtcttccgcatcacgcgatcaattatcgtaccagtaatttaatccatcttgcaagccacgagcacagctacgatttctgattctgccattatgtcgagcacgtggtgagcaccacgcggacttcactgccttctccatcgactccgatcttccacacacatacagacatgatggagttgcggtgtcgagatggtaagggagacacacgtagaggccgagctgctggcgatacggacaggcgcgcgtgccggcgagctaggttggcttagatagggacagccgacgtgatgaccatggcaaataggagatcgacgaccggctcaggcgaccctggtgagagctgagtgcacggacgagcctagcgccgagcgctgtgaggcaacgacaaggtcgacggtcgacgacacgattggggattaaagccgagcgagccgagagggcgcactggcgaacaggaaacaggacgcgacacatgaggactgatccggcgaacagcgacgcggagagcaaagcgaggtcgcggccgggtgaactttattacgcggactgctttgtggtctggacggcagtcgcgatgcacacgacgtcgccaagccacgacaccaccacgaccaggcttggccatgggcgcgacgacgagcaggaaagacgcgtagccaggatcccggcgcgcgacctgcagaagaacacgcgcgcgacaccaagaacccgtgctcgctgcaacatatcatcgccggcc

SEQ ID NO: 140675 - DNA, 468 bp, Zea mays
  Clone ID: MRT4577_5977C.1
gaaaccaaccaaaaaaatctttcgtgggacctttttatgtggagcggttttaaagaccctgcacaaggtgaaattaagaccatgtttttgaacacactccaggccaccttggggtactgtaatattaatcttaacccaccaaaattgtgggggaagagggattatctaaaattattgtacccctaagacccctaaatgggggaaaaaactaacctacccaaaaaaaagctcgcgcagctcaaataattttatcgcacactgcaggcaggaaacccatccaaaactaataggctttttagaaaatacaagaccttgcgtggggctggtccttctacactaggcgcgttttccacaaaaccagcccataggttactttttctccgtgaaaagaaatgtgcgccccctttttcaaatgggctttatcagaagcacctgcttgatgctaatacccccgagcgccaagttccc

SEQ ID NO: 140676 - DNA, 110 bp, Zea mays
  unsure (1)..(110): unsure at all n locations
  Clone ID: MRT4577_59780C.1
taccctccgnagcccggccgggccactgtgtaaccgcagcanacaggccgctcgttgcgtnactccgcgctcatcctnccgccgcactccacaaggcgcgtgcccgcctt

SEQ ID NO: 140677 - DNA, 2179 bp, Zea mays
  Clone ID: MRT4577_59781C.1
gcaaccatgaaattagtatcctccattatactaaaatgtttatcaactcacaagcaaagacgctccatgcacgaagagaaactgctcgcaggaggactacaatatccattatactaaaatgtttatcgacagccatgatccaactgaattcagataactgaacttaacaatgttgctcggcaagactcctcaacgagtgaaggcaggactcctcaatgtgtagaggcactcgcaggatagctgctttacaacagaaagagaatcaccggaagcaccaaggaactccttagcctggacaaatgcaaagaatcaacagaaagagaatcaccgaatagccattctaaatggtgctttacaacataaggatatttatatacaggcagtttaccttgcaacataaccactgagcttatctgctgtggcagaacctcccaagttattgggcccacatgcacctgtccttgtctcaaagacctcagactgctatgcatgtgcaccagataacttaacaggatccgtccgattgccctaaggacatcggataaaccacttacaaccagaatcgcgggattaagtaacacaaatcacacacaccaatattgttgcagcggaaatctttctaccaaattttacaggttaaaataaattttacattagtttatcgaagtgattacaaaagtataagtttaaaatatatatgctagctcaagggatcatcctcaataagaagtatagaagggttacttagacttataagaaggccgagcccaccggcacttaacaccagcatgagcagcacaaaactatgacctgaaaaacaacagggaataaaaccctgagtatggaattactcagcaagtcttacccgactaaggaaaagactctcaagggtatgctggataaataggaatcaaggaaaagctttagcaagaatcaacttagatactttttgcagaaatagcttactaaagtgagtccttactttcaatattttaacgccagattgaatattaatagacactgtttgcatctagtctaatttcatcatctcatcaatacaacatcctttttattcataatgttcacatcctgacttaggttgtagacaagtgaccaagtcttcataaccgcgaaggtacggcgatccgaatcgattatactcagctgaggatctccaatcacacgacatatgtagcacttaacccttgcatatgtcaacccgccaccggggttcttaagaccagatcaggttcacgcaaaccgagagcacagatacaccaccgtccagcctcttgccacggagggtacacgctactctcgccaccgctccacgcccatttcgtgttatcttattctggtcttagtctgcccgaggcaaggcttacccatgacgaggcatgtgaccagttaaagggtcctcggtcagcacacctacatacgcatcaatccttaatcaacctgggtagaacatcacctgttcctaacccaagtcccgatttacgtatttccacccttaggattgtttgtgttccttaggatgaaaagagcatcatagggaacttttgcagtaagatcccaccatgctccgaatgaaaatataatcttgcaggtagaagccatctttcctcaggataacccctgagcaaggccttaacgcaaaagacaacctctatccacaagatctaagcagggctaagcatttttgtaaatcatattttgatacttcacagaagtatctataaaggtatggatatcaaagaaagcaatgcatcaaagggtttcaagcaattcctataaacctaatgcacatttcactagacttaaagtgtgcgaaaattatttaaaaacacaaggaaaggggttgcatgcaccggggcttgcctgagtaacactaggttagtgttgttagacgacgttcgcttgacgagcagcctttgtcttggtacttgatcgggttatccatctgcatcatcctgcgggttagcccgcgcttggggtcaacttggcttgtcttccgcatcacgcgattaattaacgtacctgaatgaaatgcattatgcacatgaatgcatatcgataagaatatcacacacctaaatagtgctacgcgatagcgaataaaacacctagcggcgaggagatgtatattttgtacggaaacactagttattaatatccc

SEQ ID NO: 140678 - DNA, 229 bp, Zea mays
  Clone ID: MRT4577_59782C.1
actcacacggtctacacatcaaccagcacacatttccctttggcggatcttaggagggaaggaggacatagacggcggggtggacgtgcacataaaccggcgtatcgaagtgtggaacgcctgccgagagaacctcgagttcaacttgcgctggacccgccgcacaatcgccctcgtaattctcttcagcctaggattgaggacaccattatacacatcaatggggagc

SEQ ID NO: 140679 - DNA, 195 bp, Zea mays
  Clone ID: MRT4577_59783C.1
ccaaagctccccgggctcagacaagtcctatgaacaagcagactcaacacctgcaccaaggccaaacaaagccagcgattgctccggggcagctgagcccagcactgcgagaaaccaaggacatgggatgcttgcgctcgcaaggatcacaagagcccagaaaccggagaggcagcccagccagctaggtgctgg

SEQ ID NO: 140680 - DNA, 1187 bp, Zea mays
  Clone ID: MRT4577_59784C.1
gctccctctgctcgctcgccgtcgtcgcagccgagctccacttggcgcgctgcccgtccgatcttgtgcccccaatctcctgcacatggcgcgcgcttacccagctcttccccttccagcagctgagcacgccgtccctccctatttcagctcgcctctgtccgccatggtccgaccagagacacccacgtcgagctccctcacacgcacgctcagttccagctcgccagtcaaattctctgcgtcgcgcccagctcggatttcgccggccaccgttctctaacccgtgtgctggtcggtgtcgtatagttttagtttgatcggctcgtcgtcgacttcgtcagttgtcatcattcgtcgtcgcaccgttcgccgtcgagtttcgctacccatcgcggagttctctgctcgccacaacgtgtcgaacttccgcgtcaaacttatctcttccgtgccggttgtcgtctccgagccgattcttggccgtcgtagtattttagctatcccggccgcatctgtagtcatcaagcatgtctgttgccgtgaactcgcccttggtgtccactctgtctctggtccgcgcttcctttagtttggccaggcggggcatcgttacatgctgtgttcgcgcagtttccctgctcaccagtgcgtcccctcagctcgcttggccttaattctcatcgcgtcatcgactccgccgttccaataattttgccgcatcgcccttcaaatccgagtcctcgtccataggatcgtcgttgacctcacaacttcagctcgagttaattatggacgataaataatcgcgtaatgcggaagaaaaaccaagtcgaccccaagcatgggctaatctgcaagctgaagctgatgaatcaacctgaagatggttaaatcaagcaagtgctcggacgaagaatactcatcaagcggacgtcacctaaccaacactaacctagtgttactcaggttctaactttgtgctgttgttgatggtgttaagtgtcggtgggctcggccttcttataagtctaagtaacccttctatacttcttattgaggatgatcccttgagctagcatatatttcaaacttatacttttgtaatcactccgataaaataatataaatttttttgtaacttgtaaaatttggtaataagatttccgctgcaaaatattgatgtg

SEQ ID NO: 140681 - DNA, 244 bp, Zea mays
  Clone ID: MRT4577_59785C.1
cgacaacgcggacaactgactgtcgctctgctgccgcgtcgactcaagcgtcgcatgatccgtatgcacgtacagggaccgaacagacactgcgagagtgagcatacttgtataccaagccgtgccagactactcctggctacaagcgttcaagtgcaacaactgcatgagaaccacagctatccaccgctacctacacagaaatggactacagctacaacatcacgaacatatgccagacagt

SEQ ID NO: 140682 - DNA, 1654 bp, Zea mays
  Clone ID: MRT4577_59786C.1
gcagcgaaaatactattaccaaattttacaagttacaaaaattttatattattttatcggagtgattacaaaagtataagtttgaaatatatatgctagctcaagtgatcatcctcaataagaagtatagaagggttacttagacttataagaaggccgagcccaccggcacttaacaccatcaacaacatcacaaagttaggacctgaaaacaacagggaataaaaccctgagtatggaattactcagcaagtcttacccgactaaagaaaagactctcaagggtatgctggcttaagggagtcaaggaaaggcttatcaagaatcaaggactctgttttgcagaaatgcttactaaagtggatccttaaaaatccaattttatttgtcaagttaagtacaattacctgcaactagagttctttctaccctagttcaagcactggtcctgcactagccaatttcttaacaaatacccatcatctttagtggaatgctacgtgtagggtagtgaccaagtcttcataaccgcgaaggtacggcgatccgaatcgattgtactcagctgaggatctccaatcacacgacatatgtagcacttaacccttgcatatgtcaacccgccaccggggttcttaagaccggatcaggttcacgcaaaccgagagcacagctacaccaccgtccagcctcttgccacggagggtacacgctactctcgccaccgctccacgcccatttcgtgttatcttattccggccttagtctgcccgaggcaaggcttacccatgacgaggcatgtgaccagctaaagggtcctcgatcatcaagcctacatcgagacgatccttaatcgactcagacggagacactacacgagactctctttctcgtgcaagtcacccgcccggtctcagcttaatcttttcaaacctaaagtttggtacctggcagaggtacatctttttcgatgttgaacccatcacggccctgatggatccaccatcaaattttatttttgaaaacaaccctcccactttgccaatcatcttttgtaaaacaaatccttttgtttttctaaagcaatactaagcatagaaaaacctttttgtaaaaacagggtttcaaggaaggtaatcaagttcaaggaaggtaatgcaggaattgtttaagcattcaactcctatcacctaatgcagcaatcaagtgagaaagattttaaaaacatcaaggaaggtggcaaatgcaccggggcttgccttcgttgataggtgagtcaggctcggacccgcagatatcgaagtagaaacaatttccggcgtgagattccgaaggtggtggtgtcttctcttcggttacttcgatctcttcttcgttttctaaatataaccatataggtatatataagaatgaatgccatgtaatgctcatgagagtgcaaagataataaaggatttattatctaagtcttgaatacaactttccttcatggaactccaagaacttagggtttccggagtcagtaaaggagttcaaagggcagggggtagggtttttgggttctagttatcaaacaaggttcaaatcaaacccaactctacccaaggcttctaaataaggtgtagaactcatataaaaaatttgggcaattatg

SEQ ID NO: 140683 - DNA, 1653 bp, Zea mays
  Clone ID: MRT4577_59787C.1
ggggaagacttttgtgacggaacctcccagtaattaggcccacctacagttgtccttgtctaacagacatcagacaccctatagatgttcctaagtcacttgacaagttcggtatctttccttacctcaccaggaacgtttcacccgtcttgcagacattacagaacatcggagataaagaaatgcggaagcgattacataacttacatttattttaaaagcaagctcaagtggttttattacagaccagaactaaaaaggcgagtgctgagtagtaatattatacaaaccaagggaggcacaaactcctcccgataagttataagcaaaagatcctatgtggaggaccgagtcctcccgcacttcagtcttgtttttcttctttaggaaccaccttggcacagaagcagcagaaatctgctacttcctcacctaaaaacaacgaagggataaaccctgagtatggaattactcagcaagtcttacccgactaaagaaaagactctcaagggtatgctggttatatgggagtcaaggtaaggcttttcaataatcaaagactctgttttgcagaaatgcttactaaagtggatccttaaaaatccaattttatttgtcaagttaagtagagttacctgtaactagagttctttctaccctagttcaatcactggtcctgcactagccaatttcttaacaaaaacccatcatctttagtggaatgctacgtgtagggcagtgaccaagtcttcataaccgcgaaggtacggcgatccgaatcgattatactcagctgaggatctccaatcacacgacatatgtagcacttaacccttgcatatgtcaacccgccaccggggttcttaagaccagatcaggttcacgcaaaccgagagcacagatacaccaccgtccagcctcttgctacggagggtacacgctactctcgccaccgctccacacccatttcgtgttatcttattctggccttagtctgcccgaggcaaggcttacccatgacgaggcatgtgaccagttaaagggtccccgatcatcaagcctacatcgacaaggtgcttaatcgactcagacggagacactacaccgagactctctttctcgtgcaagtcacccgcccggtctcagcttaatcttttcaaacctaaagtttggtacctggcagaggtacatcttttccgatgttgaatccatcacgttttattttcaaaaacatccctcccactttgccaaacatattttgtaaaacaaatccttttgtttttctaaagcaatactaagcaaagtaaaacctttttgtaaaaacaggatctcaaggagggtaatcaaaatcaaggaaggcaatgcaagaattgtttaatcaatcaactcctatcacctaatgcagcaagtgagaaagattttaaaaacatcaaggaaggtggcaaatgcaccggggcttgcctttgttatcagaggtgtcttgctcggatccgcagatatcaaaataaaagcaattgtctgcctgaggatcagaggtgggtggtatcccttcttcaacaacttcttcttcttcttcttgctctaatataaccatatacatatataaggatggatgtcatggaatgctcatgaggatgcaaagataaccccggg

SEQ ID NO: 140684 - DNA, 300 bp, Zea mays
  Clone ID: MRT4577_59788C.1
taattaccggaccgacccatgcgttcaaacaatacttgcacccattatctccattacttcaccacatctctctcaccctaacgaaggtcgcccgccccacataccacgctcctctcctacatccttataagatttaccatcaccacgggccaggcaccggcacatctaccaattgctctcacagctgctatatcacccgccgtggccaccgaatgcgctatcccttaccgtgacccacacccagtgcatcctcgagttcttaccctatgagagcgacaccctgttcaggaacttctttct

SEQ ID NO: 140685 - DNA, 810 bp, Zea mays
  Clone ID: MRT4577_59789C.1
gagtgactgagagctgcttcagccacatgcgacccatttttgtccacggcaatgaccgaaaaatagtcgatacaattgcgtaggaatgtgcataactgctctaactcacagccttctataagaacctgcaaggtgtggcttataacagcatcagtggcaagttcatgctctttccctctagtttcttctaaggcattagcgcatatagttgagcgctcttcaaaatcaatctccttgttatcaaagaggtttgagatctccataaagtactttgcagtttcaggatcaactcttttcctaagaacattttgtactggttttgatgtatcggaggatggtaccgcatcctgattgttgaggttcttcgtcctgggattcaccatcacggagcttcctgaatgatggtcctttcgtcgacccttccctttcttcccatcatcatttctctgcttcctatccttcacatgccgaggtttccctacagaaggtcctttacttgagctgtgaccccctttcccgtgtttctcgctcgtatccttccttgtcctcttcttgtgtgagctatcgtctaaagctccatctcccaagccatttattgtgctccccttgggtctaattgccttggacccaacacaaaccattgctcatgtacacttcgacagcagctgcttactctggtgggtgctcgtcgccggagaagagaccgacgaaggcctcggcacctagcgcagggtggcggcggcggtagcccacccagtgatcggctagtcggagagagatgggaggaaagagagcgcacgcaggggaagg

SEQ ID NO: 140686 - DNA, 889 bp, Zea mays
  unsure (1)..(889): unsure at all n locations
  Clone ID: MRT4577_5978C.1
cctcgaggccggccggggcttgggtgaacggtgaaaaagcgggagcggccgatcgggagctgctgggagctagttgggagccaaggcgtcgtcgcaggttgccgtctcgctgccgcccgccggccacagttgctgcggtgccgtcggccatatctgacggctgaccccttaccggcagttatcctcgtccctcacgcttccattcccgcgcctctcgaatctcgatggagggccgcctcttcgataagcccttgaacccgaataagctcctcaaggagcaattcgtgagcaacctgacggggtcttccctgctggagatcgcggcgctccccactgtcgttccggcattggtagttctcagaaagtggagcagcagagataattctaggaaggagtcagcaaagaaaaatgatgatcaagttcatactgttcgtaaagattggatgcagtacttctctacactaggtgtagattatctcactgttgtattgccaattattttggttttcacagtcttatcggaatgggtttttatgtgtgctatttctcttgtaatcctgatatccatttacatcatgtttaaaaggtctcagtttcatcttaaagatggattcagtcagctgcctttgctcagggcagacatatcttcttaccgtgtctcagtggttctggtgacatgtttgtgcatattagctgtggacttcaaaatatttccaagacgctatgctaaggctganacatatggtagtggcatcatggatcttggagtaggatcttttgtagtggctaatgcactggtatctagacaagcacgaaatatagcctcaatgagtttcaaggcagntcttttgttcgataagtccactcttatctcttggctttgctcgca

SEQ ID NO: 140687 - DNA, 677 bp, Zea mays
  Clone ID: MRT4577_59790C.1
cttctttcccaacggccacactttcatcagttcccctttcccggcgccgccggaatccccacaaagcccccaaaaccctacggccacctcgccacccccaacgaaaacccagaccacgagatggcccccggtggagagggcaagccaagcacgggcggcggcggcggcggcggcggcgtcaagggtgggaggaagcgcaagttccttccccacgggaagccggtgcggaagggggcctacccgctgcgccccggcgtgcagggcttcttcatcacctgcgacggcggccgcgagcaccaggccacccgcgaggcgctctccctcctcgactccttctatgaagacctggtggatgggaaaggatcggatgagaagcctaaaaacattccagacaagccactgaacaaaaagataaagtttgaggacactgattcctcagatgatgaggatgaagacaactctggtgaggaagccgacaatgggaatgatgtggagaaaggtgaaaccgctccatctgagaagcaaccggaggtgcttgatacctctaataccgcaagcaaggacaatactgctctatctgagaacaagaggaggtgcttgacacctccgataccgggagtaaggaccatgacgcaccagtcggcccctgctgattgacccaagagcaaaagaacccc

SEQ ID NO: 140688 - DNA, 604 bp, Zea mays
  Clone ID: MRT4577_59791C.1
ctcctaccccgaaagaaagaccacacgcacacttcgacatttctcagatatttcgcccctgcgcttttcttcctcctcccttccttcctttcccgccgcaattgctcctagttatccttagcacgacatgccggaggcacctgcacgggcagccgccgccggcggcggcgcctccgcccccgccgacgtcgacgtcgtcacctccagcggccgccgcaagatcaccgcccattcctccgttcttgcgtcggcgtcgccggtgctggagaccgtcctggagcgccggctgcagaggctcagggagagcggcaagggcggcagggccgtcgtccggatccgcggcgtcaccgacgacgtcgcggcggcgttcgtccgcctcctctacgccggcagcaggcatggcgagggcgaggtggaggaggacgtggagaagtacgcagagcagctgctggtgctggcgcacgcgtaccgggtgccgtggctcaagctgtggtgccaggaggccatcgggtcgcggctcacgccgggcaccgtggtggacgtgctgcagctggccgacctctgcgacgcggcgcagctccacctccggtgcatgggcctcctc

SEQ ID NO: 140689 - DNA, 343 bp, Zea mays
  Clone ID: MRT4577_59792C.1
ccctcttaggacatcgggaccttactttgggccggatcttgaaatttacagcccactttcgtttccactggctcccaaaaaaatccagcgcattaccgggggtgagccctaagcaggcaaccttccttgcatgggcagtaagatgttgggggccccgaaggggaaaggggaacaacgggaaccggactggaagcggaaaaaccccccaatcccttgatttcctggggggagggggccacgccaacctccgttggaacacgaccgtaggtcataagggcggttaataaaccaagcacccgcctaatcttgatcaagagcggttcctccctgtgaataaacgggg

SEQ ID NO: 140690 - DNA, 289 bp, Zea mays
  Clone ID: MRT4577_59793C.1
gggtccacgtacgcgacccctcgggtccacacttgcaccgatctagcagccaacatggggaccaaacacttggctctttgcctccttgttctccttagcataggcatgggcatggacatccctgctgcaaaccgcatactgggttaaggcccccggggaggaggtggcggtggtgttaccggtggccgcagtggttacggtggaccatgcgtatggtccggatcacggtatagtcatggcggtgagtgtgcaagtgctgctggagggtatggacatggtggcggcggcg

SEQ ID NO: 140691 - DNA, 382 bp, Zea mays
  Clone ID: MRT4577_59794C.1
caaccagctgcgggggaatccctcgtcgtcgttgtacaacatgctggttctgctcctcctcgcgagcgcgtgtatctgcgctgtcgaccccgtgaggacacgtgtcatctgaggagcaagttggtacctggaatctcaagtccgaggtcaagaacaggtaccgcaggatgaggcgcatggaggatgctgtgacgagttcgtgacaggtttaggacatcgtctcccagtcaactttgggttgctggatcgttgtctccttatgatgtaattatttatttattttgtacataactcctatttagtaaagatgtgacattcgtttctgttgggggttttcttatacaccgaaggtccttacggaataaacaccttttgcaagaca

SEQ ID NO: 140692 - DNA, 463 bp, Zea mays
  Clone ID: MRT4577_59795C.1
gctgctggacgttgtgcgacgcctgcagggacttgcccggacgacccaggtcgacccacgacgcgtgttgctgaagtgtcagataggggagactaacacacaccttggctaaaacacatacctggttgggcatgctgttactatagttgacataggactgacatgcaacctgtaccatggaagggctcggaacttgaacaagaccttaacgagtcatttctctgatgttgcgaggaatttatggaccatggttaacaaggctttcagtaggaaggtcattggttgggtccaaggtgatggaccatgtcacagctatgacccaatatggtggcgtccttagcaggagcctgttgcaaaggatgtcaagaaagagggtgctaaagaggccaccaaggcaaaggaggctgtggaactagcagaagaggaagcagcctaggcacagcctatgaatcctctggacttg

SEQ ID NO: 140693 - DNA, 434 bp, Zea mays
  Clone ID: MRT4577_59796C.1
tatttccacgacatactgaccacgcaccacctgaacgatggcctaaaacatcacaccgagctatcgtacaggactccaaactagcgctggctgcgagcgcctaacaacaaccccgagtgcaatcgctactctcatccttgtcgcatctaactcctgacagaccgttgaaccgcaactacaacaacaacaacagtttcgggccatcactgtaccacgctacccgcggagaacccctgtccctacttgcaacagctgttgtttgcatccaacccacttgctctggtgaacgtagctgcataccagcaacaactacaaatgccacagcgtatgccagtgcatcagtctactagccatggcgaaccctgccggctacctacaactactaatatctagcccgctagcggcgggcaatgcacctacctacctacaacaac

SEQ ID NO: 140694 - DNA, 518 bp, Zea mays
  unsure (1)..(518): unsure at all n locations
  Clone ID: MRT4577_59797C.1
cccacgcgtttgtttatactaggncagacgcttcttatgacgcttagggtaggatccatggactcctaaggagcttactgaaatgtagaacaagagactactaaaccggtgagccaggaatacggggagagcatcgccggtatgaatggtctgttgatgctgaccgactaagatctagtatagccgctatctatgctactgtggaacagctaggacctcatgatgagccaggcgatcaagtctgagacaaagcgcgtagaatacctcagaacggggagcgactgcttcacacgaacaatgaagctccttgacaactccatggctgtcaagaacacatactaacgttcgggcggaacgaagagcctggtctccttgacgtggactactactacgtctacggccttagcgcgtgattgcagaacgtgcgaaaatgctgggtgcgtctagacgacatcgactagctgccgtcgcactatgacgcccttgccgactacgtaaaagaaccggacgtaaacgtc

SEQ ID NO: 140695 - DNA, 2029 bp, Zea mays
  Clone ID: MRT4577_59798C.1
gttacagcggaaatcttactaccaaattttacaagttacaaaaattttacattagtttatcggagtgattacaaaaatataagtttgaaatatatgctagctcaagggatcatcctcaataagaagtatagaagggttacttagacttataagaaggccgagcccaccggcacttaacaccatcaacaacagcacaaagttagaacctgagtaacactaggttagtgttgttaggtgacgtccgcttgacgagtatccttcgaccgagcacttgcttgatttaaccgtcttcaggttgattcatcagcttcagcttgcagattagcccacgcttggggtcggcttggttcttcttccgcatcacgcgattatttatcgtacctcatgagatgcatgatgcacatgtatgagcacatgtataacgagtataatatagataatctacgctaaaaagcatgaaacacttaaaaccaagcattaagcaccatggatatcacagcaggacatcgactatatccattaatcaaattgacatattacactagaaaatctatttttattctaagctttttattaactctctaaactgtgtaacttaattagttgatttagcgagctatctaaatcaatcatcacaatatacgcatgctaaattaataatatttattgtgaccaataattctatttaatctatttatagacctagttaatgggaatacgaaccaacttacccttactaattcgacgcgatagtcgcaagcacgactacgggttccggttgacgtcatccaggagccttcttttcttcggtaattaattgctgaagatcttttcttcgattgaataatttcgacgaattgaacttgagtcgcgcaggatgtccgagctttttggtcgcgcacttggtgaatatcacgctgctggcttcgttttcactcgattcttggaatttcttgatgacgcatggaacgatgacgacacaggagggtgacgtatatagagctacacacgcgacacgatgacgaacgacgctgaccagcggaatcgatgacgcgatgagaattaaggccaagcgagccgagagggcgcaccggcgagcaggaaaaagactcgacgcaggagtttgacacgcacgcgaagctatcaccagcgacaacactatgatggcgatatgagcgaacgcgaatcggcgcgggccaaacaccgtacaaccatggcagcgacttgggcgagattcaaactaaagcagcagcacagcgacaagcagggacgactggcgaactccggtttaggtgaatggaacgcgacacagggagctggtgcgcacgtagggactcgacgacggacagcggccatggatgacgtgtcgcgcggacggccggaacagaaacagcgagcacgttgtgatttatggcacagacaggtaacgacgaagcaagacgaaacttgactgcgcgctggagaaagtgagagaggttggggccaagcacagatgctgctacggcatgctgccagggagcaagtgttgagcatgatgaggggatgagacaggtggaataggagcgcagagcagtggacctcgcaagatctccactaccggaccttcacgagcatgtgggtgaaggtttcagggagcggaggactgggagatcaagcacagagagaggacgtcggcgctcatggctagagctgggcgcggtctgctgggagatggagagatggagatgagcggcagagggaggaagcaagctgcgcgcggagaagatgctgggcgccgctaccgggaaaccttagaggccgaggaggggaagggctccggcgagctgcgcgcatataaaacgaacagggcggcggcaaaaatatcacgcagtcaggtacagtggctgcggagaggatgagaacgactgagacacaggaaaatcttgcgctggctgaacggatgaacggctgggagtttttttaagcagagcgcacactgggaattgcagcttgccggggagcagaacacagaggaggcgctgtgcgttga

SEQ ID NO: 140696 - DNA, 2928 bp, Zea mays
  Clone ID: MRT4577_59799C.1
gcagcggaaatcttattaccaaattttacaagttacaaaattttactttgtatgatcggagtgattacaaaggtgattcaaagaaataactttaaactgttataaattatttataagtttgaaatatatgctagctcaagtgaccatcctcaataagaagataaagacggggtatacttatataagaaggccgagcccaccgacacttaacaccatcaacagcagcacaaaactataacctgaaaaacaacagggaataaaaccctgagtatggaattactcagcaagacttacccgactaaagaaaagactctcaaggatatgctggatttgggaatcaaggagaggctttagcaagaatcaacttagatacttttgcagaaatagcttactaaagtgagtccttactttcaatattttaacgccagattaaatatttaatagactctgtttgcatctagtctaatttcatcatctcatcaatacaacatcatttttatccatcgtgttcacatcctgacttaggttgtaggtcggagctcaagtctccactgtccggggatataacggcgatccgaatcgatttactcagctgaggatctctaaccacacgacatatgtttctcgtaaaccttgatgtctactattcccacggatcctccactgcatgaacaggtccgcgccacccgagagtacaccaccccttttaggcgatccgttgccaggagggtacgtgccactctcgccatctctccacgcccagtgcgcgattgtcttttcatgtatggaatagccgggttcaagcttaccctgtcccattctcagggcatgtggctagataagatagtccttgatcaacaggcctacatacgcatccaatccttaattgacccgggcggagcatcatctgttcctagcccaagtctcgatttaagtatttccatccttaggattgtgtctgttccttaggatgaaagagcatcacagggaactttgcagtaagatcccactattgctccaaacgaaaatattcttgcaggtagaagctatcctctccatggttaaattgaggacaacctctatccacaagatctaagcaaggctaagcatttttgtaaatcatattttgatacttcacagaagtatctataaaggtatggatatcaaggaaagcaatgcatcaaagggtttcaagtaactcctatgaacctaatgcacatttcactagacttaagtgtgcaaaaagtatttaaaaacacaaggaaaggggttgcatgcaccggggcttgcatgggataaacactaggttagtgttgttagacgatgtctgcttgacgaccatccttgtcctagcacttgatcggcaggttcgtctattagcaccaccatgcggagtagcccgcgcttgaggtcaacttggttcgtctttcacatcgcgcgattaataagcgtaccagcatcaaacgtgactcaatacttgcgagtatgctgataaatcctggctcgagcttgtcgttgaacatctgacgttgtggtgcggcttcactttcttctccataccttccagtgatttctctcaaaccagcgacgatcgacgaggattgcgaacatgacgagagggcgaaaaccatctatcacaacaactctctctaccccgcaaacagcatctaaaacagccatatgaaatagtgttgagatcttccgcccccatgacctagatggggctgaccaagaggaggcgaaacacgacgagacgcgtatcggaagagttactgggattaaagatgacgacacgcatcaaggcgaggcgacatatgacggtgaaaaaaataggaatgaatgacgacgagagacagcacagttgcgtgggacttggcgataacggcgagctggaccattggtcagctcagcagacacgaccaagaaaatttacgagcacacgtgagcgagcagttgagtgatggtggcgaagcttgctggttgacacggaaaggatcaacaaagtcgacagccaatcggtgaaccgaagattgggagtgacagccgatgaagagcttatctctagagagccacgcgagtgaaactgaaaattaatccgacagtggttcagcggcaactgatgaccggtagaagaacgtggctgcccagaggagctgcagggaggaacggcgtgcttatctactgaaaggaaaggacctcggctgggagagggaactggctaccgggcttgcttggtacaagaagccgagggcgagctcggcaggacgcagagaggagcgctgtcgagcagagaaaattagcgcgcgcggcgatgggagctctgcggcagaggaggacgccgaccagcacgcaggggagcaggacgggggcaatcggcgccatggaggtggagctcaaagacgacggcgacttgggcgagctccagggagaaactgggagccgcggcacggaggagcaggggctagccaccatggggaaaagcttcgggagaagggagacgaccgagcagagagcttcgcgagctgggatccggcgcgtgcgcatggaggaattcgagcgcgctgactggggacagggagagagacgggctgaggaaggagatggatgcgcaggggaggcacgcgccaaagaagctccaccggcgagtagggaagacgccgagcagaggagcacggactcgaccgagacacagagacaacgtagagagaatggacgcagcatgaccagagaaggacctcaatcccggattgaagaaaagggagattgggcgagcagaaaaggcagggcgagctcaaccaggggcttggacgccaagcgccatgggagatctgagcgagctggagagagccgcgtacggggaggaagaagaacacagagagcagggagacgcgcggctggagatatagccggtagtgccccacgcgtccg

SEQ ID NO: 140697 - DNA, 233 bp, Zea mays
  unsure (1)..(233): unsure at all n locations
  Clone ID: MRT4577_5979C.1
gccgggancgcgcggcctcgatttcccttaacacagcacagaggaagcaggcggcggcgatggcatggcgggcgagcctgtctcggagcctataggagatccgcgtcctcttctgtcatttctccccggtcagcgtcgctgatctttattttgttacttataatttcgnatttntcctctttcttcttcctcttttnntcttccttttcttttttttttnctttttttttttt

SEQ ID NO: 140698 - DNA, 1226 bp, Zea mays
  Clone ID: MRT4577_597C.1
cggacggcacgagagtttcgcctggccctggctacttgcggcaactcccatctccacgcgctctcccatccgagatctcaaccgccttcgccggcgagcgactgacgggcggacggtcccgccggctatggggaactgctgctccgatgaggtgagccacgccggcgctcatcccgtcggctccgccaccgccaaagccgcctccgcagcctccgccgcggccgatcgctttctccgctcccgtggtgccggcgcgtccacgcagatcgagttatctctctctgcatcaaatttgggtgatcaagaatattttcccaagagtaaacccatggttgttgtgtattccaaaaagagagatggtacactagaagaaattgggcgcagtgaagtaattttaaattcattgaacccattttggacgaccaaaatcagtgtgcagtaccagtttgaggttcttcagcaattggtgtttcaggtctttgacatccaccagcagttccatgaggtcagtgaaaagatgcttaagctagaggaacaagagtttcttggagaggctacctgtcttttgtcagaggttatcaccaaacgggacagactgctgactctgaagcttggtgtttctgaacataacttgccaaatcctaataattttggtgagctaactgttcaggctgaagaaagttcaggttcaaaagcaataatggagatgatattccgctgttcggatcttgaaatcaaggatcttctaacaaagagtgatacttttttgctaatatctggaatatcagatagtggaatgcctgttccaatttgcaagacagaagtaagaaagaatgatctcaatcctaggtggaggccagtgagtctgaatctgcaacagattggaagtaaggagaaccctctaattgtagagtgctttaacttcagtagcaatggcaaacatgacctagtcggcaagatagtcaagtcagttgcagaattggaaaatatgtaccataggaagaatggtgaaaatttctttgttcctgccagcaatgcacatgaatgtcacagtaaggaggtgttgaagagccagctatatgtagagaaatatgttgagagtaacagacatactttcctagattatatttctgttgggtgccagttgaattttatggtaggcgtagatttcacagcttcaaatggaaatccacggcttcagattctttgcattatattgacccctc

SEQ ID NO: 140699 - DNA, 3336 bp, Zea mays
  Clone ID: MRT4577_59800C.1
ctcagcatcgctcgctcctgcatctcctagctcgagctcgcctctactccggtgcccagtcgctagactctcgctttcctgtgccgctctcgtccgtggttgtctctctgcccagtctccatctcccttcccagccatggccttcctagtgcctgcccttcccctgccgcccctctccgtggacgccgcccatggagggtcgccggctgcactgcttcccatctatcccaccgccatggagctcgccggattgcgtccctgcatccatggcggctgcttggccccagctccttgccgcgcccttccagtccctctgccggccatggagctcggccctagctcagattcttgcgccgcgcccggctgtttctcccctgcgtgccgtggctgtgccgttcctgtgtgcgcggctcactgctcggcgtccattcccctgtgctcaccatggtcgtcgttgctccctggtgtaagttgccgcacacgttgtatcccagctcggagctccctctgcacagctcagattcagcccagccgtgctgagttcggcctttgcttgtccctgtgcttgagctccgtcctcccagccatggcgcacacactggttgcctctgctcgagctcgcccggccagagttcccggtcgccgtgtcctgtcgagcttggctccgtgcgtgcgctttttctcccttagctcgccccgatgccgcaccttgaagccctctgcccggtgctcgagaccccttccatgcctgcgcatcctgttgcctgctcgcaccctgctctctctgacgcgcgtctgttccagctcgcctagccgtcgaagctccctgccatcgtcgttttcggccctgccgttggtacaacatcgtttgctgttgctagttgatgcaacgttgccgtccttcgacgccgcgccgtgagcagcgacttcgtcgatccgtcattttgatagggtacttgcgctgctctcctgtgtatgtgatgattggaaaaggagtcccagctgatgaaggattaaggaacgaaagctctagtacaccccgcctgccagctgatcgtcgtacatcctgaaccagggtttaatcattttctttgtgaagttcgagccgattataattttagaaggagatttggtgctgaagtcgaagctagcagcccctttattcctcgtcgtcaagccacgccgcgtcgcgacatgcccgtcgatcccgacgatctatctcccagatgtgtgccacttgtgttgagctccaaaacccctgtcgagctcttctcctgaaagccgccttcgagcacaatccctgtcatgtgttcgatgggaagtctgaaccaatgctcatcgtcgatctacgattatcaaatcattctggtcatggtaagtcgatgagttattcagaatagttcaattgttgaaaaaattaatgtgctagtgtgatgctcactagttgctcgataaattacgcgagtcacggaactctcgtcgacttcgcggttcttgcgattatcgagccaggttctattatagcgagttatttcgctattccggtcaattagttgaattagtgtaccgagtagaatattagtaggccaatattttaatcccttgtaaagatgtagtataatttataaagcaagagataaggttagcatttaattaattagctggtgagttgtgtaggttaattgtatttcatgtgtatagtttgttgttcgtgatgtttgtgttagattcgagaagcgtaattattgcgcttagtcgtacgtctgtaactagtgtttccgtataaaattatacaacgcctcgccgataggtgtttaaattcgccatcgcatagcgctatttaggtttgtaatattcatgtttatatgcattcatatgcataatgcatttcattcaggtacgttaattaatcgcgtgatgcggaagaaaaaccaagtcgaccccaagcgtgggctaatctgcaagctgaagctgatgaatcaacctgaagatggttaaatcaagcaagtgctcggtcaaagaatactcgtcaagcggacgtcacctaacaaacactaacctagtgttactcaggcaagccccggtgcatgcaacccctttccttgtgtttttaaatacttttcgcacactttaagtctagtgaaatgtgcattaagtttataggaattgcttgaaaccctttgatgcattgctttccttgatatccatacctttatagatacttcggtgaagtatcaaaatatgatttacaaaaatgcttagccttacttagatcttgtagatagaggttgtccttaatttaactcgagaaaggatggcttctacctgcaagaatattttcatttggagcaatggtgggatcttactacaaagctccctgtgatgctcttttcatccttgggaacagaaacaatcctaaggatggaagtatgtaaatcgagacttgggttaggaacaggtgatgttctacccaggttgattaaggaattgatgcgtatgtaggcttgatgatcgaggaccctttaactggtcacctgcctcgtcatgggtaagccttgcctcgggcagactaaggccggaataagataacacgaaatggacgtggagcggtggcgagagtagcgtgtaccctccgtggcaagaggctggacggtggtgtatctgtgctctcggtttgcgtgaacctgatccggtcttaagaaccccggtggcgggttgacatatgcaagggttaagtgctacatatgtcgtgtgattggagatcctcagctgagtataatcgattcggatcgccgtacctccgcggttatggagacttggccactgacttacatgtagcattccactaaagataaagggtttttgttgagaaattggctagtgtaggaccagtgattgaactagggtagaaagaactctagctgcaggtaattttacttaacctgacaataaaattggattttaaggatccactcgtagtaagcttttctgcaaaacagagtctttgattcttgataagccataccttgactcccttaagccagcatacccttgagagtctttttctttagtcgggtaagtcttgctgagtaattccatactcagggttttattccctgttgtttttcaggttctaactttgtgctattgttgatggtgttaagtgccggtgggctcggccttcttataagtctaagtaacccttctatacttcttattgaggatgatcccttgagctagcatatatttcaaacttatacttttgtaatcactccgataaactaatgtaaaatttttgtaacctgtaaaatttggtagtaagatttccgctgcaac

SEQ ID NO: 140700 - DNA, 210 bp, Zea mays
  Clone ID: MRT4577_59801C.1
aaggtaaaaccaaccgaccaacaatctccaaacgccgccatgtcaagtttatggaaggcaaggagaagagaaaaacagacatgttgacacagtcacagatgacaaaaggatccaggaggttccagcaatgaaggttactgacctgaggttcacggaaacagcaagggccaggattgacaatgctaatggcgagtgccacacatttaacca

SEQ ID NO: 140701 - DNA, 682 bp, Zea mays
  Clone ID: MRT4577_59802C.1
ccggccggggactgtgtcttgtgttttgttatttttcttcctctccttctgacagttctagctgttgttcttttttgcaatcatgtcggacgagtctcaactccctggccttcctggctttgacagaaacaatattcaaccatggaccgtcgaagtcgttgtctccatgactcttctagcgttagtgtcatgtggtctgagattgtatagtcgacatctaaaagcgcagaaactgtggtgggatgattatgtgattttgttttccatggcttggaacttggtcgtcgtcggtttcatctttgccatgcactcctctggtatgggtcttcacgccgacaaagtccctgtagaccaaatcgtcatgatggcaaagtggctcgtcgtcgcagaggtcctctacgcttggaatctaggatggaccaagctgagtcttttgctcatgtactaccgcatctttcgcgtgccatactttaagaaaatggcctggatcgtcggcacttttgtgtttgcctgggtcatcaccatcacgtttctcttcatcttcatctgcgtccccgtcgccaaactgtggtatccgactcttcctggccactgtattaaccaggtcggaacctggatcgccaacgccgcctcgacaatcttaccgacgtcggtatcctgtggcttcccattccgcctatct

SEQ ID NO: 140702 - DNA, 515 bp, Zea mays
  Clone ID: MRT4577_59803C.1
gttgcggtcatcatttggggaaaattaatctgttttacgaccgtcttaacctagctcacgttacctgataggaggggaacaatccatcacgtagggaatcctgcttcacacatgataggaatgagccgccatcagaaggatcaagaaagcaacttcactatgaacgcttggatgcccaagccaatttacatgaggtaacttcaatgacacctctagctaaaaactcccaatgtctaatggatcgatacaggcacgctttcacggataggattagaactggaaataagaatcaaacgagcttttacccttttgttccacacgagatttctgcaatcgttcaactcattttagaacatctgcgttatcttttaacagatgtacgcgcacagtcaaactccgcacatgacaatgtattgctgccgagatcggcaccgaatagacacctccttggagcctaaaggaggggactgactgcgcttgctacccacggaataaggtacataacaggaaaagta

SEQ ID NO: 140703 - DNA, 451 bp, Zea mays
  unsure (1)..(451): unsure at all n locations
  Clone ID: MRT4577_59804C.1
cccagcgccggcgancccncccccgcccccggcccccagggacgcggagggaacgcaagngggccgncncanccgagnnaaggaagccanggagcacaaggaggcngggngccaggcccccgagggacccanccncngcancaanaacgggggcnncnncggcagcgcggcgaccaggaacaggngcnccaagngccacaagggagaganaacgaagcaggancaggccaagcnggcngccnccncnancgacagcancgngaacggcagcgacgccgncanggagccggngggggcnggcagcaacacggnagnagcngnggcccaagnngagnngcaaacaangaacgngcagcagcccgcnggaggggccggacccagcgagggggnggcggngancnccaaaggggggaagggagggccgaaccggggcagcgccggcaggaagagg

SEQ ID NO: 140704 - DNA, 517 bp, Zea mays
  unsure (1)..(517): unsure at all n locations
  Clone ID: MRT4577_59805C.1
gcacgtagtcggcgtcggctgtcgttcatgtacgccgacgcgcgcgacgtcccggtcctccgtcagactgtgaggcatgaaggtgcgcccgtcactcgaccgtcaaggtaccaggtgccagctgtcggtatgctgcgtgngcgcgttctttcgacgtactacgccgcctgtggcaggggcattctacacgcgnatctatgtacttcaagnnaacgcctgacgttctgcctgctacggcagccagtnctagcctggntggggcacctgcgcanncaccatannggccanatcgctctggcctggcaaccggtgtggccntcanntggtacntaccgncgnntcnnccagctaccattncgncncananngacacggtncggcggctgggtcagtgctggtacggtaccgccgctactcctngatacangnagntctgtcgccatggnctgntacccctgtcaagtaaagntnncgcactggacccactcggttccggctacggaactgaaggcactgt

SEQ ID NO: 140705 - DNA, 332 bp, Zea mays
  Clone ID: MRT4577_59806C.1
gaaacaaaaattttttggtgacataaaacaagctacttgggaagggactactacttacctgcaaaaaaggggctaattcaaaccgcaaaccttaggcaagccccgaattgaaaggtaacatgggccccagagtggaaggccaaaccgcccttacttgggtgggacgggccccccttccttatattgcacgtcctcatgagcggtggtatcccgctcctcgttggacgtggacaccagatccgtgaggtccccgtaacctagatagaacatcatatgatccatgccctgaacatggtaccaattcatgaccccctccctgctcaatataacaa

SEQ ID NO: 140706 - DNA, 2095 bp, Zea mays
  unsure (1)..(2095): unsure at all n locations
  Clone ID: MRT4577_59807C.1
cggccgggnaaccctacacgcccccgccacgccgcggcatggcggatccgccgcccgtggccgcctccgcctcgccggcgcagcccgaccagctcgccgccgcggcctccgtgtccaccccgcagaaccccaaccccctcctctcccctcaaattcccccgtccccgaccgtctccgacctctccgcgcacatctcgtccccgcagcagctcgaccaggcggctgcggcagctgacgcttcgggcggcggaggatccatggattacctcccgcgcccgccgcagctgcaggcgccttcgcccacgcaggcaggggtcggcgccgcggggtttgcccagatcccccgctcggggtcgacctcacgcctctccacggccacccagctccagcagtacgcggctaggatgtacggcgggcagatgagcttctcgggtggcggagggctcgtgggccagcagcagctggcggggcgcgcccccatgcttgggcagggccagctggggatgctgcaaggccagggtaacgcggcatctgcggcacattttgggcttcagtcgcagatgttggcgcaggctaggcaaaaggtcatggcacaaaacacccaattgaataatgctaatacagctcaagtgctgcaagggatgcagcccatgggtgtcatgggtgctatggggatgaaccagacgagaccgaatgtaactattccctatggtgctcaacaaaggtttgcccaggcacaaatgaggccacaagcatctcaacaacctgcactgtctccacagaaggtacctggtcaaggtttgtcgaggacagcatcaattaccgcattaaattcacaactgtctggatcatcacaaaatggacagatggtggcaatgtctatgcctcagcaacagcaacagcagcagcaatggttgaagcaaatgcaaccatccatgggctcaccactttccccacagcaacaatatcagaaccagcagaggctcctgttgatgcagcatcttcagcagaagacaggattgaaccaacaacaacttctccaaatccaacaacagcatccacatctcaatgtccaacagctgattaagcagcaacaatttctgaagcagtttcagcagcagcaaccgctacaatctcctcgtgttttagcatctggttcacagaaatctgcgaatcttacaggctcgcagccgggtacaccattgtcaggtggaactatgactggtggaagtggaagtcagggagctgaaggaactagccaacttcttgggaaaaggaaaatacaagatctggttgcacaggtagatcccttaggcaaggttgacccagaagtggaggatttacttctagaaatcgctgatgacttcattggctcggtgactgcatttgcgtgtaccttggcaaagcacaggaaatcatcagttgtcgaagccaaggatgtgttgctgcacttagaaaaaaattggaatttatctattcctggtttctcacggggggataagaatcctcaaagaaattctgcaaagcaactggtagatccccaacattcagaaagtgatgttactggtatcagaggcacaagcaataaacttggtgctaataactcggttggaaatcatcaaatacgacctccgatggcagaaccttcagcaatgccaacaatgggccctctatcaaaagcccctcgcttctagtggttatgcttctcttccctatcgaaggaaaaattccttttcaggacaatctacctggaaaacaacccgtaggctctaactcaaggattgctagcaagtggaagcacaataaatccacgagcatctgtggcaaactgcagatgcttgtcttacagttacaggaaagcagttgctgacttaccaatcctctacatggggtcatatgtaactttattttattttattttatttttgtgcccgtaaatgcccccatccgttgtatataaatgtttttttttttggcaatggggcattatcgtcaccagttttgatgttgctaggtaggtgaacaaatactaaagtggatgcaacttatataatttaatgaaatgtaagattgatgtcatttttaattaaaaaaa

SEQ ID NO: 140707 - DNA, 337 bp, Zea mays
  Clone ID: MRT4577_59808C.1
acaagagtctgatacttgatgcgctagagaagggcagagccaaagaacaatgacatgcactaccagcttctacaaggcgcacaagaacggtatcatgaatccccagcgccagcggtagacctccactaagctgatgtaccccccgccatctgaggcatccgccgattccccagaccaaggatcatcttacgaacccccaccacgtggactccatctgccaccacgttcccggacaccactcaccgttctgtcgagtggcccttaaaccaagggatccccaggacaagctatatggcttctcttcatttttttttgtccccccacctgacgatttaaa

SEQ ID NO: 140708 - DNA, 146 bp, Zea mays
  Clone ID: MRT4577_59809C.1
atgtgggccggtactagggactccgagctcaagaccgagctcgaactaaacgtgaggctagaacaagtgctgtgtgaaatgcattgctttgacattgccacacaacaacactaaccgaaggactagaagggtatagtcctgtggca

SEQ ID NO: 140709 - DNA, 192 bp, Zea mays
  Clone ID: MRT4577_5980C.1
atcctctgcgccttgtactgctcgctacatcgcggaagcttacctctgttccacgaactgagagatctcggacggacccacccagtacccacaccggacggccgatagagccaagaagctacatgcacgcagacgtcgacagatatctatctcactcgcacgtagacgaatgaacacctagcgccactgtca

SEQ ID NO: 140710 - DNA, 1560 bp, Zea mays
  Clone ID: MRT4577_59810C.1
atggcggatccgccgcccgtggctgcctccgccttgccggcgcagcccgaccaggtcgccgcctccgtgtccaccccgcagaaccccaaccctaaccccctcctctccccccaaatccccccgtccccgaccgtctccgacctctccgcgcacatctcgtccccgcagcagctcgacccggtggctgcggcagctgccgcttcgggcggcgggggatccatggattaccccccgcgcccgccgcagctgcaggcgccttcgcccacgcaggcggggcccggcgccgccgggtttggccagatcccccgctcggggtcggcctcacgcctctccacggccagccagctccagcagtacgcggctaggatgtacggcgggcagatgagcttctcgggtggcggaggtctcgtgggccagcagcagcagctggcggggcgcgcccccgtgcttgggcagggccagctggggatgctgcaaggccagggtaacgcgggatctgcggcacattttgggcttcagtcgcagatgatggcgcaggctaggcaaaagggcatggcacaaggcacccaattgaataatgctaatacagctcaagcgctacaagggatgcagcacatgggtgtcatgggtactatggggatgaaccagatgagaccgaatggaactattccctatggtgctcaacaaaggttcgcccatgcgcaaatgagaccacaagcgtctcaacaacctgcactgtctccacagaaggtgcctggtcaaggtctgtcgaggacagcatcaattgcagcattaaattcacaactgtctggatcatcacaaaatggacagatggtggcaatgtctatgcctcagcaacagcagtggttgaagcaaatacaatcatccatgggctcaccagtttccccacagcaacaatatcaacagcagaggctcctgtttatgcagcaactgcagcagaagacaggattgagccaacaacaacttctccaaatccaacaacagcatccacatctcactgcccaacagctgattcagcagcaacaaattttgcagcagtttcagcagcagcaactgctacaatctccgcgtgtttcagcatctggttcacagaagtctgcgaaccttacaggctcgcagccgggtacaccattgtcaggtggaaccatgactggtggaagtgcaagtcagggagctgaaggaactagccaacttcttgggaaaagaaaaatacaagatttggttgcacaggtagatcccctaggcaaggttgaccctgaagtggaggatttacttctagaaatcgctgatgacttcattgactcgaaagaaattggcatttatctgttcctggtttctcaagggaggataagaatccccaaagaaattctacagaaggttgatggaactgtaatctgcaacagaaacttcggctgtgccgacagtgggctctctatcgaaagcccctcgcttctaagggttatgctgctcttccctattgaaagaaaaattcctccttctgaaggtttcaggacaatctacgtcgaaaacagcccatag

SEQ ID NO: 140711 - DNA, 909 bp, Zea mays
  Clone ID: MRT4577_59811C.1
aatgcccacgcgtccgcccacgcgtccgcccgggcgtcaattcggcacgagggtgacaccgacacccgtggcatctctctcgtgactcccggagcagaggcatggacaccgcggcggagctggagctggggctggagttggagcagaagccggcggcggggtactggagcgtggtgggcgcgcggccctgcgacgcgtgcgccgcggagccggcgcggctgcactgccgcgcggacggcgcgttcctgtgccccggctgcgacgcccgggcgcacggcgccgggtcgcgccacgcgcgcgtctggctgtgcgaggtctgcgagcacgcccccgccgccgtcacctgccgcgccgacgccgccgcgctctgcgccgcctgcgacgccgacatccactcggccaacccgctcgcgcgccgccacgagcgcctccccgtcgcccctctcttcggcgcgctcgcggacgcgccgcagcccttcccgtccccggccccggctcagggggaagcggtggcggaagactacgggagcagcgaggccgaggcggcgtcgtggctgctccccgagcccgacaacagccacgaggacagcgccgccgacacgttcttcgcggattcggacgcgtacctcggcgccgacctcgacttcgcccggtgcatggacggcgtcaaggccatcggcgtgccggtcgcgccgcccgagctggacatcggtgccggcagcttttgctaccccgaacactccatgaaccacattttgtcgtcatcctcggaggtggcggtggtaccggacgcgcaggcggccggcctgccggtggtggtggtggtgagcagaggggaggagcgggaggcgcggctgatgcggtaccgtgagaagcgcaagaaccgccggttcgacaagaccatccgct

SEQ ID NO: 140712 - DNA, 877 bp, Zea mays
  Clone ID: MRT4577_59812C.1
tctgtctcgtgggagcccccagtagaacccttaatacaacttttagtcattaagcttgcatatcatttgacaaataattgtttgctcaaaacatacaaagcttgaccttttcaatttagtccagctaccaattgtccaatccttgtgcctctgcaaaaaaagctgctgagtggcaacaatgttctgattcttatatttgctgcaatgttcaatttactatgcttttgtgagcaatttccatgagtatgtgaaaaatgagtgtgaagttatatcttctttttaggtacgcattgtccgccgggacaacggtgcaaaggttgacattccggtgaccaatttggttgaagatgttaaagtgttattggatgagattcaaaaaaatctgttcaaaacagcccaagaaaggagagatgcatgtgttcaggtcgtcagctcttgggatgaattcacaactgctctgaataacaaaaggttgatcttggctccttggtgcgatgaggaggaagttgaaaaaaatgtgaaagctcggacaaaaggggaactcggagctgcgaaaacattgtgtactccatttgagcagccagaacttccagaagttttgatgtcatcacagctgaaaaaagtcattgattccagtggacattacttccgagttttgatgttgcaaggatgagaagacatacatcccttttaccggtgggcagtgttgccaagtagaaaaaacgaacccatcccactgaaaggagtgaccccccaattacgacagtggtcggaaatcacagttcctactctttttaccctaaatcacagtttttataataaatttatttataataaaaatgcaagtgagtcttccaatttgttagattggcccccc

SEQ ID NO: 140713 - DNA, 238 bp, Zea mays
  Clone ID: MRT4577_59813C.1
ggtctgctgttttttgcttagctctatctggctgttatggctctgctctaaaagcaacgggggccgccccagggattgcggcccgggaccaggggaaccacccgctttcccccgcgagagaccactacaaaccagggggggtcgaggactgaaccccatccggggggacagtgacaaccggtaaaaacggcccccctaaaaccaaccactagcctgtaatgaacaaccgggggggccc

SEQ ID NO: 140714 - DNA, 135 bp, Zea mays
  unsure (1)..(135): unsure at all n locations
  Clone ID: MRT4577_59814C.1
gcgaggaaggtcgacagctgcccaaaggcgattctgtggcttgctanattcaaggatttcaaaactgccctgttacaaaagcttgaagaagactccaagcaacaacaacaacaaaacctcccgcaactccttgaa

SEQ ID NO: 140715 - DNA, 446 bp, Zea mays
  unsure (1)..(446): unsure at all n locations
  Clone ID: MRT4577_59815C.1
gggccccccccttggggttttcacccctttcccaaacaattaattaccctttttgcccccccaaaccccgggtttcacaccccttttgcaaatttaaaaacaaaatttgcctaggggaaactctccgatcatccggctaaaaggggggggggggtgcctacccatcttgccccataacatacccaatcaggggggaggttttcgagttgggggggggattttcaacaaaatgcctgtccgggggacccaaacaaaccctttttgtccgggataattaacaggggttcctacagtttgggggttccacaaatcctcatgcctgaatctccttggcctggggctgctgttgttttttttggngggctccggctccctttctttggggctccttcggaaccttggttgcctcgggtgggatcctcccgttggggggtgctttttttggg

SEQ ID NO: 140716 - DNA, 321 bp, Zea mays
  Clone ID: MRT4577_59816C.1
cccactcgttcgaacaaaacaaatacttgctactaatcactgaaatgacaacaaaagcatggagtttctgacagggtatcaaaagcactgcatgatgcaattgctgctgagtatcatgtaacatgatcaattatcctgcctatgcatatgacatcttcattacatacacgtacaagctctgctgtccactatgatgatgcaattactgattatgcatgtgacagattgcattttgagcccaacttctcacttccctttgtactcaacctccattgctcctgatggtggaacttttgctttctactaacttaatgcaaaaac

SEQ ID NO: 140717 - DNA, 2254 bp, Zea mays
  Clone ID: MRT4577_59817C.1
ttgggtacctcgaggccggccgggaagaacaaaggagccgccaagacggcaaggcgccaaggcgaccggacaggcctaggcgaagcgggcgcagctcctgccggtggtgggtagtggccctagcaataaacatcttgcccaaccggctctcgctacgcgcctacgcttcgtcaacaccggaaccgcccccaccccgccccgagcgccaattgcaccgccgctcccggccaaaccggccaagtcaacggcgcatccacttctccttaccatcccggaggtaatcttgcgccgattcggtgccgatttgcgccatccgcgaccggaggctccgccgggtcttgtgttcttgcggggcgggggctcaggacaacctggcctctgcttgattggattcggggcgttcggcgcctccagctcgcgatctttcctgccggtttcgtcgaccgctggtcaacctggccggtcggtcccgggggctcttcacctccgtgctgcctgccaccgtcgctttagtcaagtctcggccaagattttagctatctccggtcaaaaggctttaccgattcttggattggtggcttcttgggggcgagaagccggttcctgtttcgtctcttgtgctccagcatgttctgtagcacaccggttccccatctccagtgaaggtgttcgtgtgctcttggttttgtgcctcccggaatcgttcccggaaagctacttttggccgctgcggcgatggcgtcgagcaccagcgagatggccgaggggaaggagaagctgaagaggtccggcagcttgggaagcaacgatacgtatgtgcgtgcagacaagattgatcttacgagcctcgacatccagctggagaaccagctcaccaagacctggggcaaagccaatctcaaatcccaggggccaaaggaggagtgggagatcgaccttgcaaagctggagatccgctatgtcatcgctcaggggacgtatggcacggtctaccggggcacctacgatggacaggacgtcgcagtgaagcttttggattggggagaagatggttttgccacagaggctgaaactgctgctttacgaacatcatttaagacggaggttgctgtttggcataagctcagccaccctaatgttacaaagtttgttggtgcatctatggggaccacagaccttaagattccatcaaacaattccaatggtgctgcacgtacaaatttgccagcaagagcatgttgtgttgtggtagagtatcttgctggaggaactttgaagcaatatttgataaagaatagccgacggaagcttgcttataaagttgtggtccagcttgcattggatttggccagaggattgagctatctgcactccagaaagattgtacatcgggatgtgaaaagcgaaaacatgctgcttactccacagagaaaccttaagattgccgatttcggtgttgctcgtgttgaggctcagaatccaaaggacatgactggtgcaacaggcacacttggttatatggctccagaggttcttgatggtaagccatacaacaggaagtgtgatgtttatagttttggcatttgtttatgggaaatctattgctgtgacatgccttacccagacctaagttttgccgatgtctcatctgccgttgttcaccagaatttgcgcccagacattcctcgctgctgcccaagcgcatttgcgaatgttatgcggaaatgctgggatgcaaaccctgataaacgccctgatatggatgaagtggtgcagcttttagaggctctggacacgagcaaaggcggtggcatgatacctgatggccaatcatcaggatgcttatgcttcacaaaggctcgtggtccatagatacttttcatggtactcccttcccttggcaacactttccccgtgtaaatgactgggccacagcatgcttctctttgcacgacctgtgcagtcgtcgcttacagttctccatagctgccttgcgatcattgcgtgtcaacctgtagctctcatacgatttttgctgtcctctgtcgacaatcttttcatatactagtgtgctgctgtaattgtggttctaaaagagatttggcatacgcgttacactcttgaaactgctgtatgatcagtataaatctttactctgattattatttccatttgtgctaagaattgagtacaagaatggcctgaaataaattcgtgtttagctgatccaaaaaaaaaaaaaaaaaaaaaaaaa

SEQ ID NO: 140718 - DNA, 170 bp, Zea mays
  Clone ID: MRT4577_59818C.1
ctacactattgcgcacgcgtcctttcttaacttaagaattttatgaagtacctgaagagcagatacggataaatgatcttctatttgacaaaccaatatttattacacggatcaagacacaagtatgattaaacacgtatcttcttgtgaaaaatctactaattttttat

SEQ ID NO: 140719 - DNA, 424 bp, Zea mays
  Clone ID: MRT4577_59819C.1
aaaaaacattttttaaagggttatgaaccggcctgacaggggtcgccagggttcccgcccggaattggtttttccccaaagggaaaggggcctaagggtttatgccggggggggccccggcctggccctttttgtttggccgcccggaaacgggaggggccaaaccccccccacttaacaaggtgggatccccccttccacggggctataatttccccccttcagggtcaggggttttacaaggggtaaacccatggcccccgtgttagggcccaggggccccccatacaaaccttggtagaaaccccctcaaagcgacagcatccgggggatggggatgcccttcttggaggacccccccggcgtcaagaaaggcaccaagtaccttttcaaggcccttttggggaaacccaggggaccccct

SEQ ID NO: 140720 - DNA, 313 bp, Zea mays
  Clone ID: MRT4577_5981C.1
gttactcttccggttaaaccgcacactttgtagaccaagctacataagagccgagctttgttactggtgtcatgggagttgcacttgtcgctcctcacccaagaggcggtaaagtagggctcttcggaggagcccgtgagatataaactgcccttatcatgtagctatgaaccatctaggccgagggccatggatgttgctgttgctcatgctgtgaaggagaacgacctcgtgtaggtaatgacttggacagaaaaacgatcgatagtgccggtgtcatacctgacaattagctaattgagagctagtgcac

SEQ ID NO: 140721 - DNA, 382 bp, Zea mays
  Clone ID: MRT4577_59820C.1
atacataggggggttttactttaatttaattttcttttttttttttatatatatttttttttttttgggaccaaaacctcctttattaaaaaaaaaaatattggaaaaaataaaaaataactaaacaactttaaactaaaaaatgggcaactgcttaaattaaaaacaaaaaaccataaaagcctcaaaagtaataatgagaggcaccccaaatttaacttttgggggcatccaattaaaaaacttaataattgggggccgccaaaatttaaagggcgaactgatactttgagcacctccaaaactaaatcctggggcattgaaaaacaagaaacttccctaaggaaaaaaaaaaaatttacttggaaaaaaaaaatatggt

SEQ ID NO: 140722 - DNA, 362 bp, Zea mays
  unsure (1)..(362): unsure at all n locations
  Clone ID: MRT4577_59821C.1
cggccgcgtgggcggccgcgtgggttgagagtcaacttgttgatacttanagatagtgtaaaccacaattgactggctggtaacttgaaaaaccatccaaacacatatctagaagttcccaaatattattgaaatacttgccatcttccgatgaggttattatatgataccatgcaaaatggcaagtccaaactccacatcggttgagagatacaaaatctagggattagaagggcaaaaggacaagaaatctgtatgtctgacattttgtccttttttatctcataaaatggatgaagttggtcttgaaaatttgtgtgatttggtaatatgatgtcaattaatgataccaagtttttagt

SEQ ID NO: 140723 - DNA, 349 bp, Zea mays
  Clone ID: MRT4577_59822C.1
atataaaaaattttttttttttttacagaaaaagcacacacaaggggaggttttaagcgggggacacccccggaacacaccaccggcaccggaaggaaaccaaaaatccataataagagggaaaaaaaaacccgggggaaccaagaaaaaaaaaagaatccagggggaaaaaaaaacccccaaacaatcccacacaaaaaaccatccgcaccaataaaaagaaaaccccgggaagcccaaagagggaaaaaacctaaactaataggggcaaacacaaagacaaccttcaaataaagaaaacagtccacccgcccgcaaaaaagagacggccaacccacgggaagagggg

SEQ ID NO: 140724 - DNA, 326 bp, Zea mays
  Clone ID: MRT4577_59823C.1
tctcagacgcttgcgtgaagatatcacgcacgagggtattacgctctagatcggttcagatccatgaggccaccggctagaggaggacgtggcgagaagagtggcagtgactgctggctgggtgccatacttgtcagtgatgggaaacctggatgtgtcagcagccgaggcgagggaggtgacaaggaatagagaaggttctaccactcactaggcaaggacttcggtgatcacatgactatgggttggagacactttactggcgaatgatatgttcagttcaatggcttactgtttattttccctaatgattaacatgatcttta

SEQ ID NO: 140725 - DNA, 187 bp, Zea mays
  Clone ID: MRT4577_59824C.1
atcctgggccgccctctgactgaggaggaatacttcaaggccgccacgctgggctggatgacggagctcctccaggccttcttcctcgactccgacgacatcatggacggtagcatcacgcgccgcggccagccctgctggtaccgctcagagggcgtcggcatgatcgccatcaacgactccttcc

SEQ ID NO: 140726 - DNA, 352 bp, Zea mays
  Clone ID: MRT4577_59825C.1
cgcagtcctgtcgtaggaatgggatgaggccgggcccgctccctccttcctcctcggcgcttctcccgtgacaagcctccattctccagtccgtgagcactccactccctgtctccgcttttgtttctctcgtcccaacctccccttttctgcgggtttgatccgcacggtacaggataggggaggatggatttgtccaggttcgcctccggcgtcgggcccagcagcgtggccccgcgggcgggcctgcagatcggcgccgccgagaatggcttccgggcctgctccctgcggcgagcacggcaccgcggcggcgggaacgggaacctcacggccggcgggttcaccctgc

SEQ ID NO: 140727 - DNA, 809 bp, Zea mays
  unsure (1)..(809): unsure at all n locations
  Clone ID: MRT4577_59826C.1
ccggccagggacaagatcatcaccgcctaccgctgccacccctttgccgtgctgcgcggcggcaccatcaagggcgtcattgccgagctgctggggcgaaaggacggcatctccaagggcaagggcggttcgatgcacatgttcacgcccaccttctttggcggcaacggcatcgtcggcgcccaggtgcccgtcggcgccggcatcgcgtttgcgcagcagtacctcaacacgaccaacgccacctttgccatgtacggcgacggcgcgtcgaaccagggacaggtgtttgaggcgtacaacatggccaagctgtggaacctgcccgccgtctttgtctgcgagaacaacaagtacggcatgggcacggcggccgagcgctcgtcgatgaacacggcctactacacgcgcggcgacgtcatcccgggactgcaggtcaacgccatggacgtgctggccgtcgtcgcggcgaccaagcacacggccaagtggacggccgtcgacggcaacggcccgctgctcatggagctcgtcacctaccgctacggcggccactcgatgtcggacccgggcaccacgtaccgcacgcgcgacgagatccagacgatgcggagcagctcggacccgatccagggcctcaaggcgcgcatgctcgactgggggcgtcgtcgaagaggccgagctcaagaagattgacaagcgcaaaaaggnaggagttgaccacgccgtcgaggaagccaagaagagccatggcgacgcaaaaggaagtgtgggacacatctactaccgggcacgagccgactacatgc

SEQ ID NO: 140728 - DNA, 245 bp, Zea mays
  Clone ID: MRT4577_59827C.1
ggcagaagttagcatttttttaacataaaagggaaaagggtcccattcttatgggccaccaaaattgtagcagttcataaaatttaaaacagctcactttgagatactcagaggtttttataagtggtccgcaaaaaggggttgtacttctaaacaaaccgtttacaccaattacgattcaccggaagttttgcaaccatttaaacgggacaatttattggtccgttttctttttagcgacaatt

SEQ ID NO: 140729 - DNA, 695 bp, Zea mays
  Clone ID: MRT4577_59828C.1
atcgtgcatcctcctccacctccccctctctccattccacctcggcctcccctccctctccaagccccggcagtcatagccaccgcgagggctggagctgcggaatgagggattccttgaacgctgcgcgccccctacccagagccgctttttgggagagtgttgggcgagctgaactctcccccaaagctcctggtgcgcagacaagaagttgccctcgcctctgatcgctgctctccttagactacgaccataggcacccggctaatgcattcattgttcttcatcggccccttcggagaccaccctcggcacgagttgttgggaacccaattcacagggggacctcgggggaaggcgccgcttcgattcttgttgctccaacgtctcccgccccctatatatctgcacctcctgttgacctactcgcctaagttccctgtactatgctccgccccgtctgactattcgatggctgtgcgtctggcagcgtttcgctatagggcttgcctgatcgtgctgatgacgtttttctttcacatggaggaagcccgggggcgcacctgatgatgcaattacctgatgggaatgagaaagatgggattcttgtcccgattcctcagtaccctttgtactcaggttctatagctcttcctggcgaatctcttgtcccaaatatctccatgaatcgacgg

SEQ ID NO: 140730 - DNA, 165 bp, Zea mays
  unsure (1)..(165): unsure at all n locations
  Clone ID: MRT4577_59829C.1
aaaaaaacagtgaaccttctcgcgctcggcagttgtcagtcctgtcctgtggaccgatgacgtgtggatttataaacggngccttcggcggcactccccaccggnggaaggaagcgagaagactcaaaagnatggnaagcgacaagggaactctggtagncaagg

SEQ ID NO: 140731 - DNA, 443 bp, Zea mays
  unsure (1)..(443): unsure at all n locations
  Clone ID: MRT4577_5982C.1
ggccgccgtttggggggtttttttttttttttttgngggggggggcggcttcttgaccgggtcccgccctcccaccgntgatttttccctccgtgctcccgctcttcgggccgccngccgcatcctccttttttttttgactggnnggcncntanctatttttgggggggggggggggntannnncnngggacgccncaaaacttgtatccggcgcggctgggggttgtgggctgttngctcctgcgcgctcttngagagggccccaccgctgatgggttggtggtgggacactgttgagcttgtctaggcgggttgggggaatggccgcccgctgctgccggtgtncgagggtgcccgcggttggcatggcgtgcgggtgggacggcnacaacggttggtgggccccgaaggcagcagggctcacctcggcgttgctggctg

SEQ ID NO: 140732 - DNA, 542 bp, Zea mays
  Clone ID: MRT4577_59830C.1
acccgaccccaaacataaacaaaaataattttaaaacacttgtaacaaaaaaccttggggtttaaagtttagggcagggacaaaaaaaaacatggccccaaacaattttaagaagttcgcgtaaaaagggaccccctgcccaaattcgtttaaaaaaaaaaggaccaaaaaaactactggggagaagaaacctccgggaaagcctaataaccctggaggggcctttaaagcttaacaccaacgtcctttttggaggccccatgaacccccataaacttcccgaaaaaaaactggggggccttgagtatcttcaccttggggaagaaaactttttaaaggggaaaaaagctggaggaaaacttctaaatctttttgccaaaaacttccggaaggaacttaaaaacaagttttttaagggcacatggaaaacccggggtgatcaaaatcccaaccattttgggggaaatctgccaaatctgggatgcctgaacaaaaaaggttttcttgacctggttggggccccctttggaaaaaccaaggca

SEQ ID NO: 140733 - DNA, 455 bp, Zea mays
  Clone ID: MRT4577_59831C.1
gggaccaaagggggtaaattaaattaaagggcccttcaaaccccaaaaaactcaaggacaagttccccaaggggcaaaaaaaaccgattggaccgaaaaactgttaatagaccccactgaaacacaaaagggcaaaaacccccaaccttatgaaaaactttgaaacttatatacaaatttactgaaagcaaaaaagacttttttgggggcataatggacccaaaagaccctaataaaaaaaccctgccgaacatgaccacaaaggctcaaaccttagagccctaattgatttgagcaaaaaaaatcgggccatattttcccttgccggaatcctgggcaagggagccaacccttgcattgagggcccactttgggaaaacaacccaaaaaaaaacacggtcaagggagaaaaaagcggcccccccaaacaagccggttttggcaaaagggccctg

SEQ ID NO: 140734 - DNA, 739 bp, Zea mays
  Clone ID: MRT4577_59832C.1
aggcgtctctactattatggtctcatacacagttggaacggaaagaaaatgcacgccaaccatcacctaatcacggatttcctcaagaacaagctcaaatttaggggttttgtgatttctgactggcaaggcattgatcggattactactcccgaacacctgaactattcctattcaattgaggctggagttggtgctggtattgacatgatcatggttccttttgcctacacagaattcatcgatgaacttacatcccaagttaagaagaacattatccccatgagcagaatcgacgatgctgtctacaggattcttcgggtcaagttcaccatgggtctatttgagaacccttatgccgatccaagcctcgccggcgaactcggaaagcaagaacaccgagaaattgctcgggaagccgtcagaaaatcactggtgttgctgaaaaatggaaaatccgcctacactccattgttgcccctccccaagaaggccggcaagatcctcgtcgctggaagccacgccgacaacttgggcaaccaatgtggaggatggacgatcacatggcaaggattgaccggcaacgacaatactactgggacgaccatcctttcggcgatcaagtccaccgtcgaccccagcacgcaggtggtcttctcggagaacccggacagcgccgccgtggacagcggcaagtacgactacgcggttgtggttatcggcgagccgccctatgctg

SEQ ID NO: 140735 - DNA, 396 bp, Zea mays
  Clone ID: MRT4577_59833C.1
tcctgtatagcggacagccgccgccctttttttttttttattgaaatatgacgagccagggcctccggctttttaaattaaacgggcacaccctactggttttattaccgcttaccagatatggacatagatctgagttaatgctatcccggacgcactcactgttcaggccttcagatcggggggactggctcttttagggtcgggggacaagagcctggaggcggcacccagaagagacacctacagacttcatgccctcctaccgtgctttctgcgagtgctgtccaaaaagaccggggtaacatcctggatgcatccgattttcatcccaaaacgagcaagcgccctgggggcagactgttcaccaggaacaagggccttggtcttgttgcc

SEQ ID NO: 140736 - DNA, 488 bp, Zea mays
  Clone ID: MRT4577_59834C.1
cagccggcccgggccggggaactcttgggtcatcctctacgcgagcgggccgcttctcccatccagccgcgcgcggcgtcgccggaaccggagaagggaggggaaggagcgcgagatggacaaagccaataagctcagcaccggagcgggggagaaggcgaccaagagcaggagccacgggtccacggcgctgttcgtcgcggtggactacgcgttcctgctcgtcttcgccggcttcctcgcctacctcgtcgggtcgcggatcctcccctccgccgccggctccgcctagaccggcccgcgttcgtggatctctcttctttcttgcacgtttttttggagtcgatggctgccgggagcaccgggatcttgccgggcggttctcgtctcgatctgatgccgctcccgcgatgtaatctggcgacaatttgacgagaagagaagtagcggcgtgtttcttggaaaaaaaaaaaaaaaaaaggccccta

SEQ ID NO: 140737 - DNA, 470 bp, Zea mays
  Clone ID: MRT4577_59835C.1
cgcccaaaaaaatcccagggttaaaaatttttttttcaacaaaaaagggggggggggggtaataactaaagttttttagggctactagaataataatggccgacaaatttttgccccattaatgggcatttggggcgaagcggggggaaaacaaaacaataaaaacaaccgggggggtccggccaaccaaaaaaagcttttcctcctcctccttaaataaaacgggaacgggaaccggccccaaattttaaggaaccaaaacttgccggccccggaaaacgacccgtaaaaaacagtggggaggaccccagcccccgttttgaaccttttttggatctaaagaatctcctcgctgtttttaaggaagtttttcccaataacgaaaaccgagccgccggaccctccgccgggaattttcgcgccaaaaggttgggccctccggcgcgcgagcttttcctgtgccggatttt

SEQ ID NO: 140738 - DNA, 241 bp, Zea mays
  Clone ID: MRT4577_59836C.1
agggcacaagcaggagcacctatctaccgggagaaggagaagaagggttcgttctctgagactctgactgcctggacgggatgctgcacaaaccgacacgttgtgtccacccgaggggagggcacattgtctggcttggttttgggactccacactaccccaggtcttgaggattatcgttatgtggctagctcgctgtttgttggggctttgcccggttccggtcgctgcttgcctggcc

SEQ ID NO: 140739 - DNA, 776 bp, Zea mays
  Clone ID: MRT4577_59837C.1
gggtaccctcgggccggccgggtgggatttggtggtacacgggggcgcggggccgggctcttgggtcatcctctacgcgagcgggccgcttctcccatccagccgcgcgcggcgtcgccggaaccggagaagggaggggaaggagcgcgagatggacaaggccaataagctcagcaccggagcgggggagaaggcgaccaagagcaggagccacgggtccacggcgctgttcgtcgcggtggactacgcgttcctgctcgtcttcgccggcttcctcgcctacctcgtcgggtcgcggatcctcccctccgccgccggctccgcctagaccggcccgcgttcgtggatctctcttctttcttccacgtttttttggagtcgatggctgcgggagcaccgggatcttgccgggtggttctcgtctcgatctgatgccgctcccgcgatgtaatctggcgacaatttgacgagaagagaagtagcggcgtgtttcttggcaactcgcctggtaatgtgacgcatctttccttattctaaaaaaaaaaaagttgctattgctactagtactatccctgctcgtgtcgtgtgtgctgagagtctgagattgcttgggactttgaatgcggcgtttatgacgcgatctgtgatgtctgcttgctactgacgccagcttaaagtaaacccatcagctttatctccaaaaaaaaaaaaaaaaaaggcccctagggctctccttccgtttctcgggatcgtcgacacctccatcggcctccgat

SEQ ID NO: 140740 - DNA, 190 bp, Zea mays
  Clone ID: MRT4577_59838C.1
ggccttttacgtacaccatcaccacagcaaaaccctggcgtacccaagccaaaaagctctaaacacatgcgcttaagggcagctgccgtaaaaacggaagacggcccaaacgccgatcgacacttgccaacaaaatgcaacaggactgaaatgcgagaaggagcaaatcgctagcggcgcatatctaggg

SEQ ID NO: 140741 - DNA, 593 bp, Zea mays
  Clone ID: MRT4577_59839C.1
gcgattgggttcctcgaggccggccgggttgcatatttggtggacacgggggcacggggcagatctcttgggtcatcctctacgcgagcgggccgcttctcccatccagccgcgcacggcgtcgccggaaccggagaagggagggaggaagggagcgcgagatggacaaggccaataagctcagcgccggagcgggggagaaggcgaccaagagcaggagccacgggtccacggcgctgttcgtcgcggtggactacgcgttcctgctcgccttcgccggcttcctcgcctacctcgtcgggtcgcggatcctcccctccgccgccggctccgcctagaccggcccgcgttcgtggatctctcttctttcttccacgttttttttggagccgatggctgcgggagcaccgggatcttgccgggtggttctcgtctcggaatcgatctcgatctgatgccgctcccgcgatgtaatctggcgacaatttgacgagaagagaactagcggtgtgtttcttggcaactcgcctggtaatgtgacgcatctttccaaaaaaaaaaaaaaaaagtgcccctagggacaaaaaagttaa

SEQ ID NO: 140742 - DNA, 345 bp, Zea mays
  Clone ID: MRT4577_5983C.1
gcatggtcccagtcaaccctcaggcaacccggtgttaagggacgcgctggctcctggagctcctgcgtccatgagaggtcactctgcagtccgacatgaccgtggcctactcgcaggacacaccctagatcgagctactcaccctagacgagcagactcacaacatgtaccagtgtgagactatctgcctcaccaatcacttacatcagacctgtgccaagcaccgtcccaagttcacactgatgcacgcactgctcctggatcatcagccggagctcgttgatgaagaccctcttatggacctctagaacatggacgtgcacaacgatgactaagcaatttcag

SEQ ID NO: 140743 - DNA, 111 bp, Zea mays
  Clone ID: MRT4577_59840C.1
tggctcttggaggcgagagcgggacgtactctggaccacggtgtgacggtggtggggtacggctgcgagggctggcacggactactggatcgtgaagaactcgtggggcac

SEQ ID NO: 140744 - DNA, 771 bp, Zea mays
  Clone ID: MRT4577_59841C.1
tcccccgaggccggcgcggaaaaaaaaaaaaaataaaaaaaaaaaaaaaaaaaaaaaaaaaaaaaaaaaaaagcaaaagcaacaaggcagcagcacaagcaagaaccacacctcctcccttcgcctgtgatcatgtcgtcttgctgcggcggcaagtgcgggtgcggctccagctgctcctgcggcagcggatgcaacggctgcggtatgtaccctgacgtggagaccgccgccaccagcagcgtcaagaccacggtcctcgccgcgccgaccaccaaggccagcgccggcggcttcgaggcggccaccgagggcggcggctgcgactgcaacacctgcaagtgcggcaccagctgcggctgctcctgctgcagctgcaactgagccggcccggctcggcgatggcgcacgagagtcgagaggacgacgacgaggaggcgtataataataaatataatagcggcgtccagtaaataagatcctgtcaactgcacccgccattatccatggtcgctcgctcctcgcctgcgtctcctggggttcgtctgaacgtcctcgcggcttcacgacggcgatgccgccgccgtcgatcctgtccgtctcgtgccggatttaatatttagatctatatgcgtgtttttctgcgttattactacatgtgtctgtctgtcgtgtgtctctctgacggccccatgcgtcagcgtcactgcttgcttcagttctgcatctcactctgttcaggtgaaaaactgataacatctttgcagtgct

SEQ ID NO: 140745 - DNA, 190 bp, Zea mays
  unsure (1)..(190): unsure at all n locations
  Clone ID: MRT4577_59842C.1
gcctggaaggacccgntcccggatttctcggtcgacgggggcgtccctagacacctcagcacgctcccacgtacgtgaaggtgatcttcgaggcgggcccgcacgctgtgctgtcggccagggctggactgagccattgcgcacgggcctcttggggacgcgaacgctcctcacgtggtgtcgggtgcgg

SEQ ID NO: 140746 - DNA, 555 bp, Zea mays
  Clone ID: MRT4577_59843C.1
gcacgagccctgaggctgagcgtgtagagcgccatcgcgtcgggcgcggtggccacgttgaggtgcaccaccgcgaggccgagcgcctgcaccccggccaccagcctcagcagctgcccgggccgccgcggcgccatcacgcggaggctggcgtgcgcgtccaccaccaggcccacctccacgtccgccaccgcgcagtcgccgctcgcctcgtcctccacggccacgacgccatcctcccgcgccgccgcgtggcgccacgcgtactgcgggtaccggaagaaccgcgcgaacgcaggcggccgcgcctcatgaggcgccgccccctcgctgcgcgccgcggcgtccgctgtcacgcccgcgccactgctgccggcggacgcggggtcacggcctggtgttcgttgcgccgtgtagggattgcagctgctgctcgagctccttcacgaaatcgatggcgccgctgatgacggacgcctgatcgctctacacatgattaaaatttcttcttttatataacgaaatcaaaggaactgctggtctgctggggtggta

SEQ ID NO: 140747 - DNA, 756 bp, Zea mays
  Clone ID: MRT4577_59844C.1
ttgggtacctcgaggccggcccggggccatcctctcatcacaagcaaaagcaacaaggcagcagcacaagcaagaaccacacctcctcccttcgcctgtgatcatgtcgtcttgctgcggcggcaagtgcgggtgcggctccagctgctcctgcggcagcggatgcaacggctgcggtatgtaccctgacgtggagaccgccgccaccagcagcgtcaagaccacggtcctcgccgcgccgaccaccaaggccagcgccggcggcttcgaggcggccaccgagggcggcggctgcgactgcaacacctgcaagtgcggcaccagctgcggctgctcctgctgcagctgcaactgagccggcccggctcggcgatggcgcacgagagtcgagaggacgacgacgaggaggcgtataataaatataatagcggcgtccagtaaataagatcctgtcaactgcacccgccattatccatggtcgctcgctcctcgcctgcgtctcctggggttcgtctgaacgtcctcgcggcttcacgacggcgatgccgccgccgtcgatcctgtccgtctcgtgccggatttaatatttagatctatatgcgtgtttttctgcgttattactacatgtgtctgtctgtcgtgtgtctctctgacggccccatgcgtcagcgtcactgcttgcttcagttctgcatctcactctgttcaggtgaaaaactgataacatctttgcagtgctagaaaatctgagaacga

SEQ ID NO: 140748 - DNA, 1057 bp, Zea mays
  Clone ID: MRT4577_59845C.1
gatcaaaagggcggccgggactctatccgtattcctgctcccaaagcagagcaggtcgggccgtggggggtggtccctggctcgcccgcccgcatccattctttccggccaccggctgccgtgcgccgttcactccactccgattcgtcacccccgcctatttatacccctctccccaccctgccatcctctcatcacaagcaaaagcaacaaggcagcagcacaagcaagaaccacacctcctcccttcgcctgtgatcatgtcgtcttgctgcggcggcaagtgcgggtgcggctccagctgctcctgcggcagcggatgcaacggctgcggtatgtaccctgacgtactggagaccgccgccaccagcagcgtcaagaccacggtcctcgccgcgccgaccaccaaggccagcgccggcggcttcgaggcggccaccgagggcggcggctgcgactgcaacacctgcaagtgcggcaccagctgcggctgctcctgctgcagctgcaactgagctggcccggcccggcgatggcgcacgagagtcgagaggaggaggacgacgacgaggcgtataaatataatagcggcgtccagtaaataagatcctgtcaactgcacccgccattatccatggtcgctcgctcctcgcctgcgtctcctggtcctggggttcgtctgaacgtcctcgcggcttcacgacggcgatgccgcctccgtcgatcctgtccgtctcgtgccggatttaatattagatctatatgcgtgtttttctgcgttattactacatctacatgtgtctgtctgtggtgtgtctctctgacggccccatgcgtcagcgtcactgcttgcttcagttctgcatctcactctgttgaggtgaaaaactgataacatctttgcagtgctagaaaacctgaggaactcatgatatctaagtaactgagccaagagagagagagagagagagagtatctaagtaccttgatccacttggacagcacagttagactctgaaacgatcgttggcataaaaaaaaaaaaaaaaaagtggtc

SEQ ID NO: 140749 - DNA, 519 bp, Zea mays
  Clone ID: MRT4577_59846C.1
ggctcccgtggcgatccgtcctaacttgaatttgcttcaactcaccatgcttgcggttcctgggttgcacagatcacacaagggcttctggttaacagagggagcttctttgatcgcacaccaacatgcctggggccaacattacaccattgtttacccaactacaattccaaccttttgtggcaaaactacagcctactttgcaccctctggagcattcattgatctaacacataaatcccggaatacatatattcagatcacaagttaatctatgttaaaattccccacttggacataattgctttcatgctcaaggaaccaatacttttttggcccaccaagagaagggctatatgtccatagttatctttgcgccactcaatatgcatccttctccgcaaggtctataacctaacgctttatttttcccttccctgtaccttttgaaccacaaccgccaattaccctcacaaagacagatggatatgcaatacaaatcttcttgtgaattttgag

SEQ ID NO: 140750 - DNA, 313 bp, Zea mays
  Clone ID: MRT4577_59847C.1
gggaaacacgttgaatcttgtttgcagcatacaaggctagatggaacttcgatttctacactgtgtggttttccatacatcaacgaaaaaaaagcagctccgtaaaaggatgccgcttgacaatagctacaactatgctaacataaaccctacctcaaatgtgaaaattcctgatacatataaaacaccaacagacgacactaaccatgagaatttctgctgcaacaacaccgccatatttgcctttcctgcagaccgggaactgccacacgagaatgccgtaatatgctctgactacctgggcaggcagccg

SEQ ID NO: 140751 - DNA, 1014 bp, Zea mays
  Clone ID: MRT4577_59848C.1
ggtccagacctccactaatatgaaagggtatgaccaattgagaacacacatttcaatcaaaccaatttatttacattatcatgcaataggagtagatgtagcgtagctctagtcgtagttttttcaatctcattcttcacctctcttcagctttacgtcgtctagagacactttgcatgacctgccgatccctaagcaaccatacaatctctccctgactgagtcactcacgggaggcaagatctagatttactcgagagctctttgcgctgtcgcggacggtccgataccctactacgggccaaaagggtgccaacatagaggtgtggttctagattacattacaaagtcgattctaaggtcttaggattcgttgatatttgacgtaaaaatatgccagcacattcgtatattttgtttttttcagagcatataaaacaacactttatttgctctagactgtatagtacacaaaggagctggagttcaaaccgagtctaatattgacaattgttgggcaccaaattgaggtgcagacagtccggccctgaggccggacggtccgcgcctgtgggccggacggtccgcgcacgcgctgaacagattagggttccgagtttctcgctgcgtttgttggcgaaaatcgcgggatttgctcggagttttgttggtaacgggtccagcccccctcctctataaaagcagaggactacggccgattaagtacaacgaatcgaatcaacaacactgttatttcgcacttttgtggaggagtagaggtgcagacagcatgaactgatatctaattgttgagcaccaatttgagcgcgcgaacggtccgcgcgtgcgtagaacagattagggttccgagttttgtgctacggttgttagctaaaatcatgggataagctcggaaattagtttgtaaagggtccaaccccccttctctataaatagagaggtatacggccgatttgtaaataaacaaaagaatcaatacaacttctatttccc

SEQ ID NO: 140752 - DNA, 330 bp, Zea mays
  Clone ID: MRT4577_59849C.1
ttgccttccacacccaacccgacccgggcgaggtggattcttttagggcacccagacatcacccggccgctcgccaagagacaggaccggagaccatggcggaccagctcaccgacgaccagatctcctagttcaaggaggcctccattctatactgcaaggacggttacgggtgtataacaaccaaggagctttggactggtatgcgatcactgggtcagaacccaaccgatgctgatctccactacatgatcaacgagggctatgcttacctcaaccgcaccatcgactttccggagtgtcttaacctcatggcccgcaagaagaagg

SEQ ID NO: 140753 - DNA, 2099 bp, Zea mays
  Clone ID: MRT4577_5984C.1
cacacgcgtcaaatcgtcttgggggaaaacacatgatagacctaaagaaagctcaggcctgcgcataggacttttcgaatctcgaagggcctagccacgaaagccatcagggcctagaggagtctcgcacaggtttcgattgaactccgctacgaggggcgttacaacgcaacgagagcagtctggagagcatgggcattgggctttgacggagagaggatggtcaagtccttcatgaccaagggcaacgtcgttgtcgtatgtgacaacttcataggcccttgcaagggcgacgtgaccatccaggtggatggcaatctgctggcgaccacggacctaagccagtacaaggaacatggtaattggatcgagattctacgcgtggataacctggtcatcaccggcaagggaaaccttgacgggcagggcccagccgtgtggagcaagaactcctgcaccaagaagtacgactgcaagatccttcccaactcgctggtgatggacttcgtgagcagcggggaggtgtgcgcttatcactgctgcttagctgccggggtctatctactctgttataagattcgagcttaatttagagcaccgttttgcgatttggagcggaccaccaggttggagagtctcgaagtctatctactctgttataagatgtcacaagatgtgcgcgcccgccggggtgccgcagaacggaccaccaggttggcgttgctggaagagaaggagctgtcggcggtgcttaaaacctgtgctctacctactggcgtagccaggaagatagtacagcctgccgctgccaagtacagttatgcattccaagtccccagagaagcaatcacttctgggatcgaggagaaacccagcaaataatgggagtacggaggatgaaaagggagacggcgggatcccatggctgacatttctggggttcgtgttcctgaccttcaactcgggcatggcgatctaccgctcggaccgcgaccccgggtcaatagcgttcgtgtcgggctcgtacgtcgacctgctgctgctcttcctctgccttcgcctgttcgagcggacgccgcctgactcgccgcgccgggggtggatcaaggcctgcgtctgggggctgaccacgctgctcaccgtcatgttctcgcagaaggtggccgccatcatgccgccgctgctggcgctcgtcgtgtgggcgatggcgttcgccaccatcggcggtggcttctacgcgttcttcatccacaaggacaaggccgcccttgtggaggcggagaacccgtagatgtctctgccgctgccatgcgctcgtggctgtttcagactatctccagccccggtcctatgattttgaggcctctagtcgaactgatcatggtggaccctctagactataaaaaaaattctatattatacaatagagcatattaatacttcgtaaataaatgatcatgtatattgaaattggttttttaaaaatctaagaagctagataatatacatcgatacaaaatagcaaaaaaaaaaaatagagggttggatcgacgagatggcgaacgacgatcacgtggagggtgtggtctcatagacgctcggggacatgagcgtgacgactagtcagtggggcaatacgtgccacattgtccgtgtgcgcggggcgtcagtgtgtccagccctaccgccatgttggctacctatactattttactactagcatataactcgtgctaacgctatgttcctgtgaagaggaggagaggggtggacatttcggtggtggcgcgaggggagggattgatggcggtggagatgcgaggaggggagggctaaaggatgatcaaataatattctttgttagatttgagtgagcaaaatagatgatgttatttaatgatctgaaccattaattttgatgtaatgttaaatatggttccaatttgtttgaaggatttcgtaaatattataggtgtgtgagttatttggttggatgtgttttgtaaagtgtaaactggtgtattatatgatgttataaatactaaatattgggctcctaagaattttgggcccccagctgtcaaaaaaaaaaaaaaaac

SEQ ID NO: 140754 - DNA, 623 bp, Zea mays
  unsure (1)..(623): unsure at all n locations
  Clone ID: MRT4577_59851C.1
ggcgacgaggggnaagcggaggcggcggcgggccgggnaagaagagatctacgcgaggctcgccaggcctgtgccttttggcgacggcaagaaggaattctggttggacaagaacaaaggcatgatctgtatggcactgtcgtccaaagcactggtgattactgggattgatgacagaagatactgatcaacacatgccaacttcagaatcgaggtgaatatggctttgatatcacatttactaatatttgtctgttcaatttatgccagttttctgaaaacaaagatggtctgttggcattaattgcgatggaatgcgctgaagatatttactcatgattccagtctgtagcctaccttcagcaaatctggtggtttgaggtggttggtgaagtcgatttctgcttccctgttggaacatatagcttgtacttcagggtccatcttgggaagttctacagacgatttggccgccgccagtgcacctcagagcatgttcatggttgggacaagaagcctgttcgcttccagctatcgacctctgacgggcagcangcattgtctcagtgctacctggaggagcccggggagctggtcctgtaccatgctggcgattttgtggc

SEQ ID NO: 140755 - DNA, 253 bp, Zea mays
  Clone ID: MRT4577_59852C.1
ttcttcctgcgcatactaccaccctactactccttttccacccacctcacctgatccctagctcgaactctttgccgtgcccatcgacatctatcgcattgctgcaccccgatggctaccctcgcctccaagaattgcctatgctcgtgcagctattcgttcgatgaccccgatccgatcgagtactctacttcaaccgcctctgctaccacaaggtctcatacatatgtctgttttcaaagcacattatatt

SEQ ID NO: 140756 - DNA, 325 bp, Zea mays
  Clone ID: MRT4577_59853C.1
ctttcatttccctaacaatagctatttattatcggggtggcctcactgacaaaggggaatgtacatcccttacctgtttatattcaagatcctattaaatctccatataatccctacattacatatcttgaatccttttttcctaacgtaaactatctaaaaaaaaaactctctactgatttgtccacaaaaatgatacaccacaaaatcccattcaatacacatactttctcactttaaaaagatctacctgattcacaacctcaaaaatctcaatttcctacttttacctaaccgcaattattcaacttcttcacataaccat

SEQ ID NO: 140757 - DNA, 1918 bp, Zea mays
  Clone ID: MRT4577_59854C.1
ggactagattcgtctcgtcttttaatcttcggctgacaaattagttttataatacgactacatttaatactcgaaacggaggttcaaacattcgataggacatgggctaaattttagcggggtgtaaccaaacaccccctaggatttggatccttgataatccagtgcgataacttcgatggctactggctggcagcgcaagttgcctttggatggttactggaagcacaagttgccctgggatggcttcctcaaaaagctgtgtacaaaaggcctactacgcggctggccgaccgggaggagtacgctcacgttgtcactcatacacacccgagctgagctaactaatggcggttgacacgatggagtcggttgccgtcgtggccgtgccgttcccggcgcagggccatctgaaccagctgctccacctgtcgctgctgctggcgtcgcgggggctgtccgtgcactacgcggcgcccccgccgcacgtccgccaggcgcgcgcgcgcgtgcacggctgggaccccagggcgctcggctccatccgcttccacgacctcgacgtcccaccgtacgactcccccgcgccggacctggccgcgccgtcgccgttcccgaaccacctcatgcccatgttcgaggccttcgccgccgcggcgcgcgccccgctcgcggccctcctccagcgcctgtccaccagctaccgccgcgtggccgtcgtcttcgaccgcctcaaccccttcgccgccacggaggcggcgcggctggccaacgccgacgcgttcggcctgcagtgcgtcgccatctcgtacaacgtcgggtggctggacccgggccaccgcctcctcagcgactacggcctccagttcctgccccccgacgcctgcatgtccagggagttcgtggacctcgtcttccggatggaggaggaggagcagggcgcgcccgtcgccggcttggtcatgaacacgtgccgcgcgctggagggcgagttcctcgacgtggtcgccgcgcagccgccgttccaaggccagaggttcttcgcggtcggcccgctcaacccgctcctgctcgatgcggacgccccgacgacgccgccggggcaggcgcggcacgagtgcctggagtggctcgacaggcagccgccggagtcggtgctctacgtctcgttcggcacgacttcgtgcctccacgccgaccaagtcgccgagctcgccgcggcgctcaagggcagcaagcagcgtttcgtctgggtgctgcgcgacgccgaccgcgccgacatatacgccgagtccggcgagagccggcacgccatgttcctgtccgagttcaccagggagaccgagggcacggggctggtcatcaccgggtgggcgccgcagctggagatcctggcgcacggcgccacggcggccttcatgagccactgcggctggaactcgaccatcgagagcctgagccacgggaagccggtgcttgcctggcccatgcactccgaccagccgtgggactcggagcttctgtgcaagtacttcaaggcagggctcctggtcaggccctgggagaaacacgctgaaatcgtaccggcgcaggccatccaaaaggtgatcgaggaggcaatgctatccgacagcgggatggcggtgcggcagcgggccaaggagctcggggaggcggttcgcgcctccgtggctgacggcgggaactcgcgtaaggatctcgacgatttcattggctacatcacaaggtgaaagtatgacgacgacgcatcacgcatgcatgggggatacaatacaaaaactttttgtgctttcagcggttaatcggagaactttgaatcgttcactgcaaataaaaatattactgtcgaaatttttaaaaaaaaaaaaaaaaaaaaaaagggcgctagaggatcggg

SEQ ID NO: 140758 - DNA, 323 bp, Zea mays
  Clone ID: MRT4577_59855C.1
gtggttacattctgagcgtattctccgcttgggagttttgctgcgcgccacatgaggcataccgttgctgttggagtcatcaagagtgtgaacaagaaggacccaaccgacgccacggtgaccaacgctgctgccaagaagaaactatgccatcctgcccctggtttagcattacctagtccacatcataacaaggtttgcttgtacacggtgcttgaattgtgcgaactcataagctcttggaacgggtgcactaatatctatgtatgggagacgtatcgctatttcaccttctgcattaaaaataggacagcttttatgct

SEQ ID NO: 140759 - DNA, 608 bp, Zea mays
  Clone ID: MRT4577_59856C.1
gaccctcgaggccggccgggccttctggtgggcccattcgtgaaggccgggcctcttaggaacaccgagatcgccgggcaagcgggctctctggccgccggtgggcttgtggtgatcctcagcctttgcctcacaatctatgggatttcatccttcaacgaaggagccccatccactgctccgtcgctgaccttgacgggccgcaagaaggagcccgatcagctccaaactgctgatgggtgggccaagttcaccggaggcttcttcttcggaggcatttcgggtgttatttgggcctacttcctcctctacgtcttggaccttccatactacatcaaatgatgaatgtgcttactagctttctttactttttcttattcattctccatgaatggactatttgtgcaatagagatggatgtaaatgatgtattgtatgactctcaacatgttataatgttcattcctctctcctattctcgccttcttttaattgaatttctatactgctggagaaggagaagacaatcacatcttcattagcatgcatggatttccccaaaaaaaaaaaaaaaaaagcggccccgaggttccaggctttggttcccc

SEQ ID NO: 140760 - DNA, 1026 bp, Zea mays
  Clone ID: MRT4577_59857C.1
gagagcaacaacagaacctgaccttgagtcattctttggcatgccttctcgatcaagtagtctaccgagatcatacaacaacacaacaacgaatcctttcgatgttcaacctggcaatgctggttctggtggtgtaaggaggacaccttctggttcaggttttccctttactcagccttcatcaagcaatcttatggatggcctatcttctatatttggagcacctttaccatctgctgtatttcaagaagtggatggagggggtgaagagagaaggaaggcaagattggaacgacaccaaagaacaatggagcgtgcggcaaaagctcttgctgagaagaatgagcgtgacttgcaagctcagcaggagcaagaagagcgacatagaattggtgaatcacttgattttgagataaagaggtgggctgctggcaaagaaggcaacctacgggccttgctaacaacgttgcaatatattctttggcctgaatgtggctggcgacctgtatcattgactgatctgattacagcagcatctgtcaagaaagaatacaggaaagcaacattgtgtatccatcctgataaggtgcagcagaagggtgcaaatcttcaacagaaatacattgcagaaaaggtatttgaccttctgaaggaagcctggaaaaaattcaactcagaagaactcttctaacaacttgtttaggaaaatgttgatcgcaaaacaagtattgggaaggacaggtaggcaagctacggtagatatttttattcatttctatatttagttatatagtgtttttcttatttccttgtttccgatttcttgctcgctctattcattggcatatgcacccttattttgtgtcatgtaacgttgtatatatatatttccgtgtgcagtgtaagtaaacttgtgctcactccgttctttttcatttgccgtgttttagttaaaaaatgaactagcggatgacaaatattcgataacggaggagagcaatgggaatgaaattgattggatgggct

SEQ ID NO: 140761 - DNA, 519 bp, Zea mays
  Clone ID: MRT4577_59858C.1
aaaaagggggtatttaggcaaaaatcgggggggaaatcaaaacaaaggggttaatattaggggaggcgcccccaaaagggcccccaggggaaaaaacaaaacacgggggaggccaaccccccccccccccttagggaaacggccaaaaacaaccccggggttgggagggggcaggattcccccctttttccaaaaaaaaaaaaaaaaaaaccccccccttttatttgtaaaaaccctttgccaaaaccccccctttttctgaaagccaagctaatttaaagggggccaaaaaaaattttattttgggacaacctttttaaggggccccaaaccccaacaagcttttttaaaaaaaaccgggggaggggggccccggcccgtccccaaagctaaaagggggggacccccccttttttttttacctggggggtttccccccaaccccttaaaaacgggaaaaacggccccacccttggaatggggccctggccaaccccgggtttttttttccgggggggg

SEQ ID NO: 140762 - DNA, 439 bp, Zea mays
  Clone ID: MRT4577_59859C.1
aaacaaaaccccctttcccttacatggaaaaaacagaacaaacaaatacaaaagattaaaaggaacgtgggacagccgcgcccaacccaagggaacccggggttatttaaaaagcaagggatcccaactttaattcatttggaacggggccgggtaaaaattgacaaaacttcccctaaagaaaacacatgaaaattggaccccaaaacccccaaaaaaccccggtggtctgaccaagggttgggggggccgaaacaccttatgggttaaaaggggcaaaaaccaccaaagaattgggacccccaaaaccaaaaaaaattgagaagccaacggtcacttcaggggggttttttaaaaaagggaccgggggaaataaaaccgcttcctcgggggaaaaaggggttatgccggggggcccccccccaggagttatcggttt

SEQ ID NO: 140763 - DNA, 334 bp, Zea mays
  Clone ID: MRT4577_5985C.1
agcaggtggtcagatctacctaattggtggttttggaacaccacatgataagattggtgtatgagtcattaatcatcatgacggtatcattggctttcgtctagagcatgtagatccatgagtacatacacaggatctttcatggctactaaagagaacacatatggactctcctgctcatataaagatacgacaataaactcacgtttcaaataatcccgagcatgatgacaaacgatttttatcccccattgcataacacctgctatgaccttttgactaacatacatagcaatgaggacacttaagctttgttataaagtaaccagataaa

SEQ ID NO: 140764 - DNA, 255 bp, Zea mays
  Clone ID: MRT4577_59860C.1
agcagtggtaacaacgcagagtacgcgggatagaaggctcacgcgatccttgtgttcattcttttagtctcttcgctcctaatctttcatgtccccttattcggctctgtactgccgtgtagctgctctttgatcctgtcccaaaaattgcctggaagttggaaaaaaaaggggaagaaaaaaaaaaaaaaaaaaatgaaaaaaaaaaaaaaaaaaaaaaaaaaaaaaaagggactctgcgttgttaccactgct

SEQ ID NO: 140765 - DNA, 301 bp, Zea mays
  Clone ID: MRT4577_59861C.1
cgagcggccgcccgggcaggtacttttttttttttttttttttttttcagaatacagacgtaaattaacttagcaaaaagagcagatgcaaatgcaccttagcaattgaattcacatacctgcattttttaacctaccgggtatgagaaaacagtgaattcatgactactgacaggtaacagctagttaacaaattctgagtataataaggtccggcaaagtctcaacctacatatgccattacattgtattcaatctaggcagagcagccattgacaagtacctcggccgcgaccacgct

SEQ ID NO: 140766 - DNA, 369 bp, Zea mays
  Clone ID: MRT4577_59862C.1
aaacccccccgagagaggaagcatcgccctttggttcgaccggggaagggggaaaaaaagctgggggggacaaagggggggggggccctggtagacgtttacggggcatgcccttgcctgggggaaggggaagtatccggggccccccccggggggggggcccaaactgcccctgcccgcgttaacggggaacaacgcggggcaattaacccgggggggggagggtccggaaaacaagtgggaccgacctttcaggggacccaaccgttaacgcggacgttaaaaaacacttatccccccgtttttttctgggccaaggccaagaaaaagtggggggggagcctcacccccccccccgggggccccaaa

SEQ ID NO: 140767 - DNA, 449 bp, Zea mays
  Clone ID: MRT4577_59863C.1
aaaacttacaatcttatatagataaaatttatactccatacatctatatataaaaaattatttacataaacaataaattcttattacatattaacatctaaagataaattcagttaataatatatttatattcttcttatttacattaataataaaacaaaaactatattatttattaataacatgtgcttttactaacaattgatattcttaataataaattatttttccttcaatataatcagactgataattaacaaaaacctattacactacttttaacaacacaacttattttcatttcaatcatatacttatatacaaatctacctctatttataattaaaaactattttaatttaaacacttatataaagactattattaattattacaaaaccttacatttaataatttttgcgcaacttaaaactttttttttttttaat

SEQ ID NO: 140768 - DNA, 693 bp, Zea mays
  Clone ID: MRT4577_59864C.1
ggccgcttttttttttttttttttggtacctgtaggagaatttattgcttgttctattgcatagaggatgggtacatatatagagagacctaggaaccctaaccttaatggaccggcagcccaacagtggtgccagcctgtctatggatacataggaacagactctaacatccctccgcagtcgcaacgagagcaccacaaacgatgacactggagcagaagccgaagataggagccgatgggttgaaatcacccgcagtcgcagcatcgtgagggtgcaagtgttgcagctagagtagagaccggtgtgcactccatgtaaatgatagcccctggatgccgagatagccgaactcgaggtggtgcgttactgtggcttggagacatgcagcagcagcctcgtgcttcgggaggggtcgacgttcgagcgtcaacggtcggcagggcgacacaaaagggacaacagtgatgtggaccttcttgcttcttttcgtgtccggtcgttgaagagcccccgccagggaagccgacgacagcacacgtgtctgcgctggtcagggtggccgtgcacgctagaggaacaaaagggggtgtagcggtggatccggccaggaaggccacggcagcgacggatctagccatgaagacccgatccagccaaagggatggtgggatcagccgggaaggacgcga

SEQ ID NO: 140769 - DNA, 241 bp, Zea mays
  Clone ID: MRT4577_59865C.1
cattgggtacctcgaggccggccgggaataactatctgtgtaagtcctcacaccggcacttgttacctatcatgtgcttcgtatgtggtatacctccttaacgccaccttcgactgaccgaaggatgcagagtcttcgtggggctgtccctcgcgtgcggttcggaaattcgatatcgcaagatcagatctttcactggtgtcactgagactcgcatggctggaagacgaataatggagat

SEQ ID NO: 140770 - DNA, 573 bp, Zea mays
  unsure (1)..(573): unsure at all n locations
  Clone ID: MRT4577_59866C.1
ggaaaaacccactcctacaataaatttttcccctggatggcaccggaacattctcttatttggccctgggccacataaaaaatcaacgaaaaaaaggggaaagggggaaggcaggaccccccgcccacacccggaaaaacccttcctttttttttaaaagccctaaacgttgggccaaaaaccgtttcctcaattttctttggttccaaaccaaacccataagttttggactggtaaacaacccacttttttaaggcaggggcctttggggaacatttttttaaaccaaaaaaaggccacaaagtccttggggaaaacggatttggggaaacaaatttttttttccccaaaagaacctttttttttcgaacagaaaaaaaaaaacatccgccccattaagggactttttttacgacccaccctgttgtttttgttaaaaaggaaaccctttgggccctcctaaggacaaaaattttttttttaagccccccccagaaggggcgggncggggtttggctccccaccctaaaacaaaaccaaatttttgggggccttctcaacctccttaaaagg

SEQ ID NO: 140771 - DNA, 527 bp, Zea mays
  Clone ID: MRT4577_59867C.1
aacacaagccatctactacgtgcaaagtagagaccaccttgagcagttgagagacaccacaccagcagcagcagcagcagcagcaatggcggccggagcaggagacgatttgaagctgctgggcatgtgggcgagcccggccgtgctgcgggtgcgcctcgctctcagcatcaagggcatcagcagctacgagtaccaagaggaggacttcgccaacaagagcgagctgctcctccggtcgaacccggtccacaaaatggtgccggtgctgatccacgccggcaagcctgtctgcgagtcgacgatcatcgtacagtacctcgacgaggctttcgccggcgacgccctcctcccggctcgtccctacgagcgcgccgtcgcccgcttctgggccgccttcatcgacgacacgctgctgaaggccatgtaccaggcgtcgtggagcaagacggaggaggagaaagcggaggggaagaagaaggtggccgccgccttgacgaccctggacggagccctgcgggacgtcg

SEQ ID NO: 140772 - DNA, 330 bp, Zea mays
  Clone ID: MRT4577_59868C.1
tgttgaagcttgcaaagagtttggggtgaaaaacaatctatactttttcatcccctcgccgaccaaataacacagcccaatgacattgtccttgaggcaaaaaaaaacaccctccaaaccattgacaaccgatttttcccaaccaaagcaacttacgcactacgcctgacccagaataaacctgctcctctctggaaatgcatccccaccacctaagctgaggattaatccaaagactcttacacgcccgcccctaaaaaaaactttaccagcgatgagcacacttcctgagtacatactcagtctcccacacaatactgtgacaacaga

SEQ ID NO: 140773 - DNA, 548 bp, Zea mays
  Clone ID: MRT4577_59869C.1
cgggcctgttggatgaaaaaagaaaaaaaactacgacagcagcgatggcgaagagccactgctgtttcgtctcggcgaacacggtccccgctgccccgtgaaggagaagcccctatgcggtggcggcgagcaggcatcgtcagcaacacgtattgtagcgggcgaggacgcaagggcgaggatgcgcctacgacctacgcaagagcgatcctcgcccgtgggctatccagcgtgcggtgcgcgggtgttgtgcagcgagcggtgcacagtggttgtgcgacggcgatggcgaatttatatgctccagaaccaggatgcaggaggctcatgctgcagatgtacactaccctgaaataatgttttttcttccttgatatggaggttctatgttcattttaaaaagagagcagataaggattattgaggtaatcggtggtttcgttgttcgtcaggcgtgtctaaaatcatatgcagatttttgtgatctatttggattccagagaatgattttaattatgtattcatatattaatatattcagtttaact

SEQ ID NO: 140774 - DNA, 377 bp, Zea mays
  Clone ID: MRT4577_5986C.1
caaaggacaccgtgggctcttaaccgtcaactttattcgggttctttaaagggagtgaaacccctctgcctccctttgcggacatacagcaccacaaggcgggtttctttcctcgcaggaagcaacaacccacagcgaagccgatgggtccgcaaaggctgggggcgctcgggaatcttttacgatttagtatcacacccatcgaaagaacagataacagggctctcatacattcaatggtgagggacaccctggagtaggtcacaggcctgctggacttacaggacatgaatggggtcaactgcaggatggttctttatcaggccaacatgcatgacgacgtgtgcgagcagttcggaaaagcattcgtcggacat

SEQ ID NO: 140775 - DNA, 639 bp, Zea mays
  Clone ID: MRT4577_59870C.1
ctgggccgccgcctccgacattgcgccttcgtccctacgagcaaccgataatccgacggtgctgagatgttggtatatcagggatctcctatctggctacgagctcatgaggtattgattcacctacaaagagatagagaacggcgtactgtgggagggcgagggaaagagggacacccaaggacctgttgatgtggacattggtgccaatccatccgtcgaggctggtgaggacgaaagcgctgatgacacaactgcgaaggtgggtgatattgttgacacattccgactacaggagcaacctactttcgacatgaaatcattagagtattacatcaaaacatacatcaagactctcactgttgtgctggagccagagaaagcgaatgagttcataaagggagaagagggtgcaaccaagctactacttagcaagctgaaagacctacaattttttgatggtgagttcatgaaggaagatgcgactgtggtattgggctattacaaggatgcagccactaatccgacattcctatattcctctaatggtcttatggacatcaagggataaagcggctggcaaattagttacccatgtacggaactatctatgtactattattatatccaaaactatca

SEQ ID NO: 140776 - DNA, 874 bp, Zea mays
  Clone ID: MRT4577_59871C.1
gaccataaggtatatctggggccgaggcatatctattcgtcgactggagcagccgccggccggcaacgattctcgtcggtcgttctgtgccctatccgtcgtcggctatcgcaacagcagcgcctcttccctgtcgccctgactcctccctagcagcagaaaaccggcggcaagtcttcggtggcggcgagggaaggccaaggctttgcctgagagaatgcaagacccaagggatgatgatttcttggcgccaaagttgcataagaagaaggttgtctaccggccgcagccatcaggccatctgaagggtgaacctgaactgttgcggagagagtttccgcaatcatcaggcatggtccaaaagccacccaaaagaagcttgaagggtgagcctcgcacgcccccttccgacagggggaccccggattccctgccggaatctggtcctaccgacgaataccgtgcgttaaggaggaagtacctgatgctggaggaagagaactttgcactggacaaagaactgagcatggaagatgaagaaatgaaggccctagaggatgaaaagcttgcactgcttgatcagcttgttgtcttggaaggccttgtcgagccatcccagttgcagtctcaacctaggccgtaaggtgttttggtttatgtataatcgttgtcgttcattataattcagctactagtagctgttatactatctgggcttaaacagtgtgtagaaacagcatagtagacctgttacttctatcggacatcgacgaataaaaaaaactcttatgactgaaaacaaaaaaaaaaaaaaaaaaaaaaaaaaaaaagggggggaaaaaaaaaaaaagaaaaaaaaaaaaaaaaagcggcc

SEQ ID NO: 140777 - DNA, 884 bp, Zea mays
  Clone ID: MRT4577_59872C.1
attcggctcgagaaactaccaaagagctaataggcggcagatggagcttcaaacgcaagctctcggctcgcagtacacacagcatgagcattacaatgcgtcaccgagcacgtcatatggaagccaaccgctgacactggaagacttgtctcggcgtcatttccagcaagacttgcgcaggcctttacgccctcaccctcgtgtcggtgtgctcggttcattgctgcagcaggagatcgcaaactggtctgggaactgcgggccgcagtctgggtacagactaggtgattgtaaagggacaaggccgcctgatgccaacagagcaggaaactacgagaccttgagctcggcaggatggaacaccctgcagttgggttctgttagctctgctgccaatctggagtaccggtttccatggtatggtacgggtcagccttcgaccagtggcaatgggaggaccattcatccgttggataagctcgtgaggaaggatatctgtgtgactaacagaaacccagccgatttcactgtaattagtgacaagaacgagtacatgagaaccctttgaaagagagaaaggctttgtttaagcaatcatcattggtagagcgaggaaggctttgagcagcagctaccgggagccgggtgcagcctccagttttgttctgtgcaaatgttttatacataggcgaagaactaatgtcgggttgccatggaaaaccccaataaacttgtgtgttgtaggtagataggcagatgtacaagacaagcatgcgtggctgtggccatagtaatgtttttctttttctttttggttttgcctttttttttggtactcctgtcccagaataaactgcaatttctacaattcaaaatttatcccc

SEQ ID NO: 140778 - DNA, 272 bp, Zea mays
  unsure (1)..(272): unsure at all n locations
  Clone ID: MRT4577_59873C.1
tctggtcngtggccatggngtcgtccatgctctccgctaccaccgtgccactccagcaggggggcggnctgtccganttctccgggctcangagctccgcgtcgctgcccatgcgccggaatgccacctccgacgacttcatgtcngnccgtctccttcaggacncangnggtcggnacgngcggngggnngnggngggcgnngacggnggngaactgaatgtggccatcaatgggttnngncgnatngggcgnaacttcctgcggtgtggg

SEQ ID NO: 140779 - DNA, 290 bp, Zea mays
  unsure (1)..(290): unsure at all n locations
  Clone ID: MRT4577_59874C.1
cacccccccgggggaaaatttaataaaaaaagggtgccattttcttctacccgagctgggcccgtaaaaagggcttcccctttaaccacaaccccgggggccacgggggcactttaccctttgcctttggtgccaagtgcgaaccgggttttttacccccttcaggcgaccccccgggaccgaaaacccaaaaagaatgggggggggaatcccaaaacccaaaggggaaaataagccaaagnaaccctgccctaatactactggtgctaccctttttttttttcttcttt

SEQ ID NO: 140780 - DNA, 415 bp, Zea mays
  Clone ID: MRT4577_59875C.1
ttttgtttttttgaaaaggattcccgtttttttcactgcaggcacaagaggcaacccggaccaagtactccagcagagtattgatttgaatcgaaacagcaagcggttttaggcaatataggtaaacaagtagcatatactccaaggcataacaactcgtaccaggactccaatcatcccagtacgcttgagccggttgacagacctggcaaaattataactaagcacatcttggagcagtaggtagacatgctgaccgagaatgtagcagaccaccacgtctctattgataatggtggcgccggccccagcataagccttgttaatgatttacttgcagatttagatgcagttgtaggccgccaacatgcccgcgatggtcccgagcagctcgtagaaggatgcgaagcccgac

SEQ ID NO: 140781 - DNA, 798 bp, Zea mays
  unsure (1)..(798): unsure at all n locations
  Clone ID: MRT4577_59876C.1
gcggccgctttcgaggccggcccgggcccgggattttagggtgacactttatagaaggccggccccggtccaggaaaaaaaaaaaaaaaaaaaaaaaaaaaaaaaaaaaaaaaaaaaaaaaaaaaaaaaaaaaaaaaaaaaaaaaattcttttctcttccaatccaaatcagcaaagcggcagtgcgtaaaaaggatcgtccaacaaaacagcatgaaaatggtcatcgttctcgtcgggggcctggttttgtcagttgccagcgcctttgcaatgcaaatgccctgcccctgcgcggggttgcagggtttgtacggcgctggccccggcctgacaacaatgatgggcgccggcgggttgtacccctacccggagtacctgaggcagccccagtgcaacccgctggggggggcgccctactaccccgggtgggggcagccgagcgccatgttccagccgctccggaaacagtgttgccagcaacaaatgaggatgatggacgtgcagtccgtcccgcaacaactgcaaatgatgatgcaacttgagcgtgccgctgccgccaacaaaaacctgtacaagccagttttgatgcagcagcagcagcagctgctggcagcccagggtctcaaccccatggccatgatgatggcgcaaaacatgccggccatgggtggactctaccagtaccagttgcccagttaccgcaccaacccctgtggngtctccgctgccattccgccctactactgattcatgatatttgggaaatctcctctatccatctctctctatctatat

SEQ ID NO: 140782 - DNA, 139 bp, Zea mays
  unsure (1)..(139): unsure at all n locations
  Clone ID: MRT4577_59877C.1
gattttcgattttgccaaatggtttggaacccgaaggattaaaaaacccttggttgaagctttttaattatgggtaaccggcctctataataggggctgggggattctgcaggtggcggcccaaggttgangttttttt

SEQ ID NO: 140783 - DNA, 504 bp, Zea mays
  Clone ID: MRT4577_59878C.1
aaaaccaaaactttattatgatgcatattttattggtcataccacacatgataatgggtgtcgtcttactgcatttttacatatttagatagagagggatggatagaggaaatttcccaaatttcatgaatcagtagtagggcggaatggcagcggaaaccccacaggggttggtgcggtagctgggcagctggtactggtactggtagagtccacccatggccggcatgttctgcgccatcatcatggccatggggttgaaaccctgggctgccagcagctgctgctgctgctgcatcaaagctggctcgtacaggctgttgctggcggcagcggccccctcaagctgcatcatcatttgcagctgctgcgcgacggactgcacgtccatcatcctgatttgctgctggcaaaactgttgccggagcggctggtacatggcgctcgtttgcccacacccggtgtttttgggcgcccccgccagcgggctgcactgcgggtgcc

SEQ ID NO: 140784 - DNA, 218 bp, Zea mays
  Clone ID: MRT4577_59879C.1
cggaaagcacccgtgagtactttaggtacccagagcctttgacacttggggctgttcttcgaatctaatttcagctgttgcatggttgttgcccttaagttccggttttccctttttaacaagtggccgtaaggttcatttttttgaatttaaaaaaattgctaaaggccggaattattatggtttttaactggaaaattaaccttaccttaaaaagg

SEQ ID NO: 140785 - DNA, 482 bp, Zea mays
  unsure (1)..(482): unsure at all n locations
  Clone ID: MRT4577_5987C.1
cccaagaaccaggcccgggggccaaccaagancncccaaagccacggcnaccagcggcccaaccggggaaaagaagccgaaacgaaaacggcgccncggcaagccgagaacccggcgacacccacnagagcggaccggccaaagcaacaccngcccaagccacagcaaggngagaangaggaccgacaacagcgggggggagcagcgcaggggncccgcacccaaagcnagcagngggaggaccaacgagnaagcgccggcccccaaaacaggagggagaggcagcagcagagaacacaacanncccgagnccagacancgcaaagacgcccccgcaagagggagggcggcgngcncacccaggccggagggcagnggcacaaccgaggcgcaccgcaaccgccaccgccgaggcccaagcaagccgccagccccagccaccagagcagccgggagaacaggcacgagccaccacgcccggg

SEQ ID NO: 140786 - DNA, 294 bp, Zea mays
  Clone ID: MRT4577_59880C.1
aaaaccaaaactttattatgaggcatatattattgggcataccacacatgataatgggggtcgtcttactgcattattacatatatagatagagagggatggatagaggagatttcccaaatatcatgaatcagtagtagggcggaatggcagcggaaaccccacaggggttggtgcggaaactggacaaatggaactggaactggaagagaacacccatggccgggatgttgtagagccatggtgatgggcatgggagggggaccctgagctgccagggggtgggtggggggg

SEQ ID NO: 140787 - DNA, 480 bp, Zea mays
  Clone ID: MRT4577_59881C.1
tcgagcggccgcccgggcaggtacaagctttttttttttttttttttttttttttcttttttttctttaaaaccaaaactttgttatgatgcatatattatctggtcataccacacatgataatgtgtgtcgccttactgcattattacatatatagatagagagggatggatagaggagatttcccaaatttcatgaatcagtattagggcggaatggcagcggagaccccacaggggttggtgcggtagctgggcagctggtactggtactggtggagtccacccatggccggaatgttctgcgccattatgatggccactggggttgaaaccctgggctgccagcagctgctgctgctgctgcatcaaagctggctcgaacaggctgctgctgacggaagcgggacactcaagctggataatgatggtgcagatgctgagcgacggactgaacaagcatgatgctaatctgctgctg

SEQ ID NO: 140788 - DNA, 663 bp, Zea mays
  unsure (1)..(663): unsure at all n locations
  Clone ID: MRT4577_59882C.1
acccttccggactgctgtgaggacggaggtggtgactacgacggatttggcaggcaagcacgagggccgcgttatccgatccatgcccatgccgcgtaagaccttgttcggttaatcctattagccatgaattagataggattggaaaaaattaagaaagagtttgacttaaaaaaaaaaaaaaagggcggccgccctttttttttttttttctttaaaaccaaaactttattatgatgcatatattattggtcataccacacatgataatgtgtgtcgtcttactgcattattacatatatagatagagagggatggatagaggagatttcccaaatatcatgaatcagtagtagggcggaatggcagcggagacgccacaggggttggagcggaagctgagcacttggtactggtactggtagaagccacccatggacggaatgttcttgcccatcatcaaggtcatggggttgaaaccctgggctgccagcagctgctgctgctgctgaataaaaactggctcgaacaggctgctgctggcggaagcggcaccctaaagctgcataatcatctgcagctgctgcgcaacggactgcacgtccataatcctaatctgctgctggcancactgttgccggagcggttggtacatggcgctcg

SEQ ID NO: 140789 - DNA, 720 bp, Zea mays
  Clone ID: MRT4577_59883C.1
ccggccgggaagtcctcagtaaggtaaaagtgatctaggtctcccgcgccgccgccgccgccgcctaagctgcttccacctccgctttctgtgcagaggactcctcgccggagaatagccggcggcggctcgagacgaaactacggtgctcgtcttccgccgcccgccgcccttcactccccagcatacctagtccctactctaatccgtacagagcaacgcatcaagtgatggcgaagccggaggagaagctgcgctgcaccaaggaacccttcatcgaggacgtcggcacccggaggataaagagcatccggttcagcgtgctctcgggcagcgagattcgcaagtcagcggaggtacaggtctggaacaaccggatctatgaccgcgacatgacgccggttcccaatgggttgctcgacccgcgaatgggaatcccgactaagagaggcaaatgcaatacctgccatggtgaatttagtgactgtccaggtcatttcggctacttgaagctcgcgcttccagtttttaacgtgggcttctttaactgtattctggacgtgttgaagtgcatctgcaagagctgtagtagagttcttcttatcgagaaagaccgcagggagtttctaaagaagatgagaaatcccagggcagatgcactacgggaaaagtgctacaatgaaaaaagtgagggacaaatgcaaactatcctgctgcccc

SEQ ID NO: 140790 - DNA, 1098 bp, Zea mays
  Clone ID: MRT4577_59884C.1
ggtacctccgggttcggccgggccgggaaagattctttcctcatcttattgttgttcttcttacaggacctggtgatgaggccaggacgatggatgggaggaaggcggtgataagaccaagcggacaaggcaggtgccggctagttattactagaaccaccaaaccattgaaatgttctgtgcccaatcgagcgcgtggtaatactaattgctgctgagttccccacacacgtacgctgtatataaatcctgctcctcggaggcgccggcgtggaagatcgctgggggcggcgccctactactgcgggtgtgggcagaacgaacgccatgatccagccgctccggcaacagagctgccagtagcagatgatgatgatggacgtgcagtccgtcgcgcagcagctgcaaatgatgatgcagcttgagcgtgccgctgccgtcagcagcagcctgtacgagccagctctgatgcagcagcagcagcagctgctggcagcccagggtctcaaccccatggccatgatgatggcgcagaacatgccggccatgggtaggctctaccagtaccagctgcccagctaccgcaccaacccctgtggcgtctccgctgccattccgccctactactgattcatgatatttgggaaatctcctctatccatctctctctatctatatatgtaataatgcagcaagacgacacacattatcatgtgtggcatgaccaataatatatgcatcgacataataaacagtagcatcaacagactacatcgggcgcttgtagctcctgtatgggcagctcaaatctaaaaaattgtcatgcttgtcctcaaggccccagaccagccttggggtaatgcctttactccaatcacctttgatacaaccaaccaactgccaggcctagcatcaacaatgcatggatgtatcttaggcactagtgagccacagtacattcaccaaacaatctacaacatggctcaccccatacttcaagaggagcaactgcaacaaccatgtgagttatgtgcatctaaacaagctactcaaagtgctgcggcaatcttgacaggagcacactacctaccatcaatg

SEQ ID NO: 140791 - DNA, 425 bp, Zea mays
  Clone ID: MRT4577_59885C.1
ccacgcgtccacggacgcgtgggcggacgcgtcgggtacatatctttgaggcagttcatgacaacgacaatcctatgcggaaaccgcacctacgcaagcgaccctaagaagcaactgggcatccaaagaacattatacccctcccattgggcttcctgcccttttttgtagtgcaacaaatggcgtcattattccacaatgctcacttgcacatagtgccattattcgacagttcctccctccagttacgtcaatgggcttcgaacatgcagctgtgcaagcctagaggctacaacaagcgcttgcggagagcgtcttagaacaaccaattgcccaattacaacaacaatccttgggacatctaaccatacataccatcgcaacgcagcagcaacaagcactgagccaactaaccgtggtgaacc

SEQ ID NO: 140792 - DNA, 1887 bp, Zea mays
  Clone ID: MRT4577_59886C.1
ttaaaatcgagtaactccggagcgaaccaagtcattcccaagaaatttcctcattagatccaacactcgtgtatgagcatacaagaatgtggtcacctgtttagcactagcaattgtttgttctataggtccaagcttcccaatatcttcaagcatgagatctaagcaatgggctgcacatcctgtccaaaatatggagggtctttttgccgccaatagacttgttgttgttgtgttgacacttgcattgtcagtcaccacttggacaacattttcttcccctatctcttggatgcatctgtccacaaggtcaaacacatattttccatctttctttacagctgagcactccactgaatccaagaaacagaccccatgtgcactatggacaaccaagttcatcactcccctacccttcctgtctgtccatgcatctgtcatcaccgagcaacctatgagctgccatgattcctggtgattcttgaatctatccaacaccttttgctttgctctcttcaagaatggtccactcatctcataggcactaggacctctcagacctctaccaaaagctccaattgcctcaagcatatggccaaagcttgggagggttacccttgttgatttcagcataataacatcattctcatgcttattgtcttcttcattggatccatctgatttatctagatcaatttcatccctttctctttgcttttccttctttctctgttctttttcaccagtcttctttgtaagcaaggcctccatctcttgcttaacaggtgccggaactttcttgcactttgtaacattaaaacctccaatgtttgcaagatgatacttaactctagtaattccaccatggatcaccttgtcacagtacttgcactgtattgcatgcttcttactcatatccaggacaaagcaatgctcccatgtagggtcatctgacttgatagcatttgatgttttttgagtaactgaagcagagtttacacttgatggttcacctgagttgccgccttgctggagcagactggaggttgtggacttagtgacgtaaacactgcagaatggcaaggcagtagtgcgaccttggcttggcggcggcgcacacatgtctagccgcctcgagctcgccccactgagaacgtcgtcgctgctcgagaggacgagtgcaggagcaagcaacacagagttcggtcggctagggtttttagtgctcgctgcaggcaggtctctgatttggaacgacttagccttaatctttttgttgtaagctttggtaactatgactttgtcattctcgatctcccttagagctaccaatctcttgtcggtcacctcataaatattgtccgtcaatagatcaaaataatcaccaacagctagatcattgtgtccgacgaatatgatagcattcaatataatctccggcggcaaaacaacttccgtggagcggctgctccgacggcgcttgaggctggccttgccctccgacagcacctccgccaggtacctgtcgccattgtccttggcctccttagcaacagcagcgctcggcggcggcgtcttctgcggccgcgcctttttctgctgcggctgcggcctcctcttcttctccggcaccgacgaggccgggacgaggaagtagaagcaccctcgcttgagctccgagtccggggcgacgatcaggatccgccgcgctccgccctgggagcacggccggctcaggacgtggttagggtgcgccgcgatgacctcgccggcggtgaccgggcgggcgtactcctcgatgtggccgctgaggtggacgatccggatcacgtcgaaggagccgcaggggagcacgcaggccaggcagcaccgcaggctgttgcccat

SEQ ID NO: 140793 - DNA, 909 bp, Zea mays
  Clone ID: MRT4577_59887C.1
gccggcctgtttgggaaaaccatgtactatgtttccacgtcatgcaacgcaacattccaaaaccatggatcatctataaatggctagctcccacatatgaactagtctctatcatcatccaatccagatcagcaaagcggcagtgcgtagagaggatcgtcgaaccagaacagcatgaagatggtcatcgttctcgtcgtgtggctggctctgtcagctgccagcgcctctgcaatgcagatgccctgcccctgcgcggggctgcagggcttgtacggcgctggcgccggcctgacgacgatgatgggcgccggcgggctgtacccctacgcggagtacctgaggcagccgcagtgcagcccgctggcggcggcgccctactacgccgggtgtgggcagacgagcgccatgtaccagccgctccggcaacagtgctgccagcagcagatgaggatgatggacgtgcagtccgtcgcgcagcagctgcagatgatgatgcagcttgagcgtgccgctgccgccagcagcagcctgtacgagccagctctgatgcagcagcagcagcagctgttggcagctcagggtctcaaccccatggccatgatgatggcccagaacatgccggccatgggtggactctaccagtaccagctgcccagctaccgcaccacctcctgtggcgtctccgctgccattccgccctactactgattcatgatatttgggaaatctcctctatccatccctctctatctatatctgtaataatgcagtaagacgacacacattatcatgtgtggtatgaccaataatatatgcatgatcataataaagttttggttttaacaaaaaaaaaaaaaaaaaaaagcggccaaaaaaaaaaaaaaaaaaaaaaaaaaaaaaaaaaag

SEQ ID NO: 140794 - DNA, 299 bp, Zea mays
  Clone ID: MRT4577_59888C.1
ggccagccaggaccaggcgtgcttggttttcacaaactaaaaaggacattttttttttgccgagcagagacagtgcaaaacggggaacggggagttccttttacataacaagttaccaatctcacccccccataaaattcttacaaactaatgcggccgggaaggaaataaatcccgggcgatcaagcggtctgaaacgggaagaaggaaacaaagaatttcatggaaaataaatcagttctgggaccccggggaggaacaaaaaccccttcctccaattgcaggtggaggggtttttg

SEQ ID NO: 140795 - DNA, 419 bp, Zea mays
  Clone ID: MRT4577_59889C.1
gcacgagggacgagggcacgctcgctcccgtgctctggcgcttggcggcggctcgccctacaccatgcctgtctccgacgtgcggcgacgcgggggacccagcgtgcgtagctcgagcggcttccaggcatgcgcggcgcgtgcctgtctccggcgtgcgcggcgtggagggggggtcccaggcgtgcggcgcgcgcgtgcctatctctggcgtgcggcggcgcgggcggatctccggcgagcgtggccacctacttctccggcgcgccctctggctcaccccctgtccccggcacgcgcgggcgggctctgatggctcctccctgtctccggcgcgggctcctcctccctgtctccggcgcgcgcaggatctgacagccggcgggcgtgggcggatcctcgtgctgctccttgtctcc

SEQ ID NO: 140796 - DNA, 226 bp, Zea mays
  Clone ID: MRT4577_5988C.1
aaaatggatttaccctgttagaaatcattaccaataaaacatacccatgcattcaaagggaacacaaaaacactacgggaattactgtaaacataattaccctcctaaaaagttccacacatgcatggggcaccttcacaacattttatgcatacatcaaagaattaaggatacgtacgtaaattcatatacatgaagggttcactaaagcaagcccaacacatcg

SEQ ID NO: 140797 - DNA, 1742 bp, Zea mays
  Clone ID: MRT4577_59890C.1
gccggccgggcctgggtactatgtttccacgtcatgcaacgcaacattccaaaaccatgggttgcaagatgctgcagaatgcaagccatggatcatctataaatggctagctcccacatatgaactagtctctatcatcatccaatccagatcagcaaagcggcagtgcgtagagaggatcgtcgaacagaacagcatgaagatggtcatcgttctcgtcgtgtgcctggctctgtcagctgccagcgcctctgcaatgcagatgccctgcccctgcgcggggctgcagggcttgtacggcgctggcgccggcctgacgacgatgatgggcgccggcgggctgtacccctacgcggagtacctgaggcagccgcagtgcagcccgctggcggcggcgccctactacgccgggtgtgggcagccgagcgccatgttccagccgctccggcaacagtgctgccagcagcagatgaggatgatggacgtgcagtccgtcgcgcagcagctgcagatgatgatgcagcttgagcgtgccgctgccgccagcagcagcctgtacgagccagctctgatgcagcagcagcagcagctgctggcagcccagggtctcaaccccatggccatgatgatggcgcagaacatgccggccatgggtggactctaccagtaccagctgcccagctaccgcaccaacccctgtggcgtctccgctgccattccgccctactactgattcatgatatttgggaaatctcctctatccatctctctctatctatatatgtaataatgcagtaagacgacacacattatcatgtgtggtatgaccaataatatatgcatggtcataataaagttttggttttaatgactccctgagaagactgccactcctactcccgaggcgtcctctgaagctcttgattatatcatacgacacgcttcggtaaaaagattaactgaagaggggatttttgaggctaagcactatgcccgagaactgaaatagaagaccgccgccttagtgcccaatgggacagtggagtactaatttcatcaaatacctcccataagccatggcattatctatctgcccccagtcggctgggggtgaaaggcgatccaattactagccccaggaggctagtatacacatttatacatcaaatgattacagatctgcttaaacgacaaacctataaaggtggcgaacaactttaagagttggtccacatctcgggacatatcatcagagtggggctgaagcagcccgatatacgcagtgaagcaaatcagcggtccaacagccacatgcaaggttgggaacagtcgtaactcttacccgatctcctttgtagcgcttattcgacaatgcgcaaggggagctcgcgtaactagcttatagctccactgcctggtgtagacttgcagcggtctcctctactcaacaccccgaacccgctctcgctaggctgtactagagccgtacgccctctgctcctcgcccccccccgccaccgccacagccacagttgccgccgccggcacgagcagcgggaggagaacggaaacggataggacagccgcgaggataagttggtgggtgggtcgcttcgacgggtgtgcccttcccttcgccaaggctcgacagacggatacaggcttcgagaatcgaggacaggagcacgctgcagtcgcagggagaggaaagggagccgagattaccggcaggcccgagggta

SEQ ID NO: 140798 - DNA, 710 bp, Zea mays
  Clone ID: MRT4577_59891C.1
aaaaaaaaaaaaaaaaaaaaaaaaaaaaaaaaaaaaaaaaaaaaaaaaaaaaaaaaaaaaaaaaaaaaaaaaaaaaaaaaaaaaaaatcgacgccggccgggtgcgtttcccatctcgtgattctacacttctaccgttccactctcgtgcgctcttgttttcttctctccgttgccgccctacgtcaggtgcccaattctccattttcgggcccttctccagcgacgagcacccgccagaggattatggattggctggggcagaaacgcgcggagatgctgatgcaggtgctgctggtggcgtctgcggtggtggcgttcctggtgggctacgtgcgcgcggacttccagctcatgctgctcgtctacgccggcggcgtcgtgctcacggctctggtcaccgtccccaactggcctttctacaaccgtaacccgctcaagtggctcgacgctgccgaggccgagcgccacccgcggccccaggtcagcgccgcccccgcggcagggggggaagaagaggtccgggaagaacaagtagtcggtccgatgtgtggtgttcttggtcgacctgactcaacctgtttaagatctattcgcagaactaatcaattataaaaagagatattgagataaaaaaaaaaaaaaaaaagcgaaaaaaaaaaaaaagaaaaaaaaaaaaaaaaagcgaacagctccactgtagctgaaaa

SEQ ID NO: 140799 - DNA, 368 bp, Zea mays
  Clone ID: MRT4577_59892C.1
gccggccgggtccaaaagaggatgtgctttccgcaatctgtcctatcatcatctccatgtcgagctatggtttcccagaccgttcttgtcttccgtacctatgccgtggagcgaggttatggtaggtcctagccggaatctggctattatcgaggctgactactacaagtgctagctcttcttcacagaagacctgctctatatctccctgtgatccctattgctctgtgacttgtatgtgctaatgccacctcgcgtgcgtgggcacgtcttccacctctgccactactctcctctgcaagaatgcacaatcaaggtgccgtatcatcgcttctttacatttcattgctcgtcgctactccttttac

SEQ ID NO: 140800 - DNA, 430 bp, Zea mays
  Clone ID: MRT4577_59893C.1
atttgcttcagcggcgaccatgacatgtgtgtaccttacaccgggactgaagcatggagtgcgtctttaggctacgccgtcgttgatccgtggcgacagtggattgtcgacgaacaagttgccgggtatgtatctggattctgaacacaagcatatatgcattgaccctttatttcctcctaagatctttgaaccgtttagtcgatcctagatcgatgttgagtaattgctagctcttggacgatatgaattcactactataatcaacaaaaactttggcattatttatatatttcacgaaatattcagctcgatgatttgttatcatgttccatttgttccagtcaaatgtttgtatttttgctcccaggtacacccaaggatatgaaaagggccttacttttgccactattaagggtgctgggcacac

SEQ ID NO: 140801 - DNA, 472 bp, Zea mays
  Clone ID: MRT4577_59894C.1
gaaaaaaaaggggggggaggtccttcccaaatttttttttggctccttggaccatgtggtcccccccttttggccaccccatccggttttaccctttttttttttccttaaccatttttggtttttaactaaaaaaccccctttaaggaggctttaaaaccccccgttaagaaaaaaaaaaagttttgggtttccccaaggcaaagaaagggggaccaattttttggggggatggggggcttaaagaaaaatttttttttttgggttggaaaggtttgggttaaacattggcgttaaacccctgcccggggccctaaaaaagccctggaaaaaaaaaccctgatttgggtaagaactgttgggttttttgtcaattaaaaaagcccaggttgaaaatccacaaaatcccagtttttaagggcccataaagggctgtttttggaaaaccagaaaaccccccccctgggttaaa

SEQ ID NO: 140802 - DNA, 183 bp, Zea mays
  Clone ID: MRT4577_59895C.1
gacaacagcagcacgcgaccgaagatcgctgcgggctagattctagaggagtgagaacagtgcttataagctctataggcaaagcacaccccttgcacatgctagtgctaaggacttgcagcctggatgtgctcagagtcgaacagaacaagcttgttgtgtgtaatagctgctcgacatggc

SEQ ID NO: 140803 - DNA, 4746 bp, Zea mays
  Clone ID: MRT4577_59896C.1
cattgggtacctcgaggcgggccggggtgttcggcacgagagtagatcgctcgacggaatccggaagccaccaaggcgaggcggcgagcgcacgcaccggcacaagcacaacaccgccggtaccgactcgaccatcacttacccaatacgtggaggtgcgagatggcggcgtcgggatcgggaggcaacgagcccagcggacggccctggactgcaaccagcacgtggacccccggtcccgccggcggggccgtggcggacgctgtctcgtttgagacctccgacgacgacgcggaggcgtcaccggcgggcgtcgtgctctgccacccgtcggccgactcggaccgcgacatgactccctgcccctgcgaggtcactgttagtttcaggggaaagtatgagattcacagggtatatgtgcgaagcacagctcggatatatgaactataccactctcctgatgcaaagggtaccagcaaggattatctatgcactgtgcgttgtggacttgctgttaaagaaacacagcgctgtggtgaagaaagtatgtcacagtggactggcagtgctttaaacagtgacaagcgtgaacatgaggcaaaaagtgtaagcagtgcaagtgatgaagatagttgggttgatgtcaagattccagaatctcctgcaggaaataaaacaccagaatctcaagaaaggagtgtgattcgaacctgccgagaaaatactctgccacactatgaagctactgctgagatgactgatgtgaacccatgtgtatctcttactgtacgtcttctatcacttcagtcgaagacatccgtgcacattgaggaaatctacatatttgctgatcctgttgagcccaccgatgatgtttcagtaagaggtcctgtaaacatgggaggtagttctttgctggcaatgcttgttcctggccttatgcaaatgtctaaatcaaggaatttgaaaatcgatgacagttatttttctgacggatcaaggaatcaagaaagcagcaaatgtgaaagctttacacaggaagcagggccatgtagcacaaatgattcaaaacatacgtctgcaggaatagaaaatggaatgaactctacagtcggtgtttcagcatctgatgataaaagcagccaaggtgaattccatttcaaggacccagattctcttccactccctgtacaaacattagaaagtacacaagcgccttcagtgaagaaccagcatgaattaaacacaggttatcttgctaatcccatcatgagtgaaaaccttactccttctaatcatattgagagaaagctggacactctgctttcgaaggtagagaatatggaattattttgctctaggtttgaggacagcatgataaagccccttggtagcattgaggcaaggcttcagcgactggaggaacagtttagttcgttcgctgttgatattcagtctttgagagattattctgcatttaggtcagcaccagatggtatgcctaatacaaagagctcacaggaggaagcacataatgatgctaatgatagaagtacttctacatctgacaggaagccaggtttagttgtcagggcgccagattttgtgtcagatgattcatgtggttgtaatgtgataactaatggaagccgtgttaattgtcatgggcctaatgtggtgccaagaatacttgtgaaggcccctgattttatttcccaacctgagttaacggatgaaaacctccatgacggacatgctctatcttctgaaaaggagtgtaagacttccccaggtttagttgtcaaggttcctgaactcccagatgatgatgatgatgatggagtcgaagataagaaacaggcagaagtttgtggtgatggtgatgatcacacaaggtctgatgatactctaaggaaaagcacagctggcaacaccaagagcaaaaaatctgtatctatcaatggcgcgttggcatccgcattggaggcattactcacttctaccataggaacatcatattcaaaacctactatttgtgctaccagtaatttaagtgctgaaaatattaatggtttcttcagttgctccccttgtcctgaaaaaactggcgagatgtccactaaagatggttcagctgtccaaattctgggtacatctggtgatccaaatttggtcggtgccttcatatcttctcaggaaattgatacagctccacataattctctctcaaaggaaatgttggatagcaaggttgagataaatgaacagaactgtgacatcaatacagaaaatgtggcatttgttgcaatcacagaaccattggatgttccctcacaggctgatacagttgaggaatctattaatgatggaagttgggtgaatagacaaaactatggttctaatttgaatgcaatgccttatgccatgaacgttgaacctttggatcctcctaagcctcctacagtttctgaacctgttgatagtggagttcaggtgaatgaagatagaccttccatatccttggtggagtttcttgcagcaaggaatgctagctcttgtaagaatggtacttctgaggtatgccttggtaatgttgccgctgaaaaactgtcttttgagagaacatcggctggagctggtaaaaactcgaaaaatatcagtcagcttctagtgaagaaagctcttgaggttgatgcggacaagatattttttttgtttagtgtacccattgggccaaaatttgaaggatcaagcagtcccacccccagaactagtgggcacaatattaataatacagaagaagctgtctcagataaggaatgtggcgtgaaggataccaagaatggatttaggccctctttggggatggactctatattttctcagtaccatgctacagattctaagaaaaatttgagtgagaacagcagttcggaccggattctagatgagagtttctcaaaacagaatggagaacattctcggtcaagtctgagtagtatggtgtcatttagtggagcatctgccacagaacccgttgttccagggagtggcacatcggaaaattacgtggaagatcttacaggcgttagagatcgtcctgttgcaacactaaattctggggaagagctccaaaaggtctgtgatttactttatgagtttaaggatgaaatgttgagggcctccgtagcgaagtgtacaaataagagcagcccgtcacttgaagctttgcttgctgaatcatctgattctgaagcgcaaatctctgatctggagggtactgacagtggtgctggcattggctccggtcgactgtttagtacactctcatcttcagatgacgatgatgcttctgctgcggacgagcctttagttgatgttgctgacctgactacgccaccagagcgatatacttctgtccccagcgacgagcctctggttgacatagctgacctgacaaacccttcagggatagatgcttcttcagtgaatgagcctccggctgatgtggttgatctgctacatacttcaaacgagcctttggtcagtttggatggtctgccaaaccatccagagatgtgttttggtgggagcagtggagaacataccgacagtcttatataaaggataaggccatgcggtactgatagttcaaagatgagcggaacatataagtccatgcggctgatgtgaacgacagtctcatataagtgtgtcctgtgcagtgaataccgctttcttccaagttatgcataagtttttgtacataaataagtctttgtgtctgcatcagtttatactaaatactatgaaagcagagtaactttggttttggttgctgttctcccgtttgtgtaaatccattacaactaacactttgccgatataactttttactgttgctcgttctttttcaagttctgagcattgcaggagaaatcaaagttactacttaccagacgcgcctatattggtaccatttcagtttaaactgaagtcaccagacctgagttacaatcaagaatcaacccttcatctccgccggccccggccagtgacaggtgaagctcggaacatgctgtgttcttttactttcgatggaacacgccatgttccttccataagtaagcgaacagagtaacaggcggcgctctgttcacatgtgagcatgcctgccacctgctgcgcgcctgcgctccgtgtatagacgcacacgggctagccctgtctatggtcctggcgaagtcgtcccgccattaatacgagacacggcccggcccgcgcggcccattagtgggtccgactccgtcttcgctctgtctaggttcaaggaataggaatccgtggattcgcattcccgcgagatcacaaacataaagagacacatgagaaacaatagtggataaacttttctcttgttatttagtatgtgcctgattggatgcctgtatccggacgcgtaggctcaagatcaatctgatactgcaatttttgcgtacgagtggatgcaatcaaatgactataaaataacttgttttgcatccgctcatgcagcttgcgtctctcttgtgcaggccaccaaacaggagcttagacagagtcaatgcatacactgctccaagacgaaacagatggtatgagaaggtagatgcttatgatatacaaaagtagagccacttatggatatgtttgatattgtgcacttaaccatcgtatggtttcttaatattataccattttgtctcc

SEQ ID NO: 140804 - DNA, 396 bp, Zea mays
  Clone ID: MRT4577_59897C.1
cttaacaaaaaaaaaaaacaaaaaaacaaaactataaaaaaaaaaaaaaaaaaaaaaaataaaaaaaaaaaaaaaaaaaaaaaaaaaaaaaagttgaacctttggccgttgcccctcttagggcgactcttgcagaactccagaacctttttgccccccggcgcccccccccttgggggccctttctccccttggctcccccctcgtggggctccgggcgcggcttttggggccccccttcctcgcgatgggcggggtttcccccctcttgcccggccgtttcccacccccgttctggcagggcctcctctgccctcggggggctccccggtgggcctttccccctttgcccccgggggtttgctcgtcgtgaccgccccggtccccccttgctcc

SEQ ID NO: 140805 - DNA, 331 bp, Zea mays
  Clone ID: MRT4577_59898C.1
ggccccaaacaaacccaaatttttttggatccactcaatttaacgacaaaaaaaaccggccattctctaccccaatgacaacccaacaaacccagccagacgggcttggaaaattccttttttccggccaaaagtttttggctttccaatactacaaaaaaaaagttttcgggctttaaacaaactaaaacggggaacaaaaagagagacttgggaaaaccctaacagtttgccaggttttttccaaaaacgacaaaatggacccccaaccctttatggcgccattcctgcccatttccaaaacctgccttggttggtaaccaatttccct

SEQ ID NO: 140806 - DNA, 314 bp, Zea mays
  Clone ID: MRT4577_59899C.1
actacctaccataccctcatctttaaacccacctttatacccatttctaatctaacccgacttaaacacacaaaagccatacaccaccatcttctcttggagagagcttatccccttgaaacaacctcctcatccttggccttggcgcactaataccggacaccgacaaggcggcccttatatcaaaaaacacaaaatgtcttgtatgccttctcccaaaccacaaatttgcctatttttccctcctcgaactgaacaacattcttgatggcctgaccatcgaaaaaacactgaactagtttttcagcgctctt

SEQ ID NO: 140807 - DNA, 289 bp, Zea mays
  Clone ID: MRT4577_5989C.1
gggaaaaaaaagggttttggaaaaacccaaaaccctttaaggttgggggtaatttttttttggggggtcctttccccttccttgggaatccgacggggaaggaacactccctatgggagggggggggtaaaaaaatgaccaccgggtttaaatttttttccccaaccttaatttttttgggggcccccccggatgcaagttgttggggaccaaggaaccggccccttaaagttcgggggacgaatttttccgggtttttttgccacgccgataagggaccaaaagggga

SEQ ID NO: 140808 - DNA, 2461 bp, Zea mays
  Clone ID: MRT4577_598C.1
cggccgggatccaggccacacgatctctcgacaatccagcgtgcacccggcgaagaaacgccctgctccggacccggaggagctagctgctggctcgtgagtgtcggcgtgtcgggccacaacccgaacgctgaaccaaggctcgggaccgcgacactcgtgtgtccttctcctcagatctcgccggcggcggcatgctcccgtcgtccggcagcggctggggccgcggccgcggccgccacctattgctcggcagggccctagctctcgctgcactgctcgcgctcgcctccgcctccgagtccgaccacaagtacaaaactgaagagccagttaagctttgggtgaataaagttggcccttacaataatcctcaagaaacctacaactactacagccttccattttgtcaaccgtctgagaaccctacacataaatggggtggtcttggagaggtccttggtggaaatgagctgattgatagtcagcttgaaataaagttcttaaaaaacgtggagaagggcttcatttgtacacttgagcttgatgctaaaaaggtccagcagtttgctgatgccattgaaagctcatattggttcgaattttttatagatgatctgcctctttggggttttgttggggagtctgacaagaacagtgaaaacaagcattacctttacacacacaagaacatccttgttaaatacaatgataacaggataattcatgtaaatctcacccaagagtctcctaagcttcttgaagatggcaagaaattggaaatgacatattcagtgaagtgggtagcaacagatgtgtcatttgcacgccgttttgaagtgtacctggactatcctttctttgaacaccagattcactggttctccattttcaactctttcatgatggttattttcctaactggtttggtttcgatgatactgatgcggactttgagaaatgattatgccaagtatgctcgtgaagatgatgatctagagtccctggagagagatgttaatgaggaatcaggatggaagcttgtccatggtgacgtatttcggcctccccgaagtttgatgtttctttctgcacttgttggtatcggcacccaattggcagctcttatcctacttgtgattgttttggccattgttggcatgctatacattgggcgaggggctatcatcacaaccttcattgtgtgctatgctcttacatcgtttatttctggatatgttagtggtggtctttactcaaggagcggtggcaaaaactggattaaagcgatggttcttacagcatccctctttccgttcttgtgtttttcaattggtttcatgctgaatacaattgccattttctaccgctcattagcagcaataccatttggcacaatggttgtcatgtttgtactttgggcattcatatcttttccgttggtgcttttgggaactgttgttggtagaaactggagtggtgctccgaacaatccctgccgagtaaagactattccacggcctattcctgagaagaagtggtaccttacaccttctgtcatctcattgatgggtggcctgcttccctttggcagtatcttcattgagatgtacttcgtgttcacatcattctggaactataaggtgtattatgtctacggtttcatgttgctggtcttcgtcatccttctaatagtcaccatctgcgtcaccattgtgggtacttatttcttgctgaacgccgagaactatcactggcaatggacgtcgttttcctctgcggcgtcaaccgctttgtatgtgtatctgtactccatctactactaccatgtgaagacaaagatgtcaggcttctttcagacaagtttctactttggttacacactgatgttctgccttggtctaggcatactttgtggtgctattgggtatctagggtcaaccctttttgtaaggagaatctacagaaatatcaaatgtgattaaatccctgctacttactagcagcagaaagatcatatgtattgtcagtggaagcaaggcctgaaaaaaatggattttaatggtagaccctgaataggttttgaaaccgctgagaacttgacccatctgttcttatacgcaattttgtttgcctgcttattcctgtgagatcgtcctcatagtgtatatctgtggtagttgaggattagcctgaagcacctgttttcatcatttttttcttcattttaattacttcattcgttaggatgtaatcagtgaatattgatgcggcgcgagtcgaattaggactgttagaccgaatcactgccaaataagacccacctaaggggttgcgattataacaccgaagctatgacgagcggccgcccgagcagaatgacaggataaggagaattgtataggatgtctctcgtgatgttaacgaaatattggttttggcaaaaaaaaaaaaaaaaaaa

SEQ ID NO: 140809 - DNA, 444 bp, Zea mays
  unsure (1)..(444): unsure at all n locations
  Clone ID: MRT4577_59900C.1
acntnntgataataaccataanaaaaaattaatatttgggggtttttttttatttttttccggtttttttctctcggggcccccagaaaaaaccttttacaaacctttttggccaggagggtccggggtttaaattcccccccatatttttcccttattttttcgggccttttgttttttcaacaaaaaaaatggacaaatttgggttcaccggggaaaaaaaagggggggggagggtaacaaacaaacccgggaccttgggtaggaaaaaattggggggcccgggtcaccaaggggggggtctgggcctacctgcaaaagggccggggagaacaccattcagggaccggggcgggtaaaaactcacggggctgggtccccccaaacccaacggggggccctgggccctggtggggtccccttacaaaaaccttttaccacttt

SEQ ID NO: 140810 - DNA, 400 bp, Zea mays
  Clone ID: MRT4577_59901C.1
cgcccacgcgttcgccacgcgtccgctcagatctgcctttccttatccggagcgaacgaggtgagccggggcgggaggactcgccaccggccatggagcccgggctgagaatcgagtccggttccgccatccgcgtcgcggtggtccccgtgggcggcccgatcccgccgtcgcgcctgcgcgaatacgcggcgctggtggcgcgcaacgcgcgcgtctacctcgcctcggtccgcacctactacgcggagcaccagaagagcccattccagcaccagccctgggagaccggatgtcttcgtcttaaattcgtgctttcctgctgcttgccttctccctgggatgatttccagtcctctccaaggtgtttgccgtgatcggtttctgccactttccttct

SEQ ID NO: 140811 - DNA, 344 bp, Zea mays
  Clone ID: MRT4577_59902C.1
ccggccgggagttaccggaggctccagggcgcttacaatctcaggaatgagcatcaatctggacggacatcttggctctcgactgcccattgatacttgattaagacactctgcgcataagaaaactacgcggactccagtggctccctgcctcgctcactatcgtagactccgtgcgaaggaactgaataccaacagcgaccatgtacgatccctatacatggataccgtccgaagacggtcctaaggcatgcataaatgtatttctcattttgacgccttgcgctacacaaagtataagagatctatcctgcaaaacaaaaaagaaaatgaacccgcggccg

SEQ ID NO: 140812 - DNA, 398 bp, Zea mays
  Clone ID: MRT4577_59903C.1
gggctccaatccggtccggcccttggttttttctgtttcggccggaccccgggcgccggggacaagaagccatgtgtggctccaacttttcaaccgcctggtcttcttgggggttggcaagaagggcttcaacaaccggtgggggttccccccggggctggggtttccgggggcggggttccttccgggggctcggaaccggaatggactcggtagggaacacgcaaaaaataacggaggccatgaagctgggggccgccgccaaggtccggcccgcgcaggaggccgtcgtttcttttggccttttttgggaggcgctggggggggggctttacaccatgaaccaggagatccagacgggggacatggacctgcccttaaccggaaccggcccggta

SEQ ID NO: 140813 - DNA, 253 bp, Zea mays
  Clone ID: MRT4577_59904C.1
gggccggcggaaaactagcgagctgcaaggctgagaaaaaaatcgctttcctcagcgaggccggctagctccctctcctctggatttcgcgcgggtctatctttacaagggcccagtagcatgactagcgggagtctgtcgcaattaccggccagtgcaccgcgcacttctgtcagaaccgtttttcttcggctcctcctctttggcgtcggactcttgcagaagaccaagagagacaccttgtaccaaaaca

SEQ ID NO: 140814 - DNA, 526 bp, Zea mays
  Clone ID: MRT4577_59905C.1
aaattcggcacgaggccacccaacaccctaaacccttcgacccaacccgcctccaactcctaagccgtcatggcggcgccgtccccgaccactaccgccgccgccacgacccaccaccgcgtgctcctcccatccgcgcgcccccgcgccgcgccctcttctctccgcctcccgctccgcgcgcagccccacgcccacgcccacgcccagcgcgcgcgcctcgccgcccccgtcgcggccgcggcggcgtcgacggcctcccccgagtcccccgcgtcgggcgccgtcccggggaagcccacggtgctcgtggccgagaagctcggcgccgcggggctcgcgctgctgcgggagttcgccaacgtcgactgctcctacggcctctcccccgaggacctccgcgccaagatctcgctctgcgacgcgctcatcgtcaggtccgggaccaaggtcggccgcgacgtcttcgaggcgtccgggggcaggctccgcgtcgtcggccgcgccggcgtttggatcgacaacg

SEQ ID NO: 140815 - DNA, 306 bp, Zea mays
  Clone ID: MRT4577_59906C.1
aaggctgaacatgtatgtgaaaatcgcagccacaccgcaaaagattcaccaactaaacgctgttaacattgggaagccgttcattagaacaggcagcatccagcatgcaatgcatcattcaacgccaaatgcatgaacgcacgtgtcacaagaagacctaagcgccgaattgacgggatctaacactgaaacaggaaccacggcaccatcaacggacacaagcacgactcctgcctacacgatgacttgacagaagatcttgatcgacggcgagatccccggcgcaaactgcgaaacctcccatct

SEQ ID NO: 140816 - DNA, 316 bp, Zea mays
  Clone ID: MRT4577_59907C.1
agacagaacgacccatttctaatatttgtcttccatccgaatctgaagagaaatatttgtctatcttaatagaccttattacccaaaaggacaaagcacagtgttaaatgccgcacaacctatatataagctactgatccgtaactagcacgtgctgtactgcatacacaactactattggatcgatggacacgtacgtacaatgtgtataattggacctttccacaccactctacgccattcgtacaaggttcggctagtgatttatttaagcgcatgagtctacaggtagacgtatatcatggatgagctagct

SEQ ID NO: 140817 - DNA, 642 bp, Zea mays
  Clone ID: MRT4577_59908C.1
ccggccgggaggtttcagcgacgccgccgtcgcaagccgtccgtcttgtccttcacgtatgcttggtcctcctccttgtatctccactccccccttcacagatccgaatcctccctgtatggttatacgttcctctgcaaggttgttcatcacagcggactagggcgagaaagaagactcgaaccacaaaaagatgggcagcctgatcacatgatacaccacggcgctcctctgcctgtccgacaactccgcttctacgtagctcccgaatgtccgacggcgcctctggagaccactcgtgcggagctcatgcggaagaatgcgcgcatcaggtctcgcatctgggtgtcacgcgtagaagaccggctgccgcacctctacacccgactcatggacctcctggatcggaaacgtacgactcttcttcaccaaggcatacctctggagaggagcacgaggaggccgccaaggacaatgtgcagggtcctggtcaagttcgactgcgtgctccagctgttgttgctgagccccctgttatacctgtggctggatccgtcccagacctctatcttccattggctgatcatccccgccaagattaactggtgaaccgtgcatactatcaccgcctgtgtatgctga

SEQ ID NO: 140818 - DNA, 337 bp, Zea mays
  Clone ID: MRT4577_59909C.1
gcctggagagaacaccatgaccaaccgggaggacaagcacgcagtttttctattttctgagggcggaccccggaggggcaggggctattcaactggagggggcatactgcaccgctatggcacctccaggccttccaaagagtgacattttgactaactcttaggttggtaactgcaaactgagttcacgatgcttcgatccccgttgtcaagatgcgtaagacggggggctgggggaaggacactatgatgggaaatgacttcttctcggcccgcccgatctttgatcaccagggtccactctactatgccttcctattgagaaccggggaaaacc

SEQ ID NO: 140819 - DNA, 256 bp, Zea mays
  Clone ID: MRT4577_5990C.1
tctgcgggtcgattttttcgggtcagaccatgtgtatgtctgtcggtcttggtcctggaggtgtcgtcatggctggtgctgaggtgcgtacacactgatagtggtggtcggagttccatcgcatcgctgcatgctgacatgctgttgtacgtcctgtctagagcgggtccatcttccgtcctcgtgctgacgagtggtgtcgcgctcctgaagctagcccgagccagtcgccgcggctggttgatcaaggatttgt

SEQ ID NO: 140820 - DNA, 397 bp, Zea mays
  Clone ID: MRT4577_59910C.1
gggggggggggattaccttttgggggtttaattggcaggtttccaacagcccccataaagggaaaggggggcgcccaaaagtttccctttttggccaaacaataaatttttttcccgacaaaaaataccccccgggaggggggtttaaatttttttaaaccccaggagcccttggggggggtttttcccccccttggaaatccgggatttttttttttaaaacccagggaagtttaagcccccccattttttttgggaattccttcctggggaaacccaattttttaagaacctcttttgggggttttttgggtggcccccctcctttggaaagggggggtgccattccccaattttttttttttaagggctttggggggttttaaaaattttggga

SEQ ID NO: 140821 - DNA, 329 bp, Zea mays
  Clone ID: MRT4577_59911C.1
aaaagaaacaatatccacatttttttcaagcatattgcatccaacacataagcttttaacattaaacatgattcataatcctttataacaagggaacaataaaacaagttgtagttcctattaatttctacagcaggcataaggttaaaagggggtctaaagttttgggagatccatcttcaggatggttgacaccaaccccctagcaggcattcttaagggggggtcatctggccatgattgatgcttaatatttggcgaaggagactgtttttttctgataaggactttttaaaatctgcaatctcaggcgattgattaacaatggt

SEQ ID NO: 140822 - DNA, 315 bp, Zea mays
  Clone ID: MRT4577_59912C.1
cgttcttgtgggttcaggcgtatgtccgaaggtttctgcgcctgagggcacaagcgccgacagtgcccaatgaaattgtcattgaggccatgattaaggggcttcggccgggaccatcagcgcagtactttgccaggaagccaccacatacgttggagaagctgttccagaagatggacgaatacattcgagctgacaatgactttcgccaaagaagggaggaagctttcaggttcttctgaaatgaccaggggcttttgaggaagattttatccgtggcatgtttgtgtaattcattactctgctcaaactgat

SEQ ID NO: 140823 - DNA, 543 bp, Zea mays
  Clone ID: MRT4577_59913C.1
attgggtacctcgaggccggccgggattcgcgtccgctatagagaatgatatgctgatgggaatcactcgtcgaggacttggatgacgcccaacatccttattgaagcacggtgttccctgatgcgactgaagcacatgtgaaatcggctctgacaaagcccttggctccgaacactgcgatatcggtcgcgtgccatttcgaaagtatcacgtcattgtccgcgagtgtatctcgctctattcagactgagcgtacccggacacatacacttgaatacctgtgtatcatgatagtgcatggacagcttcaggagaaatcctcacctgatcatcagcaactacaggagacgaaaaccctggatccgaattgctcgcacaaaaaatgggagtcactcaatagaactattgcccatgtggcaccagaacacgaggtacgctaactccgacctctactgaaagaaatttgagtatcactaccacttctcgcgacacttaaccgctgactagattgcaatgaatcatgtcgacttcatcatcaccag

SEQ ID NO: 140824 - DNA, 276 bp, Zea mays
  Clone ID: MRT4577_59914C.1
accccgcagtttctaccaggcaggcgctgctcaagacacgggtgagatcctccgccgaaggcgcggctacgcctcctcgcccagcccggagcggaaggtggacatcctgggcgctgcggacggcatcgggcagccgctctccctcctcatgaagctcaacccgctcgtctcctccctcatccctctatgatagcgccgggacccccggcgacggggccgacgtctcgcacatcaactcccccgcccctgctgaaggcctacatgggggacgaccac

SEQ ID NO: 140825 - DNA, 283 bp, Zea mays
  unsure (1)..(283): unsure at all n locations
  Clone ID: MRT4577_59915C.1
ggggggggccgtccttaattcccnttgggggggaggggcctctctccctccctcaccttcaatccgcactcatggtcttctttttggtcagcttttcctcgggggggggctctccagggggggggggggggtctcctactttctacccttcctttaaaggggttggaagatgatcggcggatggaatgggaaggggggcgccaacggccttgggcaaggccctcaggcgggggaaggaggggggggacgtgggggggatttggattctggggctgtggggtgg

SEQ ID NO: 140826 - DNA, 381 bp, Zea mays
  Clone ID: MRT4577_59916C.1
atgggacatcatggtgaggggagggtgcagtgtcgtgcaggtacacaggcagagcatcaaggcgacgaggcggtgcgtaactccgttgttgctatcgacagggagggaggaggaggacggttgccggcgaagaagccaccgtcgttgtatgccagtgaaggggggagaagggaccgacgggcagggcctagtcaacaaccacggggagtgaaggggctggcaggcgggccaggatgtcaacgagagggagagcgcatgggcgctcgggcacgagcgctggcgggtggggcttggctagtagtggcgaagcgggagcacatgcatgggctggtgatcgcgcgggaggaagcgggcgtgggcgctgggccggagtcggcctag

SEQ ID NO: 140827 - DNA, 483 bp, Zea mays
  Clone ID: MRT4577_59917C.1
ggctgctagatgaattgtaataatcaatgtctggggttggtacaatggcatataattgagctcccaatggtacatacacgatgatacatataaactcaggcacctatacctactacaaggcactaccacagctgaaacagtgcacaacaatggcagaaaggaaatgacaactcacgctacacattctgctaagggcaataattttacaacttggctggaatgccttattgtgcttctgacaactgatacgaatttcagccaagttgtaaaattattgcccttagcagaatgtgtagcgtgagttgtcatttcctttctgccattgttgtgcactgtttcagctgtggtagtgccttgtagtaggtataggtgcctgagtttatatgtatcatcgtgtatgtaccattgggagctcaattatatgccattgtaccaaccccagacattgattattacaattcatctagcagccagattcttgtc

SEQ ID NO: 140828 - DNA, 309 bp, Zea mays
  Clone ID: MRT4577_59918C.1
ctgtcctttttttttttttttttttttttttttttggttttttgtttttttttttttttttccccatcataattacaaaaccaattttttcgaaccatgccctttgttcttttaaagcccaaaccattggccatgggatttaaaaaaggaccggggaaaaaactttttggggggctgtaacaattccggcccacaaaaggttccttatgtccccgtttattgtgggtaatagaaacgggtaacttttggcaacccccaaataaaaaataaaaaagggttcattttgggaaaaaaaaaaaaaaccacttt

SEQ ID NO: 140829 - DNA, 275 bp, Zea mays
  unsure (1)..(275): unsure at all n locations
  Clone ID: MRT4577_59919C.1
ccccccggggggtttttttcaaggcaacgggggaccaaatcattttttaaaaccttaacgacgacgacgaacaacgaccaagcacacaccatgataacttaacttaactggggggtttttttacggaccgaacgaaatctgaaaacgggggacgggttccttttacccatgagaggaaaggggcagggggcacttgtgcccggatcggcaaaactaaaggggtcctccgacacacaggggggggggggnggtttttttgcaatatttcatagggg

SEQ ID NO: 140830 - DNA, 253 bp, Zea mays
  Clone ID: MRT4577_5991C.1
ccttctctacccactcttcctcttacacatcatttcacctccacaatctctacatctccttctatctacaatacatttcgaaagtttcatacaaacctaccactatcctaaaatactctacactctatcctaccatactccaaaaacacattaacactctacaacttaaccatcacatcacatacttctactaataaactcccaaatatactaaccataccaaaactatcttactatttacattcaattactt

SEQ ID NO: 140831 - DNA, 213 bp, Zea mays
  Clone ID: MRT4577_59920C.1
aacgacaagaccatacgggggcgcttattggttttcaccatgaacacaatagctacatttttgcaagagcacgcattggtaacgctccgtcgatcacaagttttacgagcttttaagcttaggccttggacacggggcacgcctttttggagaacctgacagggttggtccttctggggtccacaacgacggggcacgtaacgtgcgccctgg

SEQ ID NO: 140832 - DNA, 329 bp, Zea mays
  Clone ID: MRT4577_59921C.1
ggacgggcccaccgaaattcggcacaaaaaaaaggggatacataagccccatttttgatccctccagaggtaaacattattagcaggctcaagctttaagttggggggaggaaaaacagtttttgttcctgggcaaaagctactagcttacatagcacaggtgggcaaaaaaaagtttgttcgttttcaggggatcattttaaggggacttcacgggggcccccttgatgatgtccataaactcaggcttcaaagaagctcccccgacaagaaaaccattgacatcggggtgggctgttagctttttggagttcggaacaattaccaag

SEQ ID NO: 140833 - DNA, 167 bp, Zea mays
  unsure (1)..(167): unsure at all n locations
  Clone ID: MRT4577_59922C.1
gggggggggggggggggggggggnnnnngtctttncggtttttgttaaagcccaacctggttaccggactcggacccctataacgccgccaggggctggaattcccctctaagtggcgcgggcgagtgtttgtggatgaagcatgaggctctcctagaaaaaggaag

SEQ ID NO: 140834 - DNA, 373 bp, Zea mays
  Clone ID: MRT4577_59923C.1
aacgggagcaggggactacgaaacaacaatatctgggaatctttcagcagtttcagcaccgagtcaaaaaggggggaaaaagaaagaaagatatcggaccaccaacctagaaaaagataacagaccaccacataataaggctggctgctgccaagccaatttttacccaaggactaagccggcatggcatgggttgcaattgcagcggggattgccaaaacccttcataatccttttttccggtaattttgtatggagcagcagccaggcactgatcaaacacacacatccagcaccaggattgctttgcgggaacagccaacccccaggaagggagtcctcatgtccccagggacactcccaaccttaagcc

SEQ ID NO: 140835 - DNA, 489 bp, Zea mays
  Clone ID: MRT4577_59924C.1
aagcgtctagcatccgagcacagttaacataagacgtggatcacagcttaggactacatagcctcgtaacatcgtcacatgatgggatattatcgctaaaatctactaaaggcactccaagagtgaattctgtacagtagcaatagacattctcacatggactcgagcagacgtaaatacacttgcgtcctgcccgtttagaagggctccacaagcactcggaattcgacacctgcgtaaacagcatgaacgcctagcgtctacttcaatcctaagaagcgggatgtattgcggcaagacgctatgacctgaacggtgctgaagacttaatctgacccgtcaacaaaccaactgccagatctagactgatagtgttctcagccttaccactcctatgactagtgatcatcaccgagcgccgcacgctttgacatcttctcagcctgaatactgtgaatcacagatccgatgtgggtaaccttgatcaga

SEQ ID NO: 140836 - DNA, 478 bp, Zea mays
  unsure (1)..(478): unsure at all n locations
  Clone ID: MRT4577_59925C.1
atggntgatccttagtgaacctgcgcttagtcatgccgaagaaagaaagccgctggagacactactatcaagataaccggcatgcccttgccattggtgcatactgactaggccaatgactccaggacaatgctacatgcaccgggagaggctaggtgagtaccatgatagagcaggcctgctagaagcataccatatgctgatctgtgcatgacatcaccgatggatgcacctgattcgccattgtgctcccgggtctcactcgtgtaccggcccctaccgtcgctgaagaggaccaatgacagacactggacaggcttacctatgtctctctatatttacccctagcttgatgccactgtgctcataactgtgatcagtacttaagcgaaactccgtcgcagatgcactcatctaatactcttacatgcttgggtgtaagctctgatgggcctgctgtgtgactcaccatacatta

SEQ ID NO: 140837 - DNA, 1421 bp, Zea mays
  Clone ID: MRT4577_59926C.1
cgggcttttggaaagactgagagaaatgaggttctccagaagaaatgtggcccatatacagactcatacaagaaagctattgagcaactgaattctggtcaggatataatggttggagattgcaactatttggtgtgggtatcttatagtggtcttggtaacaggatcttgactattgcctcagcatttctctatgccatccttacaaacagagttctacttgtagatggagataaaggcactgcagatcttttctgtgaaccattccctgaaacttcatgggtattaccgccggatttccctattactaaatttaagaacttcagtattggctcccctgagagttacggaaacatggcgaaaactgaagctattcattctgatggttcttttaagggtcctaaacctgcctttctatatcttcacctggctcatgactatgatgatcatgataagctttttttctgtgaacatagtcagcaacatctccagaagatcccatggctgatcttaagatccgataattactttgtaccttcgctttttctgatctcatcataccaagaggagctcacgaggctgtttccgcagaaagatgttgtcttccatcacttgggacgttacttgttccaccctaccaatgctgtgtggggcttgattacaaggtactatgattcttatcttgccagagctgacgtccggttaggtatccagatcagagtcttcgatactgaaaccggtccatttcagcatgtcttggatcaggtccttgattgcacactgaaggaaaaatactaccagagatcaacgcgcaacagccaattatctcgacagggggggagggaggtccattttttttctgattacttctttgaactcaggatactacgaaaggatcaggaacatgtactgggaacatccgactgagaatggtgagatgattagcttccatcagccaagccacgaggagcaccaggattcagacaagacaatgcataacatgaaagcatgggcagagatttatctgctgagcttatctgatgctatggtaacaagtgcatggtcaacttttgggtatgtagctcagggtctgagtggttcgaagacgtggctgctgttcaagcctgaaaatcgcactgcgcctaatccaccttgccgtcaggtcatgtctatagaaccgtgctttcatgctccgcctttctatgattgcaaaactaggaagggaactgacacagggaagcttgttccacatgtaagacactgtgaagatatgagctgggggctcaagctagttgatacaggtgagctgtagataaccagatgcggtgttttttttttctttgtataattcatatatgtacagtagaaccgaatgctttgtgctgtggatttttcagtaatataggttcgggtttgtattt

SEQ ID NO: 140838 - DNA, 1087 bp, Zea mays
  Clone ID: MRT4577_59927C.1
cctgcatcctctcgcgggtcgcctccaacacgcggcacacgaccacggaccacctcgccgccaccgccccgtccgcgtgtcaccgacggtcgacggcgaccatgcttccctcattcctctcgtgcgtggcgtcccctctcctcaccaccgcatgcaccccgaccgcctcgtcgcagcaggcggctgccgcagcccctcccctgcagtcgctgaggctcccgcctcagccagggaacaactacaggcccgtcgctacgacgctggtggctgcggccgcggcggggctcctgctgctgtccccggcgacggcgccgtcccgcgccgaggcggagttcacagtgtactatggcacggcggcgagcgcggcgaactacggcggatacggcgggaacgcgagcaagaaggacacggcggagtacgtgtacgacgtgccggaggggtggaaggagcggctggtgtccaaggtggagaagggcaccaacggcacggactcggagttcttcaacccgcgaaagcgggcggagaaggagtacctgacgttcctgtccgggatccgcgcgctggcgccgctcagcgccgtgctcgacaacctggcgctctccgacgtcgggctgctggaccagatctcgtccgccgacgacgtgcgctccgccgagcgcgccgacggcgccggccaggtgtactacgagtacgaggtggcgggcgccagcgcgcacagcctcatatcggtgacgtgcgcacggaacaagctgtacgcgcacttcgtcaccgcgcccaacgccgagtggagccgcgacgaggccatgctccgccgcctgcacgagtccttcaagaccatccagcccggcgccccgccaccggccacggagacctagctccatctgagcacgagcgagaaacctactgagcgattcgcgatgcgttgtaattgctagtaaaatcatcagttttgtataggctactctgcctttttcctcagttcctctgccacggagcttggcctactcattttcaagtgtaagtgtaaactttgatgtatacacgaatgactccagacagttttgcaaaaaaaaaacccacgcgtccg

SEQ ID NO: 140839 - DNA, 466 bp, Zea mays
  Clone ID: MRT4577_59928C.1
cgccatgatcaacgggtacgcgatgcacgggcgcagccgggaggcgctggaggcgttcgggcagctgcgggcgcaggggctctggccgaccgacatcaccttcatcggcgtgctgaacgcctgcagccactccgggctcgtcgacgagggccgcgcgctgttggcggcaatggaggaagagtacggcatcgtgcccaaggtggagcactacggctgcatggtggaccttctgggccgcgccgggcgcgtcgaggaagcgttcgacctggtgcggagcatgaaggcgaagcccgacgcggcgatgtgggcgtcgctcctcggcgcctgccggctgcacaagaacctggcgctggggcagcgcgtcgccgactacctcgtggccaacgggctggccaactccggcacgtacgtgctgctgtcgaacatgtacgcggcggcggggaagtggcgggaggtggggcgggtg

SEQ ID NO: 140840 - DNA, 642 bp, Zea mays
  Clone ID: MRT4577_59929C.1
gtacgctctaaccctcccacctactccctcgccgcgccgccgcgcagccgcgagtgcagcgaacatcggcgccagtgccacgcttatggccgccacctcccattccctcctctctccggcgcccacctcgccactccgagaacgactcctctttcccgcagttcatgtcgaagtcctccgatgtctttcatctttccaggccgtagaggcggagggataatagatggtgtcatcggatgccgaagataataatgagatcaatctgtgagaagggaagcttcaaggacagcatcaccgacagcgtgaatggcttgacgaagtcaatatcttacgaatgacatctgtacaattaccatatcatggacaaaaaagttcatgcatgcattctctgcgggcaggtgattgataacaagatgtggataggtatattatgttgtatagtcttgataaaattgagaagaaaattcaagatgcaaaactataaagaacgaagaataggagaagatgtgcacatgaacattgaggtagctctttaagagaaactcgtgatacctctgaagaacatatacactggtataacaagataggactatattgtgagagatattagatggaatagcttgaatagtattgaataaatga

SEQ ID NO: 140841 - DNA, 368 bp, Zea mays
  unsure (1)..(368): unsure at all n locations
  Clone ID: MRT4577_5992C.1
ggagtcgtgnaagctnnactggggtggggggggggggcctccccctctctcgctcgtctgtcctgccctttccacttgcgtaagaacacactttggatgaacggccggtctccttgaccttttttctgtctgcctcttctctgttttttttctgcggcggacgacgccnngttgtgtggggggggggggtgtnnccnntccngactcctttgcttccccctcgcgtggggggcccacccgtgctgatgatcttcgcttgtgtcttggttgctcgctgctcccgtccctgcgttcgttctttttttggccggtctgtggtgtgtcccgcttgccgcccggctctgtctgcgcctccttcgcgctgctgt

SEQ ID NO: 140842 - DNA, 1713 bp, Zea mays
  Clone ID: MRT4577_59930C.1
tgggtagcccacgcgtccgcccacgcggccgcgcccggcgccggctctccgtccacgctgataccgatcgaactcccggcgtcccatcagggccgtgcgatgccttcaccctcgttgactcggctacgaccaggctggcccaggcgatggagatcggcaacgccggggagtcggtggacgccaggcttaacaacagctaccacgaagagcaattgtcggttcttcacttatgaggaattgtatcagatcacaaattgcttctcatcacagaacctgctaggggaaggtgggttcggatcagtgtataagggttgcttggctgatggaagagaggttgcggttaagaaactgaaagatggcggcgggcagggggaacgtgagttccatgctgaggtggatattatcagtcgtgtgcatcatcgccatctagtttctcttgtggggtattgcatttcagatgacgagagattccttgtctacgattttgtgcccaacgttatacttctctttcatcttcttggacgtggagtaccagttttggagtggccagctagggttaaaattgcggctggttcggctcgtggaatagcctatcttcacgaagattgtcaacccagaataatccacagggatataaagtcctccaatatcttgctggataataactttgaagcactggttgctgattttggtcttgcaaggttagctatggatgcttgcactcatgtaaccacacgagtgatgggaactttcgggtaccttgctccagagtacgcgtcaagcggcaagttgactgagagatctgatgtattctcattcggtgtcgtcctcttggagcttattactggtagaaagcctgtcgacgcatcaaagccattgggtgacgagagccttgttgagtgggctaggccattgctcacgcaggcgcttgagaccggcaacgccggggagctggtggacgcccggcttaacaagaactacaacgaagtcgagatgttccgtatgatcgaagctgctgcagcttgcattcggcattcagcatccaggagaccgaggatgagccaggtcgtgcgggtgctcgacagtctcgctgatgtcgatctaactaacggcgtgcagccaggcaagagcgagatgttcaacgtcgcgagcacggccgagatcaggctgttccagcggatggcgttcggcagccaagatttcacgacggatttcagccagtccagctggaacaacagccagagcagaggtcttgatgcctctggttcaaggccattgtaatcctcctcctcgttgtcgtcgtaaatttcgtagatctaactagctagggtgtttcgtgatgatttttttttacctcgtgtaattctttctgagtggatcaatagtgattgttctttcgccatccctgtcttctacccactaacatagatcatgggttgagatctgcttgcttgtgcaaatactcgttgaccgatgaagagagaccgctgcgtttagtccctactagtgaattgctgtatcgattttttttctttcaaggttttgcaatagtcatgtaatcagcagttcgctttgaaatcggggttttggcaagaaactcttagttcgagttgaacttttgggcaaagtttattcagatgtgcgcctttcaagttgaaaaaaaaaaaaaaaaaaaaaaaaaaaaaaaaaaaaaaaaaactcgagggggggccc

SEQ ID NO: 140843 - DNA, 855 bp, Zea mays
  unsure (1)..(855): unsure at all n locations
  Clone ID: MRT4577_59931C.1
cattgggaccctcgaggccggccaggtattctcattcggtgtcgtcctccttggagcttattactggtagaaagcctgtcgacgcatcaaagccattgggtgacgagagccttgttgagtgggctaggccattgctcacgcaggcgcttgagaccggcaacgccggggagctggtggacgcccggcttaacaagaactacaacgaagtcgagatgttccgtatgatcgaagctgctgcagcttgcattcggcattcagcatccaggagaccgaggatgagccaggtcgtgcgggtgctcgacagtctcgctgatgtcgatctaactaacggcgtgcagccaggcaagagcgagatgttcaacgtcgcgaacacggctgagatcaggctgttccagcggatggcgttcggcagccaagatttcacgacggatttcagccagtccagctggaacaacagccagagcagaggtcttgatgcctctggttcaaggccattgtaatcctcctcctcgtcgtcgtcgtaaatttcgtagatctaactagctagggtgtttcgtgatgattttttttttacctcgtgtaattctttctgagtggatcaatagtgattgttctttcgccataaaaaaaaaaaaaaaactaacatagatcatgggttgaaatctgcttgcttgtgcaaagactcgttgcccccccccaccacagaatgntgcgtttagtccctattagtgagaattgctgtatcgattttttttccctttagattttgcagaagtcctgtaatcagcagttgcttttgaaaccggggttttggcaagaaactcttaattcgaaaaaaaaaaaacccaacaaacc

SEQ ID NO: 140844 - DNA, 205 bp, Zea mays
  unsure (1)..(205): unsure at all n locations
  Clone ID: MRT4577_59932C.1
tncacacgaatttgccttgtttttaaccttgggaaattttaccgctgttgggaattaacttgttcggcccaagccggcagtttcagccaagttggcgcaaaagaagggccttcatgccggtgctgggtggaccaccattaagaagaagggaacttcaagggtcgtgccaactttctttaacccttttggggattaacgcattctt

SEQ ID NO: 140845 - DNA, 150 bp, Zea mays
  unsure (1)..(150): unsure at all n locations
  Clone ID: MRT4577_59933C.1
atccgtcccctactctcccgatctcccgtctccgtcgnntcgnntctgttcctcanctcgncgnnagccatgggcaagatnaagatcggaatnaacggtttcggaaggaacggnaggntcgtggncagggncgncctgnaaagcgaggat

SEQ ID NO: 140846 - DNA, 304 bp, Zea mays
  Clone ID: MRT4577_59934C.1
attgaccatgacaaacttaatccaatacgattaggaaagaaaactagaaatgttttttgacccttacagggattggatggggggctggaaacatgtgattacaatcttggtgcacaacaagagaataggccaaaataccctgcatttgtgaattgttacaaatgcccattaaatcagaacagataatcattcgtctgattccagggatttatacctgtagctttttgccctgtacttgaaaacagctcaactgtataatgcactcatcgctattaaggatacttccacatatgtgcacactgtt

SEQ ID NO: 140847 - DNA, 364 bp, Zea mays
  Clone ID: MRT4577_59935C.1
ctctatcgctgattacacgccagaggagttgacgatcgtggtgagtgcggatgaaaagcatatgacgaacaaaggcaccagtatcatgatccgtgaatactactgagaccagtatcatcgctacaaagtcaggatctacggatgcagtggcaccgaagacctgtgaacgctctctcgatcccgaacggaatgaggaattaaacatggaatgcaacgggtgcggtcgttcgctggcgtacgagccgatcgtgaaggagtactgacgcgccaacccgaactagtcgatgagacgtacgcgacgcttaggtaatgctgtcagcctgcataactcgctgtgacgagtaccagcacttgatgaaggaca

SEQ ID NO: 140848 - DNA, 1081 bp, Zea mays
  Clone ID: MRT4577_59936C.1
ttttgaaaatgcaaagcctaatagaatccggtgggcatcattaaattgggtgtcgtgtggaaaccagattcaaactggtgccatgcccggcgagaaaagatgctaggttgaagagacagccgttcagctttctcaactgctctggccggaagcaagagctgtcagattcagtcgtgactgatgaagacgaagctgcgagggggcctggagcaagagagacaccgcttaaaggctacacctctagccagcaggaatcaccatacaccatgcgacgtgtcgattcgaaaccaacaacggtccacggttgcgaggatgacgcccggagtaccttgacgtcaagcagatccacggcagatgacctgacaaggacgtgcaggtcggagactggctacccaaagggtgtgcgtgagcagggccgctctgatggcacgcagaggagcctgacctacagccgaactgcttctcgcgaacgctcaagcttcagaagaagctgctgtcttctggcgcagcgcacaccatctgtctgagggtccagccacataacaagatggatttcctgcctaagaaagagttcgatacgtacttctgcgcgtatgagccctacgagcagtgtccaagatcagattcaagagctacttacagttcaagagacgatgacttgtggagcaagaattcacgctttggctcgaatctactctgctggagagccccaaaacagtccatgtaatggaggaaagaacgagtgaactgggtggaacaaatcgattctgctacgagattttaccaattttgcccgaagctggagacatggacaccacccgcagctgcggggacaaattttgaagggaagtctgggaggggtctgtgctattcttgatcttggtaggcagctgaggattgaggaactatttagtgatgttttcttggaaatgcagatcctttataatgctagtgggcagttgtacagcgcgccagcgacgaaaccctgtgaattgttctgttattctgaattttgtaggacgatttgatgctctctctctgaatttacatgatctttttattagctgccccccccaccccc

SEQ ID NO: 140849 - DNA, 304 bp, Zea mays
  unsure (1)..(304): unsure at all n locations
  Clone ID: MRT4577_59937C.1
gcaacaatcacaagatttttaaataagcacacatgctkgacatacaactatgatcagagaccagcmaacatagtagagtcgaaccaaaaaacagctakactcaacaacagaagcatgatgctcctcacggncntctcgnccccgagtactcagcgccgtkntttctttcatgacagcgcatcggccacagcacgacacnatgtcgtgtgtccyataccagncacatgcacgncgncgtasacacsgcgggncacgaggcgatagccagcacacccagcctctgcgcgcagcgcaagccacatcg

SEQ ID NO: 140850 - DNA, 600 bp, Zea mays
  unsure (1)..(600): unsure at all n locations
  Clone ID: MRT4577_59938C.1
accggcgtgnccgcccgcacaaccaaggggatagggcggggggagggggggatctcgcnntttcgctcccgctgccgcatggcgcacnncgcccctcctcatgnacaccccaactagtggcaccaccagnncccccttctctgttgaccctccgcgcccggtgacctcnntgctgagctatggatgcggcctgtatagggcccccgacccatggnnatgtaacnnttcgaccccgctgnnccgccttccccgcctcacnggcgggnnggtatggtgtgtaccaaacgggcatgnnntccgcggnattaacatnnncaagggcncnntggtgcnnntcgcgcctcntnncctccagcnnnctcttcatnncggcgccccagctttcatttattcatagaaagaaaggggatctcatagaaagggccctgcattccctccggtcgttctagaagccggggggtnntggtggctttatttccttatttatactgaagcctcntttgggtggggttgggcattgataaaccaatgatttgttggnagaaagtttgccaaattttcgcaagctttatgccattttgcacccggctaattttgggt

SEQ ID NO: 140851 - DNA, 428 bp, Zea mays
  Clone ID: MRT4577_59939C.1
gaattatccgggccgacccactcgtccggccggaacgagatcgctagcatactgagctttaggcctacaggatgaagacgttcgaccggggaccggtcttcttcctccgggagtggaaacgcaactcgcaccttcctcacgctgttcatcatcaccggcttcatcatcaccaatatgacgaccaacttcaccgaggaggacctcaagaactccaagttcgttcaggaacacaagaagcgctctccaaccgggaatcgtccaaatcgcctgctgatgaaaaattagcccgctatttatcttgtctttattcttatctagatgcgtgcactctattgtaataatgcaataataagcaattggattgatccaacaatatccggctttttgatttgatccgattcccttacataatatgttcctcttttctt

SEQ ID NO: 140852 - DNA, 736 bp, Zea mays
  Clone ID: MRT4577_5993C.1
ggccctaggggccttttttttttttttttttagactgaaagtaataaaaggaaacatatatatatatatatatagtttatttgctctaaatgtttgattactgaacatgaacctaagtatagtgtatgaacttctaacaaaaaaaacgtggggataaaagtcgccaagattggggaaaaaacgaaaaacaacggaggtcccgggcagcactgtataaattaattaagctccactcgatcaatctgtacacatgggtccggtccgctgtggcgatgttcgggctgttgctgcagcaaagtcttgatgcctacacataacactgccattaattaatcctaaacgaccttagaacttaggtcgcactcgcatttgatggtggacccgcatcttcggccgccggcgcgacctgcgtggccgacggcagggcgtcggccctccctccccactccctgaccctttcttcggcccgcatagcctgcttctcccacttggtcctgtacgagatgaacacgaggatagccgtctgaagcagagtcccgagcgtcatgcccagccagatccccatcgcgtccatgcctagcttgaagccgaagagcgccgcgagcgggatgcctacgaagtagtagctgccgatgttgacgaaggccacgagcgcctgccatcccgccccgatggccacgcccgagagcaccggctggacgctgttgaggaagatggagccggcgaggacaacagc

SEQ ID NO: 140853 - DNA, 377 bp, Zea mays
  Clone ID: MRT4577_59940C.1
gatgtagttgttgagtaactctgtagtatataccacaatttttatttttggccccaatgatacctcaaagggatgggtgtaaactgaaacattaacattacctgacgcctgaccatgaacacagttccaaaaaaataatgttcgggtataaaaagagcaccgtgcaatgattaataaatacagccttcttcttgattaaataaaagccattcatctattttttccattgcaaaacaaacaaacaaacagacaagaacaaagttaatttggatcgagtatttcaatccattaaccggctgtccttttcagcaagaaaaacccttacctttaggaaacgagcaccgtcgcgcaggccaccgtcattctaggagttgccc

SEQ ID NO: 140854 - DNA, 1357 bp, Zea mays
  unsure (1)..(1357): unsure at all n locations
  Clone ID: MRT4577_59941C.1
cccggttcccaattatcattttttggaactggnaatatttggaccttttgtgatatttggattatttggatttctctgggtgttggtgtggataccggctatatctggcacgccaggtgaacatgcacagatatcagcatatgaactgaagtatataaccaaaggccagaaattggtgaaaccacaaattggaagtgaaaaaacaaaaagtttccccctttcagtaaactgctttccaaatggccaacatgggctttgatttgtgcaaacgccatgcatagctggggttattttgttatcctttcatggatgccagtctatttcaaaactatatatcatgtcaatttgagagaagcagcttggttcagtgcactcccttgggtgatgatggcagttttaggctatgtggctggtgttgtatcggacatgcttattagaaatggtacagacattactttaacacggaagataatgcagtcaattggctttctggggccaggtattgctttgctctgtctgaatgcagcaaagagtccaatcattgcttcagcctggcttacagttgctgttggattgaaatccttcggccactcaggtttcttagtaaatctacaggagattgccccacaatatgctggagtcctacatggaatgtcaaatacagctgggacatttgctgccattctaggaactattggagcagggttttttgttgataggatgggttctttccgtggatttttgatattgacgtcgctcttatacttcagcagtgctcttttctgggacatctttgctactggagagcgtgttgattttgatggcactggctagcaactcagaggaactctgcggttttctgtccttaaaacacataatgttgattcaggacagtgtttttaccgccaaccatcaagaagttatttgcacctgatgataaacaacttcagttacgactgtacagtattgggttcaactttttaaagcacgcagtgagtttatcttggatgtcgagtatcagtgatagataaacacacgctgtgagtttatcttggaagttgaatatcagtgatggataaacacatggaactgtctttatagatcgttttagattttcttggagggatagtccctgacgatgtaacatggaataaacaacaggcaggatgccaaccattaatggcgccgaaagtagtacataactgaaactgatttgcagggtagttaggaaattggaatcccaaccattaagggagtatgggtttgaaaaacatgtgaatctggtgtacatgctactgaaagttgtgccctcgttggctcgttataacctgcaacttttttacggtccnnnnnnnnn

SEQ ID NO: 140855 - DNA, 473 bp, Zea mays
  Clone ID: MRT4577_59942C.1
tactcgcgtgcgtgcacaccagccgaataggggggactttgaccgatcctggggtgctgcagccatggggacctccgcggcgctctgcaccgtcgccaatcccacccagctctaccgggcccgcgcttcgctgggcaagccggtgaacgggctttgcctgagcatgggccgacagcgcgcccagcggaccattgtgtgccacgcggggagcaggatctcctcccaccgggtccccgacatggagaagcagaagctgatgaacctcctcctcctaggcgccatctcgttgcccaccggcggcatggtgcgcccctacggcgcctacttcgagcctgccggctccgggaaccccagtggcgggacctacccgaaggacaagctgggcaacaacatcactgtggaggcgtggctcaacacgcacgggcccaaaaccgcacgctcgagcaggggtcaagggagaccccacgtacctg

SEQ ID NO: 140856 - DNA, 336 bp, Zea mays
  Clone ID: MRT4577_59943C.1
gggttgcaaatcgaggggacctcaggcaaaggcccaattttgacgaagccaacgggttccgaatttacgggtacaaacaggttcagcctgacggcaacaactgttggtccaaggaaccaaacaatgcaagcggccccggcccagcgggggcctgaaacagtcaacaatccttgcccgtccccaaaaaaaactaaccgggggcaaccgggaaaaaaaacttgaatccctatcttcgcttcgcacccctagggcgggcgggttcggcttttaataatcgggggagggaagctgttcctgggtgtgggagatgaaaaacacacttttgaaataaccccg

SEQ ID NO: 140857 - DNA, 315 bp, Zea mays
  Clone ID: MRT4577_59944C.1
gcgaaggcgaagacgcaggcgccgagccgccgaccccacggtcccccaccccactcccgccgcgcctctccctccgcgtttccagatccccccgctcgcccgtgccgcggcattggcaccggcaccccgccgagcgcccgcaatgcgagccttctagcttcccgtagcacggacggaatcgcgagaggcatgcatcccaagcccgagggcggcgaactaacggggccgccgcggaggcgggctccccgcggtccggcaacttccggcagcggagcatgcacgccgcccccgcggatccggaggcggcgcgccggg

SEQ ID NO: 140858 - DNA, 409 bp, Zea mays
  Clone ID: MRT4577_59945C.1
gggtaaaaaatattttttttttgccaaggaacaacagggtgaggctattaagaagaggatatcactaaattacccaaacaaacaaaaggaattttaaaccaaagaaaatggaggcggcgtgaaataccctgtcccaaactgacttaccatggagttgttggccaggcaacaagatgaagcaaagagacccaagttgtagcgggacaaatgggggaccggggcccacttccaccacctgaccagactgcgcccactttattgagcccaagtcacttagattgcgcaccgggcactgctatagctactacacacacactggcacacacggagagatggagagaaaccggccggtttgcgttttactgaacaaaaagcgccagagcgcgcgaggcgactgggaagccacgcg

SEQ ID NO: 140859 - DNA, 323 bp, Zea mays
  unsure (1)..(323): unsure at all n locations
  Clone ID: MRT4577_59946C.1
tntnnttctaaccaaaaacttctaaaaacattttcatgctttcaaaaggcatgagcctataaagccgcgggggtctacttctgatctacgcgcgttcaatacaaacactatacaaattcccaaacatttcttcggccattccttcttcctaaaagacctcaatgtgttccccaatttgccagtttcatcatcggaaaactggaaattaaatcttccacaacttactttgcagacaattataaaaaaaaaaacccaattccgtatcaacatgactttaattacagaggtctaaggcaataatgccccggtatgcgatctttatt

SEQ ID NO: 140860 - DNA, 337 bp, Zea mays
  Clone ID: MRT4577_59947C.1
ttgcgaggcactgcaagcagtactgataaaactgaaataacctagtttacgctgattactgggtcgattatccaaagaggcctgcagacctgaactatatatgcattcttcacgaagattacgtgatacaactaatgaggactgaattggacctacgtgtgctcactgggggaatctaggctgttacggttggtacttaaaggcctacataacgtactacataggctattgcatactatatgcaatacgatgcaatataggaggccctctgattaaaccttgttggcttcaacgtggacaatcgttctataagagacctgcttacttactctttcat

SEQ ID NO: 140861 - DNA, 224 bp, Zea mays
  Clone ID: MRT4577_59948C.1
caaatttgatgttaatttcaatccacgtatttttcaagaaaattaacgtgtaggggggggaggatcaagttttttagaggatcctccaccatatggagcacgtatagcatatgccgcagggcatggccctccacatggaaatgactttaataatattaatcgacaacttcagcatcacagtgacccgaatctctttcaatagacatgcaaatagcatatgccag

SEQ ID NO: 140862 - DNA, 603 bp, Zea mays
  Clone ID: MRT4577_59949C.1
attcgtattgccgtcgagccttcctacccgatcgcagacgggcgagaaccctcctaaccccggcccaaccccgccgtctcccgccccaccgtcttcggtctgtgacagctacaacgagtgccccgccagcacgacctgctgctgcatctacgagtacggcaaggagtgcttcgcctggggctgttgcccacttgagggtgctacctgctgcgatgatcactacagctgctgccctcataactatcccatctgcaacacccagcagggaacctgcctcgcggccaaggacagcccactgtcagtgaaggctcagaggcgtaccctggccaagcctatcggtgctttctctggcattgcaactgacggcaagaagagcagcgcgtaaacatttgcatcacgacattcgtacagccaacggccatggtgattaacttctgcaaatgatcacctggtgatccacaatcgaaggcgcagcatggcgatagctatgctctctagtatcttctttataatagatgctcctgtacataatcctaaaatcgggttcggtcgtttacagaaccaccaaatttgcttttgcatatgtatatgtaaaactcagct

SEQ ID NO: 140863 - DNA, 622 bp, Zea mays
  Clone ID: MRT4577_5994C.1
ctctcttaaccctagtgccgtgtctgattctctctcgccgtcagtcccttcccggctccgaaccgctgactgagaataatagatggtcgcttcggccgatggaccggctatcggcatcgatctcatgactactgactgcttgcgtccacgcgcgtgactgcgaccgcgtcaatataatggccaacgaccggtgtagccgcaccacatgcctcgtacggtcgccttcacctgactctcgagtcgcctgcatctcgagcatcgcgtggcaggcaacgcagagtgcgatcatgacaccaccatcaacatctgtctgttgatgccaagacgtctcatcgagaggatgctcactgatgcgtatgcccatagtgatatcatggtgaggacctgcaaggacatgtctgagactggtgataatactatgaatgatgaccttcacgatgccgaagagaagcaccctgcggctgtaaacatctcctctatgaatcttatcgacatgcgtgagattgctgaacctataccttgttaacactatcaataatgctgcgatgactgtcgctgtctacttcaatgactcactcaatgataccgcaaaggatgctgggatgattgctgaccctaatga

SEQ ID NO: 140864 - DNA, 1633 bp, Zea mays
  Clone ID: MRT4577_59950C.1
ttgggtccctcgaggccggccgggagcgcttcctcctctttgtagctgctaccctcgaggccggccgggactgtagtctgtaacgtcgtcttcttactccccctatccgacgccgggacaggaatcagcttcccctccatgctccggctggagcaatatctccggttgctgccggcgaccagccacgctacagcgcccgcgttgatctcgggttactctttcctctccagtcctctccctcgcctcagtgccctccggctagcccgctcgcggcctcccccgctcaggggcaaaacgtcgagccccgtgcgcgcctcggcggagccggattctacggtaaagcgcgcgcccgagatggcccagagggaggtggcgcgggtggtcgcggatcaggcggtggcgcgtttgggcgcgcggctgctgccgtccgccgtgcctgccgacgtcgtcgagtttcgcaacgccgccgggaacgccgtcggctcgctcgacgtgcaacggggctctcctggctcgtcgattgatttcatgctgcagtcctcgcttcactgtgaagtcccgaacggtgccattgacatcacctcgattctcattttcctgaacgcctcgacggacgcaccacatttcctactggagctcatacaaggcagctcaacttcaatggtggtgattctggacctgcttccacggaaagacctcgcgtttcacccggactacctgcagaagtactacgaggaaactggaatggatgagcagcgcagaaagatcgaggagctaccgcaggctcgtccatacagatctccgtcactcttcgtgcgcagcgcatgctcgcctacagcaataatggtgagcattgactgtggacaagggggtgagaaagccttggaagagataatacatggacagttagcaaaggtcattcaggaggctcttcagacttggcttgacaactgtgttgattccaccatagagatggatgaggcggagagggactgcctgctcaagagggaccggattgtaaggtcgaaatcgatagaggttgacctgactgcaaaccttcccagaatgtttggtccggatgtgtctagtcgggtcataactgaaatccgcaaggcctttggtgtacaagagccgtaagtcgttcataaatacaagcatgtagttactttattgtagagaaaaattgttgtgagtccatgaaacccccttatttgaacaatcgaaagtatatgtgctaaagttgtgtatatattactaccaagtgctaactgagatgatgaaagtgagctatgcaggtgaagatgatcagttgttaggaccaggtttccaggaacagtctctcatcacagagttcctaagccgttcctgtcttcctgatgctaacatacccaataagcataagaattagctctgcctaaaaaggaggtactgaatggcggtgtgttttgctgcatcttgttttatgtatataaaactttggtgtatatggtgtacatattaaaaaaatatccatccatgttagatctactatcctttgccgctgtatgtattttgcaaagaacactctccatcaccatttttcgcaatgttcggatatggcatcataatagtattatgtgtacctgatatgttc

SEQ ID NO: 140865 - DNA, 306 bp, Zea mays
  Clone ID: MRT4577_59951C.1
atgaagagcaccactctgttgccgaccccagacattcattccattccactctctgcgggcggggccaccggacctacattgccaaccaccaagaagcagtgctttttcggcgagtgcaccatctgatcaggcgtgtggacctgccacgacctcctcaccatgtgcggctccactctgcatgaaccgctgtgcccgcgcccacattcaaggactccatcaagttctggtgcctcttactccccccctgtttactgtgggtagaagatccacttgagactgatgcaactccagcatgggcgcacgcca

SEQ ID NO: 140866 - DNA, 359 bp, Zea mays
  unsure (1)..(359): unsure at all n locations
  Clone ID: MRT4577_59952C.1
ggagggggtgagtggatgaaaaaataaggnggaagnaaaaactncaaagagggagagagncttcgcattccggttcttcctatatnanaggcggggccgggaacnnnactnnattacaacctacagtaaccttaaacattatntcattatgnagaaccataaagactnnngagatccagcagtttgtagggcgcgcttnnntgggcggtggntgggtgtggcagactaaaaaaagnaaagnnnnnngaaccnnnngganncntggntgcacatcctangacctccacattcaaaacattaaccacaagtgaatgagaagcttaaataaaagccaaaaacccattgttgaatatatccca

SEQ ID NO: 140867 - DNA, 524 bp, Zea mays
  Clone ID: MRT4577_59953C.1
aaccactatgccgctgcctgctgagtggcaccaaaggagccggggctcattcgaagaacaaaaaaaactacaggctgttttcatcggcaaacagggcccacaacggggggggccctccattttcaccccaaaggggaagcaggggtcttatataccacaaggggaaaaggggggggctgaagggaccctaaaacgaatagcggccgcagcgggggcggttttttcatgggaaacacgaaaaaaacaaccccctcattgccttaataaaaaacaaaacacgtttttttttccttcttaaatcccaggggggtagtttaccctttccgaactttctacgtagttgaccatcacgaccctgaccaacttttggtaggtcatatgacccttgccaaccacgggggccttgaggatcatcccaaccacctcctcagccgccagtttctctacgaggttgctcaaaagggcgcgcacctccgaaagagagaagaagcgggtgtggctcttgaaaaacacaataaacccct

SEQ ID NO: 140868 - DNA, 307 bp, Zea mays
  Clone ID: MRT4577_59954C.1
gaggcctcgcactatccgatgatgtctccgagcgttcttactatactgccaacttatgcagacagcgaggaccctaccataccgcaacagatactggctggcttgaacaaagatagcaaataaagaatacgagcattcactgctgaccctgaccctgactaaggtgcatccatctctctctacgctggaggcactacggccacccgacggtggtggcggccctcacgccaaacaagaactgctctgagcggaaagccaaccgcaagcaacgcaaaacctcggcggaccggcggcggagtatgacagc

SEQ ID NO: 140869 - DNA, 368 bp, Zea mays
  Clone ID: MRT4577_59955C.1
gtttcatacaatgcgcaacagagaacgatttatttctgagcaaaaatataaccacggggggctctatgatatcagttcatgggctgctacataaaccattctaccgcaatgcatacaagcccctatagccaccctgctagctccatactatcttaccaatagccacatctgtatgtggaaactcaattattaaactccacactatccaacatgcaatatcaaatatcaaatcaccattaacacctttgtttcttcaacattccttatccataatacataaaccacattttatgtaatgattgccttcaaatcataatggacaaataattactactacttgacttcggcaatcttacctacatactctt

SEQ ID NO: 140870 - DNA, 1041 bp, Zea mays
  Clone ID: MRT4577_59956C.1
ccgggataatcttaaataacgatcatcctcctctgtgtgcaaaacgaagctgccgtaggtagttgtattattatggaattgtgttttgattcctagtttataaacgttgtaaggtaacgtttctcgttggtagtagttgttgttggttataaacgttagttgttgtgaagcatatgagaatatgcctggttttgggtaatatcttaagaggtgcaacgttctccgtgggtgttggtacgagtgtggtttttcacaggtccggagacaagaaaagagccgaattagtgtaggaatggagatttctactttccgtagttgggttcgaacctgaagatggttttgtggtgtctgcttcgtctctagattatgcttcgtctccagaatccctaccctaaagagtgaaattgcgtagcttaaggtaggtgtttccccaatccgcgcaaaataaacgtaagggctgtctattggtaatagaattgaaagggtagaaggtatcaacccctcggcattgttggagaagtttaagtgggagtaagcattgcccccttacttgttcgttgtctatctgttctactaacctaacctgatgtctaccggaaaaaaaaaaaaaaaaaaggcccctatcgattgctatttttttgtctttcctttactaatactaactactaataacgtgcgtggaataacgagttttattttttggtctgctgattgaaagaggagtgttaaagcaattcgcttacgaaatcacagtccaaagcaaagcactacttactggtttagctcgtgttttcctttttgaagtagtttggcagacgcatcgattgttcgtggctggtcacacggctccggtgcatcgggccactctcaattgtgtggttccgaaaaaactagggctcttctcgtatgagcaggcttatcaaccactcagaatagggagcttccagcgggaagtccagctttgggacgttgcccctccctcggatgaaaatagatctcgtggagacgggcttgacaaaagtcagttagcaagcggatgtt

SEQ ID NO: 140871 - DNA, 296 bp, Zea mays
  unsure (1)..(296): unsure at all n locations
  Clone ID: MRT4577_59957C.1
gggctaaaaactgacttaaaaaccatgtagaaatgtgactcgccaatttctagccaaaaagcatcacccatgctatattatgctggtttgactactggggaaccgcccttcaccttgtgcataactaannnnactcttggcaaactcggaaaccggcaccacccctcaaaggggactagcttcatgatggccacccgacatgagccaccaaatgcctcgcagaatacacgcctacagtatattgtgccctataccggcttttctgaaagagctgcacagggggaccgtgggaacaa

SEQ ID NO: 140872 - DNA, 1917 bp, Zea mays
  Clone ID: MRT4577_59958C.1
tgctagactagtcctcttctagtcaccttaccccgtcgcttgcatctccccgccgccgccacgcgcccacgcttccttccgaacaaagctgtcgtgctgcctttcttgccgtccaactcaggcagccgtcctagtcctcgttggtcctcatctgctgcccttctacggtggaggagagaagaggagaggagcggagcggagatccagccgctttccggctgctttcttcttctaattgcggagcaagttccgtcaatactgcttgtgctgttgcgccaatttaagttcctgctgtccgcaaaaggagagcttccgcagctcctatggcaaagcctcccaatagcattggccgtagcagcatgccaagatcgaatgagggtttgaggctcatattttcggcagttataggtatcatgctgggttacctgtttgggatctccttccctacagtcaacataaccaagcttcacttcccttcgagtatcatatcctatattgaagacaggaactctggcatcacaacccagacattgttgaaccatgcttgggcatctgcaaacaatcgtaaaaagaatagctctgaatctaacactgatgaaattcccaagatttatgttcctacaaacccaaaaggtgctgagagacttccaccaggcattgtagtgtctgaaacagatctttatccccgaagactatggggtgatcctagtgaggaccttactagcgagccgaggtatcttgttacatttactgttggtattgggcaaaaggcaaatattgatgcagcagtcaaaaagttttcagacaaattcactattatgctgttccattatgatggtcggactactgagtgggatgaatttgagtggtctaaaagagcaatccatgtgagtgtcaggaagcaaacaaaatggtggtacgcaaaacgatttttgcatcccgacgttgttgccagatatgattacattttcatctgggatgaggatctaggtgtagaacatttcaatgcagagaagtacattgagcttgttcgaaagcatgggttggaaatctctcagcctggtttacaacctgataaaggactaacatggcaaatgactaaacggcgtggtgaccaagaagttcacaaagtaactgaggagagaccaggctggtgcactgatccacatctaccaccatgtgcagcatttgttgaaattatggcaacggtgttctctagaaatgcatggcgctgtgtatggcatatgattcagaatgacttggtccatggatggggtcttgactttgctcttaggaaatgtgtggagccggctcatgagaagattggagttgttgatgctcaatggattgttcatcaagcagttccttcacttgggaaccagggcaagtcagataatggaagagcaccatgggaaggggtaagagcacgctgcagaaaagaatgggggatatttcagacaaggctggctgatgcagagaaggcttattacttggagagaggcatcacgcccccgaattcaacagtagtttagatgaatacatgctcctcacatgccacggcaaggtttctgttgcgggaatctgctgcaaactggcatgttcatcgaagctgctgcaacccagggctacattaggggtcccacgaatcgccatgattgatcttagtgtcattcactttgttttaatgtcatttttttggttagtgagactagatgggatgtaagtaggagatataacagggactgtgatgacacccatttgtgtattgatgacctgatgcaatatggatgctgatagtccgtttctcagtaatcagtatgtaaattgtttgctgtataccagctgtgtgcaactgggtcaaatgatgtgttgtgctagtccatatgaagaaatatcaaggctagtttgggagcaagg

SEQ ID NO: 140873 - DNA, 824 bp, Zea mays
  Clone ID: MRT4577_59959C.1
ctcgaggccggccggggctagcctagtcctcttctagtcgcctctacccagttacttgcatcgccccgtcaagcacgccgccggcacgcggccctcggtctccccgccgcgccctctgcctccgcccgaacaaagccgtctcgccgtcgcgttgccttccttaccgtccaccgcgggcagccgtcctagtactcggttggtcctcccctgctgcccttctacggtggaggagcggagatcctgccgttttccggctgatttcttctaattgcggggcaagttccgtggatagtcaatactgcttgtgctgttgagctaatattaagttcctgctgggagaacttctgcagttcctatggcaaagcctctcaatggcagtggccgtagcatgccaagatcgaatgagggaatgcggctcatattttcggcagttgtaggtgtcatgctgggttacctgtttgggatctccttccctacagtcaacataaccaaggtaaattgacacacttgcctctcttgtttttgtgtctcatatacttgctttagagaagggggaaaacactactctaatgtggcttgcagcttcacttcccttcgagtatcatctcttatatcgaagataggaactctggcatcacaacccagacattgttgaaccatgcttgggcatctgcaaacaatcataaaaagaatagttctgaatctaacactgatgaaattcccgaggtacttcaacacactactgccttcttgtgttgccatattagctgtatacttatatgcctgtattgggctaaattaggtatcgtatttgttattttttg

SEQ ID NO: 140874 - DNA, 233 bp, Zea mays
  unsure (1)..(233): unsure at all n locations
  Clone ID: MRT4577_5995C.1
annnnaccagcgttggggaacaatacttttttcttttcatttcaattgtccattcacggcattgctcacactgacactgccacccatggtgatgcctgacacattattactcaatcatcgccgcttaatgactcaactagcttgctagccagcggctatactacagcaccccgatcctgggccaatgcgtctagtttctgaggcatcaatgcaacccgacggccacaccctac

SEQ ID NO: 140875 - DNA, 2221 bp, Zea mays
  Clone ID: MRT4577_59960C.1
tgaatacatgctcctcacatgccacggcaaggtttctgttgcgggaaggtgctgcaagggggcatcctcgaggccggccggggaccctgcttataattgctctgtataccttgcttgaaagatctgatttgctctttctctctccctcttttgcaaatggattctggcgtccctcgaggctggccgggtgtgcctcgtcactacatacatacaacatgctagcctagtcctcttctagtcgcctctacccagttacttgcatcgccccgtcaagcacgccgccggcacgcggccctcggtctccccgccgcgccctctgcctccgcccgaacaaagccgtctcgccgtcgcgttgccttccttaccgtccaccgcgggcagccgtcctagtactcggttggtcctcccctgctgcccttctacggtggaggagcggagatcctgccgttttccggctgatttcttctaattgcggggcaagttccgtggatagtcaatactgcttgtgctgttgagctaatattaagttcctgctgggagaacttctgcagttcctatggcaaagcctctcaatggcagtggccgtagcatgccaagatcgaatgagggaatgcggctcatattttcggcagttgtaggtgtcatgctgggttacctgtttgggatctccttccctacagtcaacataaccaagcttcacttcccttcgagtatcatctcttatatcgaagataggaactctggcatcacaacccagacattgttgaaccatgcttgggcatctgcaaacaatcataaaaagaatagttctgaatctaacactgatgaaattcccgagatttatgttcctacaaacccaaaaggtgctgagagacttccaccaggcattgtagtgtctgaaacagatctttatccccgaagactatggggtgatcctagtgaggaccttactagcgagccgaggtatcttgttacttttactgttggtattgggcaaaaggcaaatattgatgcagcggtcagaaagttttcagacaaattcaccattatgttgttccattatgatggtcggactacagagtgggatgaatttgagtggtctaaaagagcaatccatgtgagtgccaggaagcagaacaaaatggtggtatgcaaaacgatttttgcatcccgatgttgttgccagatatgattacattttcatcctgggatgaaggatctaggtgtagagcatttcaacgcagagaagtacattgagcttgttagaaagcatgggttggaaatctctcagcctggtttgcaacctgatagaggactaacatggcaaatgactaaacggcgtggtgaccaggaagttcacaaagtaactgaggagagaccaggctggtgcactgatccacatctaccaccatgtgcagcatttgttgagattatggcaacagtgttctccagaaatgcatggcgctgtgtatggcatatgattcagaatgacttggtccatggatggggtcttgactttgctcttagaaaatgtgtggagccggctcatgagaaaattggagttgttgatgctcaatggattgttcatcaatcagttccttcacttggcaaccagggcaagtcagataatggaagaccaccatgggaaggggtaagagcacgctgcagaaaagaatgggggatatttcagacaaggctggctgatgcggagaaggcttattacttggagcgaggcatcacacccccgaactcaacatcagtttagatgaacacatgctcctcagatgccacggcaaggtttctgttgggggaacctgctgcaaactggcatgttcatcgaagctgctgcagcccagggcaaatccatatatttgtacattagaggtcccacgaatcgccatgattaatctttagtgtcgctcacctggttttaatgtcatttcttttgttagtgatactagctgcgatgtaagtaggaggatacagcagagaccgtgatgatacccatttgtgtattaatgacctgatgcaatatggatgttgataatcctttcctcagtttcagcatgtaaattgtttgttctagaccagctgtatgcaactgggtcaaatactacattgatgtaaggcccaaaatttgtataagaaaaaaataataaaataaatatatgaagaaataaaatagtaaattcagatcaaaaaaaaaaaaaaaaaagcggcc

SEQ ID NO: 140876 - DNA, 378 bp, Zea mays
  Clone ID: MRT4577_59961C.1
cccttcttaataattctctttatttctcggagaacaggtgcctcttttaaaagaaacgtccttgagaattttttgccggggtacaaggacaggaaaatgtgtttcgaaatttaggaaatgctaaaaaccaccgttcctggatatcattttttgattaataatgtaaagctccccaaaaaaaagtaacggtccttggcagatttatcatacggtcggccatgggcccaagttacacttcggagccaagtggaaaaaagcaaaactccgatgctaagcctcgcaagacttcctcaacctggggaagaattataaaccccaaaaccgccttagttggagttaaactaatatcaaatttccgggcacaccgttgtaaaaacc

SEQ ID NO: 140877 - DNA, 501 bp, Zea mays
  Clone ID: MRT4577_59962C.1
cacagagtaactgaggagagaccaggctggtgcactgatccacatctaccaccatgtgcagcatttgttgaaattatggcaacggtgttctctagaaatgcatggcgctgtgtatggcatatgattcaggtgaacgcaatatgctaatgcattagtttgtctaaagtgtagtatgcttacccactgcttcatgcagaatgacttggtccatggatggggtcttgactttgctcttaggaaatgtgtggagccggctcatgagaagattggagttgttgatgctcaatggattgttcatcaagcagttccttcacttgggaaccagggcaagtcagataatggaagagcaccatgggaaggggtaagagcacgctgcagaaaagaatgggggatatttcagacaaggctggctgatgcagagaaggcttattacttggagagaggcatcacgcccccgaattcaacagtagtttagatgaatacatgctcctcacatgccac

SEQ ID NO: 140878 - DNA, 720 bp, Zea mays
  Clone ID: MRT4577_59963C.1
ctccttcgccttcgctagctgattcccgtcaccatcaagcctcagctccccggcctcccactatctccgcgtcgccgtcccagccacagtcccacgcgcccagcaccatccatccgtccgcaagggggaaagcacgctagctgagctgagctgctgagagagagagagaggcaaaccctagcacgcacaagcacagcaacgtatacgcttccccccgccgattcatccatccatcgcagcgcgcaccgggcgggcgggccgggacgacgacagctaagctagcacatcgcaatagcatagcatctatctccgccgcagtacccaccaccaccaccaccatgatcttcccccctgccttcctgcaggattcctcgagctggaacgataaccagcagcagcagcaccaccagcagcagcaaggccacggccacctgctggttgccgtcagcggcagcggcgacgccaatcatgagctcctccagcaaccaatcatggggggagcgcttcccgatggaggaggaggaggtggtggcggggggcaggttgggggccccgccaagcccatgtccatggcggagcgcgcgcgcctcgcgaggatcccgctgccggagccggggctcaagtgcccgcgctgcgactcaaccaacaccaagttctgctacttcaacaactactccctcacccagccgcgccacttctgccgggcctgccgccgctact

SEQ ID NO: 140879 - DNA, 289 bp, Zea mays
  Clone ID: MRT4577_59964C.1
cccacgcgtccgcggacgcgtgggtattttcagcattgataaacacaccaaggggggcggactaacaactacagtaataccaatgactaccaagatattagcccttcttacgcttgttgccctttagggagcatcaacaaatgcgttcattattgcacattgctaacttgctccaagtgccagcattgcacagatcctcgcaccgagtcacttaaatgttcttagaacatccattcgagcgagcatacaggctacaattagcgcttgcgatgagcgccttactacaacc

SEQ ID NO: 140880 - DNA, 1980 bp, Zea mays
  Clone ID: MRT4577_59965C.1
tgcggcttcgctagctgattcccgtcaccatcaagcctcatctccccggcctcccactatctccgcgtcggggtcccatccacagtccggcgcgcccagcaccatccatccgtccgcaagggggaaagcacgctagctgagctgagctgctgagagagagagagaggcaaaccctatcacgcacaagcacagcaacgtatacgcttccccccgccgattcatccatccatcgcagcgcgcaccgggcgggcggtccgggacgacgacagctaagctagcacatcgcaatagcatagcatctatctccgtcgcagtacccaccaccaccaccaccatgatcttcccccctgccttcctgcaggatactctctacctagggcttgcttgctatcctgatccaacgtcacactgatactatatactcatcgactgctgctagtatatactagctgcgcagtttgaacgacgaattgaaatcttcagctttttatttattattgattgactcgatccaccagcagcagcagcaccaccaccagcagcaaggccacggccacctgcagattgccgtcagcggcagcggcgacgccaatcatgagctcctccagcaaccaatcatggggggagcgcttcccgatggaggaggaggaggtggtggcggggggcaggttgggggccccgccaagcccatgtccatggcggagcgcgcgcgcctcgcgaggatcccgctgccggagccggggctcaagtgcccgcgctgcgactcaaccaacaccaagttctgctacttcaacaactactccctcacccagccgcgccacttctgccgggcctgccgccgctactggacgcgcggcggcgcgctccgcaacgtgccggtcggtggcggataccgccgccacgccaagcgcgccaagcccaagcagcagcagcagcacgcggccgccgggaccggagctgccaacggcgcgatgcagcagcctcccgctgggtctatggcgtcgtcggccgccgcctgcaccgcgaccacgacgatgacgaccaacgcgctggatgccgggcccggcggcggcatgctgcccatgctgccgccgctgctgcgcctagccgacttcgacgcaatgagcctcggctccagcttctccgggatatcgtccatggggaagcccggctccatcggcgcggcctgctacccgcactcggtcggcgggctggagcagtggagggtgcagcaaatgcagagcttcccgttcttgcatgcgatggaccagggcccgctggggccacctctggccatggcgatggcggcgccaggagggatgttccagctaggtctagacaccaccagtgataacagccgtggcggtggcggcggcggcggagaagacgggtcgtctgccggagaggcgctccatatgatgcaagcagccaccaagagggagagctacccggcaccaccaagagccatgtacggcgaccaacaccacaatcacctcgctgctgctggtggctacacttcctattccaccaatgctgctgcaggtaaccatctcttgtaatggccggccgatcgatcgatcgagagctcaacaattcaagtgtcctgctatagctagctactacgacgtcgtgctacgatcgtatcggtttgcgttcctacaaatatagcctagagatagagtgtctctgtctgtgtgatcgatggtattgttatgatcatatagaaaagaccagtagcatgcatgcacttgttgcaatgtttgctttcaagaagaaactctggagggaggagaggctcggtttggatgctgatcatgcgcaaatattactagtgtctacagctgctacttcattatagctgctagcatggtcacttgttttatgtttcttcttctgctgcttttttatctgatccctttgttagggtttactactactatcgatcatttggggtcaagtaatgtgtactggtgtacgttc

SEQ ID NO: 140881 - DNA, 248 bp, Zea mays
  Clone ID: MRT4577_59966C.1
ttgcggagtatttgcgcgctcggcgttttcattgtcgtagctgctttgcgccgttcggtgggtgcttatattttttctctcccacctgttgtgcggggggggggtttttttttttttttttgccttcccctgtccttgcgctctttcgtttgtgggggtgttctgtgctgttctctttggtgtgcctgcctgcccccctcttgtctctcttgttgcgccggtgtgttctctgggccatccggggccgc

SEQ ID NO: 140882 - DNA, 474 bp, Zea mays
  Clone ID: MRT4577_59967C.1
atcacccatactgtgtcgagacaacataaactacataactaaagagcgagaacaacccgaccgcaccatgagggaagagttagccgtccttgctctcctggctctcgctgcgagcgccacatacgcgcatacatatcggcagaatgctgatgcgatccacacggccacgattcatcaaccgctgcctgcacatacgccaatgggggttgacacagccagctgtgcaggattatacaccgcaacaagacgctggcggcgaccgtccaacagccaccaactgcccatgtgcaacagccggtttaggtacatccaaccatacgaaccatcgctactcaacagcaacgagcacagactcatctagaggcggacgaactgctagtgcctacatgcaacaaccaatgcgtgcacagcaacccactaacctgtggcgacgtaggtgcctaccaactacaacaacaggtgcagcggctgata

SEQ ID NO: 140883 - DNA, 749 bp, Zea mays
  Clone ID: MRT4577_59968C.1
ccggccgaggttgtcaatccgttcttccgggctcgactaactttccagcgtcgtcctcgccaaaccaccgccacaatgaccaagatcaacccctccgtcgcttcttctcgccgcaagagccgtgctgctcacttcaaggctccctctgaccagcgccgtgttatcatgagcgctcccctctccaaggagctccgtgagcagtacaacgtccgctctatccccatccgaaaggacgacgaggtcaccattgtccgtggttccaacaagggccgtgagggcaagatcacctccgtgtaccgtctcaagtacgttgtccatgtcgagcgtgtcacccgcgacaaggccaacggccagtccgttcccctgggcatccacccctccaactgtgtcatcaccaagctcaagcttgacaaggaccgtgaggacattctgcgccgctccaaggttggccgtgagctcgctgccaacaacaaggtcaccgcttaagcggatgattttgtcgagcaacaccaacaaaaaaccaacatttggaactttcaagacgacatgatcaaaccttccctcccaggcgaggacaaatcttttcttttttcaccactcacaatcacggcaccaatgtgagcaacatcaagggcaaaagttgatgaggaaatgggcataatactccggcgttttacgatacctgcgtgctttcctccggacggcgcggtacccggtctacagcagggaagatgaattgagaattttta

SEQ ID NO: 140884 - DNA, 449 bp, Zea mays
  Clone ID: MRT4577_59969C.1
ggcacggggaggccccagggctgggacgactggagcgactcctccagacagagcaggagcaggacagcgttctacgggcagtaccagtgctacggggaaggctccagaactgacgggagagttgcgtggtctcatgacctgtcgcaggctgaagccgcgccgttcatcaccaaagtttgggtcggtggacaagagtggcttcggtaggaaacactagctagcttggttcgtcaacagtgacgctgggaataataaggcgctgcagacgcgttatggccggttggtgccgagaatacgcttgccctgaaaaaggcgagcaatgcaagcaatgagcacttgtgtttattttttggtgagcaagaaccatagtgtgcaatcggtgtgccaaaaaaaaaaaaaaaaaaaaaaaaagaaaaaaaaaaaaaaaaaaaaaaagtcgacgcggccgc

SEQ ID NO: 140885 - DNA, 152 bp, Zea mays
  Clone ID: MRT4577_5996C.1
attaagatcgaatccgcacaggtggagttcttttacgcctggggcgacgtggccaatctccccgcgtcaaccgcctggctgatgcataacaatctgtatcagggaatctgcttcatcatctaggactgtaccaatttctgtcgtaaacataa

SEQ ID NO: 140886 - DNA, 252 bp, Zea mays
  unsure (1)..(252): unsure at all n locations
  Clone ID: MRT4577_59970C.1
aancaggggaggggggaaacaaaggagaattnaaagataatgtntactataacacatgcagcggacggcacactgagaaacgcctggagcatcttttctgaaacaaaaaaaatagtctacgactgcttaacatccaaaagcgcacaatattatgtgcagtgttcatacatgttcatattggctcataagcactctcaaacatgcaaaaaaatgtcaccatgatctacttgacccagtttatcgcctgcgcat

SEQ ID NO: 140887 - DNA, 168 bp, Zea mays
  Clone ID: MRT4577_59971C.1
atagagggttctgtctgacagctcttggcggagtgtaagtccaatgcagctgtgtctagatcatgcgacaatgtgtgtcactactgtcagatgactgagtgttcatatatgagtggtagctatgtctgaacatagtgactctctatacaactctgactcagcagactg

SEQ ID NO: 140888 - DNA, 336 bp, Zea mays
  Clone ID: MRT4577_59972C.1
acgcgccgagggctgcctatatgcatgcctgttcactgcgtgctgctgcttctgctgcttcgagacctgtgggggctgcctcgaggctatatgctgctgctgctagttctgctatggagggcatgggcgcgcattattctggagatgtggccatgcgcgacacccaccgccgaatataatgctcttcttatatgcacgcacgttagaaatgcgctatagtgtgtatggggtgatatcttttgtgtgtgtgcgcgcatcttcatttgcactggaaaatgctctattatttgtggaagggcttgtaatctgttgtatgtatcttgggcagatgaactc

SEQ ID NO: 140889 - DNA, 274 bp, Zea mays
  Clone ID: MRT4577_59973C.1
ggagcagggggctaacataaattgtttcattacagctcgctgcaaaaatcgcaaatgaattataaggctaaggctaccttaaaaacttcggaccctaactactatggtctatatccttgcagagcaacttgaataaactttcaacacatcacattcagaggatttatgcgttggcacaaacctgggcagacgcatcccggtgcctttgctcttctatgatgctcacctagattcccttggcctttgacaggctaacccacgggttattaccctt

SEQ ID NO: 140890 - DNA, 466 bp, Zea mays
  Clone ID: MRT4577_59974C.1
cctctccagtagatagatcccgcacgcaagccagcgagatcggcgcgtcgcttaactccgcgcagctagtagagcagcgcagatggtggagatcccggtggtcgacctgcggctcgccggcgcgcagccggaggagtcggcccggctgcgggacgcgtgcgagcgcctgggctgcttccgcgtgtccggccacggcgtgcccgcggcgctccaggcggagatgaaggccgccgtgcgcgcgctcttcgacctccccgacgaagccaagcgccgcaacgccgacatcatcgccggcagcggctacgtcgcgcccagccccgccaacccgctctacgaggccttcggcctcctggacgccgcggaccccgccgacgtcgacgccttctgcgcgcgcctcgacgcgccgccccgcgccagggagaccgtcaagagctacgccgaggcgatgcacgagctgatcgtggac

SEQ ID NO: 140891 - DNA, 1683 bp, Zea mays
  Clone ID: MRT4577_59975C.1
acaatcccgagaacgccatcatcgcaccgactctgatccaatttcacacgcatactagcgccgccggtagcagcaccggcagccgcgttcccctccgccatggatcccgcgaacagcagcgcgggcgccgagctcgacgacgcgtccgagtggcgcacccgggcgctgggcggcacggagtacagctggctccgcgccgtgccgggcggcaccggcaccacgctgctcgcgctccgcctatcccacggcgacgcggccgaggcggcgctgcgctccctgcgggacgcgcaccccgtcctccgcgcccgcctccggacctcttctccctccggcccgacgctggcgttccccgatccggcaccgccgttcctgctggcgccgatcccggccccgggctccgcgcccgacttccacgcgctcctcgagcacgagctcaaccgcaacccgtgggccgacgaccccgcgtcctccgacgacgccccggtcctcttcgcgacgctctacgagctcccagccgccacgggcggcgcggcgctgttcgtccggatccacacggtcgcgtgcgaccgctcggcggcgagtgcgctggccagggagctcgtcgcgctgctggccggcgccggcggcgaggagcccgacccggaggatgcggcggcggaagcggggctggaggcgaggatccctcagagggacatctggaagccgttctgggcgcgcgggttggatatggtgggctactccatcaacggcctgcggacgtccacgctgccgttcgtggagaccggcacggagaggtccacgcagatgctgcggctcgggctcggcctcgacgagacgacgaggctgctcgacgcgtgcaaggagaatggggtgaggttgtgctccgccgtggccgccgcgacgatgctcgccgcgcggcagtcgaagccgatggagagcggccagcaggagacgtactctgtcgtgacccttatcaattgccgcaagtttcttgagccagtcttggaggaccgcaacgttgggttcttctactctgccatcaccaacacgcacacgatccacggcggggaagggctgtgggagctggccaagaggtgccaggactcgtacaccagcgccaagagcaacaagaaacacctcaccgacatcagcgacctcaacttcctcatgtgccgggccatcgagaacccccagctgacgaccgccggcgcgctccggacggcgctcgtctccgtgttcgaggaccccgtggtcgccgacgtggccgaggcgcagagcaaggccggcgtggaggactgcgtctgctgcgccaccgtgcacggcatcggcccgtcgatcggcgtgttcgactcgatcaaggacggcaagctggactgggcgtgcgtctacccttctcctctgcactccaggaagcaggtccaggagatattcgacaaggtgaagcagattttgcgccatgcggctgcggctgaggagaattttgaagactgcacctaagtacctaacgatgtcgtcgggagctttatggggcatctcggtagagctattgctccatttgtgtctttgtgaggcattcttttctcgtgagggttgtaatgtaagtatagtgaaccttgtgttagcctttttattctttcaattctcggcgcaatgaaaattttccggtgggaggctggtagcttt

SEQ ID NO: 140892 - DNA, 540 bp, Zea mays
  Clone ID: MRT4577_59976C.1
tctgcggccccgaccccttctccctcgacagaaagtcggcctctgctccggatcgaagaggtccgtcgcttaatcatgacatttccgccatgggaggatctgctctttgagaggcatgtgttgatggtggtgccgccggcggaagacaaacctggaggacggagtgtctgcattcgaccgccatgttaacgcttcgcgacactgcgctcacggataccgcgaacttcctgctctccgtgaccgaggacttcacaaagcccgcaagaaatcttccctacgtgaacaccttcttcggtcgcccctccgcgcgttactccaacacccgcaacctgctctacttcttcacgaaggcatttgggctgccgtatgcgccaacatacctaagcaccggcaacttccagaatgctgcatactttgcaaccggcgcaagaactggcctcaatggatcgctcttccgtgaacgcagtcgtgcaaactacatgcaagcctcactcccttgaagagcaaatggaatcggttcaaaaagcttctcacatccat

SEQ ID NO: 140893 - DNA, 792 bp, Zea mays
  Clone ID: MRT4577_59977C.1
ctgtgcggcgctcaggcggcgggctcgatccatcttcctccaaccactccgttttcctttccgtcatgttccgaacagcatgtcgttcctggacaagttccgcaccgccgcgcaaaaggcaggtgtgcaagccaacgcctttgcccagcaaacgggccgagccatcaacgagcaggctgctaccgctcgtgctggcttctcgttgccaaaggagtgcgagcgtgcagctaccatcttgcaggcgtttgtcgctgatcctgatcacccggactcggcgctgaatgctatcccaaaggcggtgctgcagcaggctaagggtttggccgtgttcagtgttatcaaggctggctttgtgtggtcaggcaagatcggcagcggagtcgtcatcgcccgcttgccagacggaagctggtccgcccccagctgcatcggcaccggtgcagtcggctttggtctccagatcggcgccgacctcaccgagtttgtcatcgtcatgaacagcgaagaggcggtcaaagccttcgcccacgccggtaacctcaccatcggaggtagcctctccgccgccgccggtcccatcggcacaggtggtgctatcaacgctgccatccgtgaccccgccccgctcttcacctactcgcgatctaaaggtctcttcgcaggtatctcgctcgaaggaaccgtgctcgtggagcgcaaggagacgaacaaggacttctacggccaacccatccccgcgcttgatctcttgaccggtaaagtgcccgctcccgaggccgcaagcgctatgta

SEQ ID NO: 140894 - DNA, 1764 bp, Zea mays
  Clone ID: MRT4577_59978C.1
atggatcccgcgaacagcagcgcgggcgccgagctcgacgacgcgtccgagtggcgcacccgggcgctgggcggcacggagtacagctggctccgcgccgtgccgggcggcaccggcaccacgctgctcgcgctccgcctatcccgcggcgacgcggccgaggcggcgctgcgctccctgcgggacgcgcaccccgtcctccgcgcccgcctccggacctcttctccctccggcccgacgctggcgttccccgatccggcaccgccgttcccgctggcgccgctcccggccccgggctccgcgcccgacttccacgcgctcctcgagcacgagctcaaccgcaacccgtgggccgacgaccccgcgtcctccgacgacgccccggtcctcttcgcgacgctctacgagctcccagccgccacgggcgacgcggcgctgttcgtccggatccacacggtcgcgtgcgaccgctcggcggcgagtgcgctggccagggagctcgtcgcgctgctggccggcgccggcggcgaggagcccgacccggaggatgcggcggcggaagcggggctggaggcgaggatcccccagagggacacctggaagccgttctgggcgcgcgggttggatatggtgggctactccatcaacggcctgcggacgtccacgctgccgttcgtggagaccggcacggagaggtccacgcagatgctgcggctcgggctcggcctcgacgagacgacgaggctgctcgacgcgtgcaaggagaacggggtgaggctgtgctccgccgtggccgccgcgacgatgctcgccgcgcggcagtcgaagccgctggagagcggccagcaggagacgtactctgtcgtgacccttatcaattgccgcaagtttcttgagccagtcttggaggaccgcaacgttgggttcttctactccgccatcaccaacacgcacacgatccacggcggggaagggctgtgggagctggccaagagatgccacgactcgtacaccagcgccaagagcaacaagaaacacctcaccgacatcaacgacctcaacttcctcatgtgccgggccatcgagaacccccagctgacgaccgccggcgcgctacggacggcgctcgtctccgtgttcgaggaccccgtggtcgccgacgtggccgaggtgcagagcaaggccggcgtggaggactgcgtctgctgcgccaccgtgcacggcatcggcccgtcgatcggcgtgttcgactcgatcaaggacggcaagctggactgggcgtgcgtctacccttctcctctgcactccaggaagcaggtccaggagatcttcgacaaggcggtcgatccggcgcggcggtcgggtatggcggccgcggagcagctgaaggagctgggggagaagctgcaggcggtggtgccggctcctgcggatgaactcgccaagctcctcgagatgacggaggaaaaggtggggcggatcttcatcggcgggctgtcgtgtaacaccacgaagcgcacgctcgagcgcaccttcggtcagtacggcaaggtcatcgaggctcagtcttacaatttcattctaatagcagctgctgattcacagagactgcagtcagttcaatttctgcatgttaggaagttagcaaagttgctggaaaagaaattcactaatcataaccagatacctgtttttggcttgttagcacttaagataactgctgccagctttagaacacaaaagaatcatcaccggcatggttaa

SEQ ID NO: 140895 - DNA, 381 bp, Zea mays
  unsure (1)..(381): unsure at all n locations
  Clone ID: MRT4577_59979C.1
aggacgcggcatcaagggacccttgttcgttaaaaaaaatcatcgccccaccaaaaagcaaaggaccaccattcccggggcaaacaaaaaaaaggcaccccggggcggggggccctcccaccccaaccaaacgcgggaaccaaaaccatccccctgaaccccaccctttaactactaatagcctactaccagcccacaaaaacctatttggccgggcgtgccggggcccccccccccgggggaaactccctggcgaactcgtggacctgggcctggtaagcgcccccaaactcaaacgcctccaccttggggtcgccaaactggacccacaggcgctccttggccttttccgccgtntcggggcggggcccggccgggccc

SEQ ID NO: 140896 - DNA, 498 bp, Zea mays
  Clone ID: MRT4577_5997C.1
atatcaatttcgtggcggcgctcttgtcactatagcgactatataggagtaatgcgagacgatcactttgtatatcttgtgttgtttctcgaagagtgagaagatgagatgtgctttgcttgggcgatggtgatctgctatataagatggtttctttcgttactggtgacgtgaatgacgacctttatgtgcttcttcatatgttctctaactacgactgtcggcttttcatcgccggggcgataaaaatgctaaagaggttgcagaaaaactagccggtgcagctcgtccaccatttgaacatacagatgaggtacctccgtgttaacattaatggtgaacctgccgagacacatcgctggaggatgtgcagtgtccataggcatgtaagaactcatggtgtgggattatgacatcaggatgttttactttagtgacatcagactcacagatggtagatcagtgacgggtttagttgttcagatcctataaaaggca

SEQ ID NO: 140897 - DNA, 637 bp, Zea mays
  Clone ID: MRT4577_59980C.1
cctcgaagccgatggctatatcctatgccaaccaatgacaaccctaccaccactccctgcacccatcactcgtaatattcttccgctccgccttccggaatcagagccacaagatctactctacgtttcccgccatgcatcccccgaaaccgactcgtttacctcaacaatcacactcttgccgctttcaaaaaaaaagaaaaaatctttgcatgccccgagctcccactatggaaccctacagggtgggttagttgctgcactcgcagaaaccgtgagcataggtgtgtccggtgtgaaattggaatccagtcgctacccctgcctttccacggattgcaaaactttgattgtctacgcctgagaagtgtaaggagagattaactacattacttactgtgttgtcactgaccattttacttatgcacctcctgacaagacgaataacttagatgatcaagcctgctgagcaaaaaacaaccagcataagaattacagcaatcttcccctcactgctgtctgctgctcaaatgcaatgcaactggttatctggcgtctcggctgtccaatgattcaaaggagccacctgctcctcccacaaacatcctcttcatccagaacttgaccgagcggacca

SEQ ID NO: 140898 - DNA, 583 bp, Zea mays
  Clone ID: MRT4577_59981C.1
ggcgggggccggcccaccaaacccccccgggggcaaaaaaaaacccccccgggccaaaaaaaaacccacaaaaaaaaaaccacccacccccgacaaaaacgaaaaccccgggcccacaaaggaagggggggggggcaaaaaaccaagaaaggagaaaggaaaccgggccccgaaaacaaaaaaggggccaaaaaacaagcggaaggggggaaaacagcccccagggggaaggcgggacccccaaaaaaccgtttcacccccgaaaccctggaaacccgccgggcccggggaaaaacccccgcccgggggacaaaaacccacccccggggaaaaaaagacccccgaagggaaaaaaggttcttgaagggaagaaggagggccctcccttgaaaaaggggggggttttctacaaaaaacaccccaaacaaaaacctggcccctggaaaaaaacggggccccgggggaataaaccctcaagggaccggttgctaatggaaggaccccatccgggatgctagaaaaaccatgataaccttctccccacttttgaaccttttggcggacattttcccccccggggcca

SEQ ID NO: 140899 - DNA, 196 bp, Zea mays
  unsure (1)..(196): unsure at all n locations
  Clone ID: MRT4577_59982C.1
tcgtctcgtcccacgtcgtctcgctttcaactggttctcttcgctcgctctgttcttagnnttctcgttttggggccttgaggggtgcactgnntggcggtgtgaaggggcttccctgggtctggtggctnggttggttgggttcaaatgtcgnnatggcgcnnaggtgtnnngctgcgatctttcggctcgtagc

SEQ ID NO: 140900 - DNA, 1037 bp, Zea mays
  Clone ID: MRT4577_59983C.1
cccggtcgacccagcgtccgcggacgcgtgggcggacgcgtgggcggacgcgtgggtcaagattccagcccacaaacacccagagcacctcttcaccaaccgtccatgatgaaacagcaagctctacagcatcgccatcagttgcgaacaacgcattgcctccgcacgatcctccagccccgccagtgagggtatctccagaagagcaggtcatgagtgaccttctcgcactcaccgtatcatcaaacccgtcaccatcctcctacaccccggtaacacctgaaccaggccgcctgaatcaaagcagcgcaccaacaggtgagcttccgcgggcttatcatggagaccaaggacacgtgtctgcaccttacgtcgctccgtgggctcagccgcagtcccagaccgcaggaagtcagcaaccgacacgcactcaggcacaggtatcttacagctcgtttgcttacccaccgccgccatgggcgtcacaggacagcaccgaatcgaacccttttgtagcggcagcgtcatctcagcaataccagtccacttcgagaacccctaccatgccaccgaacttgaggcctctactacagcagtcgcattcttttggagtaccacttccaaccgcgagtctggactcgccaataaatgggaacctgaagcaaccgctgtctgctggggctcgcaggccatcttatgtttcttccaacaagttcttcgacgacttgtttgagaggaactcggatggtagcctgaaagtaggcagcacaaggcacggtgatgtctatggaaaataaatgtcgttctcttgtcctgcttgcgtttgatgttatcagctgcctgcatattagaacgatttagttgatgcttctggcgaacttgctggccttttcataaataattttgccaaaccaaactatgtggaagcttcagcctatgagctgtccactgtccagacattttgaatggcaaaaggcgattcttcctaaattgtgtaatgaaacgggtttgcttctatatatagtgttctttagagc

SEQ ID NO: 140901 - DNA, 745 bp, Zea mays
  Clone ID: MRT4577_59984C.1
ccggccggggcattgcccgccgccgcagccgctagctggacggtatcaccggcccccaaatctttctgactctctcctccataatggcgttcgtgacgctcatggcgttggcgtcccctgtcctgctactgctcctgagggcggcatgggtcgccctgtcctgctacatcctgacgccgctgagaatccgccggatcatggcccggcagggcgtgcacgggcccccgccgcgcccgctcatcggcaacctccgcgacgtgtcggcgctcatggcgcaggccaccgccgacgacatgcccgccctgagccacgacatcgtcggccgcctcatgccgcactacgtgctctggtccaggacgtacgggaagctgttcgtgtactggtacgggagcgagccgcgcctgtgcctgacggacgcggcgcagatcaaggagttcctctcgtccaagtacgcggcgaacgccacgggcaagtcgtggctgcagcgccagggcaccaggcacttcatcggccggggagtcctcatggccaacggagcgcactggtcgcaccagcgccacgtcgtcgcgcccggcgttcatgcccgacaagctgaagggacgcgtgggtcacatgggtggagtgcacgaagcagacgatccgggcgcttcagatgcagcgtcggcgcccgtcgtctggcggcgggcggcgtcccgaggtggagatctgcgggtacatgactcggctcacgggcgacatcatctcg

SEQ ID NO: 140902 - DNA, 236 bp, Zea mays
  Clone ID: MRT4577_59985C.1
ggggccccaaaatcttcgcgcctttgccctacaccctttatttagtgtgcccccgttctccccaccctccctggggtgcaggggtttaaacccccccccaattgccctaaaaatttaaccctaggggggccccggcccttggtttttaaaaccggaaaagtccctttcccccatggggggggaactaagcccccaattcttttcctgaacttatcccccaggggccgcaatcgggg

SEQ ID NO: 140903 - DNA, 557 bp, Zea mays
  Clone ID: MRT4577_59986C.1
aattcggcacgagggtacttctcgcgtccgcccccctcccaccccccgaaacccgccgtccgcgcgatgcgctcgcacgtgccaccgccccccggcccgcgataccgtgcctccgctcgacgcctgcccccgatccctgcgattccagcgccgtcgccgcgcgcgatgcccgtgcacgcacccccaccccaatccccgcctcagcgccgctcccccgcccccacccccgtcctcgccgccccgctccacgctcgcgtggcgtcgtcatcgctgcgctctgcgcccgctccgcccccacccccacacgcgcacacgcgcctcaccccgcgtcggggtgcacagcccctgcgtcgccgccgtgggctcggggttgaactggtggccctggggcgcgggtggtgccgccggcggcggtggttgtggctggttgggcgtgggcggctgcgccgggtgctcctgtttttggctgcgcgcgcggtggtggtgtgtccgttggtccgtgccgtgtggcggggggctgtgcgtggtgtgcgggtccttctcctggggccggtctt

SEQ ID NO: 140904 - DNA, 331 bp, Zea mays
  unsure (1)..(331): unsure at all n locations
  Clone ID: MRT4577_59987C.1
tacatacataatgaacctttgtgaaaactaacttaaactttactnattaaccttgacttactntttgatttttatttttttttttttnagngnntacagaacttactttggggatctgtctgggggtattaataaccttaaacatttaattgaaggtaaaagaatgtatgacggactaactagtcttattaactaagttttttaaggtcttggtgtttaagaaaaaaggatgagtttttggttttacttgaggtgagttttaaagatataaagtgaataattgttgtttgtattttatttaaggattttatatgtaatgtttttttgtgtt

SEQ ID NO: 140905 - DNA, 642 bp, Zea mays
  Clone ID: MRT4577_59988C.1
ctcgaggccggccgggacacatttcagaaaggagagagggatctgcatatattgagagagaggatcgcgtggagtccggatgacggagaaccggacgctgctctaccatacgggcacgtgtccaaccccaagattggaagagctgcctctactactcgcgagcgctccccccgcgaaggaactacccaatctgtgcagggatcccccgctccatcccccaaggagcatacctagcctgctgcaattactcccttgagcactcgactacctcggcatcttcccctccgagacaatccgcaatgtagggagcgtcactcaccgctggtgacatacaggaagccctcccagggcgataggtagttctcacgctcttgtcatatgggaaaaggctctagaaactgcatgacagcacaatgaactatagaaagtcattattatgagaacctcctccagcacatgttcttgcagattgatttactattcgatcctactaccaaagtgaaaagagaactcttaatttgacaacactttaatgtcttgcacaggtgtcttggtagctttcattggtcgctgcaggagtcgtaaaaatcttgagctacctatgagcatattctggaaaatattcgcgacatggatgacacc

SEQ ID NO: 140906 - DNA, 212 bp, Zea mays
  Clone ID: MRT4577_59989C.1
ctaataattttttttttttttttttttttttaaagggataattgatgatgtattgaagaacaaagttttgaaccatggagcagcttggaagctctacatcactggaaaaaaaagggagatgggattgtacctttcatctccactgttcccatgctatgcctacatagtatggctcattctaaaccacccacgacctatactccctctcacca

SEQ ID NO: 140907 - DNA, 286 bp, Zea mays
  Clone ID: MRT4577_5998C.1
cccacgcgtccgctctccaactctccttgcccggctgccccacacctctgctcttccctctcgcctcccgccgttacagcttgcagctccatccccaacccccgtcgctctctccctgagccgtcgccttcgccttcgctgcgagatctagggtttacgccgcgcatcgggtaccgcgcacgcaccgaccgaccacccggcggtcggcgccgctagacgcgggctcgctctcaggtggttgagcgtggccggagaaggggaggggcgacactgctcgtgggtgggt

SEQ ID NO: 140908 - DNA, 399 bp, Zea mays
  unsure (1)..(399): unsure at all n locations
  Clone ID: MRT4577_59990C.1
tgctgccgctgggaggcgtcttgcctgtggtggatgtcatgctaaaagggccgcgactggttgggctttctaccgctgccccggcccttggcgacctttttgtccgcgaataggttccgacatgtacaagggacttcactgctcccccaataccccatgcttatggccacttatccacaaacctgagaacgtcttctagctaggcgaaccattaaatgatgactctgtaaaaggacttatacctgaaagaattacatgatcttattaccttcaaaaggtgcagggtacacgtaaaatccttagcctaggttatggatcanattagtgcaccaaaagcttaactttgggaaaatggtattgccaaatgtggatctctttaaccttggacttgttttccca

SEQ ID NO: 140909 - DNA, 1005 bp, Zea mays
  Clone ID: MRT4577_59991C.1
caatgagctcccacctagccgctgctcttgtccagcgggagaagcagcagcagacaatgagaagtctcagctctcgtgaccttgggcctagtgcggcgcgagcttcggctcttggctcccctctaagctcatcatggtctaagtggggatctccttcggggacaccagattggggcataaatggtgaagaattgggtaagctccggcgctcatcgtccttcgagctgaggtctggtggtgacgaccctgatctctcttgggtgcatacactggtcaaggaatctccaccggagaagcaagttactacggctgaatcaattagttccgttggaccctcaccactaatgcctcccggcatgaacaatggcgacggttctggcctgagcacccagctggatggacacgaccaagccgcggttataggagcgttgcttgaacagatgcagctcgaccagcagattggtagtctagcaacatagactcacgacgcgattgaggtactcaacaaagatggatagctgaaggcggtgatattcagagattggttttctttaattttgggggggtaaatcgtacacattattatttgaggttcctttaggttaaagagtgaagctccctcggttgggggttgttccaaggccaacccaggtagagaatcgcaccccggcagcatcggttcatcgactgaagcattaaccctcttaaggaaaaaaaaaagttcgctgtgttggaaattcttttcctttctccctagcggtgtttattttgttcattatggtatcgatacctgatgtacttactgatggtgtaagtgggatcctatagtaggtctgtcaagttcaaaaggtatttttttttcttcaccctttaccatttgtcgtggattatctcgtggccttgttttggttagaccttgaggccggcgtaatcctcgtggatgatatttgcaaataaatgtaatatttgctttcgaacttactgctactgttccaatctcatagg

SEQ ID NO: 140910 - DNA, 800 bp, Zea mays
  Clone ID: MRT4577_59992C.1
aaggtatggacagttatacataacattgttcaatccttgattacagttttttctacaaagttaatacaaatgttactaagctctacacaggcaggcctaagagaagcttcaacagccttcggaacgtgcttcggactatcaatcttcggcaccgccatcctgcagataaacaaacgatgtaaggtaaaaaagaaaaattacaagacataaagcaagcaacaggtataagttctataccggcttaagcaagtttcgggcttcgtcaccaggcaactctcgcccacccttagcccaaatctgagttataaacctgttcccgatgctccgggcttcactggggatatcaaccaagtacgttggagacagactgaaggttggtctatttactatttttgcgtgcgtgcaaccagccttcataaatgctgcagctgtgccgcgagaagctagcaaggcatagaggtcaccgtgcccggctattacttcatcaagcgcctcaacttcattttcagtatgttcgaaggtgctaggtatgtcttcatgaaagggaaatgtgcccttggacaatttctataatgttttggtgattaagtgtccaacacatttaattgagttctaatgtgcaaaataaagtgagaagtgcaaatcaaggaaaaaggtatgtttctagacttggtgaattgttttgtgtactaacatggttatccaagtgctagaaacagtgactaaagaagaagaaaggaaaagggaaaagcttggctctatgtagccaatcctcagctcggtctggcctcgtgccgaat

SEQ ID NO: 140911 - DNA, 546 bp, Zea mays
  unsure (1)..(546): unsure at all n locations
  Clone ID: MRT4577_59993C.1
agcagtggtaacaacgcagagtacttttttttttttttttttttttttttttttgtagacggggagttcgattcaaaaatttggaaatccaaacatcaacctaaatcgaagcaactagatatgatgcaccatgcaggaatatggggatatcctgatttcactgttttgttttgagaatatgtaaacacttaccattctatgctatgtatgtattattggaccatattatgtttgaagggtcttataaacccatacaattgatagtgcatgtaaactgccaatatacgtgaagacttgggtcaattatcttatgtgagtttaactgtcaaaatctacgattgatacgatatcaatgggctttgcttccggtcaaccaaatctaaagtcattcatccagatgcggcatataacattggagttatagctagggtcgtcgatgcatacagtcatgactttaattattatagaacaatccaagacgtaatcgaatatagctatacaaaaaatangaatcttaaagcccgcgtagtctgcgttgttaccact

SEQ ID NO: 140912 - DNA, 218 bp, Zea mays
  Clone ID: MRT4577_59994C.1
ctcgaagcttagtcgtctgcacacacagccctgttgtactatggatgaaagttccaaagagcggcacgcattttgtgcaccgccacagatcgttaccgtagcttgggttcgaggagccctgcatgagaaggcactaggcacatctcctctatggtatccccatttgtgaagattgagctgcatatatctaatgaatgtatgcctaaccaccttatctg

SEQ ID NO: 140913 - DNA, 299 bp, Zea mays
  Clone ID: MRT4577_59995C.1
aatcaagaggaggaggagcttaacacctgattcgctattcaactcgacgccctcccacctccatcgcgccaccagaacagtatgcagcctacaagaaacacctgatggacgagggaatcaaaatcaagttcgaatacgaagtcatcaaaggctatgccgtctggctcaaccagtctcagctccaagccatcaagaaagacccgcgtgtcaagaccattgaggaagactcgaccgttcacaccgtttgaacatcgttatccccagtaatcgtcccccccgactcttcttttctgtctttg

SEQ ID NO: 140914 - DNA, 860 bp, Zea mays
  Clone ID: MRT4577_59996C.1
gaggctcggccgggaaaaaaaaaaaaaaaaaaaaaaaaaaaaaaaaaaaaaaaaaaaaaaactcgagccggctctaatccaacccgcccgataaaaactctaccgccagatcagcaacattcccacgccactcccagagctcctaacccggaaccacgaaggggatccatggcggcggcgggttggctccgacgtgcggcggcggtatcgctgccccgcctgccttccggacttcccctcataccgcctcctccttccggccctctcaccgaggcgcagtcgctcgtggtccccggcctcggcgccgccgccgggccagccatggagctcatggccgtccctaagaagaaggtctccaagtacaagaaaggtttgaggaatggacccaaagctttgaagcctgtgccggtgattgttcgttgcaggtacatctaaaagctatgtttgctaatacttctatttaagtttgatcttggtgctgcggccgagtgaagctaccccacttctattgctgcagtggagaaagaggaaacccaagcgagtcgaactcataaatgttttgttttcctactttgctcactatgctacgtctgaaatctggacatcgtaataccaatgaaataaattgtcagatcgctcttggtattcaccttgttctccttccaagcattgaatcaatacacacttactctagtttgaattcgaagtgtaagactatcatcaagagcctttctaattttctgatatcatttgagtaaaacttattttttatatttttataccctccaacagtttttttaaaaaaaaaatgcagtccgattatatgcagcctgaaataaaaatctattctcgtttttggc

SEQ ID NO: 140915 - DNA, 301 bp, Zea mays
  Clone ID: MRT4577_59997C.1
caaaggggtttttaattggggggggaaccgggaattttttgtccgttccttaattgggaacactttttcctttatgggagcgtattttacctttgggggaatttattaaattcggctccatgtgggaaaatatttttccctggtatattcacaaaacctttgaaccgggagcattaaattttaagcctggggtttcaaatgagggggcttagctccatttatttgggtttccttacattcaatttttacggactgaaacccttttttccatttttattattgtatttccccatttcttttt

SEQ ID NO: 140916 - DNA, 538 bp, Zea mays
  Clone ID: MRT4577_59998C.1
ggggggggggttttttttttttttttttttttttttttttttttttttttttttttttttttttttttttttttttttttggattctacaaaccggttttgcaatattaacaaaaacaaatcgatgggacgatgtacaaaaaaaagcttttggggggggggggggggtttcgggcatgtttccaccatgggcgaaagacccgaggggatgaccggcaaattaagcgggttccgttgctgtcgtttcggcggggaaaggattggagcttttttgtaaaaattaaaaaacaggggggggggatgtagcatcaacacccccgatggatttttcaagggcagctgtgacagtgacggggacagcgacagggacggccttttccccctcctcacccaccgaaatggccaaattcagtgtaaagtttaaggagggtggccaggtcccgcaaggaggagggcacccaccccggcaggaagtccacaagcgactggtagttgttgccatccccactggagcctccgccggggtcctccacggcccc

SEQ ID NO: 140917 - DNA, 798 bp, Zea mays
  Clone ID: MRT4577_59999C.1
cccacgcgtccgtccaaggagagcttcgtgttccggagctcgtgctgcgaggctgctgaaccggcgaagggcgccgacgacgacgacgacggtcgctgccagcggaggagggacgtcggcacggagacgacgccgctgggcagctcgtgtcacacgccgctcaagagcgcgtccccggcgcggcacaacacgccggcgagccggtcgtcgggcccgctggtgccgtacgccggcggcggcggcgggacggacatctcggagctggcgggattccgcctcgccaagctggacctgggcgcgcggttcggcgcccacgccacgctcgtcggctggagctccaaggaggaggaagaggacgacgaggacgtgtccaagagcctcaggcacttcgaggccaccgtcggcgggatagcctgcgatagacgcggcggcgactgccgttgggatgacgacgacagggccaagagctgtatcaggtatcagagggaagaggcgaagatccaggcctgggttaacctggagagcgccaaggctgaagcgcagtcaagaaagctggaggtgaagatccagaagatgcggtgcaacctagaggagaagctgatgcggcggatgacgacggtgcagcggcgcgcgggggagtggcgcgccacggcgctggcgcagcacctccagcagctgcggcgcatcaccagagattggaggggattgagagataatttgttcattttcctttcaatcctctcgtgatccacttgtcagcccttagagtttaagggttttagtaaggcaatatttgga

SEQ ID NO: 140918 - DNA, 167 bp, Zea mays
  Clone ID: MRT4577_5999C.1
aaccagtaccgcacccgttcggcccaggcaaagttagccctcaccatgccggtcaaaggaggcaccaagtgcatcaaatacctgctgttcggattttctggcttgccgggattgctgtccttgccattggactatggctccgattcgactctcagaccaagagcatc

SEQ ID NO: 140919 - DNA, 2698 bp, Zea mays
  unsure (1)..(2698): unsure at all n locations
  Clone ID: MRT4577_599C.1
gccggccgggcctgaggcagctgctgggctcgtgacccacgccgtctcggaccaacccgagcgccgaaccccaaggctcgcgaccgcgacactcttgtgtcctcctgctctccagatctcgccgtcggcggcggcatgctcccctccaccgtcggcggccgcggccgcggccgctacctcatgctcggcatcgcccttgccctcgctgccctgctcgcgctcgcctccgcctccgagtccgaccataagtacaaaactgaagagccagttaagctttgggtgaataaagttggcccttacaacaatcctcaagaaacttacaactactacagccttccattttgtcaaccgtctgagaaccctacacataaatggggtggtcttggagaggtcctgggtggaaatgagctgattgatagtcagcttgaaataaagttcttaaaaaacgtggagaagggcttcatttgtacacttgagctagatgctaaaaaggtccagcagtttgctgatgccattgaaagctcatattggtttgaattttttatagacgatctgcctctttggggttttgttggggagactgacaagaacagtgaaaacaagcattatctttacacacacaagaacatccttgttaaatacaatgataacaggataattcatgtaaatctcacccaagagtctcctacgcttcttgaagatggtaagaaattggaaatgacatattcagtgaagtgggtagcgactgatgtgtcatttgcacgcccgttttgaagtgtacctggactatcctttctttgaacaccagattcactggttctccattttcaactctttcatgatggttattttcctaactggtttggtttcgatgatattgatgcggactttgagaaacgattatgccaaatatgctcgtgaagatgatgatctagagtccctggagagagatgttaatgaggaatcaggatggaagcttgtccatggcgatgtatttcggcctccccaaagtttgatgtttctttctgcacttgttggtatcggcacccaattggcagctcttatcctacttgtgatcgttttggccatcgttggcatgctatacattgggcgaggggctatcatcacaaccttcattgtgtgctatgctcttacatcttttatttctggatatgttagtggtggtctttactcaaggaatggtggcaaaaactggattaaagcgatggttcttacagcgtccctgtttccgttcttgtgtttctcaattggcttcgcgctgaatacaattgctattttctaccgctcattagcagcaataccatttggaacaatggttgtcatgtttgtactttgggctttcatctcctttcccttggtgcttttgggaactgtcgttggtaggaactggagtggagctcctaacaatccctgccgagtaaagactattccacggcctattcctgagaagaagtggtaccttacaccttctgtcatctcattgatgggtggcctgcttcccttcggtagcatcttcattgagatgtactttgtgttcacatcattctggaactataaggtgtattatgtctatggcttcatgttgctggtctttgtcatccttcttatagtcaccatctgcgtcactattgtgggtacttatttcttgctgaacgccgagaactaccattggcaatggacgtcgttttcttctgcagcgtcaaccgctctgtacgtgtatctgtactccatctactactaccatgtgaagacaaagatgtcaggcttcttccagacaagtttctatttcggctacacgctgatgttctgccttggcctaggcatactttgtggagctattggctatctagggtcaaccctttttgtaaggagaatctacaggaatatcaaatgtgattaaatccctgctgcttaagctagcaacagaaagatcatatgtattgtcagtggaggcatggcctaaaaaaatggattttaatggtagaccctgattttggaactgctgaggacttgctcccctttgttcgttgttatacgcatttttgtttgcctgcttattcctgcgagatcgtcctcgcgaggccgctacagcccgcacctcgtttcctctcccgtctccgagatgacgaagcgaaccaagaaggccggaattgttggcaaatatggaaccaggtatggtgctagcttgcgtaagcaaatcaagaagatggaggtatctcagcactccaagtatttctgtgagttctgtgggaagtttgctgtgaagaggaaagcggttgggatttggggatgcaaggactgtgggaaggtcaaggccggtggtgcttacaccatgaacactgctagtgcggtcactgtcaggagcacgatccgtcgcttgagggagcagactgaagcatgatcggtcgcttgtcaggcatactggggtccactatattggctgtgtagccgagacagtactccagcatttttgggttatgctctaggatctctaaaggttgggtgctaagatttctacttgtttaccgttgtgaatttcacaagtgatatctgatcctattactatcttgatgacgtcaaatttgcttctggtttctaccctttggtttgcaaatccctttttctttgaaaattttacttataaaaaaaaaaaaaaaaaaaagaaaaaaaanaaaaa

SEQ ID NO: 140920 - DNA, 273 bp, Zea mays
  Clone ID: MRT4577_5C.1
gcatcatatataatatatatatatgtgtgtatgtgtgggaatcttgatgatgctgcattggatatcaagggctatatatatatggatcatgcatatatatcagatcaccagtcatatcgagttcttccttccaggcttgctagaaggcaatatataataagaaaagactgaaaggaaaaggcaccactgcaatgatggaacgcatcagtgcatctgttttgttcttctaaacgattcaggtcatcaggtgagctaggttggctaataagtata

SEQ ID NO: 140921 - DNA, 398 bp, Zea mays
  Clone ID: MRT4577_60000C.1
gctcgcgccggcgcctgcgccggcgttacgcgccggacgtcgcttgcttccaccgtcttgagatgaccaagggcactctgaaggaaggaatggtgggcgattacgaaaccaggtatagtgctcactggcagtgtgcgcaccaacaacatggtggtctttcagagttaccaggactattgcgagtcctgaggaaaggagagtatatatgactagggcatttgttcctccggaggacggcgaactgcttcagatattacactaccggagtgtggagaaatatgaaccccactacgactactgccatgacaaagaaatcatcgccttgggtggccgtctgatcgccactgtgctgatgtgcctctctaatgttgagaagggtggggagaccatctttcccc

SEQ ID NO: 140922 - DNA, 341 bp, Zea mays
  Clone ID: MRT4577_60001C.1
caactagttactttattcattacatcaggtcattacataatacaacacacaactaccataagctcattacatgcgagtgctatcgagggtactcccgaactccttctctaaagtgtccccaaattccttgagaagatcatcaaggctggctagggacatttcctcggtgttggacgagtttcttatcccggcagggggtagggctggaggggctccttttttctgctcagtctgacatccttggcttttggtcttcttgcggatttttcttgcgggggcaagcttcttcaagttcttggcgtaatccatctttagagggcgggaggcctcacgggtattgg

SEQ ID NO: 140923 - DNA, 306 bp, Zea mays
  Clone ID: MRT4577_60002C.1
gcgcataaagggcgctaaacatcatgatttcaacattaaaaccagacacttatatatgctacaagttacacatttgactaaggagactggtgagctagtaatctcataaacaagcggacgtcgcacatcatggcagacccctcaggttaagcagagctcgaactcctaagcttccggaacacccctacatcactctcatgagtgcaactaaacttaccccgaacacatgctgtctcacagtgtccagcgatcgactcgagtagatgcaagcttgcatataagagatggagactggccaccacaagc

SEQ ID NO: 140924 - DNA, 312 bp, Zea mays
  Clone ID: MRT4577_60003C.1
cagcgaggtttttttttattttcaattttacgcaaacacggggaacatttaccaacctactcaagcaaatctgaatgcccacaatgccagaatcctaaaacatagagatttactagatcacctaagcaagcgcttcactacaagaaaacactatagtttggcacaaaactacacgacacagaagtagtaggctatggcctgaccagattacagacacgtgtctatagcatatggcatatcgtcatgatccaccagaatgaattgcaatttgcaaacaccaaatggatcagacaaaattggttccactaaatc

SEQ ID NO: 140925 - DNA, 407 bp, Zea mays
  Clone ID: MRT4577_60004C.1
ttaaaggcggaccaagccgtccgcgttggttggccctgtgagctaatccgacgcggcggtcacttgagcccccgatggagttcgccgccggcgctgcggtggccccgcgcccgatgcccgccggccccggtcgaaaccgccgggtgggcggtggagcgatcggcatcggttgggcccgccgcgtgaccgggccggggctctcgctggctcccggcgttgcgagacgtgcggcctccgcgtcaggaggagcgaggccacaggcgcgtcatcgttcgctcaaccggcggcggctatctgtggttccgcgacgagggcgccgattgtgaaagtcgaggcaagcggctctactgccactccactctgcagcggtgccagcggtgatgaccacctctcggcctactgctact

SEQ ID NO: 140926 - DNA, 393 bp, Zea mays
  Clone ID: MRT4577_60005C.1
ccaaaactacaggctgctctatgacaccaatggcctgttacttcttcacccaatcactgatgacgttgcctattacaagctctgcgaggagaggtatgttcattctgccaaaaaacataccctacctgaacacctactacagccgcaccatccgcatccacaacccgctcatgaatgacaacgacaccatcaatatcgatctgtaaaccaacaagatcatttacttcatcaagcatgacttaagcaacgtgatcatagctaccgcctcaagtaacaccgaacgtgtaggtgtgatcaaaaacaaggatgagcacaagggcggcttctataccatccacgtggaggacttcatgaaccaacagttccccacccagatggtcaacattttcacca

SEQ ID NO: 140927 - DNA, 648 bp, Zea mays
  Clone ID: MRT4577_60006C.1
atggcaacggccgtgcccgccgcctgcctccgcgcgccgtgctcctctccagcggccgtcgcacgccgacttggggccggtggcccgtcgctgcgcaagcggcattgcgccgtcgcgcccgtcgctgccgcctgcggccccgcgccgccgcggctgcttgacaacgtcgcagcagaggctaagaaagggttcctgcccgtcgtcgacaagaaggctggctactctttcctctacccgttcggatgggaggaagtggctgtgcaagggcaagacaaggtgtacaaagatgtgatagagcctctcgagagtgtgagcgtcaactctattccaactagcaaggaggatatccgtgatcttggtcctccggataaggttgccgaggctctgattaaaaaggttttggcaccatcaacacagaagacaaagttaattgaggcgaaagagaatgatgttgatgggagggcttactacacttttgagttcacagctcaggctccaaactacaccagacatgcacttggtgctattgtaattgcaaatggcaaattttacacattgaccactggagcaaacgagaggaggtgggaaaagatgaaggataggctgcatactgttgtggattccttcaaaatcgaaaatagaatatga

SEQ ID NO: 140928 - DNA, 533 bp, Zea mays
  Clone ID: MRT4577_60007C.1
aaaaaaagggaccgcccgaatttgcattaacaaggccattacatacccgattccccctttggtctccaaaggtttccaggggatacaaaccccttcccaagatccatgggggggggcggccccctagcagttagaccctcgaatcactcgggcgggggggaccaaacccccgggatcttgacatccttgggccccttggccccgagggcggggtcggacgggtgccccctctcaaaaaccccgatgaccccgccggtctccgggttgctcttggggaccctcaacgggatgttgccggggggggagggggggttcttgatgttctcctttgggagctcctcctcggcacctttgcccccgggggggagcgcgacggggttgtcctacccgggggagcccccccggcccttggggtcaaggaaggaggagccccggtagctgggccccaggaagggccccccaaaacttttgggcttgccgggggcgaccagctgcttgaccgtgaaaaggaacggccccccctcgccccccgg

SEQ ID NO: 140929 - DNA, 563 bp, Zea mays
  unsure (1)..(563): unsure at all n locations
  Clone ID: MRT4577_60008C.1
cggccgggaaaccctacctatcacacgaagcagcatgcataaactagcctctctctctccctgctggggccgcgcgaggatggatnaatctacctngaggacggagaaggatggatgcccacccgaactagtccaggactactcactccacctccctcgctccgtccagatggatgtccctgcactgagtggacattgattaatactgacaggtacgaggagctacctccttatgaaccagactgacagtacctacatcatgcatgcattgcttggaagatctacctaccgaaaggaatccatgtgtgtggctttcttaaaaactacctacgccgcccgacaaatgaatccctcccaccacacttctttcagagcaaggagggtggttgacgcaacatcctgcatgaactgcatattaagtacatcattcatctctatccctaccaaggacgcctcattcctcaccaaccaaggaatgatctatatcaaccgactggatagggacgctcgctgatcaagagcaaggacatccatctttgcaatgaatgcatgcatgatggatg

SEQ ID NO: 140930 - DNA, 1061 bp, Zea mays
  Clone ID: MRT4577_60009C.1
ggtcggcaattgcgtacctcgtggccggcccggggtgtggagggaaaagggagcgaaatcctactcggcgcacggggtccgcaagcttttcgtcgcctcgattcgcttccgccccatcctccttcccgacgcctcacatggcaacggccgtgcccgccgcctgcctccgcgcgccgtgctcctctccagcggccgtcgcacgccgacttggggccggtggcccgtcgctgcgcaagcggcattgcgccgtcgctcccgtcgctgccgcctgcggccccgcgccgccgcggatgcttgacaacgaggaggcggtctgctccgtacggcggcgtgtgctggttgccggtgccgccgcgttcctctcccggcctaatccggcggcattcgcagcagaggctaagaaagggttcctgcccgtcgtcgacaagaaggctggctactctttcctctacccgttcggatgggaggaagtggctgtgcaagggcaagacaaggtgtacaaagatgtgatagagcctctcgagagtgtgagcgtcaactctattccaactagcaaggaggatatccgtgatcttggtcctccggataaggttgccgaggctctgattaaaaaagttttggcaccatcaacacagaagacaaagttaattgaggcgaaagagaatgatgttgatgggagggcttactacacttttgagttcacagctcaggctccaaactacaccagacatgcacttggtgctattgtaattgcaaatggcaaattttacacattgaccactggagcaaacgagaggaggtgggaaaagatgaaggataggctgcatactgttgtggattccttcaaaatcgaaaatagaatatgagtgcctgaattgctgtgctgtttttccttcgttgattcgctttttcttacataactgcagtgctgagatttttcagtagtaaataccgggattgtggattatgctgatcagtttcatttcgaaatgtttgttaccagacttgagcaacatttgtttgtactttatgtgaataataaaaatatcttgtttggatgt

SEQ ID NO: 140931 - DNA, 825 bp, Zea mays
  unsure (1)..(825): unsure at all n locations
  Clone ID: MRT4577_6000C.1
ccccgcgtccgcccacggcgtccacctccaactctccgatctccatgaatcctcggttgacgcgccggtgattgtagctccctggtcacacccccaatacctgctccatgctcacaggctgctatcgcctcctcttcttcctccataccttccatgaatgctcccttcacattctgaaactccaatggtttgacctttaagcttataacctcaatcgaaaactgcaggtacctttagtccccttgtatgttaanaaaacaccatccctatctttggggcagtcattggaacgataccataacggctcaacacttgcaaaacctcgagctacctgtgaccaacccagaccctctggaaaacctttctccctactctcaccaacaacactgtgcttccattctgccaactgtctacactgaaccctgctgcttatttgcagcaacaactattaccatttagccagctagctactggctactctcatcaacaacaacttcttccatttaaccaattggccgcactgaaccccgctgcttatttgcagcagcaaatactactgccatttaacgagctagctgcagcaaaccgtgcttccttcttgacacagcaacagttgctgcctttctaccagcagtttgcggctaaccccgcaaccctcttacaactacaacaattgtggccctttgtccaactngctttgacaagacccagcgggcttctacccaacacacattattggnggggcccccttttagattgcttaattagttggaatacaataataaagatttttggatgatggtatgggggccaccccaaaataaa

SEQ ID NO: 140932 - DNA, 276 bp, Zea mays
  Clone ID: MRT4577_60010C.1
ggggcattgacaacaacattttgtgtttacaaaatcaaggaaccagtaatcctaaatttttcaaatttgatgccatgaatacacaaaacttggatggtgaactatgatacactagagagagagagtcctatattgaacatacaaggagtggtaaaacatggcaaagacgcccatgcaccggacacaaaaagacactttgctttcagatccagctgacatatgaggccagtagatgtttgttgcatacaatgctttctgaccataaacatctacggc

SEQ ID NO: 140933 - DNA, 323 bp, Zea mays
  Clone ID: MRT4577_60011C.1
gaccaaaaacgcgggccacgattattttgttcaccaacaaaaggtttttacgcggtttcaccgggacgaccaccattaattgagcagggactgggccagccagccacttgatctgacacacgatactgtcacaaaccgttttgtccaccttcttgattttggggccaggggcaccgttttcagccggagggttctcgtccattccgccggagacttccattttgggacccgcgccctggtacatttttgggattattgggttgcaaagggttttcagctccttcattttgtgattgaactcttcccccttggggaggtggttg

SEQ ID NO: 140934 - DNA, 397 bp, Zea mays
  Clone ID: MRT4577_60012C.1
cccaaaattccctttttttaaaggggatttaattcccggggccccaacggggggtttttccaaaacgggtttcccaccattttttcccggggcacaagggccccctgtatttttccggttcgggtttttttcccccccctcaaattttcaatttttccccgggaaacccgggttcttttgggaaaccctaaaaccagggccccccgtttaacggtctttttccctaaacccagcaaaagcgggggggctaaaggggggcttgaggttttccaaaaaacttaacaaaaaaaagccctggggccctatttcacctgccaatttaagaactttttttcccccaaggggtctctttgccacgtaaaaaacccccctttttaaaaaaagagggggttccttt

SEQ ID NO: 140935 - DNA, 251 bp, Zea mays
  Clone ID: MRT4577_60013C.1
tagtgagtcgtattaaacattgccactcactatacggtgttatatttcttatgtctactcactggctgaacttgagagatcgaattacatcgtgtcctgtgtggcgggaggtgattatttgtgcatctatgagggtggatggtcatgttgtcgcgaagtgattctcagacttgcgcgtgtactcagaggtttgatcttgtgagctccctgaaaggtagagctcccgaggcatttttcaaccgttttgtggt

SEQ ID NO: 140936 - DNA, 449 bp, Zea mays
  Clone ID: MRT4577_60014C.1
cggacgcgtgggaggaaagtaacaagcatggaaagcatgatccaatatacatggtgggatgcgtatatcctgcatggatctccaataaaatctacagcccaccacattatatgcgagggtaaaatggagacgagaacattgctcttagggcaaggtggaaaatgcaacatcttgagggaaatactcagcgcaagcttacatttctgaacacgtacttgattcttttagacaagctgaggtgtgtacaaacatgactgtgggcgctgattttgtatatataaaaaattgctagcaggcaatagcattacaatcgatgttgactggccaagacttatcattcaattgcggtcctaggacttgaattttagctgcgagcctaacgtcatatgcctattccatatggactatcagagaaatgctagcactttgaatcaacaactagcacgctt

SEQ ID NO: 140937 - DNA, 489 bp, Zea mays
  Clone ID: MRT4577_60015C.1
tcgagccggccgggactgcccatccgcagtgcgcgacagctatcatcaccctcgatccggttcacgcgttttgcactcgctggactaccagtgaagggaggacgggattcatgaatacagtaggtagcaacagctcttgctgacgacaacttatgtagaggcaatgtctagaccgccgacaatgctcaccgcacctgaacctgttcctgctactgatagggtctctcagagacgattgcgcaaaagatgaagatcttcagactccctgactttcttgtagaactcagctccacatgagagggcaaactgcatgtgattcgcggtactacatcctgcgtgcacgtcagccgtttcactgcccttagcaacgcatcaccccgagcatcctctagttgacgccagccagaaccagaagatcttgtttcttgagagggatcggcttggacttgtgcattgcctctatgatgagaaccctgtacgtctgtgaag

SEQ ID NO: 140938 - DNA, 314 bp, Zea mays
  Clone ID: MRT4577_60016C.1
tttttggttttttttttaattttttgtgttttcttcttttggtatggctgtgtcttgtcacaaacaaaaaaaaaacagttgttagctcgagggggggggtgacgcccggccccgaaccaaaaatacctttcttgggggcgcagggcctaaaaatcccccggaacgcggccccagggtgccttctttggggaagtggctgccggccctggcccggtgggggtcccaaggggagccccttggcgaccctctctggggcccccagccccgtgacctggccacccgaggcgcatgggaccctgccctgtggccgccca

SEQ ID NO: 140939 - DNA, 388 bp, Zea mays
  Clone ID: MRT4577_60017C.1
gggcccaaaacccgggtccccttttaaagcccttatttatatagccgggcaaaggtcaaaaacgggggggcataccatggggggggggggcagaaaaaaatcaggggttacagggggggggcgggctgtctaatttaaactacttgggggggcttgcagctcggttaaataaataaaaaaaacaaagagaagcccgcccccatcaaattcaccccccggggggaaaaaaaaacaaaaaacttcctttgggaagggcaggcaaagttaccctgggtaggaccgcgggaggggctcaaaggcgagtcccttcagtttaacaacaaactccacaggcccctggaggggggaaagcccccccaaccttgaaaatcgggccccccttttggcc

SEQ ID NO: 140940 - DNA, 564 bp, Zea mays
  Clone ID: MRT4577_60018C.1
gtgttttttttttttttttttttttttttttttttttttttttttttttttttttttttttttttttttttttttttttttttttttttttttggggaaaaccagaaagaattcctggtccaaaaaaaacaggttagggaaacgacattacgagggggggaaaccacccctcggcagaatctagagggattgaaaaaaaggggtcttttctggtttgggggcccccacaaaaaaaacacctggggaggtttggagcaaacaccaccatacatttattgggaccggacaaacattggaacaaaagggagcagggagctagtatagctccacaaaaaaacaaccccaaccccttccttttttaaaaggggtccactggggccctgaactttgctccgggggaaaccgggggataaccgagctttttctcgatcctgaacaagtgggtgtatttggccaggcccccaaaccgggaaggggctccccttttgatttggcccctaaacaggccaactgaaagggcaacaatgaagggggcccctggctcgccactcctgggggttggca

SEQ ID NO: 140941 - DNA, 447 bp, Zea mays
  Clone ID: MRT4577_60019C.1
aagaaatgtacttgaggattcctgcgaagccgcgtacctaggacgaatgactgtattttgtactttcactcctactaaatgtaaaacaggcaccaccactgatggggtgctggtggaaggctgatggttttgtcaaaacaagaagatttaatggcagcaattgctgcagttgtaagagggtgccggtttcaggcgcagcgtgctggtggaacggtaacagctgtggctgtgtcaagaaggtgacagggctcacaccagctagctgtctcaatggaagtagccgttgcttctgttaataaacaggagagttcaatgctgtcacttgcatgaatggaaaaaattgctgggggtaggcatcagaaactcgctgaatggtagttgttgttgttgcaaatgatacgccaatttactgcagctttttgggtgaacggaagaaactgctgttgc

SEQ ID NO: 140942 - DNA, 562 bp, Zea mays
  Clone ID: MRT4577_6001C.1
ctggaatacaattagggctggtttgaagttgccctctcggcaccggcccgcaccaatcctggtctcatcccttccggattgaaccctgctgtgatgcgagacagcgcaatgctggcggcgcgggaggcgaataagcggctgcgcgcagcgccgacggcgaccctccccaccgccttctcactgttctacaatgagtatgtcattacgagatcatattagaaagaggagggaagaagaagatgatgacatgatgttgtttattttccctgccttatatctgatgggttcaactagaagtggggggacaaaagaagaaacgccatacatcagatgagacaactccgtatgtgtattgtcaagtattgggaagacaactccgtatgtgtgaccattgttattactgtatttgcttatgtagctgattacttatataactgtttcttggcgagtatgcgtgaacaattgcaagtctttttgttattactgtatgtattaaattgatttgaacaaattgagtgcatcctgattgtgtacagaaaaaaaaaaaaaaaaaaggccccta

SEQ ID NO: 140943 - DNA, 378 bp, Zea mays
  Clone ID: MRT4577_60020C.1
catcattgctgtttgttctaggatggggcggatataaatcctgcgtaacagaatactggcatctattattatttattgtgaaggtttatttcattcggttgcttggttttcaaccttattttcttcaaggatgtgatgtaaagctatatatgtttcacttttctttggcaagtttttcatcatatgtttctattttgttacaggcaccgtaggaattgtggactacacaaattatgatgatatgaaatatgctgtaagtccataatacattcccttgtctcatgacattggcttgtcaatttgtgtgaatcatttcattctatagattttttctcatggatataccggttgaccttctacaataacttatctttggtt

SEQ ID NO: 140944 - DNA, 411 bp, Zea mays
  Clone ID: MRT4577_60021C.1
tgatttcttttcctggcctcggagtccgcgccgcccgccgcgttgcccgagatgctgtccgccaggccgagatccggctccttcgaggccgggctcaggggtaccgccaccgcctcgtccgtttccagagaccgcaagccgtcccctcgcctccagcgcagccgctcacccgccgccggcggttccaacaaggcgttcccgtcaccggagcagaggcggcgcggcgttggcggcgtgggcgccatgcagcagcgggtggcgcagctggaggaggagctccggcgggagcgggaggagaaggcgcgggccgtgagggagctcgaggagctgaggcgggaggatggcgccgccaagggtgtcgcggagaaggtgcaacttctggagcgggaggtggacaagtccaaggagtcg

SEQ ID NO: 140945 - DNA, 386 bp, Zea mays
  Clone ID: MRT4577_60022C.1
aggaaatggccggacaaacataggacataaactggtgctatgcaaaaagccaggaaaaaccaaacaatgtttaaatagccttgacagaaaaaggtagcctgaaaaaattttttaaccagggctgttgtccacagatattcggttaaggtgcatgggatacgacacatgcttaaaaaaaaggggcggttgccaaaaaccacactcaggggagcgcttccataatggggggggcacaagtttccattagaagcttagaggggcttggcccacctggggctccaaacaaaggtctgggggaactcccggtagacgttgttgggtcctacaccagtgtatgaaagccccccttctatgtgtcctcccgcccacgccaaatgttcagggtt

SEQ ID NO: 140946 - DNA, 860 bp, Zea mays
  unsure (1)..(860): unsure at all n locations
  Clone ID: MRT4577_60023C.1
agcctctccgggagcgacgacgacaacaacatctgattgcaatacattcacgtcccgggcgactctgcaacaatcatggtaccaaagcctcaaggcagtgctgttcagtcggctacgcatcgccctctcccgccgctccccaagctccgcgtccgacgaccaaacaagccagaggtgaacccatgcctcggcgcaatgtcctcagttttgggatgctgggcttcgtcgggttacagcatgcaagcatgcgcacagcttgaacagaaattgcgccagtgcatggatgctccacgagaccccaaccaaaagaagaacaacatcaactaccacctctcgagaatgtaccccaagattgttggccctcacaagcgcaactagacggcctgcatctcgttctctttgtacactactcatacccacgccacggcggccgcacgaaacagcatcatggaggagttttatcgcttttggatcatcacttggagttatggagacaaaggctgtagataggtcgtgctaaggaagagtcggacgtttgcacatgttgtcttgagaccaatctctacttggaaccctgagccataatcacgtgctgagtacgtgcagaattgtgaagcaaggaagaggccaggctaggccaagccattcacgcaatcagcctcatgtggcacaacacgaaaactaggccagtgcgaccaaactccaaggtccgccctttgcgcacgaccnatttgtggctttgtttgttctgtatcgggccagcgcttaccacattttactacgactcatcactcaagaccctccaacagcgcccgtttttgcgatcgtccgtgtgtggttgaagcaatgcaactctttcc

SEQ ID NO: 140947 - DNA, 478 bp, Zea mays
  Clone ID: MRT4577_60024C.1
gtaaaaaaaaaaaaaaaaaaaaaaaaaataaaaaataaaaaaaaaaaaaaaaaaaaataaaaaaaaaaaaaaaaaaaaaaaaaaaaaaaaaaaaaaaaaaaaaaaaaaaaaaaaaaaaaaaagggggggcctttttaggggacccaagtttccttccgggggcttgcaaggaaatggtttttttatggggcccccaaaattaaatcaccggcccctcttttaaaaccgccggaattggaaaacccctgggtttcccaaattaaatccctttgaaaaaaacccccttttccccagtggggttaaaagcaaaagggcccccccctatcccctttccaaaaattggcccaacctaaatggaaaagggacccccccttttcccggcccataaagcgcggggggtgggggggttccccccagggggccctttacctttgcaaggccctatagccccggccttttggattatttcccttacttt

SEQ ID NO: 140948 - DNA, 454 bp, Zea mays
  Clone ID: MRT4577_60025C.1
ggaacaacgggcggcatctataaaggaaaaccccccaaacggccatacatgagaggggatagcccgagaacatgaagcaaaacagagccccaagctgcagcggcccacagggggcaccgccccccactcccccccccagaccagacgacccccactttatttaccccatgtcactcccagcccccaccgggcagcccacccgacagccactggtatagctaccacccactggccccccccccgagagggggaaaaacccccccgttcgcgttgaactgaacaaaaagccccgcccatgtaggccccccccccctgacccatcaatccccccaccccctgtcccccccccaagggcccccccggggcacggccccactcggtggccttttgggccacctaaggggccgggtgggccttttggggctcctaaagggccggttcggcccccgggggc

SEQ ID NO: 140949 - DNA, 456 bp, Zea mays
  Clone ID: MRT4577_60026C.1
ctcataaattgtccgaaagccctaaaaatctgagtctcgcattaagtccaaacactttcatgtggctcctttcgtcaactccacagagatctcctcatggctccaattgctgtcggcgatgttgtaccagacggaactatctccttcttcgatgagaatgatcaacttcagaccgcctccgttcactctctcgccgccggtaaaaaagtcattctctttggtgttcctggtgctttcactcccacttgcagcatgaagcatgttcctgggttcattgagaaagcagaggagctgaagtcaaagggtgttgatgagatcatttgctttagcgtgaacgatccgtttgtgatgaaagcatggggaaaaacatacccagagaacaaacatgtgaagtttgtagctgatgggtctggagaatacacacaccttctcggacttgagcttgaccttaaagac

SEQ ID NO: 140950 - DNA, 708 bp, Zea mays
  unsure (1)..(708): unsure at all n locations
  Clone ID: MRT4577_60027C.1
gcagatcgcccgcccgcctgcctatgctgctgttataataattaaaccaacatctccgtcggctgacgctgatccaccgctgctgctcgctgctaaccgatcgcatcttccccggttccgcgccgccggccagcagtagcagtagcagcaagcggcatccggcatganccgagggtcgggcggcggcggcagcgggaagctgggccagcacgtgagctggctgtggcgtgggccacggcgggcgctgtgcgcggcgcgcgacctgtacgtgcgcagcctcacgggctgcgcgggccacctgccgggcgacgccgccttcggctacccgaccttcgccgccgcgccgtcgttcggcagcttcgcgtcctcgtcctcgtcgcgccgcgcctcggacgccgaccaggacctgcgggagctcgtccgcgccgcgtcccagcgccgcgccgccgagctggagcgccagcgccacccggccgccgtgccgcgcagccgcagcgtcgccgccgccatggcgcgcatcgacgaggacgggccctgcgacttcgcctcctccgccgcctccgccgccgtgtttcccaggagccggagcttcgctcccggagctggacgcgtcgtcggtgtcgccggccgcaggggcagcgtggccaccctcgccgcctgatgcttctccccccctcctcctcggcgtgatcatgatttgatgcttgg

SEQ ID NO: 140951 - DNA, 527 bp, Zea mays
  unsure (1)..(527): unsure at all n locations
  Clone ID: MRT4577_60028C.1
gtatctcctcgaggccggccgaanaaaaaaaaaaaaaaaaaaaaaaaaaaaaaaaaaaaaaaaaaaaaaaaaaaaaaaaaaaaaaaaaaaaaaaaaaaaaagcccctcccctcctaccccccacaaaaaggggggggggggaacaaacccaggcgaaggggagggtgggagggaaggagcaccaaccatgggggacggcaacttctaccggaactatgggaaaacgttcaaaaaaccaaggggtccttatgaaaaggaacgtcttgatgctgaactgaaactggtccgggaatatgggctgaggggcaaacgggagctttggaggggcccggatggcctggacaggatcccgaatggtggaagggacttggtcccccctggcgaaaaaaaccccccgcggatcttttaagggggggggctttttccccccatgaacccctttgggctggttggtgaggggccaaaaaaacttggttatggtcttggcccccccggtgaaaaattccccccaaggggggttccaaaac

SEQ ID NO: 140952 - DNA, 1240 bp, Zea mays
  Clone ID: MRT4577_6002C.1
gccggccggtccgagaagcccgacccaatcctggtctcatcccttccggattgaaccctgctgtgatgcgagacagcgcaatgctggcggcgcgggaggcgaataagcggctgcgcgcagcgccgacggcgaccctccccaccgccttctcactggtaagacgctgccctctcttcctatcctcgcgttacgcgttacttctgcgtcgcgtgcctgcgcgagcgcctccacggtctcgaggcgtccgccgctgccgcctccgcgccggggcgcaagtccacatcggccatgccgtccctgttcgccaggccgtttgccgccggcagctcttctgtgtccgaccccgtggagttctcgtgcggccgcggtggacaccacacacttacgacatgaattgccgagatctgagtcaggaccgggctacatcaatactcctaccctacttgagcgaatccattgagcgccgaacgatccagaatggccaactgaaaataaaacacgcagcccgatcgtcgtttatcccggtagtttacggcctgtgattcattaattctattttattatttaacttctactatggatggcgaccacgaccagtggcttcacagtaatccctacaacaccaattatagttggggaaggtgaacctccctcttgggatccggtaccaactctaaaagttctacaatgagtatgtcattacgagatcatattagaaagaggagggaagaagaagatgatgacatgatgttgtttattttccctgccttatatctgatgggttcaactagaagtggggggacaaaagaagaaacgccatacatcagatgagacaactccgtatgtgtattgtcaagtattgggaagacaactccgtaggtgtgaccattgttattactgtatttgcttatgtagctgattacttatataactgtttcttggcgagtatgcgtcaaaaaaaaaaaaaaaaaaaaaaaaaaaaaaaaaaaaaaaaaaaaaaaaaaaaaaaaaaaaaaaaaaaaaaaaaaaaaaaaaaaaaaaaaaaaagggggggccccctcttaggggttttattaccccgaaaataaattgggccccggtcccccaagggaaccaagtttttttttttagggtcatttaaaaatttggggaaaataaggtaaaaaattgttccgtgtggaaaatggtattcggtttaaatttccaaaaaaaaacctaccgggaaaaataaattgaaaac

SEQ ID NO: 140953 - DNA, 2043 bp, Zea mays
  Clone ID: MRT4577_60031C.1
gtcgtggcgggagagagagagatcgccctctcggggcgcgctcactcgctcgggcgccggcgatgctgaggaccaagagcacgcggtcgcgcggcggcaaggcgcgccgcgccgcgcccggggccgcctcggcggtcaagcccgccaaggccgacgggaggtcgccgtcgggagagctctcgctgcagctggagcacgtctccctcacctccttgctctccgaccgccgccccgcatccgggctcacgcgcttcgaggtgctcctagaggaagaggagtcgggctgctaccgcgccgacccgaccccgtggcggctgcgacttcctgagccacaatctatgcccccgccgataccgacccatgcgttcacgcaggcatcgccggtggacgcagacgagaccatggaggagaaggattgctgcatcctcagccaggatttcttctgcaccccggactacatcacgccggagatgccgcaggtggccaacgagttcgacgacgacgataaggagaacatcccctgcccaaaatctccggagaagtcagcgaaccctcgtagcaagcggtacagaaccgattgttctcccaaagctcgggaggttacggacttctctttcgaccatcagattacgccggttctgtttgacagcttgactcgagatgattcggaagaagagcagccgaagcagcctgcgctggaaaagaggggtggttatgtctcccagtcagcagtggctctgcgttgccgggtgatgcctccgccatgcgtcaagaatccatacctcaataccgatccatgcatagatgctgctgtttacggtgggaggcagtgcaactcagcagtattctctccttcaattggtggtaatggtctttcacgctatcgaactgatttccatgaaatagagaaaattggttatggcaacttcagtgttgtgttcaaagttctgaataggatagacgggtgcttgtatgctgttaaacggagcatcaagcaattgcataatgatatggaaaggaggcaagcagtgaaagaagtccaagctatggcagccttaggttctcacgagaacatagttcgatatttcacctcttggtttgagaatgagcaactttatattcagatggaactctgcgaccgctgtctatctatgaatcggaaccagccagtgaagcgtggggaagccctggaactgttgtatcagatctgcaaaggcttggatttcatgcacgaacgtggcatagcacaccttgatgtgaagcctgataacatatatgtcagaaatggtatttataagctcggggattttggctgtgctacacttgttaaccggagtctagcaattgaagatggagattcacgctatatgcctccggaaatgctgaatgataagtatgagcatcttgacaaggttgatatcttttctcttggggcagccgtctatgagctaataagaggcaccccgcttccggagtctggatctcactttcagcaaaggagatcctgagacacccttcttttgacaagctccccaaggccttatcgaagtagaagtgctgccgcgcccgactcagatcagagcagccggcaaagggaattccgcagcctgagacacccttcctttgacaagctccacaaggcctcatcgaagtagaagtgctgccgcgcgtgtatcagatcagagcagccggcaaagggaattccgcagctgcgtcacattcaccttcagctgctcccaaaggaagttgagcacgagcagcgtcatgcgtgtgccatgtgccctgttctgatactgtagaagatgggtggaaacgaagcagggatctgattttaattccaggaactggagcacgagcagcgtctgtaaaggactaaaaggctgtggctgctgttgtgttaaggttgtgcctctcttttggtttctgatgcacgcttggaaccatcaaccctgtgcctttttttggggtgcttgttatcagttgcatctgggcagcgaatgctaatttggatccaaactctccagttagaccaaaaaaaaaaaa

SEQ ID NO: 140954 - DNA, 357 bp, Zea mays
  Clone ID: MRT4577_60032C.1
cgttattctttttactttgttaatgaattacagcgaaaaagcaaccttaattagggcaccgcctatgattttttagtaaaaaaaatgtttttgggtttgtcaaagcaagttcgacaaatgggtggccccgttgcaaatgggagaggggtaacaaagctcgcctcctgctgctgggaaaacgggagccctggttattttggttaaaagggaaaaaaggttgttgtttctaaccccaacaaatggggggaaaatatgctcctggaaattagccaaaggggatagggggggccattggctaaaagggaaaaatgggtgctttttagagtagggggaaacccaccgggggaaagggagggg

SEQ ID NO: 140955 - DNA, 2236 bp, Zea mays
  Clone ID: MRT4577_60033C.1
ggatttctgcatcctcagccaggatttcttctgcaccggagactacatcacgcctgagatgccgcaggtggccaacgagttcgacgacgacgacaaggagaacatcccctgcccaaaatctccggagaagtcagcgaaccctcgtagcaagcggtacagaaccgattgttctcccaaagctcgggacgaccatcagattacgccggttctgtttgacagcctgactcgagatgattcggaagaagagcagccgaagcagcctgcgctggaaaagaggggtggttatgtctcccagtcagcagtggctctgcgttgccgggtgatgcctccgccatgcgtcaagaatccatacctcaataccgatccatgcatagatgctgctgtttacggtgggaggcagtgcaagtatgaagtattttctccttcaattggtggtaatggtctttcacgctatcgaactgatttccatgaaatagagaaaattggttatggcaacttcagtgttgtgttcaaagttctgaataggatagacgggtgcttgtatgctgttaaacggagcatcaagcaattgcataatgatatggaaaggaggcaagcagtgaaagaagtccaagctatggcagccttaggttctcacgagaacatagttcgatatttcacctcttggtttgagaatgagcaactttatattcagatggaactctgcgaccgctgtctatctatgaatcggaaccagccagtgaagcgtggggaagccctggaactgttgtatcaggtttgtggttttgttgtttaccaattttattccttctttgtcaccgagcctggtctcgtaggataagaggcctaagtcttaacacttctgttttttttaccaataattctgtagaaacatggaactactcattcaggatgtttcacatcttagcatctataagcattaactcattttagtctgctaatttggttcagaaggaatgtattccgggaactaataatgtggtttacaaaactgtcacaacaaaattggagaaaaacacattgatttgccctagtttgaattaaagagagattggattgatgtatttggtagtttgatgttataattaggtctaccactccagcatgttgaccaagtcaaacccatataaaatgcaaagaaatataggatgcatgccagttctgtagtgtatgatctacgaagtccaaatatgttcgacttgtgcaagttttagaattgaactattgaattgatcaatttcaaagttttttatatcaagtggggaaatatgtaaacctatgttctgttggacatgcattagtgatgtttcttttttagcccccctgtgaagttcattcagcatcattccttttaattatttctggttctttattaaaaaacttatccggttcactccaccagaaaacatttttttatcttatacttttcatatgtaccttggttacaatactaacagtgagctttgtgaatcctaagatctgcaaaggcttggatttcatgcacgaacgtggcatagcacaccttgatgtgaagcctgataacatatatgtcagaaatggtatttataagctcggggattttggctgtgctacacttgttaaccggagtctagcaattgaagatggagattcacgctatatgcctccggaaatgctgaatgataagtatgagcatcttgacaaggttgatatcttttctcttggggcagccgtctatgagctaataagaggcaccccgcttcctgagtctggatctcactttacaagcattagagagggtaagatcgcattgcttccagggtgcccgatgcagtttcaaagtttaatcaagtctatgatggaccctgatccggtgaggcggccttcagcaaaggagatcctgagacacccttcgtttgacaagctccacaaggcctcatcgaagtagaagtgctgccgcgcccccgtcagatcagagcagccggcaaagggaattccgcagctgcgtcacattcaccatcagctgctcccaatttttgtgtatctatctatctatatgcgtgtgccatgtgccctgttctgatactgtagaagatggttggaaacgaagcagggatctgattttaactccaggaactggagcacgagcagcgtctgtaaaggactaaaaggctgttgctgctgttgtgttaaggttgtgcctctttttggtttctgatgcacgcttgaaaccatc

SEQ ID NO: 140956 - DNA, 332 bp, Zea mays
  Clone ID: MRT4577_60034C.1
cggacgcgtggggcgttcagaccattgggctgatgtgcgcccaaacagcgcagaacctgagggagatgttcaggctgcagctcgctactccatgtctctacgctgttgccggcagcgccccccactgaagaaactatgtgctgtagtatatccacccgctagctacctagcatagacattcagcggcgattattgcatcataatgtgacacgcctcatcatgggcgtctgcgtcagcgtgagcaactacctgaatgaacacatcgtgataaaaagaaaacatgtgtcgtcccggttcatctagcccgctcgcccatccactaccctactaac

SEQ ID NO: 140957 - DNA, 1217 bp, Zea mays
  Clone ID: MRT4577_60035C.1
accatatttctgccttggagatctctgggaggctttcaatgagtggagcttttacggggctggtgttccccttgttataagtggaagtgaatctgtgattcagtattatgtgccatacctttctgctatacagctgtatgcagaccctttgaagtttcaatcgaagatcaggcattcttgggaggaaagtgatggggaatctatggatactagcagcgaaggtagcagtgaaactgatgatatccgattaagaagcttaactgtggaagctacatatcgattggatggtggctttcaaagggatggcgatgaaatgcactcaccatcgactcgtccaatttttgaatatcttgagacagatccaccatttggtagagagcctttaacagacaaggtatcagttcttgcaagtagatttccagatttgaagaaattcagaagttgtgacctgctgccaaccagttggatgtctgttgcatggtaccctatctatagaatccctactggaccaacactcaaggatttggatgcatgtttcttgacatttcattacttatcaacaccttccaaggatactgatcccagtacaccaccatgccccaatttgggggggcttaattgcaacatgaacgccgctggcaaactaacattgcccgtctttggactggcatcatacaaattgaagagctctatttggtcgtcaaataggcctgaggagcagcagcttgcagcttcactgacgcagacagcagatgactggcttcgccatcgccaagtgtaccatccagacttccgattctttctcacccacttcaacacagcattgagatgacatgagatggtcgcatctctcgctgtaaattgtcttcattagtacaacctccgttctcgaatatttgtcgtccactatatttttgaactaaaacgcgacaaataaaaaagaacggaggaagtatattatatgttgttggctgagccaggctacctgtaacactatgtggttgaccgcgtaactagcgcttctctgaacttttttcgtatggttcagtagttcaagccagacagctaatttgtaacttctccaataattcttttgttgtaggtaaacttttgagagtaaacattatggagatctgtaaaacagaaactgatggttataaactttttaaacttagacttgagaacacattgcttataatttagtttaaccttgtatt

SEQ ID NO: 140958 - DNA, 1929 bp, Zea mays
  Clone ID: MRT4577_60036C.1
ggattgctgcatcctcagccaggatttcttctgcaccccagactacatcacgcctgagatgccgcaggtggccaacgagttcgacgacgacgacaaggagaacatcccctgcccaaaatctccggagaagtcagcgaaccctcgtagcaagcggtacagaaccgattgttctcccaaagctcgggacgaccatcagattacgccggttctgtttgacagcctgactcgagatgattcggaagaagagcagccgaagcagcctgcgctggaaaagaggggtggttatgtctcccagtcagcagtggctctgcgttgccgggtgatgcctccgccatgcgtcaagaatccatacctcaataccgatccatgcatagatgctgctgtttacggtgggaggcagtgcaactcagcagtattttctccttcaattggtggtaatggtctttcacgctatcgaactgatttccatgaaatagagaaaattggttatggcaacttcagtgttgtgttcaaagttctgaataggatagacgggtgcttgtatgctgttaaacggagcatcaagcaattgcataatgatatggaaaggaggcaagcagtgaaagaagtccaagctatggcagccttaggttctcacgagaatatagttcgatatttcacctcttggtttgagaatgagcaactttatattcagatggaactctgcgaccgctgtctatctatgaatcggaaccagccagtgaagcgtggggaagccctggaactgttgtatcagatctgcaaaggcttggatttcatgcacgaacgtggcatagcacaccttgatgtgaagcctgataacatatatgtcagaaatggtatttataagctcggggattttggctgtgctacacttgttaaccggagtctagcaattgaagatggagattcacgctatatgcctccggaaatgctgaatgataagtatgaacatcttgacaaggttgatatcttttctcttggggcagccgtctatgagctaataagaggcaccccgcttcctgagtctggatctcactttgcaagcattagagagggtaagattgcattgcttccagggtgcccgatgcagtttcaaagtttaatcaagtctatgatggaccctgatccggtgaggcggccttcagcaaaggagatcctgagacacccttcgtttgacaagctccacaaggcctcatcgaagtagaagtgctgccgcgcccccatcagatcagagcagccggcaaagggaattccgcagctgcgtcacattcaccgtcagctgctcccaatttttgtgtatctatctatctatatgcgtgtgccacgtgccctgttctgatactgtagaagatggttggaaacgaagcagggatctgattttaactccaggaactggagcacgagcagcgtctgtaaaggactaaaggctgtggctgctgttgtgttaaggttgtgcctctcttttggtttctgatgcacgcttggaaccatcaaccctgtgccttttttttggggtgcttgttatcagttgcatttgggcagcggaagtgctgccgcgcccccgtcagatcagagcagccggcaaagggaattccgcagctgcgtcacattcaccatcagctgctcccaatttttgtgtatctatctatctatatgcgtgtgccatgtgccctgttctgatactgtagaagatggttggaaacgaagcagggatctgattttaactccaggaactggagcacgagcagcgtctgtaaaggactaaaaggctgttgctgctgttgtgttaaggttgtgcctctttttggtttctgatgcacgcttgaaaccatcaaccctgtgccttttttggggtgcttgttatcagttgcatctggacagcgaatgctaatttggaattttctctcc

SEQ ID NO: 140959 - DNA, 1358 bp, Zea mays
  Clone ID: MRT4577_60037C.1
cgggtagagagcctttaacagataagggtatcagttcttgctagtaaatttccagatttgaagacattcagcagttgtgacctgctgcccaccagttggatgtctgttgcatggtatgtctgtaaatgctcttggattctctgacatcattttcaatgcaactttttgagaggtagcatctctggactgtgctgttcttacttggttgatgtttgtaagttttttactattccatttcttataggaaaaactcccaacgttaccattttaagtgtttattaaataactaatttccaactttatacctataccaaagttacttttgtgtttgttgccactaccaatagttttgtgagacctcatttcacagttgttgctttcttgttcttagttgctggtgcttataagtttctatatagcaagaaccgtcatacttgtgctgtggttcaaacagagggcacacttcatagtgactgatagaatacaaaagggaacttgctaaattttcagtcaagtaacttctgtagaattttaaaagagcaatacggtaactgaaatgttgctatgactctacatcagtttcatcccggggcatataattgcaggtaccctatctatagaatcccaactggaccaacactcaaggatttggatgcatgtttcttgacatttcattacttatcaacacctaccaagggtatgtttcatcttctgatggtatctagtcttttctccattagataaactcccctaattctttgctgctctatgaatttccattcttcagttcatctgatagctagatttatttttcacagatactgatcccagtacaccagcatgccccagatttgggggccttaattgcaatatggacgccgctggtaaactaacattgcccgtctttggactggcgtcatacaaattgaacagctctatttggtcgtcaaataggcctgaggagcatcagctcgtagcttcgttgatgcagacagcagatgactggcttcgccatcgccaagtgtaccacccagacttccgattctttcttacccattacaacacagcattgagatgacatgagatgatcgcatctcgctgtaaattgtctttattagtgtgttattatatgtggttggctgagccgggctacctgtaacactatgttgttgatcgcgtaacgtagcgcttctctgaacttttttggtatggttcagtagttcaagccagacagctaatttgtaacttctccaataattcttttgatgtaggtaatcttgtgggagtcacattatggagatctgtaaaacagaaactgatggttataatttttagaaacttatagactttacattgtt

SEQ ID NO: 140960 - DNA, 221 bp, Zea mays
  Clone ID: MRT4577_60038C.1
ctctgcatgcacacgtcagtattctgctcgatcggctccgcagaacacacgaggctggtggcgcatgtgcatgaagctggacatgtccgcgctcgagaccatcttcgagatcatcatagtctccgccggcgactacacgtacttctccgacgatgcccccgacgtaccgtctatggtgctccccatctgcgacgaattcgacggcttccagcgtccaccaa

SEQ ID NO: 140961 - DNA, 447 bp, Zea mays
  Clone ID: MRT4577_60039C.1
gggagatacacccgaagagagaatgaaaaaacactctctctcctagatcccgatctctacggcgaaccctctccgctccttcgaccggaccgggggcgcagatcaggaggggcgtacacggatggagcagtaccccaacgcggtgcccaagaccgccgataaattacgagcgctgcgcacggccgagacgcgcctggcccagtatggcccgccggtccagtacatgcgctccacagttcaccagctcgtccgggaggtgatgtgccagggcggtgaccttacaggcgtgccaggcacctgcctacagtgcatatacggcgcgagtgtctgccatgagaaagctctgcgcaagcccaccgcccgcggcgggttctgcatggccaacgccgtgcacaacagcaacggctgccagctattcagcctgcaccgcctctgaccgttggctcg

SEQ ID NO: 140962 - DNA, 567 bp, Zea mays
  Clone ID: MRT4577_6003C.1
ggccgggacgtttgccgactcgaggacggtgaaagtcgtagccgacggcccggccgcctccctctccggctcccgtccccaaggtcaatagttttctagcgagaatggcggaccagggtaaccaacccactgtcctgcataagctcggggggcagttccacctgcgctcgatctctctgaagggtacgggcccgtaacatatgcccatctgtctcatcttatgaaaggagatttgacacaaagaactacatgacccacagccttttgatgccttcgatgtctgttagcgacgacatcaatgtcccagagatgcggaccccgctctgtgctaatgctcctgctgatacaggaagcaagaactccatgatcgatatcatgatgagcgctgcttccgctgctgtttcaaacactgctgctgctcccatccagagagtgaagctgcttattcagaaccaagatgagatgattaagtctggtagattatcatagccgtacaagaccattgctgactgcttcaaaagccccattaatgatgaggaatgtcacctccttgtggacggccaacac

SEQ ID NO: 140963 - DNA, 1207 bp, Zea mays
  Clone ID: MRT4577_60040C.1
ggcacggctaagtgtccaaactgtggtgagaaagatctaccagtttgtgagttggcagacaagatcagggaggaaatcatggagttgtttcacaggaggaggaggataggacagagactgcaaggtcggatactgccatctgtggttcatatccttcatgctaggactagaggtttaggacacttgacagtgaagaaagtcgacaattatgtcgcagaggtgagggataataatcatgtgcattctaagcacatagtgaatgttgatttgagacaatgttcatgcaacgaatggcagcatacagggaaaccatgtcaccacgcactttgtttaacaacaacacaacaatttaaagatgttcggatagaggattttgtggatgactactactcagtggagaagttcgtgaaggtgtactcaagggtagtagagccaattggtgacaaatctttttggccaagagtgtcatttgcaaaggaggtgggtgcaccaattggaatgtggggcgatggtcgtcaaagaaaaaacaagattaaagggtgcgtagaaggaggaagtggtaagaaagccaatgaaaatgaaaatgtcacaagtaagaaaatgattcgtgggaggtttaagtgtccaaactgtggtgaatttggccacaggaaagcaagctataaatgtcctttcaatggaacaaagaaaagaaaaaggagaccaaggaaaaatgtgactaaaggttggtttccaaaagatttcgaagcttcgtcgcagctcgtcctgcaagagaacgaagtgcatccactagctacttaactacctgcaagagaacgaaggcgagggtgagggcggcaagggtgtcgaagagaagcaggaggtagcgtggcgtcgccatggaagcatcggaggcttgggattaggtcggaactcagtagcgaagaggacccataacaggtgtgtgagatataggagaatgtgattgtgtttggccttttgttttgtgaaatttgtacgcgatgaaggcaacatgaaactaaaattaggggatgaattttgggagagaatacagaccacatagttgtcgttctgactgctagacagttcggtaagatcccttaggcatcatatgcatatgcatttgtatggttttcatattagaattataattactgaaagcacatctgaatgatgcagattgttttgaatcctatgattgtcaaaa

SEQ ID NO: 140964 - DNA, 570 bp, Zea mays
  unsure (1)..(570): unsure at all n locations
  Clone ID: MRT4577_60041C.1
ctgcaggtttcggtccgngattcccggggttcggagcggtcagcagtacacagccccatcccaatcctagacgatcttcttcccctcctcaaggaagaaaagaagctgatccatggggaagagaaagtcatgctgctaagccatctcctaagaagcggatggacatgcttgacactggtcgtttccctgcccatgtctgcatccactggagtagcgtggagtgccggattgacagtgcaagatatctgattggcagaaccatcttgtggaatctgtcatgaaaacttcagcacatactgttaatgcactcactgagcctattgatctatatacgtgaatgggattgatgagtgcgagcgtgtctacactgtggaaggacacgatgatgcctgagcttgtcccatgtgatgaaactgatacctacaatcgtaatgtcatgcgctagctttcttgaatgccattacccatattcagacatgattgggaataacgtactggctgactgatatgccattacgcaccttatctattacttacagaactacaaaaagtttgaactatacatatata

SEQ ID NO: 140965 - DNA, 275 bp, Zea mays
  unsure (1)..(275): unsure at all n locations
  Clone ID: MRT4577_60042C.1
caaaagaannacacanagagggaaacaggagccaagcacaccgngncaagccaacanccgcacncgcaggccacaangaagcaagccccgcnncaacaacacaancnacaccccccggnacgaaggaaacacacgcgggagcggacaggcanaagaaccacccnnaccnccanacaacgngacagggccacagggagaacaaancnaccagacggggcagaccacaccaaccccaaggggggaaacacggggcacgcaagccgcgcaggcgggac

SEQ ID NO: 140966 - DNA, 436 bp, Zea mays
  Clone ID: MRT4577_60043C.1
gaaaacttcggttggttaattcaattaatgttttaatgaaaacttaggtgactgcagtttaaacgactgcatctgtcatcctgtgttgtttggatacatggaactagtagtagtagtaaagtaaaattcggtccaccttttggtacaccgtaaggatgaaccaggatcaaaattctgtcaactaaactgattgtatggccgtcagacgttctgtgtttttgcactacttggtctgacgagaggatggacggccaaggactggggacactactacacaaagaaacaacaaagccactgcagaattctctaacctatatctgtggaaaaaaaaactagctacactccggggcagatgcaggatttagagactgtgtattcaaaatttagaatgggagttttcctgataacgcctcaaaaatagaggaagagaacgcga

SEQ ID NO: 140967 - DNA, 945 bp, Zea mays
  Clone ID: MRT4577_60044C.1
taaacattctatccaggattatatagactcgagtcgtcgattgcctaaggcccggattcaagatttatttcagagaaaaaatatgtatgcagtcacggtgggtgttggcctgatgatttttcagcaactgggaggaattaatgccttaggtttctatacaagctatattttttcctctgcaggattttctggaaaacttgggaccaccttgattggcgttattcagattccaatcacattctttggggcccttctgatggataggagtggaagaagagcccttcttttggtctcttcatctggaacatttcttggctgctttctgactggactatcattctattttaaggcacaaggactgtgcacacagctggttcctactttggctctttgtggcatactggtatactatgcggcgtactcagttggaatgggcccagttccttgggttatcatgtcagagatattctcaatcgacatgaaagcaatcgccggagggtttgtaaccctggccagttggattggttcctttgcgatttcatactcattcaacttcctcatggattggaaccccgcaggcacattctttctgttctctgcagcgagcctggtcactgtgctgttcgtggcaaagctcgtgcctgaaactaaaggaagaacactagaagagatccaaacattgctcaaagccacatgagtggctaccattcgctcagtaggtaaagatccagttaaaaaaatgctgtaaatattcgcctcttgtaaattcttgtgcacggcaggtgaatgatttcgcctcttgtcgattctcctatattttagtctctttgatatatgttatttaggacaaagatacggtctacaaaatgcgtatcttcaactatttcattttctgagttttttctctgctactatacagcaccagtttcgacggttgtcttatag

SEQ ID NO: 140968 - DNA, 834 bp, Zea mays
  Clone ID: MRT4577_60045C.1
gggtacctcgaggccggccggggaatcaatcctgcctccgccgcctcgcggttggccccctcgcttcctaccatgtcgttgcgctccaatccgaatatgtcgcgatggttttgcgtttttgttgttctttgttggtgatctaatgatgggggcagcgatgtcttcgccattcctgacaaggaagatcgtgaagaagcgcgtcaaacagttcagcatcgacgtgctgcagtggacggcaagcggatatccgtcacatcgattctgatgtacgcgatgcgcgctctacgcaagatcagaaggtcaaaggagagctgcataaggaagagtcatacaacgacccaaacacacaaactaccaggacttaattaccagaaaacagaaaatttagcttaggtaccgcagggagggaaaaaaattgcacgcggccgtgccgcacgaggccgccggtgcggcccggcaccgattaacgacgcgtggatattcaacggcatctgcatctcatggataaagcctcggacgtatacgcagctcggctaagcctcggacgtatacgcggcttggcttacagaacggctcgctttaccatcgttgcttccatacgcttccatacagatacgtatcttggcttccaaaaaacatgtcctgctaatcatattgaagccgccgccgccgccacgcgtgactggtggccgccgtcttcctcatttgccaagtgacggttgcgccattacatatcgtagcttccaaagaacaagtcctgcaacgatcatattgaagccgctgccgctgccacgcatgaacggtggctgctgtcttcctcgcttgcaagtgacg

SEQ ID NO: 140969 - DNA, 910 bp, Zea mays
  Clone ID: MRT4577_60046C.1
ttccacgcgtccgtgattactgaatcattgtatcttccacagctacctggattcttatccacttctgctctgcttattgaattgtttctcaaacgaatgaacatgcctagaggattacactgtgaggcactgtcgatctattttgcttagttccgttcgcttattgaaattccttacaatctgaacaagttgagatgcaactcaagagctcggctgcctcgctgtttccgtgttttaactcgtaagcctagtaatgttccttttctatttccaaatttctgtcagggcgactatcccaagcaaaccgaagccagcaacaagcaccgacaaaatcaaagctccaagcaaaacggcagcaggcaacaagaaacccgcgaaggctggaatcaagcaagggagcattatgtcattcttcaagaaagcatgagccagcgcggtgcgcaccaaaacgagacaggactaggttcagcaaactgtctgctgccgcgcttactgaaccaggtcgctagccaggcatctgaactggtagccctacggctctctacctgaatatcgtcaggccagcgagcaagaagggctccaagcagagagcacgtctgttagttcagtgattatcttgctgtaggtgtacatatagttgtactgagaggtactcacagcctgtttgcactttttgggcggttctgttgtgttgtgtggaagtcgaagggagaaacgctttgggtatctccatccggtattgcaacctactggagtttatgggccaaagctagtggaaagtgtagtagtacagtagaagaggagagattatccgtgagtttaattatgtgtatctaataaacttgtatattgtttttttttataaaaaaaaaaaaaaattattggagcggcgatctagaacctagatcgc

SEQ ID NO: 140970 - DNA, 172 bp, Zea mays
  Clone ID: MRT4577_60047C.1
cccacgcgtccggctctcgcttgtctggccaggcggggcgaaaggagcggtcggacgacatgcccgtaaatggtccgcaaaaatttggcccctcgccttgggatggcacaacttcctgttgctgtgttatgatcggtggtaatataatgtgtatatggtgacatttggtaat

SEQ ID NO: 140971 - DNA, 342 bp, Zea mays
  unsure (1)..(342): unsure at all n locations
  Clone ID: MRT4577_60048C.1
tgaggccgttttttttttttttttgggggggttgtgtggtgttgtnatatagtggtggggggtaaagtttgtattgaaaaggattggtgatatggaatatgataatgttagttattgttatggtaatagaaaaaaagtttttttttttgtgtagggaagttatggggggggggaatggagttgatagtttaggttatggttgtgattgtagattgaaaatggagaatttataaaaaatgttgatgaggtgaaagagttagttgtttttgtagaatagttaagagggagattatgtagtgtaatgatgaataattgaggtggggggagtggatggaatatttg

SEQ ID NO: 140972 - DNA, 394 bp, Zea mays
  Clone ID: MRT4577_60049C.1
gattatatagaatcagttcgtcgattgcctaaggccaggattcaagatttatttcagagaaaaaatatgtatgcagtcacggtgggtgttggcctgatgatttttcagcaactgggaggaattaatgccttaggtttctatacaagctatattttttcctctgcaggtatccaagctagataaattttgtcctcttaaaaaacgaggtatctacagctctttctaaaaacttcaggattttctggaaaacttgggaccaccttgattggcgttattcagattccaatcacattcttcggggcccttctgatggataggagtggaagaagagcccttcttttggtctcttcatctggaacatttcttggctgctttctgactggactatcattct

SEQ ID NO: 140973 - DNA, 145 bp, Zea mays
  Clone ID: MRT4577_6004C.1
ttctctcgtacgaccacgcgttcgtacactttggcgaattttggagcacctatgcgttttgtattggaacaacttaaagaatctctctagatgagcaatcatgaattctcattcgtaaaagagctacagcatgagacccgcacaa

SEQ ID NO: 140974 - DNA, 335 bp, Zea mays
  Clone ID: MRT4577_60050C.1
atgcggtcttggtgttctattctgtaaaacgcagtgccttatgcatttcagagcatttgctccttttgggcccagtcgattagttacttttgaggttcaatgcacgtcatgggtgaagttttggtacgccactaaccactctattttggaatttgacttcatacgatacccctgaaaatatgaagtagtcggcattttgcctgcgcctcttaagactacttttaataaagggttcaacgtttcaaatgcatagtaacacccaggcattccccaaccatttgactgtcctaggactatgaggggcgggccttaggtttaacaatgctggagggcaa

SEQ ID NO: 140975 - DNA, 651 bp, Zea mays
  unsure (1)..(651): unsure at all n locations
  Clone ID: MRT4577_60051C.1
caagtagtcgtcaccattagcagtcaccgttaagtttcttctcaaatcaccatccgattttgattggattgcgccaacatgattgcttgcacattacatgctcgctacttattgtccctaggttacagaaacctatatttcccttttttatgtgtggcatctgagttgtaacttaattcaagttctaatttgcggtgcatacttgtttttagctgtatgtttgcctctttcatgcacgccattatgtttatctattgcctgcacttggtccacaggtacaaggctttgtagaggacaacaatgggaacaaagcttcgtttttgatagggatgtgggacgaaagcatatattgtagtaactctgatacttccaaggtgaagagcgccgatcaactgaaaggtgcctcgctgctgtgggaaaagaacaaacctgctcctaacccaactcgatacaatttatcttcattcgcgatcacactgaatgagttgaccccagngctgcaggagaaacttccacctactgattcacggctgagaccagaccagcgccacctagagaatggtgaatacgagaaagcgaatgcagagaagctgaggttggaacgacgacaaagaatggtatccgctctcgcttcatagatcacaatccata

SEQ ID NO: 140976 - DNA, 2542 bp, Zea mays
  Clone ID: MRT4577_60052C.1
gcgggacccgctgtgtttcgtcgagggcggccgggatgccgccgaggcgggagcgggaaaaccgccgcctggtggctcatccgcggctccacgcccaaaaccccaaattccctatccctatcccgcgcgccctgttcttcgtctatctctctcccgactcggaaggaaaccctaggcgccacgctagggttctcgaaccttcgctccccaccccccgattcggaagccctagcctggaaggttccgggaccttctggcgcgggaggatggcggtcgtggaccagtcgctgctgccccagatccatgccctcttctccgacccgcttcgcgtggtttcgtacaaatggctcagtcggaacttctctgtgtcatcaaatgatgccaagaggttgcttcaggactttgtcaacaaacatggaactgacctgcaagtgatttacagtgtgtcggggtggttgaagaacaatccccaaaactattgtgtaaagctcatttcaggcccaaaacttgaagaagcaaggcaaattttcaaagattcttgttcagttcagatctacagtatccaggcctgtattccaaaagatacagctgtactttggaatcctgaatttgtgcaggcagaggagcttttcaaccagccttttgattatgagaactgtttgagagataataggttttgtggtgttttgaattcttttgtcaagcgaacatccaatggaaagcatgtgagttcattgccaccaaagcccttgaatagtgctgcagccgccgcgcagtctaagcctagtgttactccaaaggaacagtttgttactgctcggcggcaagatttgcctgtaagttcaaagcagggagcagacactaagtccgagaaggataatttcacagtattagataaggctggcaatggtcctgttgtcaaagaacaatcagttgatgcccatgcaagcaaaagtaaagctcaaaatggaaaggccttgcctagtaatggtggatcgctggctaacatgtggggccgtgcatcagcaaaacctaagcctccaagtaccactaattctacagctgtagcaagtgttgcagctactgctgatgcacaaatttgtgcaaaggaagaagcagatggaaatagcagcgatgatgaacatgggataaagtacaagaggggatccactaatgcaaataacagaaagagaagagcggtatttgattattcggatgatgaggaagatgacaatattgtaagcattgcatctcctgagctaccaaaacagcataccccagaccctgttgttggaattgctgaagacgctgaagtaaatcaaaagagcttggaaaatgaacacgatgtaccaaacaatgggaaaggttcctcaacggtggtggattctgacttcacatctgaatgtaaaatcaaaacaatcgatcctatgaacgattctgggattactttaaaagaaaagagcagtgatcctccaatcaatgacaagaagcaggattctgcagcgagcctgcctccaaatcaccaaagaggagaaaggttttgaagacacgcatagatgagaggggaagggaagttaccgaggttgtctgggagaatgaagcttctgcagatgacaaggcagagcagaatgtcaacactattgatgcgactgcaagcggggcgactgtcccaagcaaaccgaagcccgcaacaaacgctgacaaaagcaaagctccaagcaaaacagcagcaggcaacaagaaagctgcgaaggctggagccaagcaagggagcattatgtcattcttcaagaaagcatgagccagcggggtgcgcatgcaccaaaatgagacaggacttggttaagcaaactggcagtggcagctctacctgaatattgtcaggccggcgagaaagaagggctccaagcaggcgaccgttagctgtatcgtttgttttagctagcgtagcgatggttgagtcaagcagcacagagcacgcattctagctgaggtagtactatcttgctgaagatgtacacgtacaataactgttgtctgtgatgtctagaagagtaaaggtccaaggtgcaagggccgcggaacactttgagtacaaaaaaaaaaaaaaaaaaaaaaaaaaaaaaaaatcttgtgccgcctttattgaaccaggtcgctagccaggcatcttaactggtagccctccggctctctacctatatatcgtcaggccagcgagcaaaaagggctccaaccaaagagcacgtatgttagttcagtgattatcttgctgtaggtgtacaaatagttgtactgaaaggtactcacagcctgtttgcactttttgggcggttctgttgtgttgtgtggaagtgcaagggaaaaacgctttgggtatctccatccggtattgcatcctcctggagtttatgggccaaagctagtggaaagtgtagtagtacagtaaaagaggagagattatccgtgagtttaattatgtgtatctaataaacttgtatattgtttttttttattatgagttttatttcttattggagcg

SEQ ID NO: 140977 - DNA, 426 bp, Zea mays
  Clone ID: MRT4577_60053C.1
cccacgcgtccgcgatatgttagaagaagctccgggtccaatcaacttcacccaaatgctcaccctcttcgctgctaggatgtccggcggttccgaccccgacgatgtcgtccgcgccgcattcaaagctttcgacaaagacggcctcatcgacggaaacgacctcaaacacgccctcctcacctggggcgacaagttcaccaagaaggaagtcaacgatgccttcgacgccatggacattgacaaccagggtatgatcgacactgaaagtctcatccagatgctcatcggtggtggtgacgaagaataagttctttattcaaaagaacaaaatatgacaaaaatgcataaataaatttttaatcaagcaagattcaatttgtacattttatttattaacttaataaagagagcaacctcattttg

SEQ ID NO: 140978 - DNA, 402 bp, Zea mays
  Clone ID: MRT4577_60054C.1
cgaattcgaaagcatcaggcaccatgaactaaccagagaatcttgacacagtttgtacgacgacggtgatgctgttgatgccgagatttcagaatctttaattctctacactgttctgagttactttatgcactgtttcatccatatcaaattaaatcctgtgttgttcagataataatagaaatcaatacagttatttgtatccttagaatttgctccaaaatcttttttttcaacattgataattgtatgtatactaaataaactcgttcggggaaggaatgactgccctcccggtattatgctaagaagagaccgaaaaacaatggtcccgggcgagaaacttcccgaaccctgacccctatcattaacgagccgacgtcaaccgttcactctgcaacg

SEQ ID NO: 140979 - DNA, 599 bp, Zea mays
  Clone ID: MRT4577_60055C.1
gcgatttgtttccgcgcttcgaggaatcgacagtcaagcttcggcgaccaagagatcgaactcttcgagttctacagggctgaagaccctgagcatctgattggtgaaggcaagtgtcctctgacccattatgtcccatttactttataattcactgtctcgcatactatgaacaatataaggattgactagctttctatttaccttgtccttgattaccttttgggttactatggttagattcatgctattgctttactctaataaatgaacatgatgtgaacacttatgatacgatgttgttattatgattatgatgtcggactggtgatactttaggggactcgagcgatttctcgagtgcctctcggtaaggacctgttcgttggatgaccgcccgggaaaacagtgcaaccatgagggtggagtgggacgcccttagctgagtaattagaggaactggggtgtagttcgcttcaccgtcgtgccgttaatggggctcggtgtatgcggctcgctctgccaaggttggttcgccccttggggaggagttcggtgcatttaggaaacctaacgggcgactacagccccaatgaatc

SEQ ID NO: 140980 - DNA, 354 bp, Zea mays
  Clone ID: MRT4577_60056C.1
aaacgaagcatcttcctgttagcataaaaccatctgagtaacatcttctcatggtcttgttatttacttgcttggtctcagttaccttaatttcgaatggccatgggaatctgttaatgactaatgagtatttggtagtttggtagtcaactttccaaccatcttctagcagttgtgcggggggtcaattgagtttttctatcctatatacttcggttgctgagaatattctggagactactttaagttttgtatggaagcaccaggttaattgaaagaacttgttccaaggtaaaaatacctgaaggtggcattaagatttggcttgaacctaatcgccttttttggttttgt

SEQ ID NO: 140981 - DNA, 347 bp, Zea mays
  unsure (1)..(347): unsure at all n locations
  Clone ID: MRT4577_60057C.1
gcctcccttctatgccggagcttttacaattttgactcgcgcagcactccggtgagcctgggggactccctccctgccgctgggatggccaaggaaacgagttaccgaccgagacgggcaagactagggcaggcgccaaggtcgggctcccggcgatggacctatccctagcgttcccgcacgccacaccttcctccattttcccgccgtacgcttatgattattacccggatgatgatttgnnnaccagtgaagaacgctctaatatgatgaacgtcaagcgtctcatggcaaaagaaatagctcccattctgttatcgtacagggaaaacgcatagtttccattt

SEQ ID NO: 140982 - DNA, 545 bp, Zea mays
  unsure (1)..(545): unsure at all n locations
  Clone ID: MRT4577_60058C.1
gttgttctgtaatcttgttctttttctcagccgcgcgccgcacgtcgcgtgccctgtgacgccgtgtgtacgtatttccgtacatcacaatatacaaggacctatacacatatctaacacttaggatctcactacatattggtgcctctggttgaacatgtccaagccaactcaaccgatgttggataagcttttttcaattggtgctacccctagcatttcacgtatatcatcattttaaactcaatctcttcttgtatagccataaatccaacacgacatacatatttctgcaacacttatttggtatttgctgaatatgtcatctttttataggccaacattttgcaccatacaatacaacatagatggtnctaatcgtcgtcctacaaaacttgccttttagcttatgtactatcctcttctcatatagaatgtcatacacttgatgcacttcgtctaccctgttttaattctatggctaacatctttaccaatctccctaatctcttcgtagcattgaccatttgatcctaaatacctaa

SEQ ID NO: 140983 - DNA, 109 bp, Zea mays
  Clone ID: MRT4577_60059C.1
cataatctccgacacactcgcctagtcccgtcagagttaaaattgggccacaaggtggaatcagaaagattacctatagacgcatcgctgagagcatcctatgagtgtg

SEQ ID NO: 140984 - DNA, 808 bp, Zea mays
  unsure (1)..(808): unsure at all n locations
  Clone ID: MRT4577_6005C.1
cctggccgggggagtaggcaagtgttgaacttggagaagaaacctcgaggccggccggggtgtgatccgtgttatttgcttacgcgttaagtgtaaattaaattcgtcgaccaccgtatgctgaagcggcgaagctgcttacaagtttctgcaaggctatagtttcaacagccaacattcgagcaggagagacgcagctccattccaggccccgcagcttctccgttctctgtctgcgtgtggtcgtcagttgcggaggtaccacgacctcgccaagttaagctttgatggctgccagagatcccatggatgcatggatgaaccgttaccgtgctttcgcggaaggagtggtggtgatggtctgcccggtgcttcttgcgatagcgctgaagaaggttgacctgaagagcgaagagcatggtggtgccgtcccgaccaccatgctcgtggtagcagcggttactctagtcgccggtatttgcccctacctcgtctgctgtctctccaagagattcttcaattataatgggagctcctcaggttccccacacgctgctaccatgttgctggcacccttatccagcacatgtttagtggcacttgcctgttggatcgtacatctcatcctagacagctgggcgttccctgcggtcggcgccctcgtggagcagagtctgacgagcgattcgtaccgtcatgcacttcacaacccgtgcgggacaaggagatgctgaaatggagtactgcgatagactggagagctcgcttgatttctttggtggnataactgcgctttctgttctgggac

SEQ ID NO: 140985 - DNA, 1157 bp, Zea mays
  Clone ID: MRT4577_60060C.1
tgcgccagaggcaaagagttcaagaaacctgagaagcccatcaaccataagggaaccaaggagcaggtgtccatgaagccaaggtctccaccacgtgaagggaagcatctggagaagccgtgcgagatcgtcgatgtcgagcagtatgaagctgtggctgaagcgctcaggaaatctgacgaagcggctgatgctaagggagcatcgctcaaagacgtgacgaggaatggagctgatgaagtggcgggccaagaacaagggcgagagcaggagcccgtggacgtggaggacgacgacgacggcgtgcgctgcgccgtgtgcgcgagcaccgacggcgacccgtcggaccccatcgtgttctgcgacgggtgcgacctcatggtgcacgcgtcctgctacggcaacccgctggcgcgggccatcccagacggcgactggttctgctcgccgtgcgtcgccgggaggggcaagccggcggcggcgcggcgccggagctgctgcctctgcccggccgggggcggcgccatgaagcgcacgacggaggggaagtgggcgcacatctcgtgcgcgctgctcgtgccggaggtgttcttccgggaccccgacgggcgcgacggcatcgactgctcccgcgtccccgcgcaccggttcgccaggggctgctacgtctgcgggggcaacaacaacgggtgcgccctcgagtgctcccagcccaagtgcggcctgggcttccacgtctcctgcggcctcggcgccggcctctgcatcgagtaccaggaggggaagggcggcggcggcgccatcgtcgccggcttctgcagagagcacaccgagctatgggagaagcaacaattgacaggcaagtacaagattgtggcgagaggacaagaatgatgatatgggagatggataaaattgggtgcctgaagatgcgcttgttgttattaggatttgttgtacgtaggagagtctcgtgtactatgttaagaatagtcgaataagttgcttttcatttaattattttgcacattgtcctcaagatcacgatcagaaagtgtgctgttgtcggtaggttcatgcagaactaataagcttaagatctccattggtattgtacttccatccatttgttgagcaagtttccagtttcagcattc

SEQ ID NO: 140986 - DNA, 325 bp, Zea mays
  Clone ID: MRT4577_60061C.1
accttgcagccaatgttacgaagcatcacacgtcttatggcacgagctgtcgaacctccacaagacaactgctccagtttgtatgctaacattgccccagtcaagtcgaggcggtcacgcgatgaccaatcattatagtgaggccgctctccgacactatatgctacatatgccaatgtcgccgcgttcttttgcagatgcatacgccaagcagtacattatgttattttttactccacttttttccagttgccatcatgcacgatgactgtatcacaacctctcctctcttgcgacaagagacaacgctttcatcacacgaggt

SEQ ID NO: 140987 - DNA, 317 bp, Zea mays
  unsure (1)..(317): unsure at all n locations
  Clone ID: MRT4577_60062C.1
gcgcccccaacgcgggaaaggcaaagnccggcccgaccccaacgaagncagcgagaccccccaggcnaacgcccgccagaacanccggaagccggnnaaggcagggnnnggggggggggggccgcanaaggnncacccnaggccccgngcaagaagggcccaggagcgccaagcagaagggaaggcacccnnggaacggcaagcgcaggggnaccagggaggcnaggccccccaccaagaaaccgnggangaggaggaagcgngcncngaggcgcccgcgccgcaagnaccgcgnggccaagaagaccgacaagcac

SEQ ID NO: 140988 - DNA, 496 bp, Zea mays
  Clone ID: MRT4577_60063C.1
acgcgtccgcccacgcgtccgcaaacattgaagctgatcttgaatttgtgaggcaaaagttcttggatgtggagcgccttgccactggcgaagggaatatgaactctaaggagttcagcgaagcactcgaggtactgcactccaaaagggatgttttccttgaaatccttcaggagaacaggactgcagtgtcaggattctcaggacacatccttagccacagtgggttgcagtgctcttcttataccagcaatgctgctgctgctgctgctgcacaaccgtttgagaaagaaatcccttgtggcatggaaggtgtgtgtgacgggatgcatgtcataccaaaagagtttgaggaacccgttcctagcatgccgcccagagaaacttcagttacaccagtggcgcccttggcaccaaatgagggcaagagtaaaggctcatgccgtcgctctgaaatcgttgttctgaagccaaaccttcagaggaaaagtttcac

SEQ ID NO: 140989 - DNA, 458 bp, Zea mays
  Clone ID: MRT4577_60064C.1
cccacgcgtccgcacagcttctttgtcgaatgcttcaggcactcggtaattcctagaaaaggttcggtaaagactttgccgagtgtagctctcggtgaactgtatatataatatcatgacatgtcgataaagttcatgattttctgacttcgtttgttgtttatacaattttaaaactactagatctcaagttcacattcatgttttgtgaccatgatactcaaaaattctggtctgtttttaaaataggtcgtaaactgtgctaaaataacataaatatcattttttgcattcactgttttctattttttgagtgacttacaattcaaatatgaattatctgaagaaattcaattaaaagaactaaatataatagctatagctaacactttgataattatgtcaagatggaacatgtatctctatatagtgtaagaacatagtagaaaaaatttgct

SEQ ID NO: 140990 - DNA, 1097 bp, Zea mays
  Clone ID: MRT4577_60065C.1
tgaaaaggctttcgctcatcgggcctgtcaactggttctcactgaagtggaaatgcctcgtgttgacaagttgatccaaccctggagaaactggtatttgtcctgacaactgatttgctgacttgtccacccagaaaagatttgaaagaaggccaagtgttggaggaattccaccagtgaatttatttgagtttagtgccaggaatgtgagctgtgacaagttgcctatttctttcgggatattccctgtgaacgtgcatccaagcaaaatcagaacggtgagctgcttcagatttccaatatttggagtaagtggacccccgagattttggttattagacagatccagatatttcaaagcagatagttggcctatggtattgcttaatgtaccttgcagattcatgcctgttaatctcatttctgtcacccgaccattggaacaggaaattccaacccaggaggtgcagggatcagttgaacctgtccagcttggtggttcgttttgccaattattcatcaaagcctgaagtgcagcaacatcttgggggttcgtctgaccgagacttggccggaggtataccaagagcaagaacaggagtagcaactgctgcatcgccgccatgccgagctaggcctccaaacaagttgcagcagaccactgctaacttcgatgggacgatggttatccttggagaagtctatgcaatgaggtagctaatggacgagtcagctgctaccaaatggcgccgctcttcttcctgaggttggaaccaggcaaagcaaatagcgtttcaagcaaaacaaccttgcatcaccagattcagaagaatctctcgtcaattattgcctggtctgcttaccgggtccaagcaatggatatgctcataggaacgcacgtatgcaagggtatgggaggccttaaacaaggctacagagagctcagttgaactgatcaaaacacggaaatggttgaagaaaaaatgtttctgtattcctcgttgatagtggggcagttgcttcttgtcatcttgtggctggggcctcatcggagtatcccttctaagctttgacccggtcatggctattaattaatt

SEQ ID NO: 140991 - DNA, 427 bp, Zea mays
  unsure (1)..(427): unsure at all n locations
  Clone ID: MRT4577_60066C.1
cccacgcgcccggcatgactccgaacacgttcacgcacaggcgacaagtgcgagcagagtctgcaacaagcatggcgacccacaccacctttatgagcgaagcccgcataaagatgctctgaagagtggaaggacgacctgccacgttggtggtctcggggtgaccaaagcaagaagccgcgcgctggccgaagagccgcccaggccacgngaagcaccgaagccctttctccggacagccaccgagccagccgaccagccagccccccacagaagacggccggaacaacgcggggcagtcaaccgatactgagaccttcggcaagaaccgggagctgcagatgagacagtagagccagcacaagctggacagactcggcacggcttctacggcactgagctcccagagcgaccaaaggttaaccga

SEQ ID NO: 140992 - DNA, 488 bp, Zea mays
  Clone ID: MRT4577_60067C.1
cggacgcgtgggcggacgcgtgggcggacgcgtggggtacagagttgggaacggattcaacataattgcagcccacactgatagcccctgtctcaagctcaaacccaggtctgccactatcaaatctggccaccagatggtcaatgagcagacgtatggaagagggctgaggcatacatggttcgatagagatctaactttggctgggagactcatcctcaaagctacagaaggttcctttaagcatgagcttgtcaaactcacctggccattgatacgtgtaccgacactggctatccatcttaaccgagaatactgatgggttcatgcctaacctagagactcatcttgttccacttcttgccacaaaacatgaagacacacctacaaattctgatgaaaaaagctctaactctacaaaagtcacccaccatccactacttttgcagattctctcagaggaaatcggatgtgacccagatgaaata

SEQ ID NO: 140993 - DNA, 401 bp, Zea mays
  Clone ID: MRT4577_60068C.1
ctgacccatgctcccttcttcactctctttcaccctccccttcctactggcaacattggcaactttcccattacagatcgcttgatcacaacttatcattcaattactccaattcacatgactgttcactgaccgctcacgcaaccactccagacgtgcgccctgttcacattcatacatcattcctagccgcaccactgctccaaacacatattgtacggtcatcgctgcattcactgatcatgcacttgtcatactaatttccaagatctaccaccatgattcatctcctgacctcactctcatgaaataagaataggccatactacaaataataataaacctattaaagcatcttccttacggctcaatccagggtatcatatcctacttatcatgaa

SEQ ID NO: 140994 - DNA, 826 bp, Zea mays
  Clone ID: MRT4577_60069C.1
ccggccgggaacatactatacggagatgaaatccccagatgagactgcaaaatgatcgaccacgtcaacctcgaacgttccacgcacacgctatcgaccagcgggcagcggctccccggtccccaacaaccgcgcgacgacctcctcctctccccgtgctgccattacatatagcgtagctggactttccctccttcaccagcgcttcggctccgaccaagcctgcttgcttccttcgtccatcaagtatccatggcgcggctcctcctcctcctcggggcctccgtgctgctgctcgcgtccgccgtcacggcgcaggactgcctgtccgcgactttcagcggcgggcggacgttcggcaagtgcaacagcctgccgtcgctcagcgccagcctgcactggacgtaccacccggagaacggcacggccgacgtggcgttccgcgcgccgtcggaccccagcggctgggtcgcctggggcatcaaccccgacagcggcggcagcatggaagggagcagcgtcttcgtcgcctcgcaggacggcagcggcgccgtgtccatcctcatgaccaacctggagagcaccagccccagcctcaccaacaccaccgccctcaagttcaaggtgcccgccggccccgccgccgagtactccgaccgcgcgtacaccatctacgccacggtggagcttccccggaactccacgcagcagttcacggtgtggcaggccggcccggcgaccagcaacggtggcatctcccctcacccgacggcgccggccaacttggccagcacccagcggctggacttcctctccggctccagca

SEQ ID NO: 140995 - DNA, 811 bp, Zea mays
  Clone ID: MRT4577_6006C.1
aaagcaacaggaacaagcaaggaaagccgtctcccgacgaaatcgcgcagatcgagcacgcacccgaacgatcccggttcgcttcgctagctgactcgccgctcgccgcccgccgccgggatgattctcgtggattggttcttcgacgctctggcgtatttggggctgtggcagaaggatgccaagatcctcttcctaggcctcgacaacgcaggcaagaccaccctcctccagatgctcaaggacgagagactggcgcagcaccagccgacgcagcacccgacgtccgaggagctgagcatcgggaagatcaggttcaaggcgttcgacctcggcggccacgcgttcgcgcgccgtgtctggaaggactacttcgccaaggttgacgccgtcgtgtacctggtggacgctgccgatcgcgagcgtttcaacgagacgaagcaggagctggacgcgctcctctcggccgaggcgctcttcaacgtgcccttcctcgtgctcggcaacaagatcgacatcgcaagcgcattatctgagcacgaattgcgctactatctcgggctggagtaccacaccaccggcaagggcaacgtcgacctctcccacaacggcaggcggcccctagaggtcttcatgtgcagcgtggtccggaagatgggctacggcgatggcttcagatggatgtcgcagtacatcaaatagatggagcagaggaaaggcatctctgtttcttcttgtggcgctacatatgtacagtacattgcagtttccatggacaatcaacttgattgcttagtggctagtttggctt

SEQ ID NO: 140996 - DNA, 1332 bp, Zea mays
  Clone ID: MRT4577_60070C.1
cttttgccgcttcctttcaaaaaaaaaaatgtcagacaggcgtgggcgtggtattgatgtagcaaggtcattcgctggcctttctcagtcgggccttgggtcccaagaatcaagggttgtcgacctacgaaaaggagtacatggctatcctcttggcggtgactcaatggtgatcctatcttcagctagttgaattcattatttacacggaccatcacagtttgactcagttgaatgagcaacgactgaatacggtgtggcaacagaaggtgtatacaaagctagcaggattgcagtacaaggtgatttacaagaagggaacagaaaacggtggtggtgacgctttatctcgacaatgctctgatgagttacagtgctgtgctgtttaacattgcacaccagaatggctgcaagagttggttgtcagttatgatcaggattctgacactaaggagttgctgaccaaattgagtttgcactcgaggcagctggatcggttttcactccagcaaggtgtcattcgtcataagggacgtatatggctggcaagcagtccagctatgcaactcaaggtgatacgagccatgcatgatactgccattgggggacattccggagtaccagcaacatatagcaaactgaagtcattgttctattggcccggtatgaaggctgttgtccgtgagtatgtacagtcttgtgctatttgtcaacaggccattcaggcttggcacaccatctctttggacttcattgagggcttgcccagatctttgcagtccaattgtattctcattgtggtcgacaagttttccaaatatggccatttcatacctcttcttcatccttttactgcgagcaaagttgccaaagtttttctggacaatgtctacaaactccatggactccctgttaacattgtgtccgatagagactgtatctttactagcagcttctggcaacacttgttccagctcactgacactaagctgtgcatgtcatcggtgtatcatccacaatctgatggccagacagagcgcttgaatcaatgtttggaaacatttcttcgctgtttcgtgcacacctatccaactcgttggtcgcagtggttatcggtggcggaatactgttataatacgtcttttcattcagcattgggacagactccttttgaggtgctatacggctatgccccacgacactttggcatttcatcggaggtggtggttccagtaccagagttagctgattggttacaggaacgtgagctgatgagtcgcatcattcagcttcatttgtccagagctcagcagaggatgatatactccactt

SEQ ID NO: 140997 - DNA, 2474 bp, Zea mays
  Clone ID: MRT4577_60071C.1
tttttttttttttttttacatttactttttttttagaaaaaaccttgagagcaggtagaaagaaaggtcacgacaacattcacgcctatatgctatttgcacgttcagctctaatgacatcagcatcatggtgacgatgacagtattttacaacttgaggacatgaaactctcctcagtcactctcacccacacttttcatcatacatactcatgtcatcgcaaaacaccgtgattatgtatacaacgacgattcaggccttcaaaatgtcataaaatgcagagggtcgcttccgtttcttcagacacagctcctccactgcagaagccaccctcagtaagcttgcctcgccccatggacgacctatcagttgcaaacctataggaagcccctgcttgtcatgaccaacaggcacagttattgctgggagaccaagaaggttccctgctatgatgaatcgcatcaagtaagctgacacaacataatctgactctcctgacttcagagcacttggaggtatttttggagcagtaatgccagttgtaggagttgctatgacattgaccttcttgaaagcttccatgtgataatgcattatcctcctccttatgctttgagaagccacataatcagttgcagtgaaagacccaaaaagtgccaaacttgttcgagtatccaaggtaaactcagtttttcttcctgctttgtaatgaggattcaagtcacagaatgattctgagccaattgagacaacatgagcagtacgcatctcttcaagctctggtaatgttatctcttctacttgacatccgaaagcactgcagagaagtttaagtgcatcgtcacatgtacccgatatctcatgaccagaaacatcattaaaccactctgtatactttcctattttaactgatcccaggatattgctgttttctggagacaacaaatttgggacacatagtggcgatggtctaagtgtaagcttatccataggtcttgaacctgctattgcagaatacactagtatagcatcgtcaactgatgatgtaagaggagaagcaacttcaacagtcccagagtcacatagtaccccagtcatatctgtcctaccatatgttgtcttgaaaccaacaataccacaaagtgcagatggaattctaactgaacctccaccatctgttccaattgctatcgagcataatcctgatgatactaatgcagcaggaccagatgaagaaccaccagtatatctatcaactgaatgtggatttcttgctgtcccataatttggattgtttccagttactccaaggcctagctcatgcatgtttgctttcccaataaagataactccacatttccgcaaccgagccacacagactgcatctctctccacagtatggatttggtcaaagaatgttgtagcaccctttgttggatatgggaagcagtcgatgtcatccttaatggcaacgaagatcccatctaaaatggatatcggatttcctcgctgaaatctctttgtggaagcctcagcttgcttcttgagatcttctgcattgaaatagatcaacattggcattgggggcttcttgttgttccactcttcaatgcctgcaataacatactcggcaacaactgaaggagttgtgatccccgagctgtaagcgtgtgcaaagtcacggatcttccaataaagaaaaggggggttctcctcggttgtccaacgcactgacggatcatactgcggaaggcaccgcagtgcttcatggactctttccaccgggtccctatcttcatctacaagaacaacttctggctctgggtcctgcagtgggaactccggatagtacatggggcgctcgggtatcaccgtctgctgcagcatctgcggcatgttgttctgcgacttgaggacggaggtgatgagccggccgagcagaggcgactccatgagccagacgaaggccctgagggagaagccggtgaggtgtggcgcctgcagcgcgggagacttgtacctgacggcggagatgtccacctcctccacgggcggcatggcgcgcgggacggacccggacctcctccccgtggaattcgatccgcccataccgatgccgctgtagcagaggcagagccgcagaggcagggtagcaccgtagcaggaagggaagaatgaagaagaatgaattaatgaatgggggtttaatgcgttggtgccttggtgggcggagacgacaaaggctggcagagcggggcaggggcaggacagggtcacagggatgcaatgcaagagcaagacgacgatggcgtggcgggcacagacggcacacctcacataaattcagccagacctgccgagccgaccctactagcgcctccttccctgctttgctttcatcatcttccagaaaagctcctgcagaccattgcacaagattgatggctacccgattgggatttgggatggatcc

SEQ ID NO: 140998 - DNA, 109 bp, Zea mays
  Clone ID: MRT4577_60072C.1
gagagatcgagtgccacttcaacaagcaggatttgcagagcgataagagattcatgagtagtgcaccaactaagcgcagttggcttcgccaaggtgctgtcgggaaaga

SEQ ID NO: 140999 - DNA, 527 bp, Zea mays
  Clone ID: MRT4577_60073C.1
agcctaacttactaaaaaaaattttgattattttattgtacatctaaacttagatataaaatattacaaaaattgaggtggggtcatggcccccattgccccaccctggatacgcccctgacatcagcatcatggggacgatgacagtattttacaacttgaggacacaaaactttcctaagtcaccctcacctaccctttcatcatactcactcatgccatcacaaaacaccgggattatgtatacaacgacgattcaggccttcaaaatgtcataaaatgcaaagggtcgctttcgttttttcaaacacagctcctccactgcaaaagccaccctcagtaagcttgcctcgccccatggacgacctatcagttgcaaacctataggaagcccctgcttgtcatgaccaacaggcacagttattgctgggaaaccaaaaagggtccctgctatgatgaatcgcatcaagtaagctgacacaacataatctgactctcctgacttcaaaacacttggaggtattttt

SEQ ID NO: 141000 - DNA, 1303 bp, Zea mays
  Clone ID: MRT4577_60074C.1
gtttctccccattagccaggggtaaaacgggaaagacggagaacgaagaggaggggggcgacgtcgccggcggtcggaggcgacggggatgagtcggaaggaggcggagccggcaggacaggatgggtcttcttcgtcggccactgatgggggaggaggaagtggcagtggccgggagctggcagatgcgctggcgcggcgacgtttgtaccgggaggtgacgctggcgctgcactcagggttgcgcgacgccaaggcggacttctccttcctccgcgcgcgtgggctccgcagcctgctcggattccttcgctccaccgcctccgcggccgacgacgcgctgctgctccttttccgccactcccaatccatccccgatctccaagttattcctgttctctttcagaattcgttgcatcaaccaaagcaagatcctgttgtgacattggatcatatatttggaacggaaccaatgaagattacaagcccccctacagattctgaaattgctcttgcacttagagtcttggaaggttgttgccttttatatagccgatgcacagctctggcccacaaatacaaggctgtgaaggtactcttgaatatattagccagccgaggtccaactgagcaaggagtttgcttggacacactgatatcgctgatgttggactcaccctccaatcagatggatttcgaagaatacagtggacttgaaaaggttgctgaacttttaaaggatgtgcaagtggaaaagcatataagattgaaatgtggggagttcctattgttgctcattggacatgtttttgtgaaggaaaactctcccatacatgaacaaatgaaaaatctgtttggtgagcagtgcgcatcacttatatgggcagcaagccggttcggctccaccttggatgcagagcaaaggcagacgaccttgcaaatacaagcaatgagagttgtcgaatccttggaaccctactaggactggtgcattcatctgtgtaacttacgggtgatgacaatttgatgtctctaatctgagctgcatgctccattttgttcatgcaagctttgttgtcattctcttctgtgtaaagccattcttatgctactctttttagtaagctttgttaaaaggattgtattagttccatttgagaacaatgcattagggagacactaggaaaacattaaaatatccattttgttgtggtagatttgagctgttgtacctgtgattcaaataaaagtggttagtccaaagtgctagtgaatgttattgatcccttaactgattaaactg

SEQ ID NO: 141001 - DNA, 261 bp, Zea mays
  Clone ID: MRT4577_60075C.1
ggttattgtttatgtttttattttaaccgaaactgccgtgcgtggaaatacatggacagaaaaaaccggagctgacccaacacgaagaaacaatatgctgcagccgaggcagagatgggggaccaggctgattgtcctggtgccccacaagagtttccagcggacgaacattttatttaccccaagttattggcagccggtactggtcatgtccacgagacagtcactgttaaatacgtcccggggtcggtaggtgatact

SEQ ID NO: 141002 - DNA, 723 bp, Zea mays
  Clone ID: MRT4577_60076C.1
aattcggcacgaggctcaaatcatcttttcatgctttagttgtttcttaatagttgcacagtttcatctcactcatattcttgccacatacatgtatgtgacaaaacagacaatccgtcttttttattgcttatggcgttgtgcattatacatgtccaccaattatatacaaataccatttgtgggttacctctggtgtgtttaggtattcctcagattcctgacattttttctgtctttaaatgtcatatcactattaaaaaattgatttttgttgtctaaaataccacaactacttttctaggtgcgagctgcaatcaaagttaaggcattagtcatcatttgcttcacctcttctggacaggctgcaagggtgttctggacaaagaaagcttgtaccttaaaacaagaggatacaagaagctggagtggttgtctaaaggcttttgaactgcttgaagcattagtgtagctttggtgattttgtgactgatcagctctggagcagctagagtgatgtagttgtgggcttttgaacaatagctggagtgatatgaaacattagtgatgtggttgtgggcttttgaactgcttcaagctggagtgatgtcgctgtgttgcttttgtgactgatcatctctggagcttttgtgaatgatctaactagctatatgtaaatgatctagttgtgaatggtattataattgtgatgattttgtgaat

SEQ ID NO: 141003 - DNA, 807 bp, Zea mays
  unsure (1)..(807): unsure at all n locations
  Clone ID: MRT4577_60077C.1
agtattgttccttatgttcatggagtttgttctgctagggttttatgcttttaatttctattcccttaacgaaaacctcnaggcaccttaaagacagcttggatgattggtttcatgaacagctagagaacttggatgatgattatcttgtgtttgattgccctaatatattctcaaatcatcttttcatgctttagttgtttcttaatagttgcacagtttcatctcactcatattcttgccacttacatgtatgtgacaaaacagacaatccgtcttttttattgcttatggcgttgtgcattatacatgtccaccaattatatacaaataccatttgtgggttacctctggtgtgtttaggtgcgagctgcaatcaaagttaaggcattagtcatcatttgcttcacctcttctggacaggctgcaagggtgttctggacaaagaaagcttgtaccttaaaacaagaggatacaagaagctggagtggttgtctaaaggcttttgaactgcttgaagcattagtgtagctttggtgattttgtgactgatcagctctggagcagctagagtgatgtagttgtgggcttttgaacaatagctggagtgatatgaaacattagtgatgtggttgtgggcttttgaactgcttcaagctggagtgatgtcgctgtgttgcttttgtgactgatcatctctggagcttttgtgaatgatctaactagctatatgtaaatgatctagttgtgaatggtattataattgtgatgattttgtgaatatataattgtggtgcttttgtgttt

SEQ ID NO: 141004 - DNA, 359 bp, Zea mays
  Clone ID: MRT4577_60078C.1
ggccctaggggccttttttttttttttttttggggagaggggtttttagctcagcaagtggagggggaaaggaaaccccaaagattaaccagggggccaggacaacaacaaagggttttcaagaccacaacctggctcgacacagcaaacggattcatgcaagtagatcggtattcctccccctcggcaccgtcatcactgccgacctctgaagcgacctcctcgaaaccattctccacgggggacaggccctagagtgcctcgaagaactgcccctcctccatgccctcgccgacagtagcagtggacaaacccgcgcgtggaggacatgaagtgcaatttgctggtgatggggggga

SEQ ID NO: 141005 - DNA, 1920 bp, Zea mays
  Clone ID: MRT4577_60079C.1
agcaaatcctcctctctcgaggcggttgcgtgctcgcgtgaagaagccggggccctatctctccgatcgcgggagggggttcgcagcgccgattcgagccgacgattgggcgtgcgcgaaggggctatttgaacactgaactaaaaatggggtgtcttttcttatttgacatcttgatgtgcgaaaatcaagctctcgttaaaggggaaacaaatgggcaaaatttgggctctttgattagttttttcagtgtgaagtggggaatctactgtggtaaatgggagagctgatccagttgatctatatgccttgtgaggactattttgtgctcaataagaatatatgttcaacatcactgtgggacttgtgttgcccttagattgagatggtggcttctcttacaagagtgtggcagccttttaactctcgaagaggggccccttcaattgtgagttttgagaagagccaattgctgctaccttcatatcattttgaggagtggacgtgagcgtgggttttgtagcttgcgcaatacaaggttgagtgatttgtcaaggcagaaatcagtataatgataggtgtgcttgagcttttaatagctggtttatttgaacttttatctttttatgatcatgatatattgagacataaatatattacatgtacctttgcagtttttcagttggagaaaacatttaagacaacattttcatcgtttgttctccatatggggcttgtttcacgccacttgaaggaagaagggaatggtggtgttaagttcggacaatacatctacacatcttggagcatcggcatcaatgttctcaatcttctcaaatttcaaattatactggtcattactttgaccattagaataaaatccctataaaacgtggccatgcaatcactggttgtaaactgatgggcagaatgttgtaggatggattggctcaagaactaatatagcttacttatgacaatgtagtaattcatgaagttattgttccttatgttcatggagtttgttctgctaggtttttatgcttttaatttctatttccttaacgaaacctcaggcaccttaaagacagcttggatgattggtttcatgaacagctagagaacttggatgatgattatcttgtgtttgattgccctaatatattctcaaatcatcttttcatgctttagttgtttcttaatagttgcacagtttcatctcactcatattcttgccacttacatgtatgtgacaaaacagacaatccgtcttttttattgcttatggcgttgtgcattatacatgtccaccaattatatacaaataccatttgtgggttacctctggtgtgtttaggtgcgagctgcaatcaaagttaaggcattagtcatcatttgcttcacctcttctggacaggctgcaagtaattctgacataatgaggaagtccctcttcgtggtcggagaaattgggggcaatgactacaacctacctcttcactagagtgccatttgaaaagggtgttctggacaaagaaagcttgtaccttaaaacaagaggatacaagaagctggagtggttgtctaaaggcttttgaactgcttgaagcattagtgtagctttggtgattttgtgactgatcagctctggagcagctagagtgatgtagttgtgggcttttgaacaatagctggagtgatatgaaacattagtgatgtggttgtgggcttttgaactgcttcaagctggagtgatgtcgctgtgttgcttttgtgactgatcatctctggagcttttgtgaatgatctaactagctatatgtaaatgatctagttgtgaatggtattataattgtgatgattttgtgaatatataattgtggtgcttttgtgtttaaaaaaaaaaaaaaaaaagtggtc

SEQ ID NO: 141006 - DNA, 422 bp, Zea mays
  Clone ID: MRT4577_6007C.1
cccactcgtccgcgtggacaaaaatgggtcgcatgtggctgaagcagctctcaagtcactcgcaacacatcttgaagatgaagcctccagggccatgatagaagggatactgaacaaaatatgcaaggttattgctgtggatgctgttactgtgatgtccagctgctatggttcacatgttctccgcactctactttgtctttgtaagggtgttccatcagattcactacaagacttccatactactaagagatcttctgttctagctgagcggctcagttgtgggacaaatcagtctagtcgacatgttccaaagaattttgaaaatggtttttcaggcatgtttaggtcttttgtaagagaaatgctacttaatgcaaaagctgacatttgcactttacgagttgacaagaacagttgcc

SEQ ID NO: 141007 - DNA, 1162 bp, Zea mays
  Clone ID: MRT4577_60080C.1
cattgggtacctcgaggccggccgggcactgctagtccgcaggcaaccgagagcccgagaccgcccaggcgcccaccactccaccagccaaccctagagcctctccagtctccactgctcggccgccgcctgccgcagcccgccgtccactggtcccgcctccctgcgtccgctccactactcctggcgtccgctccattgctaccatcgtccggcgttctgctcctgcgccctccctttgattcgttgccagttgtagtgtccggtcagatttgagctatggcagcaagcaaggattgacgaagcgtgcgttcccatcgcaccaccatgggctacacagagatcgacatccgcccctctgggagcggcaagcggcgtgagggattgacagactgctgactacgggagccgggagggggcatcgtgcgccgtgcgcggtggcgaaggaagagcgaagcggcggaggccgagctgctacggcgctgactggccgggtcgcacggctacgccgctactcgacgcttgctgcggcttgtgggaagctggagaagaaagtttgtcgcctgtacagctgtcggagaagaaagctcgtgcttggcggcttgctatgggccgcgattgagaggagatctgaaaatggagaaaaggtgcgagctgcaatcaaagttaaggcattagtcatcatttgcttcacctcttctggacaggctgcaaggttgctctgacataacgaggaagtccctcttcatggtcggagaaattgggggcaatgactacaacctacctcttcaatcgagtgccatttgaaaagggtgttctggacaaagaaagcttgtaccttaaaacaggaggatacaagaagctggagtggttgtctaaaggcttttgaactgcttgaagcattagtgtagctttggtgattttgtgactgatcagctctggagcagctagagtgaggtagttgtgggcttttgaacaatagatggagtgatatgaaacattagtgatgtagttgtgggcttttgaactgcttcaagctggagtgatgtcgctgtgttacttttgtgactgatcatctctggagcttttgtgaatgatctaactagctatatgtaaatgatctagttatgaatgatattatacttatgatgcttttgtgaat

SEQ ID NO: 141008 - DNA, 699 bp, Zea mays
  Clone ID: MRT4577_60081C.1
ggccgcttttttttttttttttttggtctaaccatttcatttgacattccaacactaacaattttccacaccgaccactaagccgtacgaatatacattctataaaaaacatatatttcacaactaacattttcagttaatttagaacttaaaagtctattgctgtacaccacaggaaaactaatacagtacggcgaaatttgtcaaccctaattagcccttcagagagtagctacaaagaaaacatctggctagctcttgtctaaaactgcaatcaaaggctccgcaagaatggattgacctggcacaggggttacgaaatgtcggccccgtgagacgtacttcttccgacattcaaatacctatctacaaacagcatcactatgcctcaaatttacaatgaattacaacggatggtatttctcagtactgttatcaatctatagtgattccatagacccgctctttagcctctccattcgtgcttgtagcccagagagagctcgctcatccatgggtggaatattactttgttgctggggctcaccgtccaatcgtgttcccccatgcagcatattacttccgttcatacttgccaacggccgagcctgagctccgtcaaaatgacctatagctgcagcttgaatgcttttcatcctttccctaagagcatccaatgtacctgaggtctggtatcta

SEQ ID NO: 141009 - DNA, 387 bp, Zea mays
  Clone ID: MRT4577_60082C.1
tctcacgccttgtcttgcctacctttttacgtttacatatatacaattatatctatgcgtctgttccacgcaaaaccaagactacactgactattacaagcttactagcatgcatgcataatcattattataataataataataaaactatctcactgatccactttgctctacctctatcaataatgaaacaactgtatttaccttcattacttaattgtgtatgcttttactcctactttccgatttcatcatgtctttaacatctcattaattcactatatttctataacaaataattttattaaaggtcgatcactctatattatccaatcttacttactcttacattcaacgttatatcttttatataatttaatctaaatt

SEQ ID NO: 141010 - DNA, 189 bp, Zea mays
  unsure (1)..(189): unsure at all n locations
  Clone ID: MRT4577_60083C.1
gggacgcacttagagccgctgcagactctctttctgtccaccataggggggggcagtnnacctttgtgcgtctcccanaacacacnnaccaccccccnccataccatacacataatccactccaaatactaacaataatcnttataattttattaaaccaatnccttaaaaacacacccaatcaataac

SEQ ID NO: 141011 - DNA, 704 bp, Zea mays
  unsure (1)..(704): unsure at all n locations
  Clone ID: MRT4577_60084C.1
atgacactacacagcttccacgtattgtcttgcagctgaagctactccttttccgcccccggaacgactgaaccacaaaggatgcaccgagatacaagaggacgcaaagctgggacgcaacgatactcgtttccctttcccatctgcacgccccttctcttctctaactatcttcactaccaggagccacatccgggacagatcttagaaaacaacaagctccggttgtgtcatttctaatccggcaggataaccgaaaggtgcaccctctttctcttcctcaacagctacatcctcaccggttgtgagcaggctcacagagaacactacggcgcgccaacaggagcatccaagtgatggctatgcaccatcaacgacaagaactacgaccacgcttactggaaagcncgccgatcgtccggtcgtccaacatcagacgccggtcgcctgactgtttcgctgctgcaagctcggctcagccaatctagctgccttgcagccagagccgcccgtctctcacattcgatctatgataggtgcgctcggtgcgccctctctcgcgcgcgctgggcgtccgtcaaaggcgatgagacggtgctgtacgagctgaccgagaactgcgtcaaggacgtcgtgctcaggctagaacccggtggagatctgccggatggagatcgtcagccgcatgatcctcgtctacgcgt

SEQ ID NO: 141012 - DNA, 312 bp, Zea mays
  Clone ID: MRT4577_60085C.1
attggatattttcaacacctgacaatcatgcctttaagtagcagctgaatttacagtatttatattcaatcaaagaaaatttgatttttagattttctaacagaaagaactttaaaatgactttgccgactggattgcagagtacgagtaaaaatcagttcaaaagagcatatattttcaagaaaagacatttttaaattgtacacctataaatttggaaaaaatatcggtaagatctcatctatcgaaaattcatcaggcactttgcttaattttggacgcttggaactctttatcaaaaggcgactcgat

SEQ ID NO: 141013 - DNA, 380 bp, Zea mays
  Clone ID: MRT4577_60086C.1
tccatgcacccatggactccgtcaccgcaccacattcggccagcaccaacgaaaatgtggcgcgccacagctgcagacctcttctacatcatcgccgtcgctgccctcagagcggccgatgcaccggcagagtcaccgaaggcaggctgtcctgccaaggcacctgccgagtaaccgaaggcacgcagccctgcaggtcctgacaaggcacccgagtctgctgccacgagaactgccccagctaaggcacctcaagccacctgcacacccgacgatgcacgctgacccatcgtcgtcgacgtctaggaagtctggtccagctgccgcgacgaccaccggcgtctctacaccgtcatattacacggacgaagagatgagcc

SEQ ID NO: 141014 - DNA, 263 bp, Zea mays
  Clone ID: MRT4577_60087C.1
ggaaaaaaaataaatttccattgaaaaaataaaaattatttaaagttcccaaactagcccttaaattagcaaagtaacatattttctgacactgtataagtaccagcataatggacaaaacggtattctggtcaattaaacttggaccattgttttcgttgaaaacaagaagggaccaggcattttttttacagaaaacaaagaaatcttttggagatttcggagcaaattttacctggggattacagaagaaaacttttacc

SEQ ID NO: 141015 - DNA, 297 bp, Zea mays
  Clone ID: MRT4577_60088C.1
ggacaccggcccgtggggcgctatttcactgatggggaacaccgggtacaatattgtggaccccgcctttgcaactatatttgggggcccgtccacttggggcggggcgagtattttttttctttacacgtgcccaaacgtgaaacataccctggctaaacgctattactatacccccccgcggggaaggaacacaattgtacccccttttagacaaaggttcttaggttcaaacattaaaactcccttctgagaagaaccctaaggcgggaggggacttgtttgcgaccacttgtt

SEQ ID NO: 141016 - DNA, 341 bp, Zea mays
  Clone ID: MRT4577_60089C.1
attcggctcgagcagcagcacaattttttggaccgccaccttgccgaggacgagcgggggagtctctaggcggaccatcgcccttgcgctgggcgctccgggaagagaggattcgcgcaagcaccccaggaggcggtggtaacgacaactacactgccactctttgacgacggctggtcatgcagcgatagatgcggcggtggaaagagggcgctggtcggatggccgcccttgagcttcacgcgcagcaggccgtgcggaggtggctcccccaagggcgggggggggaagaacgaaggggacatcatcggcaggaaagtggacctggctctccacacctt

SEQ ID NO: 141017 - DNA, 653 bp, Zea mays
  Clone ID: MRT4577_6008C.1
cgcctcgatagttttcatccaggcaacttgtatcgtggctatatagatgaaaggagaaggcatccagaaggggacgccacagcgtacatggtttcagatggccaggccataaagattaaggaagacagaaatgacaatgctgtatatatccatcgaggcttcagctagaggccagcaggttcttgaaccatcgcaccgagctcttggggtatctcttaaggttgtccttgtagtcgacgaagtaaagcccgaacctggaggagtagccggccgtccactcccagttgtccagcagcgaccaggcgaagtagccacgcacgtcgcaggcgtcatcctttatagaggcagccaggttggtgaggtagtcgttgtggtacttgaccctcttgctgtccttgagggcgtccttgatggaggtgaaggggctgttgccgtcgtccatcccgttttcggtgacgtaaatcggcgggctcttgtacctttccttgacgtagttcatcaggctcctcatcccgctgggcacgatgtacagccagatggagttggccctgtcaccgatggctttcccgttcctgaacgggaggctgatgggttccggtgtccgcccagggtgtttgtgcagcagtcggcccacgaggtccgtgctgttgtgc

SEQ ID NO: 141018 - DNA, 365 bp, Zea mays
  Clone ID: MRT4577_60090C.1
atatagaaaaaaacggttgggaacatttcatatattaactcacccacgtctaaactctaagaactaaatgttttatccatgaaatccttcacccatttgctattatagaaagtgtctaattctaaagaattaaagaacactcccttaaacccggttatataaaaagcataccgagacaaaaacggcaggggctctctcgcgtacataatattcagcggcaccacaaattgggacatgattcaaaaatgaaccacacaaactccctgtcccatgtcaagtacacttcaccactatatcagtgccgatcacatacatgcaattcatgcgcacttatgttgatacttgaagttattgtgtttcactac

SEQ ID NO: 141019 - DNA, 363 bp, Zea mays
  Clone ID: MRT4577_60091C.1
gactcccatattccgtgttttctttttttttttttgactagagtagttttatacattgaaccgtccacaccagggccccaaaacccgggccacccaatccaccataacgaaaggggggttggttcacgacgggcaaaaggaaaccgggggtaaaacacctacctttcgacaggccgaaaggaagccagacgaggcacaaccgggggagagagcaacaaaacacacaccaccgacctggccaaggggaattgcacttttccagacaaccgacggggaggggggaatcgagaaagcagccagaggcatgatgctgggtaccaaacactttcccgggcaaaggaaggagacccctgaacagcatcg

SEQ ID NO: 141020 - DNA, 198 bp, Zea mays
  Clone ID: MRT4577_60092C.1
ttttccaggcattttaaacccgcacacacagaggggcagcggcctagattatttgtaccccactactacacatgaacatgtccaaggacacctaccccaacaactgcactagcattcataacaagacccaacgtagatttacccacatccatattgcacagctcaagtacataaccccagaatcgatcgtcatcaaca

SEQ ID NO: 141021 - DNA, 253 bp, Zea mays
  Clone ID: MRT4577_60093C.1
cctctttagtgggagacagtcaatttcttttgagggcatctcaagatgaggaggttgaacacatgcctatatccttacacacacggccacacttgacgctggtgacataaaggtcaatcaattcatacgcgagctggcagggtcgcattcgcccgttatgctgttcggtcgagttttctttgtatggtggcacacaactcttaacaaggaggcacaaccttatgtgcttactaagcaaggtttggatgagcac

SEQ ID NO: 141022 - DNA, 655 bp, Zea mays
  Clone ID: MRT4577_60094C.1
aaaatccatacgctaaccatcgccggcgtcctcgtctacgtctactacctgctctgctctctctcccccacaggccccgcagcatccacacgaggacttcagaatcagcagcaggcagcagctcagcgagacagacgcgtccggggctcccctccgcgcgcccgccgatcaaggatcaacaacacacggggacgcctcccgtctccttcattcccagcctgcactgcgccgccccagacgcccgcgaccctctccaccacctccggcgaataccgttcctccccggcaagctaccctccgatcctctgttccgggtctgcgaggtagtaccgtcgacgaggcctgcctcccctccggcgagccccctttccgaagtcgtccgaagtcgtgaggtacacagttggaaagatcacaccaattcaaaaacgtgaagttcgtgcttcagattttggaccaagagcaagtttctggatgaacttcccaaaagaaggatctcggcttactccttcacattcagcggaagattttaaatggaaagactactgtcccatggttttcaggaatttgagagagatgttcaagattgatgctgcagactatatgatctccatatgtggaaattctgctcttaggcaactatctttccctggaaaga

SEQ ID NO: 141023 - DNA, 453 bp, Zea mays
  Clone ID: MRT4577_60095C.1
ggcatcaacagactatgatggtactgttcagctatgggatgctggctctggtcaaggattcacacagtttacagagcaccgcaaaagggcttggtctgtgagtttttcacaagtcgaccctactaagttggcaagtggcagtgatgattgttgcgtgaaagtatggagtattaatcaggcatgttactgaaatacacctactcttttctttatcagcttatcaggcagttttcttacttttgagcccttattttgagcatggatcaatggatgttatgtcattcataccttctatatcctgaattaaaaccattgtagataattgacacttaaggtgagatagagacatatcaaagtatgcgttcaaaaagaaaggcataccaaagtcatctagccgtagttttattttgctgtcccttgaatgataattcaaactttttttgaaggctgaaa

SEQ ID NO: 141024 - DNA, 1801 bp, Zea mays
  unsure (1)..(1801): unsure at all n locations
  Clone ID: MRT4577_60096C.1
actttccccgcagcatccacacgaggacttcagaatcagcagcaggcagcagctcagcgagacagacgcgtccggggctcccctccgcgcgcccgccgatcaaggatcaacaacacacggggacgcctcccgtctccttcattcccagcctgcactgcgccgccccagacgcccgcgaccctctccaccacctccggcgaataccgttcctccccggcaagctaccctccgatcctctgttccgggtctgcgaggtagtaccgtcgacgaggcctgcctcccctccggcgagccccctttccgaagtcgtccgaagtcgtgagtcctcccagggtttatgcatgacagcccctgtgtctcttccaaatgagctagaagcggtctcccattctgcaagggttgagttattccgagacgctagttgcaacatagaaaatgaggtgttggccagtttgggaaatggccaagattcaactgctgttggagcaactcctggtttcagagttggagagatcaggtttgctaatggagatatttattctggcacattgttggggaacacaccagagggttcaggccagtatcgctggtcagatggttgcacctatgatggcgagtggagtaaagggatgaggcatgggcaaggaaagacggaatggccatctggagccacctatgagggtgagtattctggtggctatgtatatggtgaaggtacctataagggtccagataaaatcatttacaagggacgatggaagttgaatcacaagcatggacttggacatcagacatatccaaatggagacatgtttgaaggttcgtggattcagggagaaatagtaggtcatgggaagtacacgtgggcaaacggggacacttacgttggcaacatgaaaagtggcaagatgtcagggaaaggaactcttacatggaaaaatggggactcgtatgagggtaactggatagatggcatgatgcatgggtatggaatctatacatggaatgaatgtgggtattatattggaacatggacaaggggactgaaggatgggaaaggtaaattctttccgaaaggttgtagagtacctgttaacgacgagatgtatatcaataatctaagaaatcgtggtgtactgcctgatattagaaggcagaatcatggttcacgcatacttcactcttcctcggttgacatggggaacatgaaggttggtatggctaggcaatcttcagatgttttgttcaaaaggaattcagctgagcaatcttctttgaagaatgtgtctttggaaagacggtggagtcttgaggtggctattgaaaaatttattggccatgaatccagcgaaagttctggtctagaaagcttggaaaacttgagtgattctcgtttgcccatactggaaagagaatacatgcaaggtgttctaatcagtgaggtggttcttgacaggagtttttcagactcctcaaagaagacaaaacgccgccagaagaaaacggtgagggacacaaaaaagcctggagagacaataattaagggacacagaagctatgatttaatgctcagcctgcagcttggaatcaggtacacagttggaaagatcacaccaattcaaaaacgtgaagttcgtgcttcagattttggaccaagagcaagtttctggatgaactcccaaaagaaggatctcggcttactccttcacattcagcggaagattttaatgggaagactactgtcccatggttttcaggaatttgagagagnatgtcaagattgatgctgcagactatatga

SEQ ID NO: 141025 - DNA, 1136 bp, Zea mays
  Clone ID: MRT4577_60097C.1
tcctgacagccagttgccccttgctactcatcttgtctggattattgttgttcttgaacacaaccttgagagcaaggcgtcactctacaaggatgcagcactgtctcatttgttccttatgaacaacgtgcactatattgtgcacaaagtaaaggattcagctgaacttagggggctaattggggatgagtatttgaggcgtctcacagggaaattccggcaggcagctacaagctaccagcgaactgcatggttgaagatcctgaattgtctcagagatgagggtctccatgttagtggtggtttttcatccggggtatccaaatcggcactacgggagcgattcaaggctttcaatgctgtatttgaggaggcacacagggtccagtctgcgtggtatgtgccagacacacaactgcgagaagagcttaggatatcagttttggagaagctgctcccagcatatcgatccttccttggaaggttccggcatcacatagagaacagcaggcaccctgagttgtacatcaagtactcagttgatgatcttgagatagcaatgtcagatttctttgagggatctccaccatcactgcataacaggaggagatctcatggatgaaagatgtcttgaaaaatctcagtcttcttgtaatgtattctttaattctttggggacaggccaacatatgcagttgggtcttttgttttgtcctcctgagacatatggttatagttggtgatgatttcttcgactagaggcaatctgaaacgggatcaggatcctgataacgctgtcaaaagcctcatttcttcttccactgtaagcgatctttttttttcatttgttacacttgtttatattcttgtgagtagcgtgtttatataggaatgatcttttagacatgtaacatacatataagttgtaacttctgtatctgtttaacatttagctgagtgttgtatcatcgttttggtggttcacatgtatctgaagaatgctgtttgattgatgaggtgcaaaaagaaactgtaatgttaaggttatgcacatatgatgcaattgtgaatgccatttttttctggccttgaaaaaaaaaaaaaaaaaaaggaaaaaaaaaaaaaaaaaagcggcc

SEQ ID NO: 141026 - DNA, 399 bp, Zea mays
  Clone ID: MRT4577_60098C.1
tgctgtagttttgttagttaagtcaatattattagcttgcacatataagcaaaatttaggagctgagaacctagcttttctagtttacggggcttagctgtggcaatcatgcaagcttagaggccaactatgaaatttgctaggcattctccatgtagtttgcatagtttggtttatagccatcaccgatcagatgtgttgactaaaataacaattaaagcaaatgtctaccaggtgttacctaattaggggatgtcgtaattagtcacttcacctcttagagaatagtcttagacctgcaatttaggttatgctactaagctttcacctacttggcatcttgacctgcgccactcttgtctcactagacatgttcctcttgatccctcgacagcaacg

SEQ ID NO: 141027 - DNA, 729 bp, Zea mays
  Clone ID: MRT4577_60099C.1
acaggatcgactacatgaaaatgatatctatcagggtcagtttcggccaaaaagaggcaaaactaaaggctaagattgctgcagaccgtaaacaaaagatgcaaatggtgcaccagatgatgcagtcggctaacatggttcaagctattcagggagtcaatagttctaacatggttcaagcaaatggtgcatcaaatttttctgaaacagtagcacattgcagtattcaggtcacggaaactgaaccaagcatgtccctcgtttctcaggagcaggcctaactgattccaatcccctcgtgctcaaagggaacatatcaagaacgttaagaagaaaatgtgctattgctctaccactgtagtaactttatcatattctataaagtgtaggatcggctactagactatattgagtgtatactaatcaaggtagggaccagagagatgtgcagtagctgttgctgcattgccagcccgtggccatttaggaaacaatagctacttgactcctacttatatttgtgcttataaccagtgcactaattgaaggcaaactactcgtcattttcttcattggtgtttgtagcattagtatgaaggcaagctgctccttatcatattcatctgttcatacctgtatgttgccaaaaacttgtatgttagttggcagatagcagaatcgaatgacttgaatatttccttcaagataatgattttctctttgaatgtc

SEQ ID NO: 141028 - DNA, 354 bp, Zea mays
  Clone ID: MRT4577_6009C.1
gactgaggctgtgacctcgcgccagatgcaggcctttacgagagcagtcctgggctttcctatttgctgaatcgccactatatccgtgctgcatctcgtaaagaggaggagtgcattttttgttttgtttgcttttaatgctgtttggatatacgaccgcgggctctcaatctgctagccagccatgccccgtttttgctcgcaataccccaatatcatatcatgcaccaaattattgtgcattagattcccatttttcgatagctggctatgaagaggtgcgatatctgccatggacgtgttttgaactatgagtttgatgctggttcttatgtagtatcgattttctttatg

SEQ ID NO: 141029 - DNA, 177 bp, Zea mays
  Clone ID: MRT4577_600C.1
aactaaatctatgcataaatatacactaattataaattaagtgtggagaatattaacataataatcctatttgaaaaatctaaatgttttgatactcctattttctataggaagaatgagccgactctgcaacgagtatgtgcaaccaatataaaaccaaggatacacgactcaggg

SEQ ID NO: 141030 - DNA, 324 bp, Zea mays
  Clone ID: MRT4577_60100C.1
acaaaacaaccgtttatatttttttatttatagactagtacaaagaaagggggaaataaaacgcttgaaaacccagagatcttgttccgtaataaattaaactattttacatcccatttaaaaaggggcaccacaaaagttattgcttgttccatgggattcttgagtcgcttttgcgccttacaattggaaagttcgatcttggcactcccaacggttcagagtttaattaattggccttgcctcttttggggagcgctactttgagcccgtgctttatgtacatggggggcgccaatttggggccgaaggggtggctcttaa

SEQ ID NO: 141031 - DNA, 655 bp, Zea mays
  Clone ID: MRT4577_60101C.1
ttttttttttttttttttgcatataacctaatttgtgttaagtactctgccaaatcagtggacatagaacgatgtatcttttacaggttcgctcacatgtttatcctcgttcccatattgttctcacaattctcacaaaaataggctcaaaagaaaaaaaatgatcaaaatccgcaacactgcatcctcaagctacaccttcaatcctaaaagaagcatctctctactaaaaaaacggacactgatggaatcatcagaagtttgaaaccgaatcgtgtgagcatagtacttattcggtttctttcgcctatcagacgcttctcttttcttctcccactgctcctctggacgagttctcgcggcggcggagagatgacgcggcagtggcctctgccttgccggacttatcgtcgccatcgcctttccacccggcgcccggtgtaaagagcgacatcagcctcgccatggtgctcctgacgctcccgcccaccgtactggtgtcgtgggcgctaccctccatgacgcgcacggatgctaccgcgctcgtcacgtgcctcagcctgtgggacatgaggagctcaaggcgcacgtgctccgggagccgcagcgcgaaccgctccatcccgccgtcgctggcgctgtggcccgtcgagtt

SEQ ID NO: 141032 - DNA, 299 bp, Zea mays
  unsure (1)..(299): unsure at all n locations
  Clone ID: MRT4577_60102C.1
ggtttagnaacctggttctngcnttaataccaagnncannntcttgtaaaagggcgccnantcatagtaaanctttccaggtatgnctgantaaganttaaaactgangggttcatttntgngagtaggntttaaagctcaatctgttatctgctaaaattgattattgttgatatgagagaagaggggaaattttatttaaattgcattattnatcttttaatctgaaccttgacacttttccactttcaaacctattttaaggncagcaaatttatttaaactgncatacnggaaaa

SEQ ID NO: 141033 - DNA, 266 bp, Zea mays
  Clone ID: MRT4577_60103C.1
cgtatagcgctgcggcatctgcaaatcgtgacttaagatttgggcacgttggaggtacacagatggatgaatttgcgggagagtttgatatggatactaaactactaaatatggccatttgggataaaagtggtgattacctttcagttgctgattcagaaaccatagaggtggaggaccaaggaactcaaatcactaaatttctcgaaggatacagggaaggaagaaccataaagaaaacatttagcggcccttcactaatgcga

SEQ ID NO: 141034 - DNA, 440 bp, Zea mays
  Clone ID: MRT4577_60104C.1
ttttaaatgagtccaatctaattgtcgcttctctgtaaggaaaaagacccaacattcaacattagggtatattattactccagggcgatcgactttacgactatggggcagactcaaatgggtcaacatgtgagttgagacttccgatcgagatatctatgaaggggtcttcgttcccaggggcagatcatttgtcctgcccttgctcatgtgacgtgcgggcttgactgttctactggccagattgctgttaccttcatgacatacaattattttcgcttgattgcaggggtttttccgggttatgaacaaaaaaactttaccaagtgctatgtactaagtacagctatctttgtgcctggcagagccgcgcagactgtactaattggctaggacactagggttgaataaaatgggacatcttgtccagtttttttaaa

SEQ ID NO: 141035 - DNA, 613 bp, Zea mays
  Clone ID: MRT4577_60105C.1
gaaacagtgctcacaagtattaagtatgttttaaaccatagtaattctgaacagatgtaagtcttatgggtctaacaattgtggagtgttagtacaagttaactatgataacgctggcattgctcttgttgttagtcaggtttctttttaagataccttaccaaagcaaggatttcaactgtgttttaagctgtgtcatggttatttggtttttattttccggttcccagtgatggtatatattaaccatgctaatactgatgtcctttgacgagtataacaatgtgctgagggagctttgtgttaaaatttattcgactcacctagaacattgaacacacttctgatcttaacttatttttttgtttctgctagttacaatttcgagcaataatgtatccttgaatgatttttgtgattataattttcctacctagctcattatgagactttcctctcttggctgtcatgatgtgttttttaacattgcatgtgacctcattcaagaattttatctagacttatttggaattattttttcttgccaagctgtactatgttacctgtccatgtagttgtctcagtaaaaagacatactttttgcatgatgata

SEQ ID NO: 141036 - DNA, 401 bp, Zea mays
  Clone ID: MRT4577_60106C.1
ccctggtaacatcgtacgagtaacaagccctcctcacccatgagtcccaaggtggcgctcttccctgacctgaacctactgattgctagaccaccgcccatcggctgcaaaacgcactgttctggcccctccgaacctatggcgtcgggccggactacaccatcattaaaaaggcccagaaggtgaccgagcaactggcccaaaataccggtgagcttcgaggtattaaggactctgatagggggtctactccacctacgaccgaagtgcatgtccggttgctgatagggcctaggaggacctcaaaaccaccgtgagccgcggcaccgcctacaaagaccataacctctaataccaccgatgcctgacacgtaatctctgcttcacccttcgcaaaagtt

SEQ ID NO: 141037 - DNA, 403 bp, Zea mays
  Clone ID: MRT4577_60107C.1
ggatcctatacagcggacgccctttccttttttctttttttttttttttccaaaacaccacccccaacacggggcggggttttatttctttaaaactaaactcccacaaaacttccaaaaaacaaacacatatcttttgtccataaagattaaagtaaccaactggcataacattgtccttaacgtaagaaagaaacctatttaggaccccatcaaactgtcatttaaaggacacacttaagaccttacacctcatgaggaaaaaaaacccaagggcccggttcgtcctcgtccttcggggtgtggatggtcaccactctcccgaacaagattgaacgggccaaccttgcccttccgttcccagacaagcatgatccttcaccttaataccgaaaacaccatg

SEQ ID NO: 141038 - DNA, 1280 bp, Zea mays
  Clone ID: MRT4577_60108C.1
ctcgagggccgtgccgggaaaaaaaaaaaaaaaaaaaaaaaaaaaaaaaagtgggaaccatcgggtcaaaacgaaacgaagcatccacgtttgtcgctcccacgctggcaatggccgccgccgcatctcccgccaccgccgccgccgtccgcgaagcggcgccggcccacagacaaattggaatccgtccgggtcatggtccggccccattccgtatcggcttcctcgccaaaccgtcctcccggtgggccgcgatctctgtgccgcctgggcctcgccgcgcggctccggcggcgtccgcggccagggagagggtcacggaggaggaggagaggcccgtgtcggtggagctggaacccatcgccagcgagcagcagctggactgggtccttggggaggcgcggcagctccagctccccatcgtcctgctgtggatggcgagttggtgcaggaaatgtatatatctgaagcctaagcttgagaagttggcagcagaatatcatccaagaatccggttctactgcatcgatgtgaattgcgttccacaaaagcttgtgaaccgcgctggagtaacaaagatgccttgtatacagctgtggagcgactcccggaaacaggcggaggtgatcggcggcgggcacaagtcttggctggtgatcgatgacgtccggaggatgatcgagcaggaggaatgatccggcgtgtccttttagcgcagcgacctcagtattgccgcttgctcatagtcctagactgggcgtctgggccaggtgtttggtcgtcttgcatatattaggaaccatccatgatcagaggttttgaaaaatcgccggttcgtcttccatatatgaactctctccctggtgtcgcgatcaggaaaatgaaggaattgggctaccagtcatctgcgatgtccttgatgtatccatgtgtgtgtattaaaactggaacttgctgctgtatgagcaataatccagcacagcacggcaggacttattgccggtgtactgactggccttgccattagccactggatctggatggtagcactgttcatggatatgaagattagcatagcgagtacaatctctgctttagggttgtcaaaataacactggtcttgtttacaaacactagcttgtcttgtagcttgcttcttgaattctcaagagacaaattgtagccagctgggaaagtggcagcaggtttccctgtttttcttggtttgctcctgcatatactatgttctcactcctatctaaataacattctggcctttt

SEQ ID NO: 141039 - DNA, 593 bp, Zea mays
  Clone ID: MRT4577_60109C.1
ttgggtacctcgaggccggccgggacagttctgtccgaatttcactttctacgttcatgatacctcgagctcctcgcggatacgtagtgtcacacgcaattcgcctgacggctcgcctaccatccatgactacctcctatctctatctcttggcgcaagctcgcattgcgaaatcccaaacgctacaagggagatctgacttgagccttttagaatgcagctgcacactgcatgtgttctacagggagataggactcttgatagttgaaggacttggttttaccgacaaagaaatggatgtgactttgaatgctgtaccctaagatgtaagagatagagaattctagggggctagagctgctggacttatgctcacaatctcctttctatacctgatgcacaatgtactgaattctatgggattcttgaacgggaaacgctggctatatgcaggattacatatgtgcgcttgcatataaaaggtatcacagagccggatgtttcgtcgctggttgatagcaggctgcaaagaagctgtggtggtaggatcatgcacagagatgatgactatagatagacggctagtgctatta

SEQ ID NO: 141040 - DNA, 282 bp, Zea mays
  Clone ID: MRT4577_6010C.1
ggctcgagaaggcctgccagcgctttctgtactgagctgtgctgcacggttctactctgttcctggctctgccggcagccactgacaagaggccagtgtgtcaccagccctcagcagaaaccgaaagagaaagaacggaaacacggagtttgggctctgttggctaaggtgtaacacttaaagcaattttctcccattgtgcgaacattttattttttaaaaaaaagaaacaaaaatatttttccccctaaaataggagagagccaaaactgaccaaggcta

SEQ ID NO: 141041 - DNA, 279 bp, Zea mays
  Clone ID: MRT4577_60110C.1
cagcaatgctacttgatataaattttgaaaactcctggagtgttccttttgtgggaaagattggacatgctccactggcattttaaagagagactgggtgcctatatatcatatatgtatgtggagcatctgagctggaaatgtcattaacccctgtataatatatggtattgcattcatctttgctggaatatctaagaataatgctctatgcagcatatcttcaatcattcagatttgcatggggagctgtagttattggcttattgcaagatacta

SEQ ID NO: 141042 - DNA, 302 bp, Zea mays
  Clone ID: MRT4577_60111C.1
ggggcccgaatctgaaaaaaaattttggttttttttaataaaaattttaacccaaagggccaaaagagggggtaaaaaaccccccacgctttttttaaccaactgttccggagttagcacgttctgttctgggtacacaactccaggggggttgagggacccgtccctccaatttgaataatgggacctggccacaccatttttcgccggacgtacagtttggtcgtttgtttttatttaaccccatgggtttccggggagacgaaaatatggggtgggctatctgcccccccttcatttgg

SEQ ID NO: 141043 - DNA, 466 bp, Zea mays
  Clone ID: MRT4577_60112C.1
aagggaaaccaagttctttaaagaagaatacagggggaaggccaacccccccccaaacgggggggggggggtaaaaaaacccccccaaggtcatgatacattgccaaaaaaaaactttggttaataaacaggaagaatagggggcgcccccccaaatgcaaagggttttctaatttacaaaaacacatgatttcctcaaaatttaaatgcatggaggggtttccccccttcctggctggccaaaaacaggggggagaaaaaattaaaaggttttgcacggaaacatgtgagcagtttccctaaaaaacatttttaaaaagggtaaacttggtttgaaaataaagggtcaccccgggaaacaaaaggaaatggggaagcccaagcttggggattacttggtcccttcctaaaggctggggccttattggtaaacctcaggttggtccaaagcctccttacataaaaa

SEQ ID NO: 141044 - DNA, 1159 bp, Zea mays
  Clone ID: MRT4577_60113C.1
ggcgcggcgcagggcgcctcccctcgcggggcgcgccctgccgttctctccgctcgccagcaccagggccccgcgccgcaccgtcacgtgcttcgtgccgcaggacacggcggccccggccgctcccgtgccggcgctggacgaggaggccagggccgcggcggcgcggcgcgttgcggagaaggaggcgcggaagcggtccgagcggcggacgtacctggtggccgccgtgatgtctagcctcggagtcacgtccatggccgtcgccgccgtgtactatcgcttcagctggcaaatggagggcggcgaggtgccggtgatcgagacgctgggcacgttcgcgctctccgtcggggcggcggtcgggatggagttctgggcgcggtgggcgcaccgggcgctgtggcacgcctccctgtggcacatgcacgagtcgcaccaccggccgcgcgagggccccttcgagctcaacgacgtgttcgccatctccctcctcgcctacggcttcttccaccgcggcatcgtgcccggcctctgcttcggcgcgggcctggggattacgctgttcggcatggcctacatgttcgtccacgacggcctggtccaccgccgctttccggtcggccccatcgccgacgtgccctacttccgccgagtggctgcctcgcacaagatacaccacatggacaagttcggcggcgtcccgtatgggctcttcctgggaccaaaggagctggaggaggttggtggcctggacgagcttgttagcagtccggtgagtgaagctactgatactgaagacgcaggagaagaaaagacgcgtccagttgtatgcgttgtccgaacaagcgtgttcatgggccagagtgtgccaaatgagttctagctttaggcgagtgggccaaatgagtgtgggctgcgtcccagggtagtataagtactatgagtctgtaataatcaggacaagaagaatttaggtaaagtaatacatctatcgccatcttcctttcattctctcctacacgctactctcttctctgatcttctctccctcgaatcccagtagcatccagtagctaacatctggtatcactggccatctttttactgttatgcagcttgggtgtggtggattaaatcactggccgtgaatggcccc

SEQ ID NO: 141045 - DNA, 3154 bp, Zea mays
  Clone ID: MRT4577_60114C.1
ggcgcggcgcagggcgcctcccctcgcggggcgcgccctgccgttctctccgctcgccagcaccagggccccgcgccgcaccgtcacgtgcttcgtgccgcaggacacggcggccccggccgctcccgtgccggcgctggacgaggaggccagggccgcggcggcgcggcgcgtcgcggagaaggaggcgcggaagcggtccgagcggcggacgtacctggtggccgccgtgatgtctagcctcggagtcacgtccatggccgtcgccgccgtgtactatcgcttcagctggcaaatggagggcggcgaggtgccggtgatcgagacgctgggcacgttcgcgctctccgtcggggcggcggtcgggatggagttctgggcgcggtgggcgcaccgggcgctgtggcacgcctccctgtggcacatgcacgagtcgcaccaccggccgcgcgagggccccttcgagctcaacgacgtgttcgccatcgtcaacgccgcgccggccatctccctcctcgcctacggcttcttccaccgcggcatcgtgcccggcctctgcttcggcgcgggcctggggattacgctgttcggcatggcctacatgttcgtccacgacggcctggtccaccgccgctttccggtcggccccatcgccgacgtgccctacttccgccgagtggctgcctcgcacaagatacaccacatggacaagttcggcggcgtcccgtatgggctcttcctgggaccaaaggagctggaggaggttggtggcctggacgagcttgttagcagtccggtgagtgaagctactgatactgaagacgcaggagaagaaaagacgcgtccagttgtatgcgttgtccgaacaagcgtgttcatgggccagagtgtgccaaatgagttctagctttaggcgagtgggccaaatgagtgtgggctgcgtcccagggtagtataagtactatgagtctgtaataatcaggacaagaagaatttaggtaaagtaatacatctatcgccatcttcctttccgcctacggcttcttccaccgcggcatcgtgcccggcctctgcttcggcgcgggcctggggattacgctgttcggcatggcctacatgttcgtccacgacggcctggtccaccgccgctttccggtcggccccatcgccgacgtgccctacttccgccgagtggctgcctcgcacaagatacaccacatggacaagttcggcggcgtcccgtatgggctcttcctgggaccaaaggagctggaggaggttggtggcctggacgagcttgttagcagtccggtgagtgaagctactgatactgaagacgcaggagaagaaaagacgcgtccagttgtatgcgttgtccgaacaagcgtgttcatgggccagagtgtgccaaatgagttctagctttaggcgagtgggccaaatgagtgtgggctgcgtcccagggtagtataagtactatgagtctgtaataatcaggacaagaagaatttaggtaaagtaatacatctatcgccagccgtgccggccatctccctcctcgcctacggcttcttccaccgcggcatcgtgcccggcctctgcttcggcgcgggcctggggattacgctgttcggcatggcctacatgttcgtccacgacggcctggtccaccgccgctttccggtcggccccatcgccgacgtgccctacttccgccgagtggctgcctcgcacaagatacaccacatggacaagttcggcggcgtcccgtatgggctcttcctgggaccaaaggagctggaggaggttggtggcctggacgagcttgttagcagtccggtgagtgaagctactgatactgaagacgcaggagaagaaaagacgcgtccagttgtatgcgttgtccgaacaagcgtgttcatgggccagagtgtgccaaatgagttctagctttaggcgagtgggccaaatgagtgtgggctgcgtcccagggtagtataagtactatgagtctgtaataatcggacaagaagaatttgggtaaagtaatacatctatcgcatcttcctgttattctctcccacacgctactctcttctctgatcttctctccctcgaattccagtagcatccagtagctaacaccgacctgctccgccacaaggaccttcacgtcgttggccagcgcaagctcaccgaggaattcagccatggcgagctggacttggggtggaccttggatgagtttggtaagcagaggctgaagcctgccgttctctgccatctgcttgacgtttgtttcgtacttctccaggttcttgagcgtgttctctgctttctccacagccacaccgtgctctgatttgctactggccatcccaaccagcaggagaatggccccgtagattgcgccgatcctttcgcatgtagggtcgaacttggagagctcgtacaatagcgacactgcaagctccctctcttggaaattctcattggacaggaacttgatgatggtgcgtatggtgtcacctttagcaagctcttccttgttttcatcgtcttcctcgacgatgacaccaaggacttggagggccttgagccgaacccttctgctgctgctcttaagcaggtcagctatggtgggtatgacgccttgcctgcgcacgagggtcttcttcatgcgggagacgtagaggagggcgcgcagggtgtcgtcgtcgtcgtcttgagcctgagcctcctgtgtggcggtgagggaagccatggccttgtcgagctccttgtcctcgttcctcgccctccactcttggatgacgttgcgcagggcgatgctgggggtgatgtcggtgctgcgcagctccgcctgcgtgagcgggcacgtcggcttccttccgctgtccctgcactccctgaaccacttgaggatggcctcccgctcgaaggtctgcccggtctcgatggtgacagggtcgtgcatcacctgcttggtgagagggcacatgaaggcctcgaacgccggctcctggttggattgctcgtccagctcgctgtcgccgccgcagaaaccttccatcttgttccactccgatccaattccgatggtctcggccggccacagcagcaattttcgaaattcttcccggccggcctcgag

SEQ ID NO: 141046 - DNA, 521 bp, Zea mays
  Clone ID: MRT4577_60115C.1
ttcgtcggaacgtggtagtacgtggcaccggcccttccgcaatggcctccttcctcgccgcccgccgcctcctctccaccgccgccgcccggcgcctcctcccatgcacttccccgccgcctcctgccaccgctgctctctgctggctgtccactgacgcctcgcccccaccgcctcttcccgccccccctctggagcccgcggtcgaccctcccaagaaggatggagcctccttctccgccggttccggcgctggaggggcctaccggactggaaagggagctgcatcggggggtcgccgatctggtggcgcggggtacgaggaggagcagcagaaggtcctccgcgcgtcgcttctccacgtgccgaggatgggatggagcgagtcggccatgatcgcgggtgcgagggacgtgtccgtgtcgccggccatcgtcggtgccttcccaaggaaggaggctgcgctagttgagtttttcatggatgactgccttcaacaactcatggatcgcgttgatgct

SEQ ID NO: 141047 - DNA, 119 bp, Zea mays
  Clone ID: MRT4577_60116C.1
gtgattcatgggcccgacttccacagcgagaacatgtgagcaccgacggacctacctctgtctggcgggtcttggccttgcgaacctatcacgctacttgggaatgcatccagtgcggg

SEQ ID NO: 141048 - DNA, 155 bp, Zea mays
  Clone ID: MRT4577_60117C.1
gtatttaaaacaaaagggccttttgggcttggagatcactttttttatttatagccagaggcccctaagtacccgcacttgcaataacctttgacatactgggccaactcttcaaaggaggaaacaggggaactcctgacgaaacgcccgaacca

SEQ ID NO: 141049 - DNA, 324 bp, Zea mays
  Clone ID: MRT4577_60118C.1
cccacgcgttcgcccacgcgtgcgcccacgcgtgcgcggacgcgtgggaaaagaaaaaaggaaaaaaaaaaaaaaaaaaaaaaaaaaaaaaaaaaaaaaaaaaaaaaaaaggaagaaaaaaataaaaagaaaataaaaataaaaaacaaatatagaaatgagataagataaagaaaagaagacaggaaggaaatgatctatgtcgatagatgaaaagcttgctgtctgagaaaacctggttgaagattatactaaaggtacttcaaaatatgccacatgttgaaattgggatgagtgtaaaggggcacttacatattagcgttg

SEQ ID NO: 141050 - DNA, 258 bp, Zea mays
  Clone ID: MRT4577_6011C.1
gaaatcttgcattcacgtgtcatttgtgagtgaatgcggtcttcctgaagctggtttggactatggtggtctgtcaaaagagttcctaacagatctctcaaagtccgcttttagtccagagtatgggctattttcacaaacatcagcatctgatactagcttaattcccagcaattctgctaagcttctggataacggaattgatatgattgaatttcttggtcgagttgtcggcaaagcactctatgaggggattct

SEQ ID NO: 141051 - DNA, 374 bp, Zea mays
  Clone ID: MRT4577_60120C.1
accaataaaaaaggcagtacaacacaaacaaaaagagcggagcagataaagaaaaaaccaaaacatgtcaaaagccataaaaaaggaggataaagcacaggaaaccaaaaaaagctactaactgaaaaaaaagacggctaaagcaggaaggtaaatacaactggaggggcttaaccacctccaaggaaaagccagggccagcccctaacaaatgaaaaaaagcccgaagattaaaagaaaaaacaaatgccgcctttcttgaagaaagggttaagaagaacatgccaagccgggaaaccaaagtgtacctgacaaactagaggaactccttgtcggggaaagggccggtgccgaacggggtggcgaaaacggag

SEQ ID NO: 141052 - DNA, 494 bp, Zea mays
  Clone ID: MRT4577_60121C.1
tttgatgactaaaagttcgaataacctcgccgtgttcataattcttttacttatggtcgcagcttcctgtaggaggagattacagttcacatttgaaaatcttcatactgaggctaatgataaagttgctgcaatagcgggagctggaagtgcatctgtcacagggaataacccttctagttctcccctgaatgatcccatatcaagtgtgagtttgaagatcaagggcaagaaatgcgggcccgaattcttccaaaaactgaacgaaatgcttagtaaagacaccgcttcaactgctgccggtctagcgcaggttaaagaatacctagaaacgtatttcacagttagtgacgaggcctgggccacaatttccaccagcatcaaggaaaaaagtttaatgactggtgatagtgtgaaggaagatagagttaccaatatccctgtcacctccagagtgtggactgccagttacggagatgccgcgaaaaattcca

SEQ ID NO: 141053 - DNA, 353 bp, Zea mays
  Clone ID: MRT4577_60122C.1
gcgcgcacacgtccgcactaacgaacgaattctagctccgatcacgagctagctggggtgaacgatttcagctgtgctcaacagcatgaagactccgcaggcggaggtggccatgctggtgacggcagcgctgatggcttcttccgcttcagcggcgatcacctgcctgcaggtggtgtcatcgctcgcgccgtgcataccgtacacgactgtgaggaccagcgcgctccccgcgtaatgctgcatcggccacaagagcctcaacagctcggtgcggaccagagcagaccgacaggcggagtgccgttgcctcaacagccttatcaacagcttcaaacagccacaacatggtc

SEQ ID NO: 141054 - DNA, 1382 bp, Zea mays
  Clone ID: MRT4577_60123C.1
gtactagtcaggaattcccgggccgacccacgcgtccacccacgcgtccgcccacgcgtccgcccacgcgtccgcccacgcgtccgacgacacaaacacaatcatggccgacattgactcacgaccgcgcaaatcggtcgcattcgccgagggcgagaccattgtcgactccaacggcgaggtcacccaggccgtctcggagaccgaaaaggacaccaccgccgaatcacactcaaagcctgacgccgccgtcgacgaggccaccgacgactttgaggctctcgcgctcagctcgaagaaaaagaagaagtcgaagactgaggatggcgaggtcgacctgagtgcgctcaagaagaagaagaaaaagcccaaggcgccgctcgtcgacgacttcgaggccaagcttgcggctgcaggtggcgacgaggagaaggtgctggccgacgatgcggctgagaagcagtccgcaaaggtcgaggccggtcttcaggagggcgatctcattcagggcactggaatctgggcacacgacgagacaaagccgatcaactacgagagcctcctcagccgcttcttcctcatgttgtccgacagccaccccgacctcggcggcagcggaatgaagagctacaagattcctcctccgcagtgtctgcgtgaaggtaacaagaagactatcttcgccaacattgccgagatttgcaagcgcatgaagcgtaccgacgagcacgttacccagttcttgttcgccgaattgggtacttctggttccgtcgatggtagcaggcgtcttgtcatcaagggtcgcttccagcagaagcagatcgagaacgttctgcgtagatacattgtcgaatacgtcacttgcaagacctgccgcagccccgataccgagctcaacaagggtgagaacagactgtacttcgtcacctgcaacagctgcggttccagacgttccgtcaccgccatcaagaccggtttctctgcccaggtcggcaagagaaagagaatggtcaagtagaccactcgcccgccaaaccaccagacgtagcgcacctctgccaccctgtcgagaagtcgaaggcgcgctgctcacgcgcgtgccctgcgacaaagactccatgcctacgcattacgacacgacacggccgggattgttgcaacacataccgtcgcccttactggcggcactcgtcacactttgcgaaagacacatgttctcatttcgttggcgagacccccagcttcgatgcacaaaactgcatttctaggaccaaggcgttttacggggatatggggacggccgagatgccttccgttgtgttgatatcttcagataggccgtgcatacgccgtgcaacgaacaaaattctcttcacgtc

SEQ ID NO: 141055 - DNA, 217 bp, Zea mays
  Clone ID: MRT4577_60124C.1
attcggctcgaggcagatgtttacgctcaatatccaccacgtcttggcgaccatatacgtgatgggaggaataggcagaggccagacacggctaatactgcatgtgctgcgacggcaggacagacccaccctagcacgctgcagcatgcatattgagagcactctccagggggcactgcataatgcgctcacagaactcagtgtggctaatacttta

SEQ ID NO: 141056 - DNA, 172 bp, Zea mays
  unsure (1)..(172): unsure at all n locations
  Clone ID: MRT4577_60125C.1
ccggggcgacccagcctcccacctaacccctagatctaatctcttacctccggcccccccgggggccgagccaaaattaatggttttgagcccnnccacccccccctttatgaacccattctgctcgaacctcatcctccataacctctcccaacatgcgccatcaatccta

SEQ ID NO: 141057 - DNA, 504 bp, Zea mays
  unsure (1)..(504): unsure at all n locations
  Clone ID: MRT4577_60126C.1
taggggccttttttttttttttttttagcggaggtgccgagcctcgggtcatggcatggcatctatcgcattcacgaaggcactcggtgatgccgggaacactcgccggcggcggcgatgagcgtttcacctttcactgtcaaccaccacagcgcgagcaaatttcgctcaagaatgaagatggaaagacaggccacgtccacgtacgttgatcaaccaaccacgtgcttcacgtctacaacgcacgccgcggatacggaaacggacgctagctagctagcttcagtcggaccgcagggnntttttttttttttttttttttttttttttggattctgtttactatcctttttttttttggtnnngatcagactaccagagtttccgcttttttttaacgggggccccccaacaaaacccgttatattttgggacggaaaaaaaccaaaaagaatcgctttataaaaaaaaaaggtcttacttaaaagggggtaaatttccggg

SEQ ID NO: 141058 - DNA, 385 bp, Zea mays
  Clone ID: MRT4577_60127C.1
atttgattgccctgcctgttgatggtgaaactagcgtctgtttgatagaacgcatttttgccggccagctccactcgagaatttgaaggaaatttaccaacgtggggagctgaatttttttgctcctctcattttccactctccacccgcgcctgactgcagctggctgcgatccccctatctaccgcctgattcatctttgtctccgtcggtgccgccctctacgccagcctgaccccagggatggctggaaaaggaagctatgtacctccacaatatattcccttatacagcctagataccgaagaggatcgtgtccctgccgtggaagagaaccatgctacgcgccctaaactaaaccaggatccaacacaatggtcatctg

SEQ ID NO: 141059 - DNA, 573 bp, Zea mays
  Clone ID: MRT4577_60128C.1
cgttcgcccagcgtccgcccagcgtccgggggggcgtgggcgcaagcaaacaattttgggtcctagcttgaaggactgccatctttttttttgaacgcatttttgccggccagctccactcgagaatttgaaggaattttaccaacttggggagctgaattttttttctgctcctggcggggggggctgtccacccgcgcctgactgcagctggctgcgatccccctatataccacctgattcatctttgtctccgtcggtgccgccctctccgccagcctgaccccagggatggctggaaaaggaagctatgtacctccacaatatattcccttatacagcctagataccgaagaggatcgtgtccctgccgtggaagagaaccatgctacgcgccctaaactaaaccaggatccaacacaatggtcatctggcatctgtgcctgttttgatgacccccagagctgttgtattggtgcgatttgcccctgtttcctttttggaaagaatgcacaattcttgggatctggaactcttgctggatcatgcactacgcattgcatgttgtggggc

SEQ ID NO: 141060 - DNA, 434 bp, Zea mays
  Clone ID: MRT4577_60129C.1
cagaccattaactgtatctactacagagcgcagaagaacccgatcgacaccatgagggtgttgctagctgccctcactctcctggctctcgcatgcgagcgccacctccacgcatacaagcagcggctgcagctgccagctaacgccgccgggtcatctaccgccgccggtgcatctgccacctccagctcacctgccacctccggtgcatctcccaccgcctgtccaactgccgacgccggtccacctgccaccggaggtccatgtgccgacgccggttcatatagcgccgacaccatgcccaaaccctacttaagcggcccgggctcagccttatgcccagccacacccatgcccgtgccaacagccgcattaaagccccatgccagctgcagggaaccctgcggtttggcagcaccccgaaactgggccaa

SEQ ID NO: 141061 - DNA, 1971 bp, Zea mays
  Clone ID: MRT4577_6012C.1
cggccgggagtcgtccgttcccccgaccccctcgtttgccactactcccggctccactgtcgctcccgctcccttccctcccacgcaagacaatggtggccgatcgcctccgcctcgcgctgctgctctccgcgtgcctctgctccgcgtgggcgcgcccacgcctcgagccgaccatccgcctgccgtccgagcgcgcggcggccgacgacgccgtcgggacccggtgggccgtgctcatcgccggctccaacggctactacaactaccgccaccaggcggacatctgccatgcataccagatcatgaagaagggcggacttaaggacgagaacatcgttgtcttcatgtacgatgacatcgcgcatagcccggaaaatccgaggcctggtgtcatcataaatcatccccagggtggcgacgtctatgctggggtgccaaaggattacactgggcgagaggtcaacgtcgacaatttcttcgctgttctgcttggcaacaaaactgctctcaggggtgggagcggcaaggttgtggacagtggccccaatgaccatatatttgttttctacagtgaccatgggggtcctggcgtccttggaatgcctacgtatccatatctctatggtgatgacctcgtagatgtcctgaagaagaagcatgctgccgggacctacaaaagcctggtcttttaccttgaagcatgcgaatctgggagcatctttgagggcctcctgccgaatgacataaatgtgtatgcgaccaccgcgtcaaatgcagaggagagtagctgggggacgtactgccctggcgagttcccgagccctccaccggagtatgacacttgcttgggagacctgtatagtgttgcttggatggaagacagtgatttccacaatctgcgaactgaatctctcaagcagcaatacaacttggtcaaggataggacagcggttcaggatacattcagctatggctcccatgtgatgcaatatggttcattggagttgaatgttaagcatctgttttcgtacattggcacaaaccctgctaacgatgacaacacgttcatagaagacaactcgttgccatcattctcaaaggctgttaatcagcgcgacgctgaccttgtctacttctggcagaagtaccggaaattggcagacagctcacatgagaaaaatgaagctcggagggagttgcttgaagtgatggcccacaggtctcatgttgacagcagtgttgagctcattggaagccttctctttggctctgaggacggtccaagggttctgaaagccgtccgtgcagctggtgagcctctcgtcgatgattggagctgtctcaagtccacggttcgtacttttgaggcgcaatgtgggtcgttggcgcagtatgggatgaagcacatgcggtccttcgcaaacatctgcaacgctggcatccttcctgaagcagtgtcgaaggtcgctgctcaggcttgcaccagcattccttccaacccctggagttctatccacaagggttttagcgcctaagaatcgtaaggtgaggcgaaatatttcagccgctccaccgcaacgaactggtttacattaccagtcctcaggggggtcctagttcttgaaccactattatagctgttccaccgttccagattacatagctatgcccaatttccggtgtacatattatagtcggaaagttatttggcaattgtattggtcgttgctgtatatattccctatagtttgttagcagatgtgtagtttgtgattccataaaaatgaaggacgcgttactgctatttctatatgtagccgactgatgttcatgtgaaactttaccccattcttgttgggaaatgtactatccgtggtggaattcttcatcgaaaacaattcccgggtgatcctttattcaaaaaaaaaaaaaaaaaaaaaaaagaaaaaaaaaaaaaaaaaagcggcc

SEQ ID NO: 141062 - DNA, 164 bp, Zea mays
  Clone ID: MRT4577_60130C.1
gcagcccactcgtcagccgcatctatagagagttatggagtctcttgtacaacgaatgtcactatcgtaaggggatatcaggttgagataagagcaactttcctagttcgtcgctcgcttgactgctgacccatatgagcttctctaccacctaggtcatgccc

SEQ ID NO: 141063 - DNA, 632 bp, Zea mays
  Clone ID: MRT4577_60131C.1
cccacaaaacatgtttattacagtaatcacatttgatatacacacacttcggagacaaagcggaagacttacaaaacattcattacatttccaaaactcaagttttatatgctagaaagagttataatatttacaagtcctgatagtctttaaagtgcataacttaattacaatacttgaaaaggcgaagcctttccataaggaatacacataggcaaactaagcttgaagacctccacatgaagtaactaatgaagccaaagacatcagaacctttcctgcaacaacataaggaataaaaccctgagcaggcaattacccagcaagacttacccgactaaggaaaagactctcaagggcatgctagcttttgggaatcaagggaaaagctcatcaattatcaaagactcctctttgcagaaaagcaagcttactaagtagatccttaagccaagttttacttcacaggttaggttgttacttgaatctactaacctgaatctagattttcctaatctagatcatacacttggcctacactagattgtttttaattaaatctttgttatacttgttaactacgatgcagagtagtgatccagtcttcataaccgagaagtaacggtgatctg

SEQ ID NO: 141064 - DNA, 224 bp, Zea mays
  Clone ID: MRT4577_60132C.1
cccaggtgctccagctagggaacaagccgtgaatttgaatgaaggactggtggcggataggactcgacgtcaagtgaagcccaaccatttattctgtgggccggactggatagaagtagccaggcccagtggcttgctcgaggtggtattttgtttgtggaatggttttgcggaagggtctgagcatttacttggtggtcgactgtattcggtctttcgtagag

SEQ ID NO: 141065 - DNA, 304 bp, Zea mays
  Clone ID: MRT4577_60133C.1
cggccagctccttccatagctgtccttactagggacttcttgatggctaccaattctctacaagtgcttggtccccatttcttagatcatgtcttcagagggttaagatttcttagcctgccctgaagcttggtctacagtgaagtagcacatagcaccagtacttagtgaaatgaagtagcacatagcgccagcacttagtgaaatgaagtagcatatagtgccagcacttagtgaaagcttctgatcaaggtcctgaaatttcctcttggatttttgttaattatgctgaatgtcccattat

SEQ ID NO: 141066 - DNA, 178 bp, Zea mays
  Clone ID: MRT4577_60134C.1
tcggaaaacggctcgaggggaactaccagaaaagcatgatgaagctgcgcctgctggagacccggcccagcgccggcggcgatgcctggccagccccacgctgcctggagccgatccggcatgccagcagcagaataatcccggacccggtgagcgagtgactagctagtaggctggc

SEQ ID NO: 141067 - DNA, 492 bp, Zea mays
  Clone ID: MRT4577_60135C.1
atggcgtgttctaaagatcacacaaatatcttcccagacaatatcctgaagtcggttgttgaaagtctgacgaccgatgagcaacatcaatacgaagactacatgcgtcaagcgaaggagaaattcttgtcacaatacatggtagatcgccaccagaaggttgccaaacatggagagaccgatgtcacatctcttctatcttcgcttcaaatccccaacccattatatggtatgccgatgaactcatatccagggcaaataccatcatcgtcgtccctgcttggcagatcaacgcccctggacacggtcggactgtccgagcttttgcccaaacaatccgacccttctgcgtaccatccggctttgcctgtcgggcagtccaaggtcgcactaggaccaccacgtggcaccacaatagtagcaaacacaatcggatattctggacttaacattggacagcccggcatcacgctagaccgtctggccgcctag

SEQ ID NO: 141068 - DNA, 191 bp, Zea mays
  Clone ID: MRT4577_60136C.1
cctatactaacttacagtttatgggggacataacgaccgatgggaaattagtattaaaacaaaaccggggtacctccgctcgagaaaggatctctactaccctttgttgccaatcctccactacgcctggggagaacaacccttcgggcgtactggcaatctagatcccatgttgatgtgttattcaaaaa

SEQ ID NO: 141069 - DNA, 312 bp, Zea mays
  Clone ID: MRT4577_60137C.1
tagtagtttcttttttttttttttttttttttttttttttttttttttttttcgccccagaagaagaatttagaatccacgacatgcaagagctggacaagacgtaccggccagcatagatcgggggcagtctaggccagccagagggcttgatttgaaaaaagaaaattaagcaaaagtccatgcataccccagggcaagagcagcaaggtagcagcgcaaccagaagaagacgaccacggcgacgtacgatccgaggaccaagcaagcaagcttgcatgtggcaaccatgcatttaatcgaggggacggg

SEQ ID NO: 141070 - DNA, 385 bp, Zea mays
  Clone ID: MRT4577_60138C.1
tgttttgggttttttttttttttttttttttttttttttttttttttttttttttttcttttccctttttgtcccggttttctctcttgtttccccccttctgggttcctctccattttttttctgttcattgcttctgcctccctggggggggggggcggtcctcaactcctcctgctttttcgggcccctggctggccccttttcctgctttgttcagtccgtggctcccgtgttttcccgggccggtcccgtggctccccccgggtttttcggcccgggccccgcgggcgcccctgcttcccccctcgggagccctttccccccccggtcctttcctgggccttgctcttccctgggcggcacggttctccgctcgcgtttc

SEQ ID NO: 141071 - DNA, 1050 bp, Zea mays
  Clone ID: MRT4577_60139C.1
taaaggtattcattgcaactttggtgtatcactttcagtttactaatggttatgcctagcattgtttggtaagttgctggcggtggccgctgccggtgaagtttaagcaggcgatgcagggtagaaggcgaagtccctcaagagattccactaccacaaagcaagctgattatgtacctgacacattgcacacggagcaaatgacagagcaagctgggctcaattgttctggacattcagggcagagacacaaatgcaagccgatttcttcactgtgatggctcaagtgatcaaagccgattttcaatgcagttgcatctgaatgcattgaataagcaagttaggcatttcactggtttgggaaatacccctatgacttacaaccttaggcctgtcattgaagaaattcaaaggtccgcggaggatagtggtgacaaacgaaatttgaagatgtgcttggggatgctaaagtccatgagaaatcgctgtgatcagaactttgttgcttatagaaagggtcttggtgttgtttgcaacaaaaaaggtggattcggtgtagatgactttgttgttgaattctttggggaggtttacccttcttggagatggtacgaaaagcaagatggtattaaacatatacaaaacaacattgaagatcaagctcctgagttttacaacattatgttagaaaggccaaagggagaccgagatggatatgacttggtttttgttgatgctatgcggccaactacgcgagtagaatctgtcactcctgcaaccctaactgcgaagcaaagtaagatccttttaaggttcaggttccaaccttgtgaatgttaactgtttcattgcttctgtggttatgtaatatcattctttgattattggtcagaatttatgtgtatgatgtgcatgacgtatttttttggagggagtaaccccctctgtgtactatgtattaatgaaatgacacccaactcttccgcgttgttcaaaaaaaaaaaaaaaaaaaaaaaaaaaaaaaaaaaaaactgaagaggggccggtacc

SEQ ID NO: 141072 - DNA, 222 bp, Zea mays
  Clone ID: MRT4577_6013C.1
aaaggggaacaaaggtttgagtatttgcgaacattaatacaaaaacttttgatccttttaaacccaccccataaaaccaacatttatactactatttataagaagccgctatttaaacataaacataattttagcgtgcacttacaagaaacctacaagtttgtatacgcagaaatgttgaaaacatgacttgaaaatacttaaaataggggttataattgt

SEQ ID NO: 141073 - DNA, 495 bp, Zea mays
  Clone ID: MRT4577_60140C.1
tcgcggacgcgtgggggtggccagatttcttctcccgcgcatctctatcttccttccccagctcactctccagcgcatctgattttttccaccgccgcgcgctagtgtgcatcttctgaagatttttccaccggatgtctcatcttatgccctctcctctccatttcttacgtagcccagatattccagcagccgttcgctcgaatccaccgccgctcctgccccaatggcgcacgcccacctcctcagccatggagctcacgagcatctccctacgccctctgctatctgctgttctcatcctcccagctcgcctcctgtccccaaccatggaggtcggccgcctgttcctctccgctgctcgcagcgcccggatcctctccccgtgaatctctctgctgccctttttctcgccggtggtgttacctcgggctcatcttctttacgcttgttccctgctgaatcgcgtcctggagcttgccctgctgctgctcg

SEQ ID NO: 141074 - DNA, 690 bp, Zea mays
  Clone ID: MRT4577_60141C.1
ggggatgctaaagtccatgagaaatcgctgtgatcagaactttgttgcttatagaaagggtcttggtgttgtttgcaacaaaaaaggtggattcggtgtaaatgactttgttgttgaattctttggggaggtttacccttcttggagatggtacgaaaagcaagatggtattaaacatatacaaaacaacattgaagatcaagctcctgagttttacaacattatgttagaaaggccaaaggttgtgttgagtctgattttaatgagatctaacttgtaactggtcatttcaattcatggtctttttatcctattaacattttagttctgtcatgatggaagggagaccgagatggatatgacttggtttttgttgatgctatgcggccaactacgcgagtagaatctgtcactcctgcaaccctaactgcgaagcaaagtaagatccttttaaggttcaggttccaaccttgtgaatgttaactgtttcattgcttctgtggttatgtaatatcattctttgattattggtcagaatttatgtgtatgatgtgcatgacgtatttttttggagggagtaaccccctctgtgtactatgtattaatgaaatgacacacaactcttccgcgttgttcaagaaaaaaagaatttatatgtatgtatgatgatgcaaaagttgacaatataac

SEQ ID NO: 141075 - DNA, 632 bp, Zea mays
  Clone ID: MRT4577_60142C.1
ccggccggggattgagaacaccagactcgacgatctgtgctatacaacgggatggctcccgagatcctaggcttgccatggggtcctcggcgcgctacctccggcggttgtgcacgacatacgatgggaacaacatactggacgacaaaacacacactctccacgcgactgaggataccaccacatcataggtcgcaacgggaagacatatcctgtccggtcgacaactctactgtccgcaccctatttacttgtcaaacctcagaagaaactgtccaactatacatcgtggactgtttagcgaaaaactcgacggcactgtctacagtgacttcgacgccatacatttgtacataactgatactcacaccatcatcctccccactatgatcgccctcgcccccaagaaactcggcgtcctcttctacaccacgagctacaacttttagatgcacttcggaggtccacagtgccccctgcgtggaacacagtgtcgcagaaggtggttccagcgcgaaacggactctgtgctcatcatgcacatcacatagcccattttgccatacgcggtgaactcccccgtcgctaatgcctgacgtcactcacattaagtgaagtgcaatatctagcca

SEQ ID NO: 141076 - DNA, 693 bp, Zea mays
  unsure (1)..(693): unsure at all n locations
  Clone ID: MRT4577_60143C.1
gggagcagcccgggaaacacagacacaacaagaacagctaactatctcttgttctgtggcccaactctccagctggggtacatataaggttcatccccgacagacgggagtggacaagctaaacttagaaaaactaaggggcagctccgacgtgaggcgacctaattttggtatatagcaagcaaacaggttatggtgtttatgcccagcatccaccgttgtatggttagggagtttcgggcccccttgaaaggggggtttccccccccccacccacaaaaaattttcccccggggacacaaaaaacctttgggggagaaaaaaccggggggggggaagaaaaaaatattttttttggggggggccccccttcttttaaaaaaaaacttctaacaacaaaccttttccttttgggggtggcggcacaaaaaaaatccccccccccccacaatttactttcttggggagggaaaaaaaaatttttcctaaaaaaaaaaaaaaaagagggggggggggggtgttgctcctccccgggcgggggggggnggggnnnaaaaaaaaaaaaaaaatattttctctcctcccgccggcgggggggggggggggggggtttgttttttcttttttcttttctccaaaaaaaaaaaaaaaaaaaaaaaaaagaaaaaggggggggggggggggggggggggt

SEQ ID NO: 141077 - DNA, 302 bp, Zea mays
  Clone ID: MRT4577_60144C.1
ctcatgttattatcgttgcataggcaagaagaaacatactcaagaagaaacggattgcatgaatgcaatggtaagaagggatccctctttttcaataaaagggatcgtattttggagttggtaccggtaacccaaactcgcgttatcggtcaggcttaagctgacccatctccgtaggaatcagaatctgcgccggactatggtgctggggcgttggtggtgtcatcagaagatgggcctggtgcggctggaggactcatacgacgactattggcgctggtgcgcttgagggaccggatgag

SEQ ID NO: 141078 - DNA, 265 bp, Zea mays
  Clone ID: MRT4577_60145C.1
ggccgcttttttttttttttttttggcgcaatgcaatacactgaagttgatagttctctttacagaaaacaaaacaagaaccgaaaacgtaagtttttctgggtctgtttttctttacaattgcttcagcacccacccttccctctcctcagatggtagtggcagtcaggtagtcgacacaggaaaccagattagtagcaactgttcaagcatgtttggcagcaagggaaatggaggggggtggaggggccttatttccctcccc

SEQ ID NO: 141079 - DNA, 1044 bp, Zea mays
  Clone ID: MRT4577_60146C.1
atggctctgctctccgacctcatcaacctcgacctctcgggccgcaccgggaagatcatcgccgagtacatctgggttggcggttccgggatggacgtcaggagcaaagccagggtcatgtgcgactgctacgagccgaacggggagccgatcccgagcaacaagcggcacggggccgcgaagatctttagccaccctgacgtcaaggctgaggaaccatggttcgggattgagcaggagtacacccttctccagaaggacaccaagtggcctctcggttggccgctgggcggctaccctggccctcagggaccttactactgcgccgtcggagcggacaagtcctacgggcgggacatcgtggacgcgcactacaaggcctgcctctacgccggcatcgacatcagtggcatcaacggggaggtcatgccggggcagtgggagttccaggtcggtcctgccgtcggcgtctcggccggcgaccagctctgggtggctcgctacattcttgaggtagacggtagaccactagacctgctgccgcatgccggctgtgttcagttcttcttcttcttcttccgcccagacatggcgtggtcaaggatcaccgagatcgccggcgtggttgtctccttcgaccccaagccaattccgggggactggaatggcgctggtgcacacaccaactacagcaccaagtcgatgaggagcgacggcgggtacgaggtgatcaagaaggcgatcggcaagctgggcctccggcaccgggagcacatcgccgcgtacggggacggcaacgagcgccgcctcaccggccgccacgagaccgccgacatcaacaccttcgtctggggcgtcgcgaaccgcggggcgtcggtgcgggtgggccgcgacaccgagaaggaaggcaaaggctacttcgaggaccggaggccggcgtccaacatggacccgtacgtggtgacctcgctgatcgcggagacaaccatgctgtgggagcccagccactccaacggcgacggcaagggcgccgcggctccttga

SEQ ID NO: 141080 - DNA, 1342 bp, Zea mays
  Clone ID: MRT4577_60147C.1
cacactcactcgcggccattgtcctgcccgtgcgtgctctgccttttcaggcgatcgaccaaccaacttctcgtcactgccatggctctgctctccgacctcatcaacctcgacctctcgggccgcaccgggaagatcatcgccgagtacatctggagcaaagccaggacgctgtccggacctgttgatgaccccagcaagcttccgaagtggaacttcgacggctccagcaccggccaagctccgggcgacgacagcgaagtcatcctttgccctcgggccatcttcagggacccgttcaggaaggggcagaacatactggtcatgtgcgactgctacgagccgaacggggagccgatcccgagcaacaagcggcacggggccgcgaagatctttagccaccctgacgtcaaggctgaggaaccatggttcgggattgagcaggagtacacccttctccagaaggacaccaagtggcctctcggttggccgctgggcggctaccctggccctcagggaccttactactgcgccgtcggagcggacaagtcctacgggcgggacatcgtggacgcgcactacaaggcctgcctctacgccggcatcgacatcagtggcatcaacggggaggtcatgccggggcagtgggagttccaggtcggccctgccgtcggcgtctcggccggcgaccagctctgggtggctcgctacattcttgagaggatcaccgagatcgccggcgtggttgtctccttcgaccccaagccaattccgggggactggaatggcgctggtgcacacaccaactacagcaccaagtcgatgaggagcgacggcgggtacgaggtgatcaagaaggcgatcggcaagctgggcctccggcaccgggagcacatcgccgcgtacggggacggcaacgagcgccgcctcaccggccgccacgagaccgccgacatcaacaccttcgtctggggcgtcgcgaaccgcggggcgtcggtgcgggtgggccgcgacaccgagaaggaaggcaaaggctacttcgaggaccggaggccggcgtccaacatggacccgtacgtggtgacctcgctgatcgcggagacaaccatgctgtgggagcccagccactccaacggcgacggcaagggcgccgcggctccttgatttgattctgcggagactgagctctgtgtgtgagccggcctgcgtagatggcaaatgggactgaccctgtcagaaacttgagatgaccataataatagctgcagtgtgctcgttctggggttggataagacccaagaactttttttaaaaaaaaaaaaaaaaaaaaaaaagaggagaa

SEQ ID NO: 141081 - DNA, 1638 bp, Zea mays
  Clone ID: MRT4577_60148C.1
cggacgcgtgggcggacgcgtgggagcacacacggatcaatcacactcactcgcggccattgtcctgctcgtgcgtgctctgccttttcaggcgatcgaccaaccaacttctcgtcactgccatggctctgctctccgacctcatcaacctcgacctctcggaccgcaccgggaagatcatcgccgagtacatctgggttggcggttccgggatggacgtcaggagcaaagccaggacgctgtccggacctgttgatgaccccagcaagcttccgaagtggaacttcgacggctccagcaccggccaagctccgggcgacgacagcgaagtcatcctttgccctcgggccatcttcagggacccgttcaggaaggggcagaacatactggtaaccagagacccacccttcttcagattctctgcactgcgtgcatgaaagttgatcatgggtatggagaggagagagaccattcgtccatttttatttttattttttgagctgtgtgtaggtcatgtgcgactgctacgagccgaacggggagccgatcccgagcaacaagcggcacggggccgcgaagatctttagccaccctgacgtcaaggctgaggaaccatggttcgggattgagcaggagtacacccttctccagaaggacaccaagtggcctctcggttggccgctgggcggctaccctggccctcagggaccttactactgcgccgtcggagcggacaagtcctacgggcgggacatcgtggacgcgcactacaaggcctgcctctacgccggcatcgacatcagtggcatcaacggggaggtcatgccggggcagtgggagttccaggtcggtcctgccgtccggcgtctcggccggcgaccagctctgggtggctcgctacattcttgagaggatcaccgagatcgccggcgtggttgtctccttcgaccccaagccaattccgggggactggaatggcgctggtgcacacaccaactacagcaccaagtcgatgaggagcgacggcgggtacgaggtgatcaagaaggcgatcggcaagctgggcctccggcaccgggagcacatcgccgcgtacggggacggcaacgagcgccgcctcaccggccgccacgagaccgccgacatcaacaccttcgtctggggcgtcgcgaaccgcggggcgtcggtgcgggtgggccgcgacaccgagaaggaaggcaaaggctacttcgaggaccggaggccggcgtccaacatggacccgtacgtggtgacctcgctgatcgcggagacaaccatgctgtgggagcccagccactccaacggcgacggcaagggcgccgcggctccttgatttgattctgcggagactgagctctgtgtgtgagccggcctgcgtagatggcaaatgggactgaccctgtcagaaacttgagatgaccataataatagctgcagtgtgctcgttctggggttggataagacccaagaacttttttttagctttcttcgaacaagtaatcatggtgctgaaccaacacagatgtgctactaaacacatctaacgagtcaaacgccgaagcatatcccaacgcacaaccccggttaatcttgttacccatggattgaatgagattg

SEQ ID NO: 141082 - DNA, 589 bp, Zea mays
  unsure (1)..(589): unsure at all n locations
  Clone ID: MRT4577_60149C.1
ggccgggatacagnccgataaaaaaaaaaaaaatgaatgctgcatcaacacaacagcaacgcgagtggtggactcgcgcgcgtctcggtgggtgttcgacggatcgttagagaccgaccaaatcagcgagggggcatgacgagacaagcagatagtttagcacgagtacaggacaagccagctttgtctttgtaacggtgattacatctacctgtcttgtaggacaggctaggctagagtaggacggatccaattggaagtccctatgcattattgtgtgggccgggccgggatcaagccgataaaaaaaaaaaaaaaatgaatgctgcatcaacacaacagcaacgcgagtggtggactcgcgcgcgtctcggtgggtgttcgacggatcgttagagaccgaccaaatcagcgagggggcatgacgagacaagcagatagtttagcacgagtacaggacaagccagctttgtctttgtaacggtgattacatctacctgtcttgtaggacaggctaggctagagtaggacggatccaattggaagtccctatgcattattgtgtgggccgggccgggatcaagccgnt

SEQ ID NO: 141083 - DNA, 1968 bp, Zea mays
  Clone ID: MRT4577_6014C.1
ccccccccccccccccgaccccctccgtttgccaacgactcccggctccactgtcgctctcgctcccttccctcccacgcaatggtggccgatcgcctccgcctcgcgctgctgctctccgcgtgcctctgctccgcgtgggcgcgcccacgcctcgagccgaccatccgcctgccgtccgagcgcgcggcggccgacgaaacggacgacgacgccgtcgggacccggtgggccgtgctcatcgccggctccaacggctactacaactaccgccaccaggcggacatctgccatgcataccagatcatgaagaagggcggacttaaggacgagaacatcgttgtcttcatgtacgatgacatcgcgcatagcccggaaaatccgaggcctggtgtcatcataaatcatccccagggtggcgacgtctatgctggggtgccaaaggattacactgggcgagaggtcaacgtcgacaatttcttcgctgttctgcttggcaacaaaactgctctcaggggtgggagcggcaaggttgtggacagtggccccaatgatcatatatttgttttctacagtgaccatgggggtcctggtgtccttggaatgcctacgtatccatatctctatggtgatgacctcgtagatgtcctgaagaagaagcatgctgccgggacctacaaaagcctggtcttttaccttgaagcgtgcgaatctgggagcatctttgagggcctcctgccgaatgacatcaatgtgtatgcgaccaccgcgtcaaatgcagaggagagtagctgggggacgtactgccctggcgagttcccaagccctccacctgagtatgacacttgcttgggagacctgtatagtgttgcttggatggaagacagtgatttccacaatctgcgaactgaatctctcaagcagcaatacaacttggtcaaggataggacagcggttcaggatacattcagctatggctcccatgtgatgcaatatggttcattggagttgaatgttaagcatctgttttcgtacattggcacaaaccctgctaacgatgacaacacgttcatagaagacaactcgttgccatcattctcaaaggctgttaatcagcgcgacgctgaccttgtctacttctggcagaagtaccggaaattggcagacagctcacctgagaaaaatgaagctcggagggagttgcttgaagtgatggcccacaggtctcatgttgacagcagcgttgagctcattggaagccttctctttggctctgaggacggtccaagggttctgaaagccgtccgtgcagctggtgagcctctggtcgatgattggagctgtctcaagtccacggttcgtacttttgaggcgcaatgtgggtcgttggcgcagtatgggatgaagcacatgcggtccttcgcaaacatctgcaacgctggcatccttcctgaagcagtgtcgaaggtcgctgctcaggcttgcaccagcattccttccaacccctggagttctatccacaagggttttagcgcctaagaatcataaggtgaggcgaaatatttcagccgctccaccgcaacgaactggtttacattaccagtcctcaggggggtcctagttcttgaaccactattatagctgttccaccgttccagattacatagctatgcccaatttccggtgtacatattatagtcggaaagttatttggcaattgtattggtcgttgctgtatatattccctatagtttgttagcagatgtgtagtttgtaattccataaaaatgaagaacgcgttactgctatttctatgtagccgactgatgctcatgtgaaactttaccccattcttgttgggaaatggactatccgtggtggaattctcgcatcgaaaaaaaaaaaaaaaaaaaaaaaaaaaaaccccaaaaaaaaaaaaaaaaaagcgccccgccagcagcagctttt

SEQ ID NO: 141084 - DNA, 1800 bp, Zea mays
  unsure (1)..(1800): unsure at all n locations
  Clone ID: MRT4577_60150C.1
cattgggtacctcgaggccggccgggacagccgtggcgaaagcacacacggatcaatcacactcactcgcggcccggccattgtcctgctcgtgcgtgctctgcccttttcaggcgatcgaccaaccaacttctcgtcactgccatggctctgctctccgacctcatcaacctcgacctctcgggccgcaccgggaagatcatcgccgagtacatctgggttggcggttccgggatggacgtcaggagcaaagccaggacgctgtccggacctgttgatgaccccagcaagcttccgaagtggaacttcgacggctccagcaccggccaagctccgggcgacgacagcgaagtcatcctttgccctcgggccatcttcagggacccgttcaggaaggggcagaacatactggtcatgtgcgactgctacgagccgaacggggagccgatcccgagcaacaagcggcatggggccgcgaagatctttagccaccctgacgtcaaggctgaggaaccatggttcgggattgagcaggagtacacccttctccagaaggacaccaagtggcctctcggttggccgctgggcggctaccctggccctcagggaccttactactgcgccgtcggagcggacaagtcctacgggcgggacatcgtggacgcgcactacaaggcctgcctctacgccggcatcgacatcagtggcatcaacggggaggtcatgccggggcagtgggagttccaggtcggccctgcccgtcggcgtctcggccggcgacccagctctgggtggctcgctacattcttgagaggatcaccgagatcgccggcgtggttgtctccttcgaccccaagccaattccgggggactggaatggcgctggtgcacacaccaactacagcaccaagtcgatgaggagtgacggcgggtacgaggtgatcaagaaggcgatcggcaagctgggcctccggcaccgggagcacatcgccgcgtacggggacggcaacgagcgccgcctcaccggccgccacgagaccgccgacatcaacaccttcgtctggggcgtcgcgaaccgcggggcgtcggtgcgggtgggccgcgacaccgagaaggaaggcaaaggctacttcgaggaccggaggccggcgtccaacatggacccgtacgtggtgacctcgctgatcgcggagacaaccatgctgtgggagcccagccactccaacggcgacggcaagggcgccgcggctccttgatttgattctgcggagactgagctctgtgtgtgagccggcctgcgtagatggcaaatgggactgaccctgtcagaaacttgagatgaccataataatagctgcagtgtgctcgttctggggttggataagacccaagaactttttttagctttaaaaaaaaaaaaaaaaaaaaaaaaaaaaaaagagggccgcgcaacccccccccgttccctccctctcggggggttgcttcccctcgcgggggtaagctgcccgctgggctccttgcctgggggattgttttttcctgtgcgctgtcccccccccactccccgctccccactacatacaaacccgccggccgggcgtgtaaggggggggcccaccccaatgacttgggctggctctcctctgcctgcttttcgctcgccgcccctttcccggttgcttattttttaatcccaccccccccccggggggggccggcgcnctggggggaggttttattgctttccggcctcccttcctcttccccgttgactgactggggggggcggggcgttcg

SEQ ID NO: 141085 - DNA, 203 bp, Zea mays
  Clone ID: MRT4577_60151C.1
cccactcgtccgcccacgcgtccgtttgttccggcctcgccgggccgatccgagcgggaggcattttcaggtggggagggtggctggcgcggcacatctgttaaaagataacgcatgtgtcctaagatgagctcaactcaaaatagacagaaatatataccgtatttgtcactgaaacaaagataataaaaacaaatagatac

SEQ ID NO: 141086 - DNA, 101 bp, Zea mays
  Clone ID: MRT4577_60152C.1
cccacgcgtccggatacgctcatacatgatcatgtggcacactcatcacaggactatccatgcactacgagattccattaacatccttggcacattactgt

SEQ ID NO: 141087 - DNA, 309 bp, Zea mays
  Clone ID: MRT4577_60153C.1
taggggggaaagatagtactcttctacagataccatctcgccactgctagatactaggagtgacggtttccatttcacccactccatatcattggccaaggttaacgggggcgcctttattctcagacacctgcagaacaagagcaccaatacacagacccgtgcttttatatagggatgactggctataatagaggatgcatgcgtgttagataaccacaagggcctgctaacatgggccctaaactgggcattcatctagcccgatctaggggtgagtgctcccggcctctcgctgtagagccaacc

SEQ ID NO: 141088 - DNA, 355 bp, Zea mays
  Clone ID: MRT4577_60154C.1
tagcaacatacacagcacatttgtgtaccaacaatggcagccaaaatactgagggtgctcatgctatttgcggtttgtgaaagcgctgctacctataccatcatgccgctttgctcacaagctcctatagcttccgttcgagcgcagacgccctacacgctggtgtcattaaacgtgtggaaacccaattcttcaaccttatatgatccaacacgcaatcgcagctggcatcttacctttatcacccttgttccttcaacaatcatcagccctattacagcagttatgttgggtggctttatgggcacaaaacattatggcgcaacaactacaacaacttgtggggccgtccctt

SEQ ID NO: 141089 - DNA, 352 bp, Zea mays
  Clone ID: MRT4577_60155C.1
cattagggtaatagaatttttttaaaacccccaagcgccgcccactgatccaccataacccacactgttggtcctacaatcaccaagaaatcaccggacacagcttacctggagctacatcaacatggcccacacggttcggggctaccaaacacgggtacacaaatgcaccaaggacatacaagcgcgtttacaccatcggttgctcgatcccacctaacgtagggcacttcaaagcaccagttacaggaactttatcaagatgtccgcggacttcttctagcacatgccgtcaagcgaggtttcctttacgagcagtccaaagagcatgcccgtgggcttaaagtgtggg

SEQ ID NO: 141090 - DNA, 367 bp, Zea mays
  unsure (1)..(367): unsure at all n locations
  Clone ID: MRT4577_60156C.1
ttnntttgttttttttttttttttttttttttttttgttttttgagtagaaaccacccaatttttattggcaaacacctgattgacaaggcaaatcacatacgggcccctgcgaacaactaccaaaggaaaacccgaaaggcgaccaaacctgagggccgggggcaaaagaaaagcctatactgttgtcattgcagacaaaaaccataacccattataataatcggaagtgagggggcaatgcagtgccatggcaccctgcgccaccacaaggaaagacaccggctcaggaggaccttgaccgcacgaaaaaggcacatctactcctcggatctcaagcccccaagcgtgaacccaagcatggcgaa

SEQ ID NO: 141091 - DNA, 294 bp, Zea mays
  unsure (1)..(294): unsure at all n locations
  Clone ID: MRT4577_60157C.1
gtcatatctagctagtagctccctgaaaagttcactagagaagcatttgagtgaggagccatgtctgaggagaagcaccaccaccacctgttccacacaagataggagagaganganganggcgnctccgaggaagtcgactacgagaagaaggagaagcgccacaagcgcatggagcaggtcggccagctcnggggcatcgctgacggcaggtacgctctgcacgaggagcacaaggccaagaaggagccggagaacgagcacggcgaccgagtcgagggggaggtgccggcg

SEQ ID NO: 141092 - DNA, 417 bp, Zea mays
  Clone ID: MRT4577_60158C.1
cccatggcgtatggaccacgaggtgcacgtcaagatgcattccctacaatgaccttgctgtcaaagaggagaccgtgtgcaggctccgcttgggcaccaacatgtatcctttctcaccatagatggtgcaaaactaggctgctaccctcgacgtactccctgtcaacgagctcattacaaaggtcaaccgttacaccacactcttgctttaacacaaccgcaagatcgtgaacagactccacgacaagaatcacatcatgggtactactgacagacggcgccaacgacgcccctggtgccaacaacgccgacatttgtatcgatgacaccgactctaccgacccggacaatatcattgccgacataccccttactgatccatatctcactatcatcatcaacgcttgcctcaccact

SEQ ID NO: 141093 - DNA, 775 bp, Zea mays
  Clone ID: MRT4577_60159C.1
aaaaaacaaatacaaatatattacaaaacatctgaagaacctttgaaagagtttagacactttgaagtttcgaaaatattacaacaagcaacactattttccatactatctattcatgggttgctttgcattgcttcgtcataaatttgctcgcaaatcttcaggacaacatcatcttcagcttttttcgtagccctggcagagattgcttcagcttcgtcagcaacatcttttgctttgactttagtatgttttacttcacttattaccttcagatttcctgctttgaagcttcttcctgatgtccacatgcttttcagatgcttatcgtgccttctccctattctttatacattcttcaatacttaattctttcccacccctcttccaaatttcagataagaatttttggaccactccgaagcttcgattgttgatcttcggacatggtcagcagaaactcagaaatcaggttctatgcaagctctcacgtgattgcacctgactttcaatagaaccgaagcagtgcttcgggcacgtttccaagcacagtagtcctctcgtgctgagagaacacctttgaaagcaagggtctcataggcactcatctcattaggccctccaagtcaccatctaaaaaacttttctctttagatagagccccgacagtggagaaggttttcagcaagtcattatgacatctgttgccaagggtgtgacagttggctagaaagattcggtagttttcattaagtcctctcaaatgatttatttc

SEQ ID NO: 141094 - DNA, 211 bp, Zea mays
  unsure (1)..(211): unsure at all n locations
  Clone ID: MRT4577_6015C.1
gacccacgcgnccgaattatttacgagaacgcacccgcccgccaacagcgggcgttttatccagatgatgcttagggtttccgcgtctccggccgccgcggtggccaaccagctctctggtggggccgcggacccggctcctgccagggtgacagcacaacgcaacggagtctctcttgatcgcgccctcatcggcaaggggaaggaggtg

SEQ ID NO: 141095 - DNA, 182 bp, Zea mays
  Clone ID: MRT4577_60160C.1
aaaaaaatggggggccttcgtttaaaaggccccgccgggaaaactcggggcttcacccagggcaggtttggggttaaaaaaactgggacctttttttaaaaacaagtttccctttaaaacgagggtttggggtttttcatcccattggcatacccccatttaaaaaactcaaaacttgggtc

SEQ ID NO: 141096 - DNA, 772 bp, Zea mays
  unsure (1)..(772): unsure at all n locations
  Clone ID: MRT4577_60161C.1
ggtacccgcggccccctctcgagtttttttttttttttttttttttaaaaaacaaatacaaatatattacaaaacatctgaagaacctttgaaagagtttagacactttgaagtttcgaaaatattacaacaagcaacactattttccatactatctattcatgggttgctttgcattgcttcgtcataaatttgctcgcaaatcttcaggacaacatcatcttcagcttttttcgtagccctggcagagattgcttcagcttcgtcagcaacatcttttgctttgactttagtatgttttacttcacttattacctatgaagtggaaactttttagcaaaggttagtaaagcaatcactagaatgagtacactaaaatttaacaaaagcgaaatgtcacataccttcagatttcctgctttgaagcttcttcctgatgtccacatgcttttcagatgcttatcgtgccttctccctattctttatacattcttcaatacttaattctttcccacccctcttccaaatttcagataagaattttttggaccactccgaagcttcgattgttgatcttcggacatggtcagcagaaactcagaaatcaggttctatgcaagctctcacgtgattgcacctgactttcaatagaacccgaagcagtgcttcgggcacgtttccaagcacagtagtcctctcgtgctgagagaacacctttgaaagcangggtctcataggcactcatctcattaggccctccaagtcaccatct

SEQ ID NO: 141097 - DNA, 290 bp, Zea mays
  Clone ID: MRT4577_60162C.1
tcgactccaagccgttccgcttcccctgttccgcgcgaagccgatgcaccccaagctggcgcgggccgcgcgcagggttctttgctgaggggggggccgcgggttcccggaggaagacctggcttgccaaaggaggccatccgtggggggggggttatagtttagagaaattagattcgctaccaacaggcttcatttccaataccagaaccgaaaaaggccaattgggaacctttctttgggggcaaatcttggaagggtcttatattggttttaaaaaggttaaataa

SEQ ID NO: 141098 - DNA, 245 bp, Zea mays
  Clone ID: MRT4577_60163C.1
ctgctgtctcgctggtatccggtgcgtatccagtagttaacaaggagatgtgcatcttatctcctttcagaaggcggttatcagaaatattttgattctgaaattacaatgtcagttttggagtaggagatggttattataggcttcttatgtattacaattcgaattacaatatgcgcttgtagtaactgctctagatgtatagtccgcatttttagttatggccctagaggcggcaaaggtgg

SEQ ID NO: 141099 - DNA, 264 bp, Zea mays
  Clone ID: MRT4577_60164C.1
atgttcttgtggatcgcgcgacgtttctcggattcgggtcaggagcataggcgtgtgatacacagtgctgtgcgtgttatgatatttagaagtggtgtggaaaaatacagtcggaggatgtactcagcagcttgggctcatccatagcatgggtgcttgatgaaccttggatgggatgctggatagcttgggagctgttgttttaagttgacatgtgatcggtaatcatgtaactaggccatgagctattggatcattattttc

SEQ ID NO: 141100 - DNA, 337 bp, Zea mays
  Clone ID: MRT4577_60165C.1
agcatgcatgcaggttcaggacatcagaaattctttttgtcgtccaattcgacatgccgtggccagacaataggtgtgtcggacactcggactctcagtcttcggctgcgcttgaccatagcacgtataacaaattgcactatactagacttggcacggtatttaactcacctaagaaaccggcgtggcttaccttcttccttttctttttctaccgagagctactcctaagcgcctaacacctgcagtttccagtttcgagcgaggcgtgcgttgccacggttgctcaagtcttctttacttgcttgcctttttgcctataacgggttggcaccgt

SEQ ID NO: 141101 - DNA, 459 bp, Zea mays
  Clone ID: MRT4577_60166C.1
atgatggtcctcgcctcagttgccaccacctcattcaccatcctgattattttctctctcccctcatgcctccgcctccgcgcgaccccattctcggcagagggcgtgggagtaggtgactcctccccatatttgtctgacaccgactcgcgcagtggatattgcacatccacgaggacctttcacagcatgcacgcaccatcgtttttgctgtcatcggacatcccgctcgtcttctcggccttcgccctattcttcctccccaaccttcttcccccgcccacggtcgcagccgtgaaccgaccgacgctcatcaatgtgggtacggggcgagtcggtcttgctcctagcctttctccatgcgtgtcgacgagaaggacatggtgtctcctgccacgcttatgttatcttggcgatggggagtccaggtctgagatattggacacccaatgcccatag

SEQ ID NO: 141102 - DNA, 2411 bp, Zea mays
  Clone ID: MRT4577_60167C.1
gaaaacgctacaaaagcgcccgtcctttctcgttcctttccgtgcagttgcaagtgttgccacgccgcgccgcgacacaccacgcaggaggcagcgagcgcaataatgcgcacgcagaggagcacagcggcgtcactgctgcggcagtaatggccgcctggttccacttccaccacggtgtgcactagcgctacaccgaggccaccttttcttggttccttcaacacgcctactccggcctccggatcgggcaccacgtctgccccctgctcccggaatctttgccaagcggcgccgctactgtccggcaaggcgaccccgtctctcggccggcgttgatctgtttgcgtctttatgttactgtggttgaggcgggcggagtggcggcgcgatgggcatctcggcgaggtggctcaagtcattagttgggctgaggaaggtggagcagcagccgcgtaaggagagtgcagatgttggacgaatgtttcattttcagaatcagcgctctcaagatgacagcagcattgctgcacaagaagaaattccagaggttccttatggaaatgatccacctgaagatgattctaatgcaccttcatgcttggaacccacttatagttcagctgatgtgccactgtttcaaactgaagaggaactgaaagagatctgggctgctacaattattcagacaacattcagagctttcctggctaggagagcccatcgagctttaaaagggttggttaggcttcaagcccttgtaagaggtcacatagtaagaaagcaagctgatacgacacttcgttgtatgcaagctttggtcagggttcaggcccgtgttagagcaaggcgagttcgcatggctttggaaaaccagactgatcagcaaaatacttcaccagagcacacgaccgtggcacgtgtcagagaaattgaggatggctggtgtgatagtattggttctgtggaagatatccaagcaaaacttctaaagaggcaggaagcagcagctaaacgtgagcgagccatggcctatgctctagctcatcagtggcaagcaagttcaagacaaattacagcatttgagcctgacaagaacagctggggctggaattggctggagagatggatggctgttcggccatgggagagtcggttccttggcacttacaccgcagatgggattttcgtagtcaatgaaaccaagcaacctgacagaagtgcaaccaagaccccctacagaaaacctgttaaaaagcatgattcaacccttcaatcaaacatgttgaaccagaagggcttcccatcaaactcagagggtgttggctcctcgacaaaccgacccagtggtttggtatctactaaatctagactcaaggttttacccagagaaggttctgaggaagccccgtctcgtccttcaccacttgtgcggtccgctagtaatccgaaggagaggacttccggtattaattctaaggagagaactggggacttggattgtcaagttcataaaaggttctccttgcctggcattggttcagaagctggtagacacctgacaaagaaaggcacagttaaccgatccctgaaggccacaaaagattcccacatgctggggtcaaggcatcatcttgccagttgcattgatccagttcccactagagttgagctggagacttaacttggatgccattcatgtctgcatggctgcatcgctttactggcggcggcggcggctttcaacaccgaatatgcggtctagatgtgcgcttatctcatttcaaatcagatgcacgtcagcctgtccatacatgctgaggttaccccattgggcctttgagatgtaaattctgtcgttgagtcgagtggtatgcttatcatgtgtttatcggtgaatgatgttggtatagttgtaacttggaaggctaagcgaagttgtaccgttgtattgttgtatttggtattgccgtatagatatatagattgcacatgcgtcttgcagttgtcaatggctgcatgaatgtgtcgcaacatctatgttatactggtggtggcggttttcgagtttcgacaccatatatgtaggctcatttcatgagataaaatcagatgcatgtgagcatgtccatatatgttaagaggattaccattggttttattgttgtatttgtaagttgccgttaggaggtgtaaatttgtgtcgtcgagtggtacttattatgtgttgtcgtatagttgtgactcgaaggttaaaggtggttttggttctactgcgaagtgtgaactgtagtgagctgtgttctgtaaaaaaataaagttgttgtgatttgtctactgtaaaaaaaatggaagtaacttggttcaagctgccgtgaaaatgtagattttatatgattttttttttttgc

SEQ ID NO: 141103 - DNA, 294 bp, Zea mays
  unsure (1)..(294): unsure at all n locations
  Clone ID: MRT4577_60168C.1
ccaatccacanaggaggttctcaatgagagcatacatccattccccatcattggttcgaagattgttcggtctggcacccccccggttggtggggtggggtcaagtgatggatgttctgcatggtcatatggtggccggtggcgcaatcatcacctacttcggcgatgcgtcctcactggcagtcacactggttgagttcacggtcctcgcggaagtgtacatctggcgcgtgggaatgagtgggcgttttcctgacatctacagggtgcatgtggtagaggaccgggttgagg

SEQ ID NO: 141104 - DNA, 204 bp, Zea mays
  Clone ID: MRT4577_60169C.1
tgccttggtgctcttcactgtctccttcccctgatgcgcatgttttgacgccttgtcctgcgcgctccttacggcatccatcccacgctgctcggtgttcgtcgccttgtccttggcgcttgtcatcgtctcctgacccttctgcatggcgtgaacgctgtgttctcggcgctgtccttggcatccgtgaccgtctccatggcg

SEQ ID NO: 141105 - DNA, 442 bp, Zea mays
  Clone ID: MRT4577_6016C.1
agccagggtccggcgtggtgagccagcccatcgtgctggtgggagggctgtggattccgcaggagcaaagcagctcgcagtccgggtctccccacggcccgctccacttctccacctcaggcatcgccgtctcgtcggcgggcaccgtcagctgcgaggaggaagacggacggtccgagagctatggctggaaatgatggagaggctgctgctgctgctgagaggggagctgcagcctcaggaacgggaatcatcaggagggaaactgagagtagtgtagctgtctgtacacatacatagttacattacattacatacagggagtgagggagatcgggccttgagcgctcgagaccaaactgatgcttcgggtttgtacatcccaaagagatgagatgatacagttttgcggctaatccatgtttcgggcttttttgtcacc

SEQ ID NO: 141106 - DNA, 479 bp, Zea mays
  Clone ID: MRT4577_60170C.1
cgcttcctgtctgccgccagtcattcatttcaggccgactggaatgcgtcgtgcggttaaacttgtccgcccgggcgcacgccaacactttgctatggaaacgactccggagataatcatacctatggtgcaaatgccgagatctgtcaaatcctacgcgaacccgacattgaatcccgaccaccccgcagccacttataatctacaggcgtaagagttcgctctcgacgagagctgcccgctcaacagcgcgctaacgtagctctgctgatgacaccgacacctccgcagacgcatgaggagtatgtaccagattgtactctatgaacctaggccatagggtctgatgatgaaaaaaagtccatcagtcttgaaggtgatcccaatgacactttctcaaacatccactgctggggagacatacatgaacaacagtggttctgaacctactcccaggacagaccataaatttggcgctt

SEQ ID NO: 141107 - DNA, 491 bp, Zea mays
  Clone ID: MRT4577_60171C.1
ccgaccacgcgttcggattgtgcccaataaatctattgagtttcggacttttagatcgccagatcataagctctgggcactggggtatttttcaacacatgcattttattcattcattatatatcgatgatgattgacatgtatatcgatcaggtagcatcacggatggatgcatgcattttgaacgcctcaatatggacagcagcacttccatgggtctatattcggtcatgtcatgctctatagtgtgttagccaatttcatagtagattaccagccagcaacaccactcacaaaggtgactgtgtgaccgatgcttccggggcagggacgactatcttctcaagattatagctttgagtatgctgtaaaattctacagattttgtgcttgtccttcaacactttaccataatccaacacgagagaaaattataccgtctttgtcccaactacagttctccttaacacttgctatatggtggatttaac

SEQ ID NO: 141108 - DNA, 317 bp, Zea mays
  Clone ID: MRT4577_60172C.1
ccggggccctggggcggaaacaaatgcccattctttttccggttcctttgataaaaccaaacataggttcacagtttaaacttgacttacaaacagtctaacaaaaaatacaacactttgttttaacttgggacacaaaaacctttttttttttttccctttccctttccgctcactgccttaatttaagaaaactgccggagctccggccccacaaaatcggccttggcaggcccaaaaatttttacggggggccttaccttggcccaaaccttaagggcaccatggacagggtcccacaaaaacttttgtttagg

SEQ ID NO: 141109 - DNA, 371 bp, Zea mays
  unsure (1)..(371): unsure at all n locations
  Clone ID: MRT4577_60173C.1
aatagagtggnattcgtgtttttttccttttaaccggccaaaagcacacgaaaggcttccattaaacccgtttgtttccgcccgaaacaaaggttattagttttggggttcattcttccgggaccccaggacggacagggcaaccatttttttagggtgggcgctggttcaatgacccttttgttaaatcataaatgggggcccccgacccagtgggcattaaaccaacacgtacagggacagcctgggtgccaaattgacaaatacttttacactagcctccaaactgagattttgggggaccaatacccccctcacccaattcgagagggtcgttttggttaaacctttcattttttttcctttgaaaa

SEQ ID NO: 141110 - DNA, 984 bp, Zea mays
  Clone ID: MRT4577_60174C.1
gaagccgaagaagtccctgaactccgccccagatccatcggtcgccgcccggctcccatggcaaccctcagcgccgccgctcgccactgccctccttatctccttcgctgccctccttctccgcgcgcttgtctccgtcggaccctactcgggtcagggcgcagcacccaaattcggcgactacgaggctcagcggcactggatggagctcaccctccacctcccctcctccgactggtaccgcaacacctccgacaacgacctcgcttactggggcctcgactacccgcccctctccgcctaccagagccggctccacgcccgcctcatcaacgcctccctccccgacgccgtcgccctccgatcctctcgcgggtttgagtcccacgaatcggtaagttgcttatgcggtggacagtgctctcgtctgatctcttggtgttcttccccgcggctctatggttcgtgtgggcgtacatcaaacttggggtcggtgttagtggagaggagagatgggaggggtggaggtggctgctagccatggtcctgagcagtccttgcttggtattgatcgatcatggccattttcagtgtaattgcgttagccttggacttgcgcttggagcaattgctggtgttctgtcgaggaatgagctcgtcgctgcagatctcttcactcttgcaatcaatcacaaacaggccttctactattgttggtcattacccttgatggaaatcagattgatgctgatcagaacactataggggaggaagttgcttcaagactgttgaacagatagcaaatgtacctacctctgttttctcatgtgtctgcctactttggaaattaggacatgaaaattattttgcatttttgctatgtgcaacaaaaaataatatagctactactgattcatttaatgtgtcgtttgtttgacctgtatgacctatttctagcatatatcttcctcctgggttttggtt

SEQ ID NO: 141111 - DNA, 284 bp, Zea mays
  unsure (1)..(284): unsure at all n locations
  Clone ID: MRT4577_60175C.1
ggggggtgagacgacggacccgcgagnaccgcgcccggatgacacaaaccctgtcgacagcaacggagaaagaaaaacgcctgaagcagccgaacgcgaagagcggcacattgctcccaaaagccccagggacaaccgcaagcctccaaagccacgcagcacgagagcccagatacagaccggaccaggcaccccgcgccaacgaacccccaggccaaggaacaccaaacaaaaaggggggccgacgacgcgagagcacgaggacccgggaaaaaaacccggac

SEQ ID NO: 141112 - DNA, 296 bp, Zea mays
  Clone ID: MRT4577_60176C.1
cctcactcaaggtactggcgctcggctgtgtctacagggaggaggcgcttcaagagatgttcataaaaaatgacggatagattacttgccccaggacgggagacgtttatgacgctgcagattgtgtcagggcttacatctactaatcatgaaatactctgatacgctgtggctttgggagtgggagcgaatgcacattgagtgatcagcgcattgtgcgccatgtggagtggatctaactaacctgcaatgattaactggatggatgttggattgtgcgcatagacagtgccctg

SEQ ID NO: 141113 - DNA, 659 bp, Zea mays
  Clone ID: MRT4577_60177C.1
ctcgcggaaggatctgcaagccaccatcgactttcatgtctcgttacttagcagtgcattaatagaagcaggcgctatggcgagcagaccgtggacctctcctccacggccttcgactgcaaggccgtgaatgtgtcgtcatggtccgccttctgtgaggcccgtgttacaatgcggaatactgtggggaagtgcgagccgtcggcggtgtccgggagaccgtgctatggcccactgaccgcgtgctgtacctgggtccactgtccggtgaggcaccgagttacctgatgggcgagttcccggcgcgagtacctctggaacaccgcggtctctgccggctgacccggagacattcgccaagaaccgatacctggaggtgatcgactcccgctgggacatgctgggcgcgctcgggtgcgtcattcaccggagctgctctgtccgcaacgacgacaagttcggtaaggccgagtgcctcaaggtcgtctcctaaatcttcttcgagggtgtgactgcactacctcggtaaccctatactcatccacgcgcaaagaatcctcgtcatctgcacctgccaggtcttgctcatgggcgccgacaatgactaccgcatctccggaggcccgcttcggcaatgtcatgcaccccctctatcccgg

SEQ ID NO: 141114 - DNA, 320 bp, Zea mays
  Clone ID: MRT4577_60178C.1
aaacactttacaggatctctctacacttacttttctttttaacgcacagtgaaatgcggccaggccggagacaatctctcttgcgctcttgtcatacaatggatcatattcaacatccatctgtcatgcagaaggtagctgtccagctactttcttctagcacttccctagattttcaaaggtatgataggtctttcaagaagcctgctctataccaaggacattttgcatataggcaatattccaatgctggaatgcactatcctattgtttcatcaacaactaccgccatctgtgttctagcccctgcataaaaagga

SEQ ID NO: 141115 - DNA, 852 bp, Zea mays
  unsure (1)..(852): unsure at all n locations
  Clone ID: MRT4577_60179C.1
cggccgctcaagcncggctggccggagccccaaactttttatataggctaactcttttgttttgtgcatttggtgcatgcattgaagtggccaggaggcagtatgaggcattggctttgttgcaatggccggagcggtgacgacgacgacagacatgaggtggaacattccaaagctcaggggaataagatagacggcaagcaaaaatcttcgaaacctgctgatcaacctgagccagatatttcccctcctacaattgatgtcccagaactgtcatttgaggacttgaaagaaaagactgacaattttggatcgagttctctgattggtgaaggttcatacggacgagtatatcatgctaccatggatgatggcaggcaagcggctattaagaaatttgatgcatctgaaaatgagcctaacgatgaattcttgaaacaggtctcacttgtatcaaggctaaacatgaaaatctcgtggagatgctgggctactatgtggagggcaactatcgtatactggcatatgaatttgcaacaatgggttctcttcatgatgttctgcatggaagaaaaggagttcaaggtgcgcagcctggtcctgtgcttgactggatgcagagagtcaaaattgctatcgaggcggcaaaaggtatagagtacctacatgagaaggttcagccttcaatcatccatcgggacatcagatcaagcaatgtgcttctggttgagggacttcaggcgaaattgcagacttcaacctcttaatcaagctcctgatatggcagcacgtctccattcgactcgtgtattagggacatttggatatcatgcgccagaatatgctatgact

SEQ ID NO: 141116 - DNA, 1108 bp, Zea mays
  Clone ID: MRT4577_6017C.1
taggacagcggttcaggatacattcagctatggctcccatgtgatgcaatatggttcattggagttgaatgttaagcatctgttttcgtacattggcacaaaccctgctaacgatgacaacacgttcatagaagacaactcgttgccatcattctcaaaggctgttaatcagcgcgacgctgaccttgtctacttctggcagaaggtttgtagatcatgagaaagctactcatcttgattgttctcagaaaaatctatttacctctttaatttctttccaacaatttatgcattcatttcgacgaacaaaccaactgattggcttctttatctcccacaaaagtaccggaaattggcagacagctcacctgagaaaaatgaagctcggagggagttgcttgaagtgatggcccacaggtctcatgttgacagcagcgttgagctcattggaagccttctctttggctctgaggacggtccaagggttctgaaagccgtccgtgcagctggtgagcctctggtcgatgattggagctgtctcaagtccacggtaagcctctgctgactatgcctgcagctaaagcatgaaaaagctctggttccgctttcgttctttgcatacctaataaccaacctctgcatctgcttcaggttcgtacttttgaggcgcaatgtgggtcgttggcgcagtatgggatgaagcacatgcggtccttcgcaaacatctgcaacgctggcatccttcctgaagcagtgtcgaaggtcgctgctcaggcttgcaccagcattccttccaacccctggagttctatccacaagggttttagcgcctaagaatcataaggtgaggcgaaatatttcagccgctccaccgcaacgaactggtttacattaccagtcctcaggggggtcctagttcttgaaccactattatagctgttccaccgttccagattacatagctatgcccaatttccggtgtacatattatagtcggaaagttatttggcaattgtattggtcgttgctgtatatattccctatagtttgttagcagatgtgtagtttgtaattccataaaaatgaagaacgcgttactgctatttct

SEQ ID NO: 141117 - DNA, 1186 bp, Zea mays
  Clone ID: MRT4577_60180C.1
gcctacgccgccgcaccggtacgactacctctactgcgggtcctcgctgtacggcaacctgagcgcggcgcgggtgcgggagtggatggcgtaccacgcgcgcttcttcggcgcccgctcccacttcgtgttccacgacgccggcggcgtgggccccgccgtgcgcgccgcgctcgagccgtgggtgcgcgccggccgcgccacgctgcaggacgtgcgcgcgcaggccgagtacgatgggtggtaccacaaccagttcctcgtcgtcaacgactgcctgcaccggtaccggcacgcggccaagtggaccttcttcttcgacgtcgacgagtacatgttcctgcccgacggccgcgcgctcgaggatgtgctcgccgagcttgagccgtacacgcagttcaccatcgaacagaacccaatgtcgagcaagctgtgcgtcgatgatccggcggccgactattccaaccaatggggattcgagaagctggttttccggaactcgatcaccggggtgaggagggacaggaagtacgcgatccaggcgaagaacgcgtacgccacaggcgtccacatgtccgagaacgtgatcggcaacaccacgcacaagacggagcacctcatccggtactaccactaccacaacaccatcaacgtcctcggcgaggtgtgccgcgagttcgtctccgttccaccgaagaagggcggcggcctgacgtggtccgagaagacgccctggtactacgacggcagcatgaagcgcgtcgccggcgctgtgcgcgagttcgagagggagaccatcggcgacgtgcggctatgacggaccagcaggagtgctgctgatgtacagtttttgtggtatggctgtgagccattcaggaaggagctaggctgccttggcttactgcgttacctgttgggttcggagctatctgagctgacagagatgcagcgaaagcgaagctgctgcaaccttgtgtgccggtggtgttgtgttggcccgtgattctgatgtgatgatgatgagaggcaaagatgacgttcttgtaaaacatatatatgtctgcagtgtaaattccattgcatttttttgttgttgctgttgttgttttattgttcaaatatacacattgtattctgttcttggaagtttcagcaatgtagaaaccattcagaacaaaaaccaaaa

SEQ ID NO: 141118 - DNA, 1499 bp, Zea mays
  Clone ID: MRT4577_60181C.1
ccgcaatcaaacccaagacaaatccaaccaaccaagctattccccatctccggaccagcgccgcctccagtcgctgtccacgggcaccccgggcgcgcctcctccgagcccagactcgagctccatcccgccgtggatcaccgcgtgaggtggggcgcaccgaccggaccccggagggccagatggtgtccggcgccggagggggcgagtagcgcggtcggcggccacgaacggattggcggcggcgcggcgaggcgtcggtcggagcgggggccaccatgtctgctgtagtgtgcggcaagaggtcctcctccatcttcggcgacgagcttgtaccttccccttcctcccctccgtccccttcccaccaccatcaccccgccaagagggcccgctgctccccgtcccgctggagggagggtctactccaccacctcctcaccctcttccccgacatggatccccagttacttgaaaaagctcttgaggcctctggagatgacttggactctgcaataaagagattaaacgagctgcgactggagtcagctggggctatcctatctgccactgtttgtgaatctgagaaggacatatcatcagctcataacttattggctgaaggtaccaccagtaatggccatttagacatagctactgaaaatccacctgcaattgataactctcagacaagtcatcatagctctgaatgggttgacctatttgtcaaagagatgatgagctcctctgacatagatgatgcgcgagctcgtgcatccagggctttggaggtgtttgaaaagtccatcatggatcgagttggacctgaagcagtgcagaatttgcatagggaaaatgtgatgctaaaggagcaacttgcaataattctccgagagaatgctgttctgaagcggggcgttgcgatacaacacgaacgccaaaaagagtttgatgtgaggactcaggaagtcgacagccttaaacagttggtactgcaatatcaggagcagataaaaactcttgagataaataattacgcacttagagtgcatttgaagcaggctcagcagggcaattctatgcatggacgtttcccgcctgacgtcttctaatgtctgccatggctcaacagaataattatgcatggacgttcgttaatatttgatgctgtacagttggattttgaactaagcagtgtcaaataaaaaaaatcgaggtagtacctattaagataagtagactcaggacctcaagttcgactcaaatgctgcatatacgatcgtaccccatcattggagtcgacaacactaaggtccaactacctggaagctgagatgaaatagcatgttagggttggcagtgcactggtccttgcatacttgttgtaataatggatcttgcaggggaagctcggatgaagtaatattggctgtatgcgtttgaagtgtgagaactgatatatatcgtaagcttaacacactaaaaacaaaacaatgttt

SEQ ID NO: 141119 - DNA, 290 bp, Zea mays
  Clone ID: MRT4577_60182C.1
ctaaaaaactgccctttccattttttggccaggtaaaaaccccaggtaatttttacaacattttttccttttttattcgggccaggatctgaaaccccaacttatcatactggttggtatctggaaaccgcaaagcctaacgggcggttttgctgttgatacacaataactgtttatttcggggttggggtttaaagaactggggatgaccccaaaaagcttcatgcccattggccttttagggtgccaagcctgtaaattaaaaccaaagccttggtcctgtcaatttc

SEQ ID NO: 141120 - DNA, 918 bp, Zea mays
  Clone ID: MRT4577_60183C.1
cactcctatgggcgattggccggctcgaggccggccgggggcctgttctccagtccccccggcggcggcgtgctctctcgcgtgcacccggcacactccctcgtttctgccgtgctcgtcgcgtgcactcccgtctgtctctgtgggggtcggcgacgattggcagcctccatacgccaggtgcccaaatctctaccttcggtaccttcgccggcgacgagcatcaccaggtttcctgttgatcatggcacagcgtgtgatgtgcttgcttcggcgctccatagggtttacagtgccaccagcacagagagccctgagtacaactgccacaccagcagcggagggtgcagcggtggccgaggcgacggcgaaggaggcaaagaagaggaagaagaaaaatctgttcgacgtggtgcagttcctgccagggtggggcgtcggatacaaggtcgccaagacgacctggcgcgatgtctcctaccagatcaccaagatcaacctgtacaaggatggtcggcatggaaaggcatgggggtttcggtacaaggcaggtgtgcaagctgcagacgccccaactaggatcagcggggttaacaagcgtgggtggaagtacataaaagaatcacagaagaaactacacgatgcccccaaagtagacgtagcgattgctggctagttgcatgttgtaagatgattcttggttccttcattagctaaatctttagatggctgttgccagatgaacagagatgagagatccacttttggatcgagacaatggttccatccattttgcttgtgtggactgaacctccatgcaatatgtccctttcttttatttctggaacctttaccataatgtactaatacaaaagaactgtgttgatggtggcaatctagttaagctttgtttgattc

SEQ ID NO: 141121 - DNA, 287 bp, Zea mays
  Clone ID: MRT4577_60184C.1
attcggcacgagcaaaaaaaacagtagaatttagcttatgttcatatggttagaaccagagagagaaaggagtatggttcctgaacttgtcagttagaacttctttccatgtttcagagagtgaccagaccatcatccagtctgagatgttgttcacaatgattcatctgatgatgtagtgaaagtgagaccaaatgatctggagtggctcacgatcaaaagtaggatcgccagtcgtttttttctaaaaaaaaaaaaaaaaaaaaaaaaaaaaaactcgagcccgg

SEQ ID NO: 141122 - DNA, 2322 bp, Zea mays
  Clone ID: MRT4577_60185C.1
gcatgaggcagaaccacatgataccattagcaaatctcaacatgttcttgctgctacgagaatcgaataactcatctgcaactaaccattccatgccatgcaggttcgattacagggttgtggcagggagattaaaccggttaattatatctactaccatacattaggtaagcacccaaaaaaagaacatatatgcacagagcaagcaacaagtgcttccttctcatataaaacccagctgggtgaggtcatcgtccgggatctccagggcgcctgaaagatcaatgtcttgcaacgagtcgtcaaggccatccgtgaaccacgagctgatgtcgttgccctgcccatccagccctccagggacgtccaatatgtcatctaatccaggcaatgctggcagtccagcatccacggtcagccgcggggccacgttcctagagggatgctgagtcttcttctcgcttgcaggttcagggggctcttgcgcttgcgccgctggagatgagaatggctcaaccactctacccagcacgtttccggaagtcgatagctgagccagcttttgctttggcttcgtcttgttcttgcgctcgccgccgccgctcctgccgctgccgcctgaggaatggcgccctgatttcagtccagagccctttgcagacgcatccctgctgtgatcccgttccctgtcgccctttttccatttcgcaccaccttgatcaaatggagttctgtcgagcttctgatgcttcagcctctctacaccctccgtgaatctcgcgtcactgcttggcaagggtgcagacagcacactccaaagagaaggctcactgaagcagcttttccctgtttcgtcaaatttgtggcatcgaacaagagtgcgtttggcaaaagccaaggctagctgttttgcagctttgttggcagatttactgacaccagccttgtgactagagccaatgcgcccacccttgagttttctgtatgctctttcaaccaatttgttcatagcatgttgctccaagctcctctcctcaatattctttgtatcttgaattgatttatctagcttatgtaatctgcatttcttctggttcacctgatcatgcagccttttcctcagctctgaaatcattttattaatgtcctcatcttctccgtcatctagctttggcactgtctctggacaaatgccaatactttgcagctcaattaaaatcttatcttccatagacatctgcccatattgatactcatatggagacaaagggaaatctttccctggattttgacattgccgtggagtcagtggtatcaagtcatgcaaagggccactttctgggtatactgtaaaatttagtccgtctgataaattctcactatgaactgaattttcactgtttgaattaatgaaattgcttgaagctgtaaaaccattgcacatgctctgatgtaccacagaagtactgtttgagtgcacgaaatccacgctcacgcccaaaattagatgttatggcactagcttgaagttcattttctaagtatctgttgacagtgtaaggattgtggctatttggaaattcaacaagtatatctctttgcaccccattggaatcaggtaggtcatcttccataattaaagccgaaaggagtctgtgtgtcattggagccatttcattaaaccatttatcagcttccagcttttgtggtccagtatggattttgtcaccatgagaaaaacagccgactaatccttttgctccgactccattagttttactttgctgagatgagggggaaaaattagacggaaccagtccctgagatgaatgctcctccatctttgacattcttctgtgaccaactgatgctataatatcatgttcactgtcagacatgcaggacatgctcacttcaagctcttcaacaaggttgatctggttttttaagaaagaaaaattttctgagctcataaaagttagcatgggctccattttcttccaaaaaggaccagaataggcactaacaatagcgctgcgagcagcattaacagcagctaaaagctcctcttggtcatcttctggttcacctgttatgtctgtaatatcactatttagagcttgtgaatgccaggatgaagctttacggtcagaggcttttttcattggtggccgccccaacttactctcgttcttttcagatccaggtcttccaccttttgttggctttcttgtttctgcagtgtccagtttttcttttggtatgggagaacaccccttgacatgcatagctccccttccactcctcccttgacgacgaata

SEQ ID NO: 141123 - DNA, 257 bp, Zea mays
  Clone ID: MRT4577_60186C.1
ggacgagctggtcaaagtaagttatacatgtccgccgtggctcgagaagatgggcggtacgtggagagcaatgattagaggttacttttgcatgcaaaaagtggatttggatgctaatggcgaggttagataggatgttaatgcctttttaatggagtacgtgcacttgttgcatgcgagatgcaatcatgcaaagctcccgtttactgctctgccatgctatcctccctttctgccaacagtactctgcgctcctc

SEQ ID NO: 141124 - DNA, 244 bp, Zea mays
  Clone ID: MRT4577_60187C.1
gtacctcacatcccagtcaaacacggcacgatgtacacgattgctagaacgactgatactgcggggtgcggtcgatgcaccaggagaccacaatacgcattacggtgtatgtagaacactacgtgctaccaacaccaaaccacgttcgcgagaatgactatcacccgcgctatgacagtcctacgcggggaagacgaacggggcatcgtcggagggctggatgaacgtgagcctgttctgatgc

SEQ ID NO: 141125 - DNA, 1916 bp, Zea mays
  Clone ID: MRT4577_60188C.1
ttgggtccctcgaggccggccgggggcttgctcctcttctccagcctccctctgccaacaactctcggagggcgccgtccgcctccgcctccgtctcggggagcgatgacgatcgcgcgacgcctgctccgatccaatgcccccgcccaggcaagcagcttactgaagcatgtaactggcactgcaagtttgcaaggccatgcacatagtccgttggatgcgtcagtcagacattttagttcagctccatctgcccagtctgacacaactgaagaaaatgggttcaagggccatggcatgttggcaccttttacagctggctggcagagcaatgatttgcatcctctaattattgagagatctgagggttcctatgtttatgacatcaatgggaataaatacctggattctcttgcagggttatggtgcacagctttaggtggtagcgagcctcgattagtcaaggcagcaactgagcaattaaacaatttgcccttctaccattccttttggaaccgcacaaccaaaccttcattggaccttgcacaggagatccttagcatgttcactgcaagggaaatgggaaaagttttcttcacaaacagtggttcagaagcaaatgactctcaggtcaaactagtatggtattataacaacgcattggggaggccagacaagaagaaatttattgcacgatcaaaagcataccatggatctacactgatatcagcgagcctaactggtcttcctgccctgcaccagaagtttgatctaccagcaccttttgttctgcacactgactgccctcactactggcgatatcatcttcctggtgagacggaagaagaatttgcgactagacttgccaccaatttagagaatcttattctcaaagaaggaccagaaacaatcgctgctttcattgctgaacctgtgatgggtgccggtggtgtcatccctcctccaaagacctattttgacaaggtcatcactgcatttggaaggttgggaactatgtttggatgcgattattataacatcaagccagatctagtttccttggccaaggctctttcaaatgcctatgtacccatcggggcaactcttgttagcccagagatatcagaggtgattcactcccagagcaataagctcggctcatttgctcatgggtttacatactctggtcatccagttgcctgtgcagtggcaatagaagctttgaaactttaccgcgaaagggatattcctggtcatgtcaagcaaatcgctccaaagttccaggacggaattagggcgttggcagacagcccaatcatcggggagatacgtggcttagggatgattatgggaaccgaattcaccaacaacaaatcaccggctgatctattccctgccgaatggggggttggtgccatctttggagaggagtgccagaagcgcggcatgctggtcagggttgctggcgacgccatcatgatgtcgcccacgctgatcatgacgcccggcgaggtcgacgagctggtgagcatctacggggaagccctcagggccacggaggagagggtgtcagacctgaagatgaaatccgagaagaactaaccaaaagggcgaggacgacgacgataacgcctggcggcaacggtagcagctgatgtacaggtgaataaaatggtcgtgactgcgagatggcaataatgcgcgggaatggtcgacggtcgtctctgatcttggagtgcaaggtcaagctgctcggtcgctaaacaacggtggctgaacttttaaacgggacatagatgtttttttccctaagcaatggcagtatctcaaatgtttgctgccctgtagtttctgaacataaagggttagcagacgttataaaatttaaattttatcgtaaaacagttgttattctc

SEQ ID NO: 141126 - DNA, 200 bp, Zea mays
  unsure (1)..(200): unsure at all n locations
  Clone ID: MRT4577_60189C.1
agactgcaaaattgtacaaggagaattgtataaatttgctttatcaggatccactcntancatgcgattgcaaaatttaaaccttaaagacttcatcttttaaagttcttaaatactactcacttaatatttctactgtattttaatcatcaatattacctctgaaaattgtatgcaatttacctgtagttaactacata

SEQ ID NO: 141127 - DNA, 1842 bp, Zea mays
  Clone ID: MRT4577_6018C.1
tgggaccctcaaaaccaaaccccaccaccactccgcacgagatcatttcgccagctcatcgccaccgccctcctccgctcccgcgtctccttcccctcgtcgtcgtcgggttggtgggtccacctctcgccgtgccccgccgtcgacccgcctcagaatcaaagataagtcaaaggaaaggtcggtatgcgccggtggttttgctgcacgaggtttaatgcttcataccgtgaacatgaaaatgaacgtcccatcactccagaggagaaagaaggaaatggtttttctgttaaaagtgatcccatcaaggcaccaccttccattgaagtccctgaattatcatttgaagaattgaaagaaaagaccgacaattttggttcaatggctttgattggtgaggggtcatatggaagagtatattatgctattctggacagcggaaaacatgttgctgttaaaaagcttgacgcttcaacagaccctgaacttgataatgagtttttgacacaggtatccattgcctcaaaactaaaacatgataattttgtggagatgcttggatattgtgtggaaggaaatcagcgtctagtggtctatgaatttgcgacaatgggttctctgcatgatatcttgcatggaagaaagggtgttccaggtgcacagcctggcccagcacttgattggatgcagcgggttaagattgctattgatgctgctaaagggctagagtatcttcatgaaaaggtgcagccttcaatagtccaccgggacatacggtctagcaatattcttctgtttgaggactacagagcgaaaattgcagatttcaatctttcgaatcagtctccagatatggctgctcgtttgcattctactcgtgtccttggaaccttcggctaccatgctcccgagtatgccatgactggccagctaactcagaagagtgatgtatatagctttggggttgttcttttagagcttctaacaggaaggaaaccagtagatcatacaatgcctagaggtcagcagagtctggttacatgggcaacacctagattgactgaggacacagttaaacaatgtgttgatccaagattgaagggagaatatcctccaaagggagttgccaaggtctggcttcaatcattccataccttgtcttgcggctgtggcggcactgtgtgtgcaatatgaatctgaatttagacccagcatgagcatcgtagttaaggcactctctccccttcttcaacataaaccgcaaccaccggcagccactactgacgctacagcaccgtcagatgcctgactttctgaaggagctatgaatcatgaatgttaagagaaccattttctcttcggtgcgtgcgctgttctagatcactatcgtgtgcctatgaagtgatcagtgtcacacaagcaacggcattgtgggctaaagcatatctccacctttacttagcttggtacaggcaggagacttcccattgtcattaccgtgttctatgctgagtcatgtgctgctttcgttggccgggtgaggtgtgcttgttggccagcggtcgtgaccacctaattaccgtgttatggtcatcactgtaacatgcgaaggttctaatttttttttcatggtttgtttttcctcgtttttttgatggatcgtttttccttattttgtttgcctgtcgtctgattttgaactggcgcctccactgtacaacccactctgaatcgcgagactactcgtgtgcatgtttatgcgtgagaattgtgatgagatcatgcgcattgattaactactcgtgtgcatgtttatgcgtgaaaaaaaaaaacccccccccc

SEQ ID NO: 141128 - DNA, 359 bp, Zea mays
  Clone ID: MRT4577_60190C.1
gcgtgtatatggtgccttactgtgcgctgtaggcaaaagctagtatcagcgactgacaactataaactgacttgctttatcccttgatgcactctctttaacagcagcaacgaacgggctgtaaccaacaacccacattagcgaaaatctaggacagatctttctgcttcacagccacctctgaataatatcgctacggacacaacagacaactccatggtctgagcttccatgcgatgaaacatgcaaggtgccttagatgggtctcccaaccagttaggctaccctggcatgatgccaacctcgtcctgtgggcagtaggaggagagcatcccatcaactgcggtccggagggatca

SEQ ID NO: 141129 - DNA, 550 bp, Zea mays
  Clone ID: MRT4577_60191C.1
ctggactctcttgcaggattatggtgcacagctttaggtggtagcgagcctcgattagtcaaagcagcaactgagcaattaaacaaactacccttctaccattccttctggaaccgtacaacaaaaccttcgttggatcttgcacaggagatccttagcatgttcactgcaagggagatggggaaagttttcttcacaaacagtggttcagaagcaaatgactctcaggtcaaactagtatggtattataacaatgcattggggaggccaaacaagaagaaatttattgcgcgatcaaaagcatatcatggatctacattgatctcagcgagcctaactgggtgagtactgtcatactagaaaagctggtatgccagcataacatatactccaacgagactcataaatagatctccaatactttcctgattgcaactctatcgtagtcttcctgccctacaccagaagtttgatctaccagcaccttttgttctgcacactgactgccctcactactggcgatatcatcttcctggcgagacagaagaag

SEQ ID NO: 141130 - DNA, 2253 bp, Zea mays
  unsure (1)..(2253): unsure at all n locations
  Clone ID: MRT4577_60192C.1
cattgggtacctcgcgtccgcccgggaaaaaaataccgtccgatctgcgtccacgcgtccgagcggagcacggggactcggggagagagacagatacctggacaaaattgggcacgtcttcttctccgcgaacctcgcgtcctcctcgcctgcctgcctacaagtctcctcccctccccgtgcctccctcgggcctcgcttctcgcgctcttcctctcctgcctccgcctgcctccaggctccaacaacccgggagggcgccgtccgcccccgcctccgggagcgatgatgatcgcgcgacgcctgctccgacccaatgcccccgcccaggcaagcagcttattgaagcatgtaactggcaccgcaagtttgcaaggcaatgcggatagcttgttggatgctacagtcagacattttggctcagcaccgtctgcccagcctgaagaaaatgggttcaagggccacggcatgctggcgccttttacagctggctggcagagcaatgatttgcaccctctgatcattgagagatctgagggttcctatgtctatgacattaatgggaacaagtatctggactctcttgcaggattatggtgcacagctttaggtggtagcgagcctcgattagtcaaagcagctactgagcaattaaacaaactacccttctaccattccttctggaaccgtacaacaaaaccttcgttggatcttgcacaggagatccttagcatgttcactgcaagggagatggggaaagttttcttcacaaacagtggttcagaagcaaatgactctcaggtcaaactagtatggtattataacaatgcattggggaggccaaacaagaagaaatttattgcgcgatcaaaagcatatcatggatctacattggtttcagcgagcctaactggtcttcctgccctacaccagaagtttgatctaccagcaccttttgttctgcacactgactgccctcactactggcgatatcatcttcctggtgagacagaagaagattttgcgactagacttgccaccaatttagagaatctcattctcaaagaaggaccagaaacaattgctgctttcattgctgaacctgtgatgggtgctggtggtgtcatccctcctccaaagacctattttgacaaggttcaagcaatcgtcaagaagtatgacattcttttcatagcagatgaggtgatcactgcatttggaaggctgggaactatgtttggatgcgattactataacatcaagccagatctagtttcactggccaaggctctttcaaacgcctacgtacccatcggggcaactcttgttagcccagagatatcagatgtgatccattcccagagcaataagcttggttcatttgctcatggattcacgtactccggccatccggttgcctgtgctgtggccattgaagctctgaaactttatcgcgaaagggacattcccggccatgtcaagcaaatcgccccaaagttccaggacgggattagggcgctggcagacagtccgattataggggagatacgtggcttggggatgattatggggaccgaattcacaaacaacaagtcaccgactgatctgttccctgccgaatggggggttggtgccatcttcggcgaagagtgccagaagcgcggcatgctggtcagggtcgctggcgacgccatcatgatgtcgccgacgctgatcatgacgcccggcgaagtcgacgagttggtgcgcatctacggggaagccctcaaggccacggaggagagggtggcagccctgcagtccaagaagaactagccaaaagggcggcgacgacgataacgataaacgccgggcgacgacggaccatatttgatgtacaggtgaataaacagccaagttcgtggctgcgagatggcaatagcgcgccggtctctgttcttgctctgtcgccaagcaaatggtggctcaactttttaaacatgtcatagatgtttttttcttcccttcctttcccttaaggaatggcaatacatctcaaatgtttgctgccctgtagttcctgaagataatgggtttcgtgtatatcgtgagtattagtagtgttcggatacatagctttgtaaaggcaaagcaataataaagtgaaggaactgcagtttcgagtctgcaagcataaaaaaaaaaaaaaaaaaaaaaaaaaaaaagaaaaaaaaaaaaaaaaaaagcggccnacaaacactacaaccgtgacac

SEQ ID NO: 141131 - DNA, 329 bp, Zea mays
  Clone ID: MRT4577_60193C.1
ctctatagcatgtatttggtaacttaccatccactctgtgtacacgaagcggtaggcctgggggagcttccaccctttccaacagaaaagatgtcatatacagacttcacagtcaggaatcaaagagaaaatcaagttatagacacacgcacagatcttaaagcttagtgctgtaagtttgtgattctgtgtttcacccttgtcgctatcctcagacaaggtaggttggagactcttaattgtgatatgtttgtaaattttatggaacgtaagttttctgctgaaaattatgtagacttaaaatttagttgattggtccactttgttgt

SEQ ID NO: 141132 - DNA, 300 bp, Zea mays
  Clone ID: MRT4577_60195C.1
caagaaagataaccctggagtgttaggaggagagtgaaggtagatgggtgaggaagggtaaggggcatggatggttgcagctggtggctctcaccagccttcctggcagcctctacaacagagcagcttgccagacttctccaggaacccagaaacgggatggttgtcggcaaaggttgggagtggcttttcctctggtagccacacacctgagcactactgacagggaggcaggtgccatcttgacacctctcttccatagcaatgggaaagttatgagtgcaggagtgctgaggagat

SEQ ID NO: 141133 - DNA, 598 bp, Zea mays
  Clone ID: MRT4577_60196C.1
cgggacacagcaattctgacaccagctagcaacgtgtatgagataaatcgaccactgggtggaagtgaacgaaggggcacgacagatagggaagagcaaatgctagagctgctgctgctgagagaataaaaacacagtgcctagcacataatgctggtggacttgttaaggaatgcctttgaccagggatgcaaaccaggatcagagacggtggggggggagcttaccatagacagcaactaccatgatatgcacatcataccaacatgaacctggcagctgcacgatcatcaccacaattacaatgcctacatagctggcatgcacggtgacacaacatgaggtgcaccaaacgacaacgacttgggctagaaagacttatgctgaatactactaagcgacagaccatatattgcatggaacacgatgaacttcattgagacggtgacatgcatatggaacaacaacatctaccaatcagacagttaacagctgcctaccacaacacgatgttctcatacaaacaactgacaggtggaactagtgtgcttatcaacagcaggatcaaccactactagtcacccacatagctccagat

SEQ ID NO: 141134 - DNA, 1194 bp, Zea mays
  Clone ID: MRT4577_60197C.1
gccggccgggttcgcacaaaaaaaaaaaacgaggccgggcggccccaaaaaattagggagttttcttctcccgtccaccttgcgtgctcgcgcgcgagctctcgtggcgcagccacaactaggcgaccgccgccgcccctacgccacgtgctcgagtctagcctcgtcgattgcttccccagtttaattgatctacaagcttcagaacatgttcaagaatacatttcagtctgggttcctgtccattctttatagcctcgggaccaagccattgcagatatgggataaggaagttgtgaatgggcacattaaacgaccccaagatgaagatatccaatctaatgtacttgaaattgttggaacaaatgtacagtcaacttacatcacatgcccagctgatccttctgctactcttgggattaagcttccatttctggctattattgtgaaaaatcttaagaaatacttcacgtttgagatccaagttctggatgacaagaatgtccgacgtcgatttcgagcatcaaattttcaatctgtcacaagggtgaagccatatatctgcacgatgccgttgaaactcgacgatggctggaacaacatccagttgaaccttgctgatctgacaaaaagggcgtacggcacaaattacgtcgagacgctgcgggtgcaagttcatgcgaactgccggctccgcagaatctacttctctgaccgcctctactcggaggaggagctgccgcctgagttcaagctctaccttccaatccagaaatcataggatcccgagggcgtggagagactctggtgaccgggagacttatatcgtaccattgtgaggataacctagctgcacatctgcgccttcctgagatacagaaaaaaaatgtaccagaatgtttctgttagttttctgattgttgtgcgatgaatgattaggctgttctgttttcatagcaagggcgagtagccttagttggggctgttacccagtgacccctttgtgtgaacgagtagtcaatgttattagtccggaccctttggctactggtccttctggtccaaagcaaaacgtaccgttactgctcactgcctggtcatttaacgtgcttcttccatggttgtaccgtctctatgatagtatcatgtggccgctgatctattggataaaaaaaaaaaaaaaaaaggccccta

SEQ ID NO: 141135 - DNA, 675 bp, Zea mays
  Clone ID: MRT4577_60198C.1
gggcaacgacaacggctgccgtggcggttcccctagatccgccatggagtgggtcacccgcaacggcggcctgaccaccgagtcggactacccgtacgtgggcagccagagacaatgcatgagcggcaagcttggtcaccacgcggccaggatccgtggctaccaggcggtgcagcgcaataacgaggccgagctggagcgccccgtggcgggacagccggtcgccgtgttcgtcgacgcgagcagggccttccagttctacaagagcggggtcttctcgggcccctgcgacaccaccaccgtcaaccacgtcgtcacggtggtcgggtacggatcaaccggcagcgacagcggcggacgcaagtactggatcgtcaagaactcgtggggtcagggatggggagagaatggctacgtgcggatggcgaggcgtgtcagggctcgggagggcatgtgcgccatcgccatagagccctactacccagtgatgtgatatctccgtactagttaccggctgcctcctgatcctaaacaagctagtatgcttggagaaggatgcatggaattaaataaactacaactcaacgaaacagtgtgtgtgttgccctatgtcgttcgatgttatcgtttgtttgctaatgtaacattaccttaaaatgcaatcccttttggggc

SEQ ID NO: 141136 - DNA, 436 bp, Zea mays
  unsure (1)..(436): unsure at all n locations
  Clone ID: MRT4577_60199C.1
aaaaaacccgggggggggggggggtgttctccacagccaacgagcttcttgagcttgctgacaaggttggtccagagatttgtctgctgaaaaccatgttgatatcttggctgattttacacttatatttttttttttttccccgcacaancgccgggtttttttgtggggggggctttgaanaccgcacgtttgctttcttttggtacgcaggggctatgcaatctgncggaggtttattccgcgtctttggctgggcggatattattaatgcgccttttttttttggacctgggattgtggatggcttgaagctcaatggtttgccttaaggaaggggcctacttttgcttgctggatgagctcatctggcaaccttgcttttggggacttccctgctgcggctgtggngattgccgcgcggctttctgacttt

SEQ ID NO: 141137 - DNA, 2020 bp, Zea mays
  Clone ID: MRT4577_6019C.1
cattgggtacctcgaggccggccgggcagtcgtcccccccggccccgacccccctccgtttgccaacgactccgggctccactgtcgctcgctctcgctcccttccctcccacgcaagacaatggtggccgatcgcctccgcctcgcgctgctgctctccgcgtgcctctgctccgcgtgggcgcgcccacgcctcgagccgaccatccgcctgccgtccgagcgcgcggcggccgacgacgccgtcgggacccggtgggccgtgctcatcgccggctccaacggctactacaactaccgccaccaggcggacatctgccatgcataccagatcatgaagaagggcggacttaaggacgagaacatcgttgtcttcatgtacgatgacatcgcgcatagcccggaaaatccgaggcctggtgtcatcataaatcatccccagggtggcgacgtctatgctggggtgccaaaggattacactgggcgagaggtcaacgtcgacaatttcttcgctgttctgcttggcaacaaaactgctctcaggggtgggagcggcaaggttgtggacagtggccccaatgaccatatatttgttttctacagtgaccatgggggtcctggcgtccttggaatgcctacgtatccatatctctatggtgatgacctcgtagatgtcctgaagaagaagcatgctgccgggacctacaaaagcctggtcttttatcttgaagcatgcgaatctgggagcatctttgagggcctcctgccgaatgacataaatgtgtatgcgaccaccgcgtcaaatgcagaggagagtagctgggggacgtactgccctggcgagttcccgagccctccaccggagtatgacacttgcttgggagacctgtatagtgttgcttggatggaagacagtgatttccacaatctgcgaactgaatctctcaagcagcaatacaacttggtcaaggataggacagcggttcaggatacattcagctatggctcccatgtgatgcaatatggttcattggagttgaatgttaagcatctgttttcgtacattggcacaaaccctgctaacgatgacaacacgtttatagaagacaactcgttgccatcgttctcaaaggctgttaatcagcgcgacgctgaccttgtctacttctggcagaagtaccggaaattggcagacagctcacctgagaaaaatgaagctcggaaggagttgcttgaagtgatggcccacaggtctcatgttgacagcagtgttgagctcattggaagccttctctttggctctgaggacggtccaagggttctgaaagccgtccgtgcagctggtgagcctctggtcgatgattggagctgtctcaagtccacggttcgtacttttgaggcgcaatgtgggtcgttggcgcagtatgggatgaagcacatgcggtccttcgcaaacatctgcaacgctggcatccttcctgaagcagtgtcgaaggtcgctgctcaggcttgcaccagcattccttccaacccctggagttctatccacaagggttttagcgcctaagaatcataaggtgaggcgaaatatttcagccgctccaccgcaacgaactggtttacattaccagtcctcaggggggtcctagttcttgaaccataggtgaagcagacttataccactattatagctgttccaccgtcgttccagattacatagctatgcccaatttccggtgtacatatatagtcggaaagttatttggcaattgtattggtcgttgctgtatatattccctatagtttgttagcagatgtgtagtttgtaattccataaaaatgaaggacgcgttactgctatttctatgtagccgactggtgctcatgtgaaactttaccccattcttgttgggaaatgtactatccgtggtggaattcttgcatcgaaaacaattcccgggtgatcctttattcaaaaaaaaaaaaaaaaaaaaaaaaaaaaaaaaaaaaaaaaaaaaaa

SEQ ID NO: 141138 - DNA, 336 bp, Zea mays
  Clone ID: MRT4577_601C.1
caaataagcgtggcagcacatggatccttagctgccactacaactatatcgcggatatcaacaagtggttcatgtacaaaaaaatgaactgtataaggacgctggagcatactctcacctacgcataaattaaaatgcacttgccgagacgtgagaagcatttcaaacactaatatccaggggaccatcacaagttgacatgtgggaccacgaacacacatgtgggcacgcaagggaaaacaaaccaacgcttatggtcatgcaatgataactaagagctagccagcttgtacgagatactgtatagaccgcttaagcccaaatattgataaaact

SEQ ID NO: 141139 - DNA, 171 bp, Zea mays
  Clone ID: MRT4577_60200C.1
tctttctctcttccttcctgcctgcttcggtggcggtgttatatccccgctcgggttgccatggcagaccagctcaccgactaacatatctccgatttcaaggaggccttcaccctcttttacaagtactgctacagctgcatcaccaccaacttactatgctctgtgatg

SEQ ID NO: 141140 - DNA, 573 bp, Zea mays
  Clone ID: MRT4577_60201C.1
tttaggaacgctttggcatacaacaattgctcaacatcccttttttggttggtgttctgatatgtggagcaagcacgttcctgcttctagctttacagatctatggggttaggaaaatagagctcataggagttatttttatgctccttatcgccatttccttctttgttgaactgagtactgtcaatcctcctatgggtgaggtaattcaaggtctatttatcccgagattgcgaggggtttatgctgtgtcagatgcaattgcactatttagcgtcctcgttgtgccgcataatctcttcctgcattcatcactggtggtatcaagaaaaatatcaccttctccaaaaggatttaagggactatatgtgccaataatactcagctggttgacaacaacaatgcatgtagtggtcttacactgaactcagcgtcagtattattgaagaatatgtttggcagatcaacttcaaaaatatacggcttaacattattagcttctggtcagagtaacacaatgactactagctattcaggacaatacattatgcaaggtttctccgggatgaggaa

SEQ ID NO: 141141 - DNA, 584 bp, Zea mays
  Clone ID: MRT4577_60202C.1
ttttttttttttttttttttttttttttttttttttttttttttttttttttttttttttttttttttttttttttttttttttttttttttttttttttttttttttttttttttttttttttttggggaaaaacccaaaccgggtttttgggggggtaaaaaaaagggggcccataaagggcccaagggtccattacaggggttaagggactttgtttttttgggggggtaaaccccggaaaaaaacgttttagtggaacccaacccccccaaaaaaggttccaggggcccaaattcttgaaaggctttggaaacaaagggggccccacaaaaataaaaaccagggggggggggccttttgggcccaggtttggacccttttagttgggccccaaaaaacccttgtttaaccccaaaaaaagggagttaaattccttgtgggggccccccacaatttttatttaaaacgggggggacccccggggggaaaaacccggcacccttttgtggggggaaaaaaaaaaaaccccgggccttggggagaagggttttcccaaaaatggggggtttcccagggcccct

SEQ ID NO: 141142 - DNA, 1245 bp, Zea mays
  Clone ID: MRT4577_60203C.1
tgttctgatatgtggagcaagcacgttcctgcttctagctttacagatctatggggttaggaaaatagagctcataggagttatttttatgctccttatcgccatttccttctttgttgaactgagtactgtcaatcctcctatgggtgaggcataatctcttcctgcattcatcactggtggtatcaagaaaaatatcaccttctccaaaaggatttaaggacacttcaacgttcttcttgattgagaacgcatttgctatgcttcttgtgctacttgtaaatgtagcaattgtgtcaactacagggactatatgtgccaataatactcagctggttgacaacaacaatgcatgtagtggtcttacactgaactcagcgtcagtattattgaagaatatgtttggcagatcaacttcaaaaatatacggcttggcattattagcaccaggtcagagtaacacaatgactaccagctattcaggacaatacattatgcagggtttctccgggatgaggaaatgcatcgtttttatcattgctccctgtttcaccgtcatacctagtttgataatttgcagtgttgctggtgcccctcacgttcgacaactcatcaacgtaatctgcgatcatcttagcttttgtattgccgttttccctagttcctctcctgaaattcagtagcagttgtgccgcgaaggtgccgtacaagaactccttctagattgtccaagtcgcgtggattctctccattgtaattatggggatcaatatttatttcttctgcaatagcttcataagttggcttgtgcacagtgaactcccaaggatagtcaatgttataattagcacccttgtcttccctttcatggcggcatatattgcagctttaatctacttggctttcagaaaagttaatgctgctggcatattcccttccgtgtcagcttccactgggactgaagtagaagcatggaggcaagatggcaacattgatgatattggtgtacattgatatgtttgaaacacagtatataaatatactctttcattaaaaaaatattttgttcatacaccacacattagggaagacgtcaaaccattattgaaagatgtatatagttatacatatagttttatggttagatttgttgtccctttaggaatgtagtataagcaatttaagttttttttttatctacggtggtatctaatataaggatttatctgtccttggtggtttccc

SEQ ID NO: 141143 - DNA, 204 bp, Zea mays
  unsure (1)..(204): unsure at all n locations
  Clone ID: MRT4577_60204C.1
agcgtggtcgcggccgaggtacaagatcagaagcttaaattgacttgtggtncatattagtgacaactcccttcngtgcttncccctgttctttnnggttattatgtgcntattccttttatnttttggaagcccgctgcgggggggggtttgtttttttttttggngngcccaccatcgtttggggnnnnanttgagaccatt

SEQ ID NO: 141144 - DNA, 231 bp, Zea mays
  Clone ID: MRT4577_60205C.1
ccacgcgtccggcatcacagcgagctatagccaggctcgttgtgttccagattaaagcctttgttcgtaatttccctagctccaagtcgagtgtgtgtgatcgagagagctagctagcagatcgacggcgcgcatgatggcgacgacgacgaggagtaggccgatgctgctcgcctttgccgcggtggtggcgacgctgctggtggttgccgcgccggcgcctgcgtcgcg

SEQ ID NO: 141145 - DNA, 218 bp, Zea mays
  unsure (1)..(218): unsure at all n locations
  Clone ID: MRT4577_60206C.1
ggtgaacataccattttcaccttgttacaactgaatggtttgtgggagtgccgtgntgtctgaattcaaataagcatacagaatgcgcgagctgaatgcatgtgtatatacaaactttaatacaattgtaacaaggtgaacataccattttcacgcgtagtatttgaacataatttttattttttaaaaaaaaaaaaaaaaaaaaaaaaaggtggtgt

SEQ ID NO: 141146 - DNA, 446 bp, Zea mays
  unsure (1)..(446): unsure at all n locations
  Clone ID: MRT4577_60207C.1
cgggccgggnactcatcagtccccgcgtgcggcgcgggggggagggctccacctgacctatgctgcgtcctcacgctttccagcgggcaagccagactttgcctctctatgaaggcagggccaccacgagctggtcgcttggtccgtgggggacgggtcgccgatgaagccgacgaaaatgctggcgccgagggactcccaccttctccatcgaggagatgaacgaacgcgacaagcgatggagccacggcgctggcggtggccggcaagctagctcctcctcctctgtctctgtctttctagaaccgatgatcgggcttatcgctgcatggttagagtggatctgcatggccattggtcggacagacacggggtaggcccgtgtggacaccaagggtcaagggagatcgtaggttcaaccaatcgaaatgaatcaagggtgctct

SEQ ID NO: 141147 - DNA, 149 bp, Zea mays
  Clone ID: MRT4577_60208C.1
gactgaatcgacacatttaccaccacaaatgtccatcacagattcaacatcacaaatattcagcataagctcaccatgaatcctatatttaacgcttacaattgtagttcatcacaaagcaaagggatagaataaaaatcatagaagca

SEQ ID NO: 141148 - DNA, 1495 bp, Zea mays
  Clone ID: MRT4577_60209C.1
ccgggcctgttcaaggttagtgccttgacatcaacacctgtgtcaaccaagcggcagccacattcttgcttgtcgaggccgtgtctgagcacactctggcaccgaagggctccacacatgcattatcgccaaagctggttgctagcgttgacatcagtgttgtgtcgtccacatgttcaaaagaaggtcaggcctctgacataggaattccggtgtcccacaattctacagaagttgcactagcctactatccaatatttgagttgcttgctgttcaccctggtcgtctcatgccaagttcactatcatgttcattgacatggccactttcaatacatctacaacagcatcctgtacgcagcggtgtgcccctgctactgcttgtcacggagcaatgtataggtaatgttgctagagaaggagcagagctgagaagcacattactggttccaggtgctttgtggcctctggcccgttcaatgctgtcaaataggggctttacaacaagaactgctgtttgggcactgtcaaatatagcagcgagcagttttgagcataagaaactggtatttgctagtgaggtgactcaaaatgaagctgctccattggctgcaaaatatcgcagacaaggatttcaaactctgaagctcaagattggaaataacttcaattcagatatagaagttctggcatctatacgactcgaccatccagattactcatttattttgcatgcgaatgaggaatacacatatggttcattaaatttctttggtctggatacaaatacacagtatgatatggtttgtccctactgtgattctgggttcgtggctgaattggatgatgcaaatgctctcatgagccacttcgatgggatggaccctgatttccatcgtgacccaaggttcgggatcatggaggtaatctctgtcgtgatgcagcatgatatggcaaggatgaacaaggaggttgatgtcacaggaaggccgaacttcttttcagacctggagatagagtttgtgatcaaaattagggacagtccacccatgtcattggaggctttgctggaaacaatcagctgtctgtcagttcataattttttgtcatggtttgggatcccggtggaattgatgccatgtatcggcttgagggcaagccgatttttaagaaggggggaatgttagggaatgtgagcacaaagcccatgccggcccattttgctaaggaaaagactacaaaggagcagcgcagtctcaggaagggggatcgattatttcagaaaacacagacctccttccttcagattccagaagccacctcttctactgttcttcttcttcctctgcgcagtgatcttcttcctgcagatctcctcatgaatatctagccctcttcgattcccttgcttctctacatatctcaaactctatttcatcccatacttgtatcagtcactattatttcagttttactggttgttgcattggattag

SEQ ID NO: 141149 - DNA, 2024 bp, Zea mays
  Clone ID: MRT4577_6020C.1
cattgggtacctcgaggccggccgggagtcgtgtcgtccccccggccccgacccccctccgttggcgaacgactccgggctccactgtcgctctcgctcccttccctcccacgcaatggtggccgatcgcctccgcctcgcgctgctgctctccgcgtgcctctgctccgcgtgggcgcgcccacgcctcgagccgaccatccgcctgccgtccgagcgcgcggcggccgacgaaacggacgacgacgccgtcgggacccggtgggccgtgctcatcgccggctccaacggctactacaactaccgccaccaggcggacatctgccatgcataccagatcatgaagaagggcggacttaaggacgagaacatcgttgtcttcatgtacgatgacatcgcgcatagcccggaaaatccgaggcctggtgtcatcataaatcatccccagggtggcgacgtctatgctggggtgccaaaggattacactgggcgagaggtcaacgtcgacaatttcttcgctgttctgcttggcaacaaaactgctctcaggggtgggagcggcaaggttgtggacagtggccccaatgatcatatatttgttttctacagtgaccatgggggtcctggcgtccttggaatgcctacgtatccatatctctatggtgatgacctcgtagatgtcctgaagaagaagcatgctgccgggacctacaaaagcctggtcttttaccttgaagcatgcgaatctgggagcatctttgagggcctcctgccgaatgacataaatgtgtatgcgaccaccgcgtcaaatgcagaggagagtagctgggggacgtactgccctggcgagttcccgagccctccaccggagtatgacacttgcttgggagacctgtatagtgttgcttggatggaagacagtgatttccacaatctgcgaactgaatctctcaagcagcaatacaacttggtcaaagataggacagcggttcaggatacattcagctatggctcccatgtgatgcaatatggttcattggagttgaatgttaagcatctgttttcgtacattggcacaaaccctgctaacgatgacaacacgttcatagaagacaactcgttgccatcattgtcaaaggctgttaatcagcgcgacgctgaccttgtctacttctggcagaagtaccggaaattggcagacagctcacctgagaaaaatgaagctcggagggagttgcttgaagtgatggcccacaggtctcatgttgacagcagtgttgagctcattggaagccttctctttggctctgaggacggtccaagggttctgaaagccgtccgtgcagctggtgagcctctcgtcgatgattggagctgtctcaagtccacggttcgtacttttgaggcgcaatgtgggtcgttggcgcagtatgggatgaagcacatgcggtccttcgcaaacatctgcaacgctggcatccttcctgaagcagtgtcgaaggtcgctgctcaggcttgcaccagcattccttccaacccctggagttctatccacaagggttttagcgcctaagaatcataaggtgaggcgaaatatttcagccgctccaccgcaacgaactggtttacattaccagtcctcaggggggtcctagttcttgaaccataggtgaagcagacttataccactattatagctgttccaccgtcgttccagattacatagctatgcccaatttccggtgtacatatatagtcggaaagttatttggcaattgtattggtcgttgctgtatatattccctatagtttgttagcagatgtgtagtttgtaattccataaaaatgaaggacgcgttactgctatttctatgtagccgactggtgctcatgtgaaactttaccccattcttgttgggaaatgtactatccgtggtggaattcttgcatcgaaaacaattcccgggtgatcctttattcaaggtgaaccgtctgtcgaaaaaaaaaaaaaaaaaaggccccta

SEQ ID NO: 141150 - DNA, 131 bp, Zea mays
  Clone ID: MRT4577_60210C.1
tgataatatgaccttcatgttcccgttgaggccaccaaactccgaacgtgtctgtttagcccgaacataaatatcgaaggggcctaatttctttaagagcgccggacttctttgggtgttttggacaactg

SEQ ID NO: 141151 - DNA, 282 bp, Zea mays
  unsure (1)..(282): unsure at all n locations
  Clone ID: MRT4577_60211C.1
ggccggggccncttcggacncgcactcagaaaaccagcctcacacgaaacggcctcccaggnaagcagaagcgnccaccccagccgccgccatgaagcgcaccccccgcgncacgagctcccgccggaagngccgcaaggcgcacggcacggccccgaccaccgaccgccgcgagcncaagaccgcggcgcaagcgacggagccccgccacaagcacaagggcgcgagccaccccgacccgcaaggacgacgaggcgcaggacgcgagcggcaccaacaagg

SEQ ID NO: 141152 - DNA, 287 bp, Zea mays
  Clone ID: MRT4577_60212C.1
ggctaaaggtggcattgcgcggatgatgatagacatggaaggcctaatcggggactggaaatctgttttaagggcaaaggctgctggtacagaggattctacagaggaaccaacatatgatggggcaaggggacggaggttagctggcgtaagctcaaagccagctgggcagctgaatctatcatacagaggtcaaggccacattgggttaacggaggggacatccgatggagatcgtcttgcacatgaccactgaaacttgaacaaaaagcaagcctgtgatgctg

SEQ ID NO: 141153 - DNA, 709 bp, Zea mays
  Clone ID: MRT4577_60213C.1
cgggacataaacactcgaagctagctagcccccaagtagctgctagctctgcagtacagcactgcgtacaaaggtagcaactgcagctcgtggtgcactggtagatcgagcagcacgatggggcagctcagcaagaagcttctgctggcgtccatggtggcggcggtgctggccgtggcagcggtggagctgtgcagcgccatcccgctggaggacaacgacctggagtcggaggaggcgctctgggacctgtacgagcggtggcagaccgcgcaccgcgtgccccgccaccacgccgagaagcaccgccgcttcggcaccttcaagtccaacgtccacttcatccactcccacaacaagcgcggcgaccgcccctaccgtctccgcctcaaccgcttcggcgacatggaccaggccgagttccgcgccaccttcgccggctcccgcgtcagcgaccgccgacgcgacggccccgccacgccaccgtccgtcccggggttcatgtacgccgccgtgaacgtgtcggacctgccgcggtccgtggactggcgccagaagggcgccgtgacgccgatcaagtgctcgggcctgtgccgcagcgcgcttccctttctgctacggcgcgccccgcggcccccgcccccatagcctcttccccccccgctcgacgccccctccctccgctccaaccccctcccctgcgccatcc

SEQ ID NO: 141154 - DNA, 374 bp, Zea mays
  Clone ID: MRT4577_60214C.1
cccccctcggagtccccacctcttcgcacgggctctttgtcgacgcggtacccctccgtggcgggggggagcacgatctgccgggcccagctagcgaggatgctctgcgcgtggcatcaggctcagattgccaccgtagtccagcccaccctagcataaacatgctgcgaaccattactctgaaccacacggaactatcgcgaacttcgacgccgttgccgggtgaggggctgcgggaacacgcacaccaacgctcccagtatggcccatcgggagtggatgacctcccactacggggtattggagaacgtctactgtgccaacaacagccccgcggtgtacaagtcttaataacccgggaactcactcttcaa

SEQ ID NO: 141155 - DNA, 386 bp, Zea mays
  Clone ID: MRT4577_60215C.1
atatatattctcagcgtcacgctagccctagccgccgtccgccgacttgatcgtcatcgcatgcatagacctattcacgcactagcaaagctgaaagtgcgcacataaaaggcgaagcatgagtactgatcttataatggctccaggaagcagcctcggcattaccataggccagctttgcaacaaaggcgatggcaagtgtgttgtctgcaactacaacgggcgcctatgcacgcattatcacggatgacgcgacgagggcaattatggctacatgaccggaaagggcgtgatctgtgaccgaaacaagttctcagacactgaaggcggtaacgaggacaccaagcgcaagagctaccgcaacggcttgttcctgttcatggacg

SEQ ID NO: 141156 - DNA, 850 bp, Zea mays
  unsure (1)..(850): unsure at all n locations
  Clone ID: MRT4577_60216C.1
gccggccggttctcggagtatattgggcgaacagagagtcgtcttgctctactctagtcgttcggtcttcactcgacaagaggtgagggagtgagtgcagccggggacgggagggagaccaatcggagctgatggaggcagcggcggcgctgccgccggagagggatacgtcagcggactggggagatggcgtggtaccgctaggtttccgggtgaaggcatcctctcgcgagtcgccgtcacagaaggcggggaacgtgctggaggccgacctgcgctcccactgggccaccgccaccaacaccaaggaatggatcctccttgagctccaggaaccgtgcctcctctcccacatccgcatctacaacaaatccgtcctcgagtgggagctcactgccggactgcgatacaagcccgatgcattcgtcaagttgcgcccncgctgcgaggcccccaagcgcgacgtcgtctaccccgccaaccacaccccttgccgctaccttcgcatttcctgcctgcgcggcaaccccatcgccatcttcttcatccaactctttggcatccccgtgcctggcctcgaacctgagctccagccactgctcagctatttactcccgcaaatcacatcctccaaacaacccctttctcacaacatgcacctccaggttctcttctcttactacttcgtttcttctttcatattcgacccttctgcttcggngttcaccatttcatgagttcctgatgcatttctgctctatccattctagttgcttaaagatatctccaccagggctacctcatttcttccccaaattgaggtgaaatcactctttctggctcctagcta

SEQ ID NO: 141157 - DNA, 661 bp, Zea mays
  unsure (1)..(661): unsure at all n locations
  Clone ID: MRT4577_60217C.1
ggggaactgggaagggaagggagcggaagagaggtgggtgaccgccgctcctccgtccagccttccagttccaggcgtggcgaactaggcaagcggcaagctcaccgctcctcgagtgaggcccaggttccgtcgccgccgtactcagcagcggataccggcgagtcaacaggtagtagagggggaaggaggggagcagttcctgttcgcccggtcaccgcgcggccggagcaatcccgctggtgcgtccgcctcagtttgccgtcaccctgttgcacgtacggctagggtttggagatagatccgcccgccagctcgtgtggaggcgcgccgtggtgcggggaggaatagaggaagcgcggttttggttccttgctcctgaagcttcagggcgtgcgaaccgggttcggtcgcaatgtcgggctcgtcggcggcaggggaggacatagtgcagcacctatcgtccaattctaacccgtcttcgtcgaagctcgcgaagctcgaggcacgcatggccggcaaggctgtctccgcgccatcgtcaccgccacaccatcccatggctgcccccgcctccgcacctgccatatccttcatggaccangaggagctgcctgagacttcctcttccgatgacgataactgtgaagaagttttgata

SEQ ID NO: 141158 - DNA, 608 bp, Zea mays
  Clone ID: MRT4577_60218C.1
tctggccgggatcgatgccggcatggcggcggcgcgcggcgtccaggtaacgcgtgaactaggacacagaaccgacggagagaccatggagggggtgatgcggaaggtcgagcctaacataactgcggcgtcaccagaaccggcggatcgaccgaggacggacgctaggggagcgcccgcggctaccgcatcgcgtagcgtacgcgtcgctctacgcaggcgctggactacaccgcacacctgatgcagccagccgctcaccggcaatgaggacgctgtcggcgctgaactcgtatacgggactggtgccgacagcaactaggatatggggaacgaggattatcaaatggcagcaaggctaaaagctacttagcagacgaggggctatgatgagcgctatgtgttcataggctaaaccttgggagaggatgaccacgacatagctagcaaaactgagagagaaggtaccaacgaactagaatgacctgttgcaaagagctcggtgagaggacgaacgaacatgaaaaagagggcctacgccgcagctttagggggttgagcgtggcacaagcggggacctactgtacacagggctatagctgctatct

SEQ ID NO: 141159 - DNA, 497 bp, Zea mays
  Clone ID: MRT4577_60219C.1
cccacgcgtccggggaagggagcggaagagaggtgggtgaccgccgctcctccgtccagccttccagttccaggcgtggcgaactacgcaagcggcaagctcaccgctcctcgagtgaggcccaggttccgtcgccgccgtactcagcagcggagaccggcgagtcaacaggtagtagagggggaaggaggggagcagttcctgttcgcccggtcaccgcgcggcccgagcaatcccgctgctgcgtccgcctcagtttgccgtcgccctgttgcacgtacggctagggtttggagatagatccgcccgcagcgcccgccagctcgtgtggaggcgcgccgtggtgcgggggttccttgctccggaagcttcagggcgtgcgaaccggttcggtcgcaatgtcgggatcgtcggcggcaggggaggacatagtgcagcacctatcgtccaattctaacccgtcttcgtcgaagctcgcgaagctcgaggcacgcatg

SEQ ID NO: 141160 - DNA, 260 bp, Zea mays
  unsure (1)..(260): unsure at all n locations
  Clone ID: MRT4577_6021C.1
gttctagatcgcgaggtcggcacgccatggtcccaaacaaagcccaaggtactcatgctcattctgtaatcatgagccagtccaactgagcactggtactcatgctcattctgtataaagagattagcctgaanaaaaaaaaaaaaaagaaaaanaaataataaaaaagaaaaaaaaaaaaaaaaaaaaaaaaagggcgggaaaagaataaggaaggaaataaacctaaaagggggggcccgacaattagaagcttggta

SEQ ID NO: 141161 - DNA, 1279 bp, Zea mays
  Clone ID: MRT4577_60220C.1
gtgcggcgctcgactcgaggccgcaggaggactctatggctttatcgtcatcatcaccagtggttgccccgtccccgtgccggttcctgtgcccccgcgccactaccgcctctcacgacctcctctctttcgcgaccacagcaacaaggaggcggctgctcctctccaccgccaccaccaccattgccgccgccatggccgcttcttcctcctgcaaggtcatcgactcccacctgcacgtctgggccacgccacagcaggccaaggaggagtacccgtacttcccaggccaggaacccacgctgcgtggcgacgccgacttcttactcgagtgtatgagtgaagctggagtggacggggctgttattgttcaacctattaatcatatgtttgatcattcgttggtaactagtgtgttgaagaaatacccatccaagttcgttggttgctgtcttgcgaatcctgcagacgatgggactgggattaaacagcttgaacatctgattgtacaagaaaaataccgtgctgtgaggttcaacccaaacttatggccatctggtcaaaagatgaccaatgaggttggaaggtcattattttcgaaggcaggggaacttggagtaccacttggaataatgacgatgaagggagttggtccatatattcaagaaatagaggaactgtgtagggattatcctgcaactaccgttattcttgaccatatggctttctgcaagccaccaacgaacgatgaagaagagaaggcattctcttcatttctaagcttatccagattcccacaggtttatgtcaaatacagtgctcttttccgcataacaagagaagcatatccatatgaagacactgctcagcttctttccagtgtgatatctcactatggagccagtcgagtaatgtggggaagtgacttcccctatgttgttcctgaatgtggttacaaaggaggaagggaggcgatttctcatgtcgccagcaagataccagtttcccagtcagatttggaatggatcttgggaaaaacagtgagccaattattccaaggtgcatgggttactccatgatcactgtagtgtattccagagcaactatatcaacaggaatatatgtcctattttccagtgtttacatgtattctctctgtttcaaataatgtttttatctagatacatatatctaggtgtgtagcaaaatctttaacctcagttcttgattacgcgacctaccccatataatctaaaaaagggggggggagggcggccgc

SEQ ID NO: 141162 - DNA, 596 bp, Zea mays
  unsure (1)..(596): unsure at all n locations
  Clone ID: MRT4577_60221C.1
tgtatgttggcaagtgatccaatntactatgtttgatgatgattttgatattattagttggtggcgtgagcataagaatacataccctattctctccattttagctaaggatgttctaactgtacctggatgttgtaactgtacctgtttcaactattagctttgaatctgtttttagtcttactggcagggtgcttgaggagaggagacgttgtctaactagtgagatggtggagaccttgacatgtttgaaggattggcagatgggcgacgatcgagaacagcacaacttggagaatccagagcttcaacaagccttcgagaatcagtatctagatggtgatggtgatgataatcaagatgctcaacctgttattgttgcctagtgtgcatgtggccgtgtaggattttatcattgtatctgtatttcgtatgtatggctgtattactcaactaaactctcgaaacattgaactgattactatttttgagctggttgtactctttttcccttctgaccaaaggtttttaatgaggcagccacaaaacagctcaattttatttggtcataaaaaaaaaaaaaaaaaaaaaaanaa

SEQ ID NO: 141163 - DNA, 943 bp, Zea mays
  unsure (1)..(943): unsure at all n locations
  Clone ID: MRT4577_60222C.1
atccgagatatagtttctcgtgtgaatcaacagttacccggtaccatagcctcgagcggggccgggccgggtcaaacccgaaacccactagtaccgccacacgaattcccgaccccgatggcgacatcgccaccgcagaaccctagctccggcgagccctccgatgcgtcgagcctcgcagccgcggcgctcgaggcgcccgtgcgcgtatggagatccctcgtcgcgcgcttccctcccctcccggactcctccagcttccttgctggcgtctccgacctccagctccgctacttcggcaacagccggccccgccgccgcaggcgctccgctctacctctccctctccgcccggtggccgcgcactctgctcggattgctggtgagatgcccaaagcctttgtgatcttagatgatgttgtgcaacacaccctgactaatttgcacagtattcacaaaagcttactattttggcaggccaaggctgagggaacaaattctcagaaagtgtactttatgatatttgagagaggtccaagggcctttgttgatgcaacatatcaaacactcactagactcgggagcaatggacgccctgtccaatacattttgcattctgcatctgatatggtgtcaacaaaactcgctgccctgacaagtatgcaacactgcttggccgcttttcttgcagaggttcgttttcttcagtttaacaactgggaattctgaagttgataaatgcagggaaggattaactgaaaactcagataaatcgctacatacattattcattgttttgaataccacattctccaagttggaggtatcacttagaaatgcttgtgagggtcaagatgaactatttatagatgatggaaacttgcatgaactgtttgggaaataccagaagttgatgtanagaagtcagaatggacagaggcct

SEQ ID NO: 141164 - DNA, 583 bp, Zea mays
  Clone ID: MRT4577_60223C.1
cctggatatccgatccgagctgtctctccgcgggctgcgaacgctcttaccaccgatggcaccggcggagcatgaccgttacgaaggagacactctccctaggggaactctgtccccggcatagatctccttccgctgcggactcccctcgctacgcttcattctccattactctgatgatcctgctgctaatgaccctcgctggtgggttaccagaacaacttaccaccactccaaccatcaagcggaaaacaacccctgacatacccttacacccttcatccaccctcagcgggcactcaggcgtattgcccggacaatcgccttaggtaccgacagacattcagcactctctgattccagagaatcactggacggtctctgtacatactctataccgatctcgccattcgcgggtacgacatacacttaaactacttaatctccgtgcatcttctcctgctagaaccatgcagatcgagctccgcgcgccagcaacatagaacatcactcttctgtgaacacatctcacgagagtgcaggaactgccagtcaaaattgccgctcgcgaatgagttaattt

SEQ ID NO: 141165 - DNA, 454 bp, Zea mays
  Clone ID: MRT4577_60224C.1
acgctggacagcgcttgggcacgtcgggagagcgccagccgcatccccgtgcatcgtctaccgtccatctactgtgccggctggctggctgcatgcctaccacaggaatcggggcgaccattcagctcatttccatggcgggccatgccaggctggtggtgctgctgctgccggcgctcgccgccgaccttctctggtgacccctcgcgcgatgcgggcagcagaactacacctgcatgctaagttttggcgactggctcaccgacaccggaaacctgatcgagtccagcctggtctccaccacatcgtcggccgctacccctacggcatcacctactttgaccgaccgaccggacggtgctccgacggccgcctcgtcggggactttctagggcaagcgtttggtctgccgatgctggagccgtacctgcagaatcgcggcaaggacctgcgc

SEQ ID NO: 141166 - DNA, 1852 bp, Zea mays
  Clone ID: MRT4577_60225C.1
cccacgcgtccggaaatttgaaaatcacgcgagacggagagatctgggccgtgcgtcgcgaggaaaggctcggaacgggagggcgcgggccgtcggatgctcacagtcgcagctgccaccgacgcctacggctatttaaccccgcgctgccgacgccgcactcgcccccggcctcctccgcccgcatccccgatcccgctcgctcgcgctcgctcgccgccagttgtccaacagctcgaatcgtctcatacctcggcgaaaatgagagagatcttgcacatccagggagggcaatgtggcaaccagatcggtgccaagttctgggaggtcgtgtgtgacgaacacggcattgacactacaggtcggtacactggcacttctgaccttcagttggagcgcgtcaatgtctactacaatgaggcctcctgtggccgctttgtgccccgtgctgttctcatggacctagagcctgggacaatggacagtgtccgcactggaccctatgggcagatcttccgccctgacaactttgtgtttgggcaatctggtgctggtaacaactgggcgaaggggcattacactgagggcgctgagctcattgactctgttctcgatgttgtgaggaaggaagctgagaactgtgactgcttgcaaggattccaagtatgccactcccttggtggcggtactggatctggtatgggtacgctgttgatctcaaagatcagggaggagtaccctgaccgcatgatgctgacattctcagttttcccctcaccgaaagtatctgatactgtggttgagccatacaacgccactctttctgtccaccagttggttgagaacgctgatgagtgtatggttcttgacaacgaggccctctacgatatttgcttcaggactcttaagctgaccacccctagctttggtgatttgaaccatttgatctctgcaaccatgagtggagtcacctgctgcctaaggttccctggtcagctgaactccgacctcaggaagctggcagtgaacctaatccccttcccccgcctccacttcttcatggttggcttcgcgccgctgacatcccgcggctcccagcagtaccgggcactcacagtccccgagctcacgcagcagatgtgggacgccaagaacatgatgtgcgccgctgaccctcgccatgggcgttacctcaccgcctcggccatgttccgcgggaagatgagcaccaaggaggtcgacgagcagatgatcaacgtgcagaacaagaactcgtcctacttcgtggagtggatccccaacaacgtgaagtccagcgtgtgtgacatcccgccgaggggcctgtccatggcgtccaccttcgtcggcaactcaacttccatccaggagatgttccggagggtgagcgagcagttcactgccatgttcaggaggaaggctttcttgcactggtacacgggcgagggcatggacgagatggagttcaccgaggccgagagcaatatgaatgacctcgtatcggagtaccagcagtaccaggatgcgactgctgatgacgatgaggaggccgagtatgaggacgaggaggagccagctgatggcatgtgagggaaggctgttaaatgtgaagcctggtggttgcagggaccccgatgagttttgatgtcccctttcgtgttgtcgccatgttatactattacactagcataccaccctcgtggcccattccgtcgatcgttgctgttgatgcttgtgttttccttgttctatagaaccttccttccgtatcgctacttatgctgcgctaatttgctgaaatcaaaatctccagagctatgttgacctatagaag

SEQ ID NO: 141167 - DNA, 1764 bp, Zea mays
  Clone ID: MRT4577_60226C.1
ccgggaaccccgcgctgccgacgccgcactcgcccccggcctcctccgcccgcatccccgatcccgctcgctcgctcgccgccagttgtccagcagctcggatcgtctcatacctcggcgaagatgagagagatcttgcacatccagggagggcaatgtggcaaccagatcggtgccaagttctgggaggtcgtgtgtgacgaacacggcattgacactacaggtcggtacactggcacttctgaccttcagttggagcgcgtcaatgtctactacaatgaggcctcctgtggccgctttgtgccccgtgctgttctcatggacctagagcctgggacaatggacagtgtccgcactggaccctatgggcagatcttccgccctgacaactttgtgtttgggcaatctggtgctggtaacaactgggcgaaggggcattatactgagggcgctgagctcattgactctgttctcgatgttgtgaggaaggaagctgagaactgtgactgcttgcaaggattccaagtatgccactcccttggtggcggtactggatctggtatgggtacgctgttgatctcaaagatcagggaggagtaccctgaccgcatgatgctgacattctcagttttcccctcaccgaaagtatctgatactgtggttgagccatacaacgccactctttctgtccaccagttggttgaaaacgctgatgagtgtatggttcttgacaacgaggccctctacgacatttgcttcaggactcttaagctgaccacccctagctttggtgatttgaaccatttgatctctgcaaccatgagtggagtcacctgctgcctaaggttccctggtcagctgaactccgacctcaggaagctggcagtgaacctaatccccttcccccgcctccacttcttcatggttggcttcgcgccgctgacgtcccgtggctcccagcagtaccgagcactcaccgtccccgagctcacgcagcagatgtgggacgccaagaacatgatgtgcgccgctgaccctcgccacgggcgttacctcaccgcctcggccatgttccgcgggaagatgagcaccaaggaggtcgacgagcagatgatcaacgtgcagaacaagaactcgtcctacttcgtggagtggatccccaacaacgtgaagtccagcgtgtgtgacatcccgccgaggggcctgtccatggcgtccaccttcgtgggcaactcaacttccatccaggagatgttccggagggtgagcgagcagttcactgccatgttcaggaggaaggctttcttgcactggtacacgggcgagggcatggacgagatggagttcaccgaggccgagagcaatatgaatgacctcgtgtcggagtaccagcagtaccaggatgcgactgctgatgacgatgaggaggccgagtatgaggacgaggaggagccagctgatggcatgtgagggaaggctgttaaatgtgaagcctggtggttgcagggaccccgatgagttttgatgtcccctttcgtgttgtcgccatgttatactattacactagcataccaccctcgtggcccattccgtcgatcgttgctgttgatgcttgtgttttccttgttctatagaaccttgcttttggtacggagctgcaatgtggattcgatccttccgtatcactacttatgctgcgctaatttgctgaaatcaaaatctccagagctatgttgacctatggaagtcaaaccattctgctcg

SEQ ID NO: 141168 - DNA, 1658 bp, Zea mays
  Clone ID: MRT4577_60227C.1
ccggccggggcccccggcctcctccgcccgcatacccgatcccgctcgctcgccgccagttgtcccgcagctcggatcgtctcatacctcggcgaaaatgagagagatcttgcacatccagggagggcaatgtggcaaccagatcggtgccaagttctgggaggtcgtgtgtgacgaacacggcattgacactacaggtcggtacactggcacttctgaccttcagttggagcgcgtcaatgtctactacaatgaggcctcctgtggccgctttgtgccccgtgctgttctcatggacctagagcctgggacaatggacagtgtccgcactggaccctatgggcagatcttccgccctgacaactttgtgtttgggcaatctggtgctggcaacaactgggcgaaggggcattatactgagggcgctgagctcattgactctgttctcgatgttgtgaggaaggaagccgagaactgtgactgcttgcaaggattccaagtatgccactcccttggtggcggtactggatctggtatgggtacgctgttgatctcaaagatcagggaggagtaccctgaccgcatgatgctgacattctcagttttcccctcaccgaaagtatctgatactgtggttgagccatacaacgccactctttctgtccaccagttggttgagaacgctgatgagtgtatggttcttgacaacgaggccctctacgacatttgcttcaggactcttaagttgaccacccctagctttggtgatttgaaccatttgatctctgcaaccatgagtggagtcacctgctgcctaaggttccctggtcagctgaactccgacctcaggaagctggcagtgaacctaatccccttcccccgcctccacttcttcatggttggcttcgcgccgctgacgtcccgtggctcccagcagtaccgagcactcaccgtccccgagctcacgcagcagatgtgggacgccaagaacatgatgtgcgccgctgaccctcgccacgggcgttacctcaccgcctcggccatgttccgcgggaagatgagcaccaaggaggtcgacgagcagatgatcaacgtgcagaacaagaactcgtcctacttcgtggagtggatccccaacaacgtgaagtccagcgtgtgtgacatcccgccgaggggcctgtccatggcgtccaccttcgtcggcaactcaacttccatccaggagatgttccggagggtgagcgagcagttcactgccatgttcaggaggaaggctttcttgcactggtacacgggcgagggcatggacgagatggagttcaccgaggccgagagcaatatgaatgacctcgtgtcggagtaccagcagtaccaggatgcgactgctgatgacgatgaggaggccgagtatgaggacgaggaggagccagctgatggcatgtgaggggaggctgttaaatgtgaagcctggtgatgtcccctttcgtgttgtcgccatgttatactagtacactagcataccaccctcgtggcccattccgtcgatcgtggctgttgatgcttgtgtttccttgttctatagaaccttgcttttggtacggagctgcaatgtggattcgatccttccgtatcgctacttatgctgcgctaatttgctg

SEQ ID NO: 141169 - DNA, 1898 bp, Zea mays
  Clone ID: MRT4577_60228C.1
acggtgggaaatttgaaaaacccgcaaggtgggagagatcttggccgagcgccgcgaggagggctcggaccgggagggtacgggccgtcggatgctcgcagctgtcaccgccgcctacggctattttaaccccgcgctcctgccgacgccgcactcgcccccggcctcctcccgcctcccagatctcgctcgctcggcgccagttgcctcgcagtttggatcatctcatacctcggcgaagatgagggagatcctgcacatccagggagggcaatgtggcaaccagattggcgccaagttctgggaggtggtgtgcgatgaacatggcattgaccctaccgggcggtacactggcaattccgaccttcagttggagcgtgttaatgtctactacaatgaagcctcctgcggacgctttgttccccgcgctgttctcatggatcttgagcctgggacaatggacagtgtccggaccggaccctatgggcagatcttccgccctgacaactttgtgtttgggcaatctggtgctggtaacaattgggctaagggccactacaccgagggtgctgagctcattgactctgttctggatgttgtgaggaaggaagctgagaactgtgactgcttgcaaggattccaagtatgccactcccttggtggtggtactggatctggtatgggtacgctgttgatctcaaagatcagggaggagtaccctgaccgcatgatgctgacattctcagttttcccctcaccgaaagtatctgataccgtggttgagccatacaatgccactctttctgtccaccagttggttgagaatgctgatgagtgcatggttctcgataacgaagccctctatgacatctgcttcaggactcttaagctgaccacccctagctttggtgatctgaaccatttgatctctgcaaccatgagtggagtcacctgctgcctaaggttccctggtcagctgaactccgacctcaggaagctggcagtgaacctgatccccttcccccgtctccacttcttcatggtcggcttcgcgccgctgacgtcccgtggctcccagcagtaccgggccctcacagtccccgagctcacgcagcagatgtgggatgccaagaacatgatgtgtgccgctgaccctcgccatgggcgttacctcaccgcctcggccatgttccgcgggaagatgagcaccaaggaggttgacgagcagatgatcaacgtccagaacaagaactcgtcctacttcgtggagtggatccccaacaacgtcaagtccagcgtgtgcgacatcccgcccaggggcctgtccatggcgtccaccttcatcggcaactcgacctccatccaggagatgttccggagggtgagcgagcagttcactgccatgttcaggaggaaggctttcttgcactggtacacgggcgagggcatggacgagatggagttcaccgaggccgagagcaacatgaacgacctcgtgtcggagtaccagcagtaccaggacgcgactgccgacgaggaggagtacgaggacgaggaggaggtgcaggccgatgacatgtgaggggagggctgttatcgtgtgaagccttgtggtccctagggcaagcggacctcgatgagttcggtgttccctttcgtgttgttgccatctttctactgctagcgtacccaccctcgtggcccattccgtcgctgttgacgtatgtatttttcttgtgctatggaaccttgcttttggtacggtactatcctgctagtatgcttggcgtttgaggttcctggcgtgaatttaagccttccgtatgcagtgattggagttggagaccggctgcttcgtccaggcgaagcaattgacagcgacgtgctatacactcaag

SEQ ID NO: 141170 - DNA, 747 bp, Zea mays
  Clone ID: MRT4577_60229C.1
cctcgaggccggccgcgctcgatttttgtcatcgattcagagctcacgagtcacgagtcacgacccaaatcccttttccactccgccggacgtcgagagaggcggtgggtgcgggacgcgaaggcgaagccctagccccctccctgccgcggacgccgatggacccacctcgcgccgtcgccgttcttctcatactcctgcccgtgctcgccccggtggcctccggtgtacctttcgtcgtcctacacgggataggcgacgagtgcgggaacgatgggctgtcatccttcaccaagatgcttggggagtggtcaggctccaagggttactgcataaggaagaaccaaaaaagaaggatgtgacacaaaacaagaggtacggaaattggtttctgaaaaccaggtaggagtttagcgaaatcgtacttttggttattcacgttttcaactatttagccaaatggatatcatcgtttcagatcgatctgttaggcaatagaatatgccatctgtggatatcctagctgctatagatagcagatgtaaatcagggatagaatcctagctgctatagatagcagatgtaaatcagggattagttgctagatatagcagatgtaaatcagggataaatcaggggaattatccctgccttgtaaagcaggccagccagctctatataatagaaggtgccccctctcattgaggtgtggccaattgccattaaaaaaaaaaaaaaaaagcggcc

SEQ ID NO: 141171 - DNA, 543 bp, Zea mays
  unsure (1)..(543): unsure at all n locations
  Clone ID: MRT4577_6022C.1
cggncgcgtgggnaaaaaaaaaaaaaaaaaaaaaaaaaaaaaaaaaaaaaaaaaaaaaaaaaaaaaaaaaaaaaaaaaaaaaaaaaaaaaccctacctacacattttttgacccctacttcttcttttgttcctcctttttaagggagggccctactcgttccggcgataagggaaggggccggagggggggggaccgggggcttttgcccttgtgtgaattttttggcccggatggtgggggcgctttccgaggggggggggggctgctcctgttgtgggaaaaccacggggagccaaatgggtgccccatcatcaggggaggccaagggaaaccgggttgctattgctgggggggcggatgaaggggtcggggacaaggggatgactttggaggattttgttaaattaagagaggggaaaaggaaggccctatttgctttgggggttgtggaaaggaatgttgatgttgacagggttttgaagcctttgcatcctttttgaagcaggaaagaaaatgaggaagttttattaaggcggggtt

SEQ ID NO: 141172 - DNA, 1844 bp, Zea mays
  Clone ID: MRT4577_60230C.1
ccacgcgtccggagagctcggagcgggagggtacgggccgtcggatgctcgcagctgccaccgccgcctacggctattttaaccccgcgctcctgccgacgccgcactcgcccccggcctcctcccgcctcccagatctcgctcgctcggcgccagttgcctcgcagtttggatcatctcatacctcgtaagtcggcgaagatgagggagatcctgcacatccagggagggcaatgtggcaaccagattggcgccaagttctgggaggtggtgtgcgatgaacatggcattgaccctaccgggcggtacactggcaattccgaccttcagttggagcgtgttaatgtctactacaatgaagcctcctgcggacgctttgttccccgcgctgttctcatggatcttgagcctgggacaatggacagtgtccggaccggaccctatgggcagatcttccgccctgacaactttgtgtttgggcaatctggtgctggtaacaattgggctaagggccactacaccgagggtgctgagctcattgactctgttctggatgttgtgaggaaggaagctgagaactgtgactgcttgcaaggattccaagtatgccactcccttggtggtggtactggatctggtatgggtacgctgttgatctcaaagatcagggaagagtaccctgaccgcatgatgcttacattctcagttttcccctcaccgaaagtatctgataccgtggttgagccatacaatgccactctttctgtccaccagttggtcgagaatgctgatgagtgcatggttctcgataacgaagccctctatgacatctgcttcaggactcttaagctgaccacccctagctttggtgatctgaaccatttgatctctgcaaccatgagtggagtcacctgctgcctaagggttccctggtcagctgaactccgacctcaggaagctggcagtgaacctgatccccttcccccgtctccacttcttcatggtcggcttcgcgccgctgacgtcccgtggctcccagcagtaccgggccctcacagtccccgagctcacgcagcagatgtgggatgccaagaacatgatgtgtgccgctgaccctcgccatgggcgttacctcaccgcctcggccatgttccgcgggaagatgagcaccaaggaggttgacgagcagatgatcaacgtccagaacaagaactcgtcctacttcgtggagtggatccccaacaacgtcaagtccagcgtgtgcgacatcccgcccaggggcctgtccatggcgtccaccttcatcggcaactcgacctccatccaggagatgttccggagggtgagcgagcagttcactgccatgttcaggaggaaggctttcttgcactggtacacgggcgagggcatggacgagatggagttcaccgaggccgagagcaatatgaatgacctcgtgtcggagtaccagcagtaccaggatgcgactgctgatgacgatgaggaggccgagtatgaggacgaggaggagccagctgatggcatgtgaggggaggctgttaaatgtgaagcctggtgatgtcccctttcgtgttgtcgccatgttatactagtacactagcataccaccctcgtggcccattccgtcgatcgtggctgttgatgcttgtgtttccttgttctatagaaccttgcttttggtacggagctgcaatgtggattcgatccttccgtatcgctacttatgctgcgctaatttgctgaaatcaaaatctccagagctatgttgaaaaaaaaaaaaaaaaaaaaaaaaaaaaaaaaaaaaaaaaaaaaaaaaaaaaaaa

SEQ ID NO: 141173 - DNA, 170 bp, Zea mays
  Clone ID: MRT4577_60231C.1
aagaacacacacacactcttataggaacgtgttaccacatcatccacgcataacacaatcctgttaaggccaagactgccaaataagcatgttcggcaaatacttcagtgaaaactgctttcaatgtctccatagtataatcaaatgtattaaagaattgtactttctac

SEQ ID NO: 141174 - DNA, 729 bp, Zea mays
  Clone ID: MRT4577_60232C.1
gcatataattggaagactataagatttatcgagtttacaagtaggttaaataaaaaatgataatacatgtgatggtggagccccaattactaaaggatgcgacaatcaaatccaaggtgtttaaatttcttctatatttcaaatttgtgtatagaaaagctacactgttaagggggatacaattcacaagcttcaatgtgctaccatgcgctcaaaagatccaccatattatgtttaaagcctagccatagtagtaactcgttcattttcttttctcttggtttcttggcttgagcgacactgtcacacctagcctagcactgcccctccttaaatctaactgttgggtagaaaagtgtatatctacctcttccctacccctcctatggtattcttggcaaccaaatcttattatgctcaaccagaaagctctctcactctacgtgatgtgctctttacattatgcaaataatgttagtttgctagaaggataagaatgagatcgaacaattctaccatatgatattcctagtgtatgtatgataagaatttaaatgagcatatgcaaaactatgaataaatagaactagatactagtaactacaagaatttgaatctagttagctaacatgtgtgagagaattttggtccatagtttccactaacccacttgacaattatatggtccaatatgatgcatctcatcacatgcatcccatctttgccgac

SEQ ID NO: 141175 - DNA, 1330 bp, Zea mays
  Clone ID: MRT4577_60233C.1
caaggagtcatgtggctctagacgttcatggtggtagtcgtcgcgtttttcgctgccgccgcttgccggaacgagcgaactagcttccgcgcagggtcgatcgggcgatataagcttgagagcgagcgaaggtacggcgtgtatgtgatgcgtcccgcgctggccctggtcgcacgaggcgagacctatcacgtacacgcggtaccttcgttcgttctcaagcttatcctcgaggacggccgccaccagtccaggtccagcgcgggacgcatcgcatacacgcggtacctccgcagctttaattttgcagagcgaccaccagtccaggtccagcgcgggacgcatcacatacacgcggtaccttcgttcgttctcaagcttatagcgcccgatcgaccctgcgcggagctagttcgttcgttccggcaggcggcggcagcgaagcagtgcgacgacgacgacgaggtacgtagagagcgagaggatagatgtcgagccgaaggtcgtcgtcgtcatcgtcgcacggcaacatctccgaggacgagatgaacgagctcgtctccaagctccaggccctgctccccagctcccgccgccgccgcggctccggccaggcgtcgacggcgaagctgctgaaggagacctgcagctacatcaagagcctccagcgggaggtggacgacctcagcgaccggctgtcggacctcttgtccaccatggaccacaacagccccgcggcggagatcatccgaagcatcctccgctcctgagcgcgcgcaagggcgaggtcaacgaacgccggcctccgatcgatcgccgacagcgcgcgctctccggccggctggtcacgtgcgggagctgagctcaattaggtagctagggtatatatacatataatatatatatctacatgtacgtgtatctaccttttcctttaccagtctccctagatctgagatcatgtggctagctccgtataaaaatgtactagccacacgctgacacgcacacgtatgcatgatggtctctgcgctaagcttcactgggtagtagggtatagcactagagcctaagcaagcttatcctcctcactttagtatagctcgcagcagcagtctctcgattcctcggggtggcttaattggatcgagctggctagtgcgctctctctctctctctcactctagcaggcaggaaaagagacaaccgaccgaccactactagcctagcctagagcaaattgactgtcgttatgatgatgatgtactgctaaagcttttattaacgacttcaataacatgcacgtcctgcggttagtgctttgtttttc

SEQ ID NO: 141176 - DNA, 232 bp, Zea mays
  unsure (1)..(232): unsure at all n locations
  Clone ID: MRT4577_60234C.1
gggtcgtcacgctcattcangcgtactgatctcggatatcggctctagctcgataagctctaaaatttgccccactcgccagtcgcagcatcacctgtagcagccatggacgccatctgacgcggtaccaattattatataggggcggctgtgctcaacgcaggctgcctctatgaataattcgggtacgcggtccgtcaaggccgtgctgcagttccccgtctgccggatc

SEQ ID NO: 141177 - DNA, 1055 bp, Zea mays
  Clone ID: MRT4577_60235C.1
gccctcttcgtcccccccccccctctctctctctctctctctagtgcagtggaggcgtggagagcgaatcaactgttctacaacaccaaaccacccttgcttcgtctccctccgctacactatctggatccaaccacgagccagctcgctataaaggcaccctctccctttctgtctccctcacaactcagttattctacagctttaattttgcagagcgaccaccagtccaggtccagcgcgggacgcatcacatacacgcggtaccttcgttcgttctcaagcttatagcgcccgatcgaccctgcgcggagctagttcgttcgttccggcaggcggcggcagcgaagtagtgcgacgacgacgacgaggtacgtagagagcgagaggatagatgtcgagccgaaggtcgtcgtcgtcgtcgtcgcacggcaacatctccgaggacgagatgaacgagctcgtctccaagctccaggccctgctccccagctcccgccgccgccgcggctccggccaggtgcgtcgtcggtcgcgaacagatggctgacccgctcaacatctccggggcactgtgcagtgcatatgcatgcatgctcgcctttttccagttttaaacgtctaaaatgcgcgcggcggggcggggacatgacatgcataatgcaggcgtcgacggcgaagctgctgaaggagacctgcagctacatcaagagcctccagcgggaggtggacgacctcagcgaccggctgtcggacctcttgtccaccatggaccacaacagccccgcggcggagatcatccgaagcatcctccgctcctgagcgcgcgcaagggcgaggtcaacgaacgccggcctccgatcgatcgccgacagcgcgcgctctccggccggctggtcacgtgcgggagctgagctcaattaggtagctagggtatatatacatataatatatatatctacatgtacgtgtatctaccttttcctttaccagtctccctagatctgagatcatgtggctagctccgtataaaaatgtactagccacacgctgac

SEQ ID NO: 141178 - DNA, 1293 bp, Zea mays
  Clone ID: MRT4577_60236C.1
cccacgcgtccggctagcccttcaagaaacaaaccatcatacgagacagacgccggccgcgacacaagcggacgatccccggagtgcggatcgatggcgccggtgagcaacgagacgttcctcccgacggcggcgtggggggaggccacgctgcgcccgtccttcgtgcgggacgaggacgagcggcccaaggtggcgcacgaccgcttcagcgatgcggtgccggtgatctcgctcgacggcatcgacggcgcgcgccgggccgagatccgggaccgcgtggcggcggcctgcgagggatggggcatcttccaggtggtcgaccacggcgtcgacgccgacctcatcgccgacatgacacgcctctctcgcgagttcttcgcgctgcccgccgaggacaagctccggtacgacatgtccgggggcaagaagggcggcttcatcgtctccagccacctgcagggtgaggcggtgcaggactggagggagatagtgacctacttctcgtacccggtgaaggcgagggactacgggcggtggccggagaagccggcggggtggcgcgcggtggtggagcgatacagcgagcgactcatgggactgtcgtgcaagctgctgggcgtgctgtcggaggcgatgggcctggaatcggaggcgctcgccaaggcgtgcgttgacatggaccagaaggtggtggtcaacttctacccgcgctgcccccagccggacctcaccctgggcctcaagcgccacaccgaccccggcaccatcaccctcctcctgcaggacctcgtcggcggccttcaggccacccgcgacggcggcaagacctggattaccgtccagcccatctccggcgccttcgtcgtcaacctcggcgaccacggccacttcatgagcaacgggaggttcaagaacgcggaccaccaggcggtggtgaacggggagagcagccggctgtcgatcgcgacgttccagaacccggcgccggacgcgagggtgtggccgctggcggtgagggagggggaggagcccatactggaagaacccatcaccttcgccgagatgtaccgccgcaagatggagcgcgacctcgacctcgccaagcgcaagaagcaggccaaggaccagctgatgcagcagcagctccagctccagcagcagcaggcggtcgccgccgcgcccatgccggcggccaccaagtctctcaacgaaattcttgcctgaccattccggcggcgcgcgattaaatattttaaattgattgatgcgtgggatttgattctcctaagt

SEQ ID NO: 141179 - DNA, 830 bp, Zea mays
  unsure (1)..(830): unsure at all n locations
  Clone ID: MRT4577_60237C.1
gccggccgggttccgatgcattttattagagagaaggggtgcattgacttttttgcccttgccttatcttcatcctcctggtgatgtagagtcgtggtgacacatccctctctcaatcatctctcgtctattcgaagcacagatgcgtcttgcctcacagcagcagagcaagacctgtcgtgccattgctctcttactccatcaacacctatggtaacacctgccaagcctgcgtacgcactgctctccaggttccctgtgtccatcatagtgctctccttcaccaccatcactgttatcggtacaattgcaccacagtcgtctggctcgagctcgacagtgctgagctcctccgctccacccccaccccaatgtcatctgatggacctcccgcaaggaggtcacatgctattctacgctgcttcggtccctgcccgatagcgtgctttctgtcatgctcaagaacctcgtccacaacctatgcactacgtcagtgtgccccttgagttccatggccccctgctaaccctgccgacgcacgatcttctactactggctccatggacccagatcaggcgacaccaaaacagccggagtggtacaatctcggagggcatgagcaacagcagtggcttttaattctgcatccagaactcgttggattcccagtccaagcttgtgagcattccgctaaacacctatcaggtagtcctgggagtctgtgtccccacactaaaaaatgatgagttatggtattccaacccgncaggcctctacgtccattagaacaacctcatcactgggcgagtgaacatcgtgtactgcaaggt

SEQ ID NO: 141180 - DNA, 447 bp, Zea mays
  Clone ID: MRT4577_60238C.1
atgattggattcaggacggacgacaccaccgaagcggtagctatgaagaccctgacgactttctgtggctaccatcccctggagatggtgatgcacccactgggactcttccctgctgagaagaaggacgacccaatgtggtgcaaccgtgtgagccatgtgaaggacgtgttggcaatgtatcctaacttggttgggaggatcaccgttcagtgcatgagtgtgatgtaccgccttcaggcacagcagagcaacgctatggcacatcttgccaacctcgctcaaaccaccaagctcacccttgacagccgagaagacttcatggtcgacttgtcctcagagctggcggagaaggacctacaggtggaaaggttgagccagtgcatcaccaccctggagcagcaggtggagatccggtacaacaccattgatgtcctggaaaactag

SEQ ID NO: 141181 - DNA, 173 bp, Zea mays
  Clone ID: MRT4577_60239C.1
ctcaagatggtcgggttacattcacttttcccctctccctccctttccatcgtttaatgctgccgcacccccgcactggttgctagggaggctactgcccgcacacgaggattctgttggaccttgatttggcctacttgcctcctgtgtcttcgctctgctcgcggccccgc

SEQ ID NO: 141182 - DNA, 179 bp, Zea mays
  unsure (1)..(179): unsure at all n locations
  Clone ID: MRT4577_6023C.1
cccgccccacaaacctcccgcanacccacagccccgcccgnccccgnccgncccaggcagctccgcctcccatccagcgcccgnccacaggcgccgcagnnccagngagancgagcgaggnaagcnnagancngagcgannncncncgcgcgncgcaggnaaagnncacncgacnncga

SEQ ID NO: 141183 - DNA, 148 bp, Zea mays
  Clone ID: MRT4577_60240C.1
aggaaattgggaccgataaactgactagtccaggcttacttttataccagtccagaaaggtgaaaaaagggttacaattacaaaagaaatagagtgtgagagagtaattttaccttgctaaaaagtttgatactttatttttaaacaa

SEQ ID NO: 141184 - DNA, 832 bp, Zea mays
  unsure (1)..(832): unsure at all n locations
  Clone ID: MRT4577_60241C.1
cctcgaggccggccgggttcctctttctatcggtaacccgcttcagctggcgagcattgagcagtctgcagtcgccgagccgcgtgtccgccgggccggcggttaccaagctcaccagaaatctttccaggttcgaggccgcccatgttcgcctgcaggtctctcctcgcaagggatcatattgtcgaaataagttggcctcattcgtgatggaaggggcgcaaggatcaagcaatgtgacaaaacacaataaaaggcagtctcctgtgcagagatggaggccagtttcaacagaagcagttccccagcatcagcaagatgacattattgagacatcaaattctggaagcaagaaaattatagaggattgcatagcttctagtgagaatttgccaccagatggaacaaccaatgttgttgaagttaccaccaatgatgcttcatcgtcaaaaaataatttaagttttggatacaattcaactaaagtaattatagaagacaatgcggagttatctggcttcaataaggatctagctgggtccaatgtcttcaggacatattcctcctctggttgaggcggttcaaagtcgacagcttgactactctcatttcatatcgcttccattggctttacacccagatcttgtcaacaaactgaactacttccagaattcgatcccttggtgaagaaaacantgacaaagatgggagnccaaagtgaaggttctatttgatganattggactatgaccacaagcaagcggaagcaaaaatgggtgccaagtctcccaatcagattttggcattgacaagtcaatatttatcaaacccg

SEQ ID NO: 141185 - DNA, 372 bp, Zea mays
  Clone ID: MRT4577_60242C.1
gaaaaaaggaccttcttatttctggggagccacaaacatcagataaaaaactttttttttggactattacccataagaaaactaaaagggggggccccccatgatgggttgttggtaaaacactgctgggtttgtcaaaacaagttggttgaatggcaacaattgttgcagttgtaaaagggggccagcgttaggcgcaacctgctggtaaaacggcaacaactgtggttgtgtcaaaaaagtagcagggctcacaccaactagctggctgaatgggaatagttgttaaacctgaccaattcaaggggattaatgatgaggggaggccaatttaccagaagcccttttttccccgtaccttttaacaaaggg

SEQ ID NO: 141186 - DNA, 1887 bp, Zea mays
  Clone ID: MRT4577_60243C.1
attgggtacctcgaggccggccgggatacagcacttcttcctcagtctatcggtaacccgcttcagctggcgagcattgagcagtctgcagtcgccgagccgcgtgtccgccgggccggcggttaccaagctcaccaaaaatctttccaggttcgaggccgcccatgttcgcctgcaggtctctcctcgcaagggctagtcggctcactcggcctgcgattccaagcgccgccggttcgccgcttcgttacctccaccagggatcatattgtcgaaataagttggcctcattcgtgatggaaggggcgcaaggatcaagcattgtgacaaaacacaataaaaggcagtctcctgtgcagagatggaggccagtttcaacagaagcagttccccagcatcagcaagatgacattattgagacatcaaattctggaagcaagaaaattatagaggattgcatagcttctagtgagaatttgccaccagatggaacaaccaatgttgttgaagttaccgccaatgatgcttcatcgtcaaaaaataatttaagttttgggtacagttcaactaaagtagttatagaagaccatgcggagttatctggcttcaataaggatctagctgggtccaatgtcttcgggacacattcctcctctgttgaggcggttcaaagtcgacagcttgactactctcatttcatatcacttccattggctttacacccagatcttgtcaacaaactgaactacttccagagttcgatccttggggaagaaaacagtaacaaagatgggagccaaagtgaaggttctattgatgaaatggactatgaccacaagcaagcggaagcaaaaatgggtgccaaaggctcccaatcagattttggcattgacaagtcaatatttatcaaacccgaaacgtttcacctgacggttcttatgttgaagttgtggaacaaggaacgtatagataaggcctcggatgtgctccagtcagtatctacccaagtaaatgaagctttggaaaatcgacctatttccatacagcttaggggtctgacatgcatgaaaggctttccagctaaggctcgggtggtatatgttccagtgctggaagttggtagcgaagggcgcctagctcatgcttgcaaagtcataactgacgcgtttatcaaggcaggcctagtttttgaaagggacgtgagagaactgaagttgcacgcgaccgtaatgaacgtgcggcacaggaagagcagaaataaacggaacacatggacggattcgtttgatgcccggggcatattcgggagatttgggaaggcggagtggggtgcatatcccatccatgagatccacctttctcagaggttcaagtttgacagaagtgggtactactattgctgctcgtcgatccccttgcctgcggagatgcacacggagtgaggtgtgtagctgtgatcatgttgtaggtttttaaggggcgtttatagcatatacatatatatattttaccgcagttcatgaggcgtttaaccttgttattagcgttggcccttaggggccaggtgttaccatgtatctatctatcggtttgaatcaccgatgggcaggtgttaccgtgcatctagtgttttgaatctgaatcgccgatttgagccgttgttggatgctgttgtatgttacaagcaatggcaggcactgggtagtgggttccctgttgtaaagttgtagttggtgttgaactgttggttgttattgcctttccatatgacccattccattgtggagtcaactcactcacaggcaggcaggcaggagcaggatctatccctgctgctggcctcagctcctcatatcacctattgtgatttgcacaattgcacctgtc

SEQ ID NO: 141187 - DNA, 535 bp, Zea mays
  Clone ID: MRT4577_60244C.1
ccggccgagaaaaaaaaaaaaaaaaaaaaaacagacaagtttgggactttggatcccacgtccgcctttacacgattattcttctcgcgcgtggaactcttctcgacaacgatctatcgtcgtctctaatctcttcaactttactcaattcctctctaatcgaataagatggctcctttcactcctcgaggtggtgcccgtggaggccgtggcggcgctcgtggaggcggccgtggtggtttcggtggtgatcgcggcggcttcggcggtggccgtggtggtgcgcgcggtggacgaggtggtggccgtggcggttttggtgatcgaggtggccgtggtggtcgcggtggacgaggtggtgctcctcgcggtggtcgcggcggtgctgctggcgcaaagggtggtgccaaggtcattgtcgagcctcaccgtcaccccggtgtcttcgttgtccgtggtggtaaggaagatggtcttgctacccgcaacacaacccccggcgagtctgtctacggcgagaagcgcatcagcgtcg

SEQ ID NO: 141188 - DNA, 821 bp, Zea mays
  Clone ID: MRT4577_60245C.1
agagaaccaatccttatgataattccgaaccagatcctaacaaactatctatctataatcttgtccgtatagcgatggatagataacaataactcaacaaacttatctctaatataaatactcctctcctcgcttcctacccggcgcatcctcgtactagcgaatcctctcttcgtccagttattctcctcacaaaggccgaagcttaaatcacctccggttaggatctcatcagtctaattcctccttgtccttgttcgtttctggtagggctagtcggctcactcggcctgcgattccaagcgccgccggttcgccgcttcgttacctccaccagggatcatattgtcgaaataagttggcctcattcgtgatggaaggggcgcaaggatcaagcattgtgacaaaacacaataaaaggcagtctcctgtggagcgatggaggccagtttcaacagaagcagttccccagcatcaccaagatgacattattgagacatcaaattctggaagcaagaaaattatagaggattgcatagcttctagtgagaatttgccaccagatggaacaaccaatattgttgaagttgccaccaatgatgcttcatcgtcaaaaaataatttaagttttgggtacaattcaactaaagtagttatagaagaccatgcggagttatctggcttcaataaggatctagctgggtccaatgtcttcgggacatattcctcctctgttgaggcggttcaaagtcgacagcttgactactctcatttcatatcacttccattggctttacacccagatcttgtcaacaaactga

SEQ ID NO: 141189 - DNA, 313 bp, Zea mays
  Clone ID: MRT4577_60246C.1
ggaacaagggggttacagcttttggttcttgtttgcaaagtctgcaaatcggatcattactccaaccttttttttggagattttcagctgttaaaatcttattatgcagcaaagtccaccccaagaaacgacattttggctctattttcgccttccaaattggtaatagattgcacttgggataccctaatttaaactatttgaatattggtttggtttcgggtcccccccgtacaaaaatgaacccaagttggcccgcattatgaaacatacccccttttaaaaaggccccgcccggtggcaaaaccatttt

SEQ ID NO: 141190 - DNA, 306 bp, Zea mays
  Clone ID: MRT4577_60247C.1
cccacgcgtccgatcagaccatatttggtagtgtcagccgagctctatatagtctaaaggatgtaacccactatggagcccatctcatcgaggtgaggtatcatgtgcactggacacgattgaagccgtggagaaacggttcttggagggcatgggttcagtaatgggcttcaccgacatcaatagaggcttcacgacctcatgaatgggtgactcctcatgcatccgtgacgacgcatgcacaatatgagtggtcgcacccagatgacaacctctacaatcgtggatgtatccatcatggctccc

SEQ ID NO: 141191 - DNA, 1056 bp, Zea mays
  Clone ID: MRT4577_60248C.1
cgaccgatttatcaaacccgaaacgtttcagctgacggttcttatgttgaggttgtggaacaaggagcgtatagataaggcctccgatgtgctccagtcagtatctacacaagtaaatgaagctttggaaaatattgacttgtcaatgacaaagatgggagccaaagtgaaggttctactgatgaaatggactatgaccacaaacatgcaccaacaaaaatgggtgccaaaggctcccaatcaaattttggcattgacaagtcaatatttatcaaacccgaaacgtttcacctgacggttcttatgttgaagttgtggaacaaggaccgtatagataaggcctcggatgtgctccagtcagtatctacacaagtaaatgaagctttggaaaatcgacctatttccatacagcttagggggtcgacatgcacgaaaggctttccagctaaggctcgggtggtatatgttccagtgctggaagttggtagcgaagggcgcctagctcgtgcttgcatcataactgacgcctttatcaaggcaggcctagtttttgaaagggacgtgaaagaactgaagttgcacgcgaccgtaatgaacgtgcggcacaggaagagcagaaataaacggaacacatggacgaattcgtttgatgcccggggcatattcgggagatttgggaaggcggagtggggtgcataccccatccatgagatccccctttttcagaggttcaagtttgacaaaagtgggtactactattgctgctcgtcgatccccttgcctgcggagatgcacacggagtgaccttgttattagtggtaggtccttaggggccaggggttaccatgtatctatctatcgatttgaatcaccgatgggcaggtgttaccgtgcatctagtgttttgaatttgaatccccgatttgaaccgttgttggatgctgttgtatgttacaagcaatggcaggcactggtagtgggttccctgttgtaaagttgtagttggtgttgaactgttggttgttattgcctttccatatggcccattccattgtg

SEQ ID NO: 141192 - DNA, 320 bp, Zea mays
  Clone ID: MRT4577_60249C.1
acgggcgggttaaacattcccctaacccttattcgcaaacaataataagtacaacaatggagtcttgatttatcaacacacacctaacaacctatgctcttatttacttataaacacccaccctttccgcgcttggggccttatttattttgagtcctccatgcatatctcaatcgatgggaggatcatttctttcactcccaaaaataaaaatatccccgcccgttccccaaccccagcgggaacatttgatccctctaaccccccttttaatggacccccttaaagatgccttgcccttagaacacagagcctccaaa

SEQ ID NO: 141193 - DNA, 221 bp, Zea mays
  Clone ID: MRT4577_6024C.1
attgggagctcttgggcacatctttattgagcacgtacacccactcatgacgtctggttttaacggaaagggggtaaaagaatcaggtacctgaccgaaccgatctccataacacactgttctgggagtacaaaacctgactttacatgatcaaaggccctagatagtgccgcagtcttattttcgaattgccgaggaccggcaactgggatactggggga

SEQ ID NO: 141194 - DNA, 367 bp, Zea mays
  Clone ID: MRT4577_60250C.1
cgcaacctttcttttctcaccctgttcaggcacgtgtacggggtgttgattgtgggcctggacttcactaggatcgcctcgtatgcgctcaaggcatttgccactctacaagtaccggtgggcgagcatcttgtcacacaagatagccaccctgtctgtctatatggtcatgttctacactttcaggccgacctataacagtcactacttttctctcgatgacaatgaacaagaggctccagagatgtttctcctacaagaggaattcgagctatgaagagatgcatccgctcacaacaagtcttcatgccacgtcactccctgtgatcttgaacatactctatatgctcttacacaacttcattac

SEQ ID NO: 141195 - DNA, 201 bp, Zea mays
  unsure (1)..(201): unsure at all n locations
  Clone ID: MRT4577_60251C.1
aaangcaaggaaaccaaggccaanngnaggccggacaactcttttgtttttatcngacaaccagtattggcancaatcttgaataataaactaaaacaccannncatactcccaactncanntatcttcaaaaaacccnntncnccctcnccaancaaaacnaattaatncatatatatatatacccctnaacctctctac

SEQ ID NO: 141196 - DNA, 427 bp, Zea mays
  unsure (1)..(427): unsure at all n locations
  Clone ID: MRT4577_60252C.1
aaagggcgnggggggaaggggcccnacaaannccacggggcccaaggaaaaggcccgggngcccagaggggcgaaggcgggggggacacccgccggnggcanaanacccgcggccaaccccggggagagggggagcccccaggaaggggccccaccaaggggggnncnnnannacgcgggccaacagggcccacanccggggggccccccacacaacccaagggagaggccnaacggccaacaacaagagcaaaacccggggcggggcgaagccgcccaagcncccgagcccagaacgagaggaagnagggncgggacacacaggcggggcaccagcgancaccnagagccccccaggggaagaacacgacgaagangggncgaaagaccccaccacgcgagagccggcacccgggggcaggggggg

SEQ ID NO: 141197 - DNA, 452 bp, Zea mays
  Clone ID: MRT4577_60253C.1
aagaacttatctcctttgccttagcattttcgttatgtctctcattacaataaatgaatctacaagcatacctccgccttttaaacaaagggaagcatgaaggatcttcgaaggctaagcggcacgaagctagggcccttaaaaagtactttatgtagggcactgttcatctatttatagaggaaatgaaccgcctttgtacgaatttacaataatgtccatcaaatttttaaataagctatttacaaatgatatgaggacaataaagtattttctccgtcttcggctttgcggatctcagcccattttgttcgggaacctcccctctagctcgtgcctgaagctattgccttctggcgcaatctttgctacttgcgtacatatgaagcatctttgtatactgctttagtcgaaggttagcttcgtctgccagtagaaatattcctgaaata

SEQ ID NO: 141198 - DNA, 1599 bp, Zea mays
  Clone ID: MRT4577_60254C.1
aagcgctggtgctctgggaaacttgagccacctcctcagcgagacggctcaatcatcaatgctgatgcccgtgtatgacaagaatcgcgctgaaactccaaacttggcacgccctaaggtgccaccaaaggagttgttcctggagcagcttactgctggacacgagagtccatcaacctgccgctcatcaggccaaactctctatttccctttccaacagcctttaggctacaacagtgagagtggcagtggcgatggggcgaatatgaattcactctggttcaaccagagtgacttcaactgcagcacaatttctacagtgatgccgccagcttcaccatcggccctctctacatcaatggggctgaatcttccacctgataattctcgacatggaggaactggcattggaagtactgcagtagattcattctactgggatggtactaatcctagcagcagtagcagtactgggagcagaggaagcaacagtatgggatttgaaccacagagcacgagctcaattctggagaacagtgtcttccaatggacagacatcggacaagaaaaagatacaagagctcacctggtagaggaacttaagtggcctgacttgctccatggaacctttgccgagacgaccacagccatgcagaaccagagccagacgctctatgatgacgtgatcaaggcagagagccaattcagcatggaagggatatgtgcttcttggttccagaatcagcagccacagcaacagcttcaggcaacaccagacatgtatgacaaggacttgcaaagaatgcaactgtcttttgagaatatctaggcattatgttccacatggaacagagcagatcagcagaagcagaaatttgtaattttcagagattcgtgggcagaactatgctgaattgcttacatagatacattaagttgatacagaaatcatcctccacagctgctcctcagttgaagacctggcaatatcaaggaaaggacagccctggcattagaagtggcagcagaatgcatacaaaaggtacaaaggagcaatcattctcaagaagaagtaaacacattcaggaaagaaaaaaggaagaaactattcatgaatatctacctaccatgtagattgggtaatctatgaagcctcaatgtgaaggcaagaaaattggtggagctcggaagtctcaaaatcaaaaagatggcgtgtgagatctacaacaagactcgtggttggaggccagttgacagacgaatccgatgaaatgaaacatgttttgttatctggttattttggttcaataactgtgcggtcgttctacttcttctcccttgtagcgcctagctacaggaaaaactatgagatagaaatgctgcttgctgctttggtgtgatctgtgtgaactttgatgttggtcagctctgtgttactttttgtgttgctactagtagtttggtttggtcagggtttggtcctttttagctgatagttgtgtgttttgtcagctttaaaattctgggtgctcatgtggtattgtaagaacttatgtctctttctatttcgtaatgaaatagggggttatcccctttctc

SEQ ID NO: 141199 - DNA, 703 bp, Zea mays
  Clone ID: MRT4577_60255C.1
agttcagagaggatgcccccccaaacctttccttgcattccactgaaatcttcctatctgcaaccatgcagttgctcaattctggcctccgctgaagcccaaccatccattgttatataagtcgctgcagcctttgcaatttcccactccttcagccaccatcggtcattgaaggagcttcgtgccaccagagaaggtgttcgccgtgcataatcacagactatatacattccacagacctgtaaagctctgtgaatttggagctcccacaggttctgcattggcgttgagatggggaggcattcttgctgctacaagcaaaagttgagaaaggggctctggtcccccgaggaggatgagaaactcatgaaccacataacaaagcatggccatggctgctggagttctattcccaaactcgctgttcaattacctaaattcgagaagacaaattgttgcagggctccaaaggtgcggaaagagttgtaggctgaggtggataaactatctgaggccagacctcaagagaggggcattctcccaagacgaagaagacctcatcattgagctgcacgctgtccttggaaacaggtggtctcaaattgcagctcagctgccagggaggactgataatgagatcaagaatctatggaactcgtgcatcaagaagaagttcaggcagaaaggcattgatccccacacc

SEQ ID NO: 141200 - DNA, 1195 bp, Zea mays
  Clone ID: MRT4577_60256C.1
gccggccgggtcgggatcaaccaaccccgcacaccgccgcgggaagcagaagagactggaagagcctacaaaagcttagaggagtgccccccacaaacctttccttgcattccactgaaatcttcctatctgcaaccatgcagttgctcaattctggcctcagctgaagcccaaccatccattgttatataagtcgctgcagcctttgcaatttcccactccttcagccaccatcggtcattgaaggagcttcgtgccaccagagaagtgttcgccgtgcataatcacagactatatacattccacagacctgtaaagctctgtgaatttggagctcccacaggttctgcattggcgttgagatggggaggcattcttgctgctacaagcaaaagttgagaaaggggctctggtcccccgaggaggatgagaaactcatgaaccacataacaaagcatggccatggctgctggagttctattcccaaactcgctgggctccaaaggtgcggaaagagttgtaggctgaggtggataaactatctgaggccagacctcaagagaggggcattctcccaagacgaagaagacctcatcattgagctgcacgctgtccttggaaacaggtggtctcaattgcagctcagctgccagggaggactgataatgagatcaagaatctatggaactcgtgcatcaagaagaagctcaggcagaaaggcattgatcccaacacccacaagccccttactgaggctgatcgcagcggagcagctcccacaatcagcatcgagagaacctcagggtccagcgaagtcaacccatcaagcgctggtgctctggggaacttgagccccctcctcagcgagacggctcaataaacaatgctgatgcacgtgtatgacaagaatcatgctatgtaacaactactattgtgccgctaagttggggtcatttcgtgcttgcttaccaggaccaggtttaattgcaaaagaaaaaatggaagcaaatacactgcaaaagttaaatgttcaagccagtccccagtcattcctactttgcctgaatgtcaaaccaattttctggatgtcaagtgcatatggtcatatagagtaatagagattatcagatgatctaccaaaacatcactatcatcaggatacttatttgtttaaaattacagcaaaacaaaggtg

SEQ ID NO: 141201 - DNA, 2798 bp, Zea mays
  Clone ID: MRT4577_60257C.1
accaggagcagagggagcaacagtatgggatttgaaccacagagcacgccggccggtctgccggacaagccggaagcaggccaagggaagggctaaacctccatcccttggcacaagccacaaccaccacctccaccaccaccaccacctttaaaagaagggtgctaaagggctgtcctgcgaagaaaaggagaggagtgcccctagcctttccttgctttccactgaaatctcctatctgcagccatgcagttgctcaatcctggcctcagatgaagcccaaccattcattggtatataagtcgctacaacctttgcaatttcccactgcttcagaacatcgtcgaagaagctctgtgctaccggagaaggtgttcgtcgtcgtgcataattatacattccgcagacctgtaagctctgtgagtttggttggagctcccaggttctgcattgcgttgagatggggaggcattcttgctgctacaagcagaagctgagaaaggggctctggtcccctgaggaggatgagaaactcatgaatcacataacaaagcatggccatggctgctggagctctgttcccaaactcgctgggcttcaaaggtgcggaaagagttgtaggctgaggtggataaactatctgaggccagacctcaagagaggggcattcgcccaagacgaagaagacctcatcatcgagctgcacgctgtcctcgggaacaggtggtctcaaattgcagcgcagctgccagggaggactgataatgagatcaagaatctatggaactcgtgcatcaagaagaagctgaggcagaaaggcattgatcccaacacccacaagccccttactgaggctgatcgcagcggagcagctcccaccatcagcaccgagagaacctcagggtccagcgacatcaacccatcaagcgctggtgctctgggaaacttgagccacctcctcagcgagacggctcaatcatcaatgctgatgcccgtgtatgacaagaatcgcgctgaaactccaaacttggcacgccctaagctgccaccaaaggagctgttcctggagcagcttactgctggacacgagagtccatcaacctgccactcatcaggccaaactctctatttccctttccaacagcctttaggctacaacagtgagagtggcagtagcgatggggcgaatatgaattcactctggttcaaccagagtgacttcaactgcagcacaatttctacagtgatgccgccagtttcaccatcggccctctctacatcaatggggctgaatcttccacctgataatcctcgacatggaggaactggcattggaagtaccgcagtagattcattctactgggatggtactaatcctagcagcagtagcagtactgggagcagagggagcaacagtatgggatttgaaccacagagcacgagcacaattctggagaacagtgtcttcccatggacagacattggacaagaaaaagatacaagggctcacctagtagcggaacttaagtggcctgactcctttgccgagacgaccacagccatgcagaaccagagccaaacgctttatgatgatgtgatcaaggcagagagccaattcaacatagaagggatatgtgcttcttggttccagaatcagcagccacagcaacagctgcaggtagcaccagacatgtatgacaaggacttgcaaagaatgcaactatcttttgagaatatctaggcattatgttccaccacatggaacagagcagatcagaagaagcagaaacttgtaattttcagagattcgtgggcagaattatgctgaattgcttacatagatacattaagttgatacagaaatcatcctccacagctgctcctcagttgaagacctggcaatatcaaggaaaggacagccctggcattagaagttgcagcagaatgcatacaaaagtatgttctagagtctccttttctttctcttgaaaattgatgttttccttctgtacacgactcaacttttgcatatttgagtttttgttctctctggtggaaattaaataaatataggcagccatgggcaaaactgcatgtgtcggtagctctcaacatgcaagtagacccaaacatttcaactgctgccatgcacgtccatgcaaattaattattgcatgttgtatttttttttctttttttttgataagttgccgacaaacgacagttgtatatttgtaagaagaaatttggaatgttgacctgagagctattttcttccccctttcactttcccgtttctgtcgtaaacttttctgtgtggagaacccaagctacttgagcgctttctacttgaatacaggaatggaaaacgattggttgatttgatagggtacaaaggagcaatcattctcaagaagaagtaaacacattcaggaaagaaaaaaggaagaaactattcatgaatatctacctaccatgtagattgggtaatctatgaagcctcaatgtggcaagaaaattggtggagctcggaagtctcaaaatcaaaaagatggcgtgtgagatctacaacaagactcgtggttggaggccagttgacagacgaatccgatgaaatgaaacatgttttgttatctggttattttggttcaataactgtgcggtcgttctacttcttctcccttgtagcgcctagctacaggaaaaactatgagatagaaatgctgcttgctgctttggtgtgaaaaaaaaaaaaaaaaaaaaaaaaaaagggaaaaaaaaaaaaaaaaaggccccta

SEQ ID NO: 141202 - DNA, 281 bp, Zea mays
  unsure (1)..(281): unsure at all n locations
  Clone ID: MRT4577_60258C.1
ctcttttgtacataaaaattcatgatgttataaggtaagaacaatatatttacattgggngggtccaaatcacatgcgggacggcaaaaaaaatctctctttccttcagctgtcactaccataactggcgtgatcagcattctcgctcaggagcgcctcctcgggttcaccctgggttccgcctacatagacaagattcgtactctaccatcgccgtgccatctaccgttaaatctctgaatccaacgggtcgccctacttttaccaacctggtgaaattg

SEQ ID NO: 141203 - DNA, 655 bp, Zea mays
  Clone ID: MRT4577_60259C.1
ctggccgggaattttacgggctgcgttggagccgttcgggagacactgtgccccctacgttcggtccggggagatccggagatataaggagcaccgttggagagagcctaacagcgttgattggtgggtggaggttagacaccagaggctgatggagcagaggtcgtaggcacaaataggtggaggccatggaggcgcagtaggagccgtgaattggtggagcggaaggggctggagtgacttgatgaggcagcaggacttgccgctggattccaggaagcagttcatacgaacatagtatgtttatgactgcttgggggaagtagtcagcgaagttccagacatcggtgcatctgatgttattgctgatgataagcttggcaaagggaaagctgaagaatggaagtgaggaggaattaaagaggaagataataaacttaagtcactattatccataactccgtgtggatgttgcatatttcacaattctcatgcatctttcataataatttggcaaaatatccaatttcaccccaaagtttcactactgaactttcagatcgtccgtttcaatcccataaggccataaccttctcttcttctgactcaaaactgtcttggccctcatatgggatgctacgttgtcacccctgga

SEQ ID NO: 141204 - DNA, 208 bp, Zea mays
  Clone ID: MRT4577_6025C.1
agctcgaattccgttgctgtcgccatggtgtataatgaactaaatgaagaatgaatatggtccctttttcagaatgaaaggaaaccattacaatatctacataatactccctatgttccaagttatagttcgcttcacttttgtcctaagtttaaaaaaaaccagacccagtgttggcgactcccacatgagtggggcgacagcaacg

SEQ ID NO: 141205 - DNA, 226 bp, Zea mays
  unsure (1)..(226): unsure at all n locations
  Clone ID: MRT4577_60260C.1
taccggtccggaattcccgggtcgacccacgcgtccgcacacaacagcagctcaaaaacctaacacacctcaacaagcagagcaaagacccnggattcgncggggcggtaggagtggcgcgagatggacgggaggatgttcggtatcgagtcccnctnatggtggcgctgcagcaccttctggacgtgcccgacggcgacgcgtcgtggnnggngacaaggtgatt

SEQ ID NO: 141206 - DNA, 174 bp, Zea mays
  Clone ID: MRT4577_60261C.1
caaacacggggggcagctataaacatccaagccagacctacctacgataccagatacaaggaacgccaatttgaccggggcagctgaataacagccccattaggagatccacaaccattgaagatggacggaggcgctataacgccacgcattcagggagtagccccacccacc

SEQ ID NO: 141207 - DNA, 1032 bp, Zea mays
  Clone ID: MRT4577_60262C.1
actacgaccaccagcaagggtcaggatcgaaagttcaccaatatgcaaagcagttccattcatctgatggcaatagcggccaacaaaaggagtagctagctagtgtccttgcgaagtgcaaggagcggagtgggcgttatttccaaaaaaaaaaaaaaaaaaaaaaaaaaagctggctagctggcttccgggccccaccaccacagcgaccggggggcgggtgccgcgtgctcgctttcacgagcacgacgagctcggcttcggcgtgagccagcgtcgtacggctcatccgccccgtcctcggtcgctatttctctccatttcccttgccccctaccgtcgcggaggaagacaagacgcgcgcgcagaagcacacctgctcgggctggattaggaggacagcttcttcggccggcgacatggcggagaagggcgcgttgcagtcggcgagggagtgggtggtcgaccacaagctccgggccgtcgggacgctgtggctcagcggcatcgtcggctccatcgcctacaactggtccaggccgggcatgaagaccagcgtcaagatcatccacgccaggctgcatgctcaggctctcacgctggctgccttggctgggtccgcgctggtggagtactacgaccaccagcaagggtcaggatcgaaagttcaccaatatgcaaagcagttcctttcatctgatagcaatagcggccaacaaaaggagtagctagctagtgtccttgcgaagtgcaagcagcggagtgggcgttatttcctgatcaaataattttgcctatggcacattctgtggaaactttgacggatctttgcctgcttttctatgcgatgtaagctgctgaaacctgcactcatcaaatgttgtgtatgcagatggtaccatgcatttgtttccctgaatggcttcaaatgaaatgaatgttttttttttcggtaaaaaaaaaaaaaaaaaacccgcctaggaaaaaaaaaaaaaaaaaagcggcccgtagggccgcatgcggccgcctgca

SEQ ID NO: 141208 - DNA, 508 bp, Zea mays
  Clone ID: MRT4577_60263C.1
ccggccaggattccctcctgacactgaaactccaggattggaagaggagcataagaggaggccagaattgacaaacatcatagcaggattgtctggtggaatgaaggccgacgatgttgccaagaaggctcttgatggtatcaaatctgcaaaattcattgtcccatgcaatttcgagggcacaatattagctgtagccactgctggtttatccccacagagctctgcattaatggcattcatagaggtgattggcaccggactcatgcggtttgcggcactttgtttccaatggaattggttctctaccatagagagctattatgccaagaacaagaagagcgagtgataacacaaaccatacctggaccttaggtcagttgcgtgtaaataaagtttattatagtcgaccttaatatgttgaccacctacaatttgatgtataagattcaaatgaaatttgaataaaattttagttttcatggaaaaaaaaaaaaaaaaagcggcc

SEQ ID NO: 141209 - DNA, 380 bp, Zea mays
  Clone ID: MRT4577_60264C.1
gtgggagatggcaagcgttcgtgcaataccaaacaggcgttccggttcaatgatcttaacggacactaacgacgtgggggggggatgagacaagaccggacacttaatagaccttctcacggacgacggagccatctaccatagaaaatgctgtaactgcgaacgcttctaaagtgtactctctaggtgcaattccttctacatggaacgtgagctgtactgcacgagacagtttgagccatcatttggacggagaccgtaaggcttattcaagaacttaaacgccaggtggatctttatcagacaagtgatgaactgtcaatgggcatccacgcaaagctgtcaaagtgcatttttttggtatccatgataccgtgcgc

SEQ ID NO: 141210 - DNA, 708 bp, Zea mays
  Clone ID: MRT4577_60265C.1
tctccgccttaaccattccctctcaacaccactctcccctgcaatcttcctaccctccgtcacgccaagtatccatgatgccatgctactgccggaacgaacaagagatgagctcatcaagaatgctgcctacgttgacacccccggcaaggatatccttgctgctgatgagtccactggcaccattggcaaccgcctttccagcatcaatgtcgagaacgttgaggagaaccgcacgtgccctccgagagctcctattctgctgcccagctagctcaccatacatctcagaggtgtgatcctcttcgaggacaccctgtaccataacatccaggatgatgagccttttgatgatgtccatctaggaggtatgcgacctccctgctatctgaggtcaccagggtcccattgtagatgatgaaactgataatgacaccaccagccatggacatgaccacgttgctcagcgttgccccaaagactaccaagcacgcgcccgctttgccaagcgaggccctgatctcaagattgtccctatagagtgatcacagcgttaccatgcgacctgaacgctcagtgttctggctccctatggcatcatctggcatgagaatgctctggtgccatagttgtgtgagccagatatccttgttgacggccctcatgacattgatcgctgcgctgacttctctgacaccgtccttgctg

SEQ ID NO: 141211 - DNA, 230 bp, Zea mays
  Clone ID: MRT4577_60266C.1
attcctattcttccgcggacgcgcggggaccaagagggggtgtcttaaaggtgacggtgcacgtccagcgacagacgccagcactgacaactccaagagagcgtacgaaatcaacgactcgggaggcaccttgggagccaagtatgcactccaggtcatggttcccggccaagaaaggtcgcactctcttcccaacaaggataccctcaaacaaaaagcaccggcccgcc

SEQ ID NO: 141212 - DNA, 2123 bp, Zea mays
  Clone ID: MRT4577_60267C.1
agcaaatgcagtcacagatgggttggagaacagtgatattgctgctctccattacagctcggcatccagatgcttctgaagttggtttcgaggctatcatgacagagagggctcacctttcactagtgaactgtcccaagagataaaagcggcatctcgcctagcttgctgcctgatgtttttccaagtcagcaggagtacgagcagcagggcagtgccggccggtccaccgtcggtgggaggagccagagccagagccagccagccagacacacaacctcggtcggcgcggcggctcaacccaatggctccttcctccctccgcccgccgcgccaccacccgtctcccctcgtcgtcctcgccatcgccgtcctcctcgtcttgcgcaccgccgatgggctgccggaggcgggaggaggaggaggaggcggcggtctgtaccgggagattctcagggacgagaccgtgcagaggctcaaggagctgggcaagatatctgatggggatggctaccttgaaaggacgtttctgagtccggcctctatcagagccactggtgtcatcgtcagctggatgaaagacgctgggcttacgacgtgggtcgatcagatggggaatattcatggtcgatatgagccggcaaattctaccagagatgccttgttgattggatctcatatggacactgtcgttgatgctgggatgtacgatggagccttgggtattatttcagcaatctcagcactgaaggttttgaaagttacggggaaactccagaggttaacgagaccagtggaggtcattgcattcagcgatgaggagggcatcagattccagacaacttttctgggaagcgctgctgtagctggtacactacctgaatcaattttacaagtatcagataagagtggcactacactacaagatgttctgaaaatgaattcttttgaggctacctctactgctattagtcaagccaggtacaacccggagtctgtggggagttatgttgaggtacacatggagcaaggccctgtcctggaagcccttcattatccacttggtgttgtaaaaggaattgcaggacagacacgattgaaggtaatagtagatggttcgcaagggcatgctggcacagttccaatgaaattgcgccgtgatccgatggttgcagctgcagagctcgttgtgactctggaacgcctctgtaaagagcccaacagtttgctgacctacgacgaggagtgcagctgcttcactgaggagtccctggccggcctggtgtgcaccgtcggcgagctgaacacgtggccaagcgcgagcaacgtgattccgggccaggtaaacttcacggtggacatccgcgcgatggacgaccaagtgagggagacgatcgtgacgagcttctcgaggcttgttctccagaaatgcgatgacagactggtcgattgcaaagtcgagcataagcactcggcggcagcgacgcactgcgacccggagttaacgtctcagctgaagcgcgcggcgcggtcgaccgtgtcggcaatgccggggcgcaccgtggcggccggcggcgatggcgatggccaggcctccgccaagatcgggatgctgttcgtgcggtgccgcggcggcatcagccactcgccggaggagtcggtgatggacaacgacgtgtgggccgcggggctcgcgctgttcaacttcatcgaccagaacgcggtgtcagaagaactggatgccgggcagaacgtggtggctgtggcgctggcggtggcagagtcgtgatggttcggtggcgattcttttcagtgggagtaggcctgtagcctgcaactgtacataagacttgttattacattgcattaaacaggaataaaaaaaacgcttctcttaaaaactggattccgggaagaacgtggtggctgtggcgctggcggtggcagagtcgtgatggttcggtggcgattcttttcagtgggagtaggcctgtagcctgcaactgtacataagacttgttacattgcattaaacaggaataaaaaaaacgcttctctcaaaatacttttttatacttaataaagggcgggcgccgcctagggagctcggtcacccgggaatt

SEQ ID NO: 141213 - DNA, 1720 bp, Zea mays
  Clone ID: MRT4577_60268C.1
cggccgggacaaccctttgcgggaggagccagagccagagccagccagccacacaacctcggtcggcgcggcggctcaacccaatggctcctccctccctccgcccgccgcgccaccacccgtctcccctcgtcgtcctcgccatcgccgtcctcctcgtcttgcgcaccgccgatgggctgccggaggcgggaggaggaggaggaggcggcggtctgtaccgggagattctcagggacgagaccgtgcagaggctcaaggagctgggcaagatatctgatggggatggctaccttgaaaggacgtttctgagtccggcctctatcagagccactggtgtcatcgtcagctggatgaaagacgctgggcttacgacgtgggtcgatcagatggggaatattcatggtcgatatgagccggcaaattctaccagagatgccttgttgattggatctcatatggacactgtcgttgatgctgggatgtacgatggagccttgggtattatttcagcaatctcagcactgaaggttttgaaagttacggggaaactccagaggttaacgagaccagtggaggtcattgcattcagcgatgaggagggcatcagattccagacaacttttctgggaagcgctgctgtagctgtggcactacactacaagatgttctgaaaatgaattcttttgaggctacctctactgctattagtcaagccaggtacaacccggagtctgtggggagttatgttgaggtacacatggagcaaggccctgtcctggaagcccttcattatccacttggtgttgtaaaaggaattgcaggacagacacgattgaaggtaatagtagatggttcgcaagggcatgctggcacagttccaatgaaattgcgccgtgatccgatggttgcagctgcagagctcgttgtgactctggaacgcctctgtaaagagcccaacagtttgctgacctacgacgaggagtgcagctgcttcactgaggagtccctggccggcctggtgtgcaccgtcggcgagctgaacacgtggccaagcgcgagcaacgtgattccgggccaggtaaacttcacggtggacatccgcgcgatggacgaccaagtgagggagacgatcgtgacgagcttctcgaggcttgttctccagaaatgcgatgacagactggtcgattgcaaggtcgagcataagcactcggcggcagcgacgcactgcgacccggagttaacgtctcagctgaagcgcgcggcgcggtcgaccgtgtcggcaatgccggggcgcaccgtggcggccggcgagacgcccgtgctgatgagcggcgcagggcacgacgcgatggcgatggccaggctcaccaagatcgggatgctgttcgtgcggtgccgcggcggcatcagccactcgccggaggagtcggtgatggacaacgacgtgtgggccgcggggctcgcgctgttcaacttcatcgaccagaacgcggtgtcagaagaactggatgccgggcagaacgtggtggctgtggcgctggcggtggcagagtcgtgatggttcggtggcgattcttttcagtgggagtaggcctgtagcctgcaactgtacataagacttgttattacattgcattaaacaggaataaaaaaaacgcttctcttaaaaaaaaaaaaaaaaaaggggattcgaagaaaaaaaaaaaaaaaagcggcc

SEQ ID NO: 141214 - DNA, 208 bp, Zea mays
  Clone ID: MRT4577_60269C.1
acccgcgccagctgtatctcgagcattacctgccgaagcttctagagacgtagcctactaatcgggcgtgatatctgagagcccttcctacaccgacctgcagtgcaagctatgactatccacgggtggtagcaggacagagaagctttaagccacgacgccacctacagcagcatgctcagcggcgccgaaagctcatcggacgccg

SEQ ID NO: 141215 - DNA, 144 bp, Zea mays
  unsure (1)..(144): unsure at all n locations
  Clone ID: MRT4577_6026C.1
cgggccgnatcagggggaaacagtcttggggggaaatctgtaaaaaatgtttgatcatgttactatccagctctttctactaaaggtgaaccatacttgaaccaggggggaatttgaatgacccgtaccgcgattacttttttt

SEQ ID NO: 141216 - DNA, 1348 bp, Zea mays
  Clone ID: MRT4577_60270C.1
agcaaatgcagtcacagatgggttggagaacagtgatattgctgctctccattacagctcggcatccagatgcttctgaagttggtttcgaggctatcatgacagagagggctcacctttcactagtgaactgtcccaagagataaaagcaacatctcgcctagcttgctgcctgatgtttttccaagtcagcaggagtacgagcagcagggcagtgccggccggtcggacgcgtgggtttcagcaatctcagcactgaaggttttgaaagttacggggaaactccagaggttaacgagaccagtggaggtcattgcattcagcgatgaggaaggcatcagattccagacaacttttctgggaagcgctgctgtagctggtacactacctgaatcaattttacaagtatgagataagagtggcactacactacaagatgttctgaaatgaattcttttgaggctacctctactgctattagtcaagccaggtacaacccggagtctgtggggagttatgttgaggtacacatggagcaaggccctgtcctggaagcccttcattatccacttggtgttgtaaaaggaattgcaggacagacacgattgaagctgcagagctcgttgtgactctggaacgcctctgtaaagagcccaacagtttgctgacctacgacgaggagtgcagctgcttcactgaggagtccctggccggcctggtgtgcaccgtcggcgagctgaacacgtggccaagcgcgagcaacgtgattccgggccaggtaaacttcacggtggacatccgcgcgatggacgaccaagtgagggagacgatcgtgacgagcttctcgaggcttgttctccagaaatgcgatgacagactggtcgattgcaaggtcgagcataagcactcggcggcagcgacgcactgcgacccggagttaacgtctcagctgaagcgcgcggcgcggtcgaccgtgtcggcaatgccggggggcaccgtggcggccggcaaaacgcccgtgtttattaacggcgcggggccccacccaatggcgatggccaggctccccaaaatcgggattctgtttgttgggtgccccgggggcattaacccctccccggaggagtcggttatggacgaccacgtgtgggccccggggctcgcgctgtttaactttattgaccagaacgcggtgtcaaaaaaactggattccgggcaaaacgtggtggcaaagtcgttatggtcggtggcgattctttcagtgggagtaggcctgtagcctgcaactgtacataaaacctgttacattgcatttaacaggaataaaaaaaacgcttctctccgtttg

SEQ ID NO: 141217 - DNA, 1022 bp, Zea mays
  Clone ID: MRT4577_60271C.1
ccggccgggaaccctgtctgtgggagaagggaggagccagagccagccagccagccaccgcccacggcggccacacaacctcggtcggcgcggcggctcaacccaatggctccttcctccccccgccgcccgctgcgccaccacccgtctcccctcgtcgtcctcgccgtcgccgtcctcctcgtctcgctccgaatctcgcgcaccgccgatgggctgccggaggcgggaggaggaggaggcgacggtctgtaccgggagattctcagagacgagaccgtgcagaggctcaaggagctgggcaagatatctgatggggatggctaccttgaaaggacgtttctgagtccggcttctatcagagccactggtgtcatcgtcagctggatgaaagacgctgggcttacgacgtgggtcgatcagatggggaatattcatggtcgatatgagccggcaaattctaccagagatgccttgttgattggatctcatatggacactgtcgttgatgctgggatgtacgatggagctttgggtattatttcagcaatctcagcactggaggttttgaaagttacggggaaactccagaggttaacgagaccagtggaggtcattgcattcagcgatgaggagggcatcagattccagacaacttttctgggaagcgctgctgtagctgttcatttgttgtattgagtttcatcagtggcactacactacaagatgttctgaaaatgaattcttttgaggctacctctactgctattagtcaagccaggtacaacccggagtctgtggggagttatgttgaggtacacatggagcaaggccctgtcctggaagcccttcattatccacttggtgttgtaaaaggaattgcaggacagacacgattgaaggtaatagtagatggttcgcaagggcatgctggcacagttccaatgaaattgcgccgtgatccgatggttgcagctgcagagctcgttgtgactctggaacgcctctgtaaagagcccaac

SEQ ID NO: 141218 - DNA, 559 bp, Zea mays
  unsure (1)..(559): unsure at all n locations
  Clone ID: MRT4577_60272C.1
ggcggctcttccggcgcctcgcatggcaccgcgccaggcagacagattctgcaactcaacgagccaattgaggtaaaaatttacgagtggaacaccggggggctactcacaagaattgaggtcggttgcagcattcgtgtgtgcattgcaaggctcgatgaagaaactaacgacctgataattagtgagaagaaagcatgggaaatgacttatcttaaagaaggaaccctcctacaagggactgtttgcaagatttttccgtatggtgcgcgggttaggattgctgggacaaacagaagtggcttacttcacatatcgaatattagtcgaggcaatgttgtgtccgtaagtgacatcctgaagatagatgatgaggtgaaagttatcgtgatcaagtcaaatgtcccagacaaaattgcactgagcatagcagacctcgagagtgcacctggtttgtttctgtcagacagagagaaagtgttctcggaagctgangagatggcaaagagatacagagagcagcttccagttacccctcagaaccctatatagatgatga

SEQ ID NO: 141219 - DNA, 1773 bp, Zea mays
  unsure (1)..(1773): unsure at all n locations
  Clone ID: MRT4577_60273C.1
gggtacctttcgnggtctcggccggggnacggccggaacgcccgcattcgacgcaatgccgacgccggcgccggcccttcctttcgtcccgaagccgcaacccatccttcacgtcgctaaagccctggtcccatcccctcgccagacgcagccccaggcccgagggcgaggcctaccgcagccggtcaattgtgccaactccaagcgcctcgacgacgcactctccgctggcttcgtccgccttctcaacgccggccaagtacaggatgcggactctgctagcggaacctgccggcgctatgaccccaagccgggtgacttcgcggtcggggtcgtagtttctggcacggaggcgcgcctcgacgttgcggtcggcgccgaccgtctcgccacgctgctctccaaggagcttctcccgctcgaccgcgacagttctgacccgccgacgcgacaagctctgcctcggctggggagcatcggcgtcgtggcgggcccctccgtggacgacgacagacagaagcgcgggagcaggacgctggtggcgcccgggacggtagtattcgctgaggtgcttggacggacgcttagcgggcgtccactactgtcggcacggcggctcttccggcgcctcgcatggcaccgcgccaggcagacagattctgcaactcaacgagccaattgaggtaaaaatttacgagtggaacaccggggggctactcacaagaattgagggtctgagagcatttcttccaaaatttgagctcgtggacaggataagttcatttacagacttgaaaaataaagtcggttgcagcattcgtgtgtgcattgcaaggctcgatgaagaaactaacgacctgataattagtgagaagaaagcatgggaaatgacttatcttaaagaaggaaccctcctacaagggactgtttgcaagatttttccgtatggtgcgcgggttaggattgctgggacaaacagaagtggcttacttcacatatcgaatattagtcgaggcaatgttttgtccgtaagtgacatcctgaagatagatgatgaggtgaaagttatcgtgatcaagtcaaatgtcccagacaaaattgcagtgagcatagcagaccttgagagtgcacctggtttgtttctgtcagacagagaggtgagacaaaagtgttctcggaagcagaggagatggcaaagagatacagggagcagcttccagttacccctcagaaccctatattagatgatggccttccaggagaaaagctaccatttgataacgaaactaaactgtatgcaaactggcaatggttcaaatttctgcatcatagctaagctgctgacaacagcgacagagacatatctggtacttgttgaccatgcaaaggtgaactgtcgctagagaacctgccaacctgttgaagtccaatactgaccactggtgggtagttctccacttccataacccagcatcagtcatggagaagtatgttggacaggaacaggcaacttcatcccgcagacaagatagggtacaaggtttccaggctgcagaacattggtgtttcgaattgcctcattcctagtgcccctggagtgaaatgttgtgatatcattttatctgtccggagaatgtagcttcattgcattcatgttatgtcaaaactagtcgggctgcccaagcactccgtgccaacaacttgcatctgcccatgaaatagattctgaaattttagcaaaaaaaaaaaagggcggccgccaccgcggtggag

SEQ ID NO: 141220 - DNA, 392 bp, Zea mays
  unsure (1)..(392): unsure at all n locations
  Clone ID: MRT4577_60274C.1
aaaaaaaaatnnttttttaaaaaaaaaaaaataaaaaaaaaaaaaaaaaaaaaaaaaatgaaaaaaaaaaaaaaaaaaaaaaaaaaaaaaaaatataggggggcccgtttttggggggcctaagcttacattcccgggccttcgtcgttttaaattttttttggtgggcctttatttaaatttcattggccgccgttttttttcggcgttttttttaattccctggggttacccaatttaatttgcttttaaaaaaatccccttttttccacctgttttaatatcgaaaagggccgcacgctttgccttttcaaaaaatttctcatcctgtttggctaatgttacgcgccttttttgggccctttaagcgcggcggggggggtggtttttcc

SEQ ID NO: 141221 - DNA, 431 bp, Zea mays
  unsure (1)..(431): unsure at all n locations
  Clone ID: MRT4577_60275C.1
tgggacctcgagccggccgggaacgctacagccgccgctgtttcttcatcttcctcgcagcgccggcgctcaggctcggnatgtnagtgaagnaacattgggtactattttgtctaccggcactctgtcaccaagaatcggatatctggagtatataaatgttctgaccttgcctggtaacaacatctctaggtggcataccaaaacaatttggcaacctctctcgattgacaagattagatttggaagacaacctgactgtttgggctaataccacgcttcacttgacaggctttcaaagctccagcttctgatactaagtccaaacaatctcaacgggtctattactgacattcttttttcatcccgcgcccgacagacattcggctggcttacaagaaactccctgcccaaataccttcccaactgtc

SEQ ID NO: 141222 - DNA, 628 bp, Zea mays
  unsure (1)..(628): unsure at all n locations
  Clone ID: MRT4577_60276C.1
tgggtaccctgagccgccgggctctcctgtttcctagccccacggccagcctgtccttgctcgtttccaagctgtgctctagcaagcttctctgtagttcttccccaactgctcgctctcagcctgtgagtgtcctgctccctcacgtaaaagcagctcggccctctgcacctgtcgtcgattctgttatgtcccaacctccgcgtcgtatccctcgacttcatcacagcatcaccggtgctctcgtcgtcgttgagctcttggcgcgacgtgacgtcatcgtcgttttctcgccagtcatgctcgacccacagctccttcgcgtcatcgtcttcgacaacccacaacctctgctctaacctcatcgcactcgcggaatcgtcgtgaagccgctagccctcctcacacccgacaagctgtcgtgctcggtgtgttttctccgtgcggccttacgtgttcctctcgcttcatcggcttgtcgcgtgttagagcagagctccatgaagaagtggacatcaaagagaaattgctccagtacttgaacacccattggtgtggttccatctaactggttatctagtagaaggattttggatcttctctgcaacaaagnaaaggttttgatgtc

SEQ ID NO: 141223 - DNA, 613 bp, Zea mays
  Clone ID: MRT4577_60277C.1
aacagctgctttacataaaaaataaaaaaaaaaaaaaaaaaaaaaaaaaaaaaaaaaaaaaaaaaaaaaaaaaaaaaaagcggcgcctacgcgctccagactatagatccgtttactggggggttagaatgaaccaaaggagggggcctgttcaccgccgttttttgtcccttttgggggggccttcacgcccccacgcaacatacctgggcgaggcgtgtcctttgtggtaaggggtgcccgttgcaatgttctaccctacattcgcgggggggggtttgggggcctgtctgggggggcgaaaggggggcccccccctccattaatgggtggccccccccgccccgtgtgcaggggggaatactgggcgcgccgccgctttctctaattgggccccgccccggggggggggtctgctgatttgggggctttttcctttctttacggcggtgctgcggttcccctcagactcgggggggggcggaggggcccacatttcttcaggggcgccagacggggccccccccgcgtcgggggccctggtggtggggtttttgataggctgggcccccttggcccggatcacaaaaaaaggccttcttgttaggggttt

SEQ ID NO: 141224 - DNA, 895 bp, Zea mays
  Clone ID: MRT4577_60278C.1
cctcgaggccggccgggacatattctttttcttttctctctacgaatagagatagatgttcctggatggagaattcctcacgtcacctgcaactccaactgttgctcggcttcaccacgttcaactcccaggaaaacccccagccatcacctgccccagcgttcgctctccatgtttcctagccccagcggccagcctgtccttgctcgtttccaagctgtgctctagcaagcttctctgtagttcttccccaactgctcgctctcagcctgtgagtgtcctgctccctcacgtaaaagcagctcggccctctgcacctgtcgtcgattctgttatgtcccaacctccggtctctgctcgtccttgcctaggtccggtcctgcgtacttcaacactgttctacagccgtctgagctccaccttgtcgtcgacctgttgtttcagcgtcgtatccctcgacttcatcacagcatcaccggtgctctcgtcgtcgttgagctcttggcgcgacgtgacgtcatcgtcgttttctcgccagtcatgctcgacccacagctccttcgcgtcatcgtcttcgacaacccacaacctctgctctaacctcatcgcactcgcggaatcgtcgtgaagccgctagccgtctgcctcgtcctcacacccgacaagctgtcgtgctcggtgtgttttcaccgtgcggccttacgtgttcctctcgcttcatcggcttgtcgcgtgttagagcaaagctccatgatgaagtggacatcatcgagagattgctccagtacttgaagacccattggtgtggttccacctaactggttatctagtagaaggattttggatcatctctgcaacaaaggaaaagttttgatgtccttggcttcatcagatg

SEQ ID NO: 141225 - DNA, 658 bp, Zea mays
  Clone ID: MRT4577_60279C.1
gccggccgggctgcgatcttctctcactccctcctacctccccctcgccagtccaccccattggtcgagaagccgagaacgacaggtagggagcggaagctaaccaagccgtcccgtccagagccgctatgtccggcggagcgcccctcctggccctgctgctgctggcggaagcggccatgatcgccccgtcgccgggcaatgccgtcgtgtcgcacgaccacaggggcgtggccatcaacggccaacgccgtatcctcatctcaccgcccatccactacccgcgcagaacaccacatatgcggccggggctgctccatgaaggacaatgaccgcgatgctggacgtggtccagacgcacgcggtctggaaccggcaccaaccagcgcgggggcagtactacttcggagaccgctaacaactcctccgcttcgttaagctcgctaagcaggccggcctctacgatcacctccgaatcgatccctacgtctgcgcccaggggaacttccgactgcttccccgtaggagctcaagcaacgacccggaatcagcttccgcaccgacaacggacccttcaaggcagtgatgcaagcgctcgtaggacagatcgtggccatgatgaagtccgatgggctgttcgagtgtcagggacgaccca

SEQ ID NO: 141226 - DNA, 451 bp, Zea mays
  Clone ID: MRT4577_6027C.1
actcctatgggcgattgggttcctcgaggccggccggggaaatattgtattgatcctctggaacgtgtccatggagccctccatgctctccgctaacaatgtttgaccccaccaaggaagaggtctgtccgaactcttggggatcactagctacagcgtcgctgtcatgagacgaaatgccacctacgacaatttaaagtcacccaactcattcaggactcacaaggtaccgacgaattcaccgaaggcgatgacgcctgccgatgctaagaagaacccgacattactggatctagaactaccccggtaacctcctgaagccatctccacgccgcgcgaatgccttgactcatcaactactgacattaaaaagtctggtgaagttgtgctggcgaccaacctcacttctacacactcttctttcgcggactacgacgtcgaccctgcgccc

SEQ ID NO: 141227 - DNA, 414 bp, Zea mays
  unsure (1)..(414): unsure at all n locations
  Clone ID: MRT4577_60280C.1
ggtaccctcgtgtgtcggccgggactgtggacaaacatctttatagttaccacctcctacaaaatataagaaatcatcaagaactatcattttttaatgctttgctgatcttgcatcttatgggtttaactagatttacatatatgcaatgcaagcaagcaaagtaaagttctgaaccgcagataagctacaggctgtgcgtgcacctccaccctacagaaaccactttgacaaatgcagaattcaaacttttgtgaaccacgacaagcaaaacaaagggtgttcccatatagaaggatttgaaatacaattgatcggcttgcatgggggacaagtaaggaaaaaaaactaagggtttgatcggcttgcattggggacanaagcaagcaaaactataagcacctcgatttatct

SEQ ID NO: 141228 - DNA, 237 bp, Zea mays
  Clone ID: MRT4577_60281C.1
gggctcttttttatttgtggggagccacacacatgccacaaaactctttattagtgctctatctctcatacgatatctaagagagggcaccaccagtgatggggtggtggtagaacggttgtgtgtttgtcaaagcaagttgtgagagtggcagcatgtggtgcacgtgagagagggtgccagcgatacgtgcagtgtgcggagaaaacgtacacatgtgggtgtgatcaaaagggt

SEQ ID NO: 141229 - DNA, 495 bp, Zea mays
  Clone ID: MRT4577_60282C.1
ataaaaaaaatggaataagagaagggcacacagtattaagctgcagacaggcggagctttatccaagagcgaaggggacccgccgctactacgttggcgggtgcccctgcagccagccataggctggacgcctgggcccatttatccaaatttatagacacattgaaaagctaggtagcgtctaacggagggaccgtccatgcttgtgtacagctgccctgattcataagagctctgcacacgagattgattgccaatgtggcaccaggaaaaaaaacatacaggaccagaacacgcgccttaaaccaaggtggaggtctatataacaaggcgaaactgtaagctacacagacatgctgggggccaatgctagtgtttaatacacggatcagatctagatggccacacgatttcatgacaaccatgatgacaaaccgttggaaaaattgtggaattcgcaacgtgcgtcttccgggactaccaatctgaaccatg

SEQ ID NO: 141230 - DNA, 178 bp, Zea mays
  Clone ID: MRT4577_60283C.1
agggaaaaatattgaaggtctatagattttatttaacgcacccccaccatttttttatttatgacacaaaccctgcagatgcggttttatccgtacacacacaattcttattatggggcgcgcccccacccaatccgtgatcgatcgagtagcccccccatgcacacccaaatgcgtg

SEQ ID NO: 141231 - DNA, 856 bp, Zea mays
  Clone ID: MRT4577_60284C.1
gttcttaagaccaatcccccaaacccctcaccaattctcttatcccctcctcatcttctccccgcacccgacgacatcgcgggagaaggaaggaagcatcatggccggagcagcagccgccgccgccgccgtggcctccggcatctcgatccggacggtcgccgctcctaagatctcgcgcgcgcctcgctctcggtcggtggtgagggcggccgtttccttaggcgagaaggcttacacggttcagaaatctgaggagatcttcaacgctgccaaggaattgatgcctggaggtgttaattcaccagtccgtgccttcaaatcagtcggcgggcagcccatagtttttgattctgtgaagggctctcatatgtgggatgtcgatggaaatgaatatattgattatgttggttcctggggtcctgcaatcattggtcacgcagatgacgaggtgaatgctgcacttattgaaactctgaagaagggaactagctttggtgctccatgtgcgttggagaatgtgttggctcaaatggtcatctccgctgtgccgagtatcgaaatggttcgttttgtaaactcaggaacagaagcttgcatgggagcactccgccttgtgcgtgcattcactgggagggaaaagatcctcaagtttgaaggctgttaccatggccatgcagattccttcctcgttaaagcaggcagtggtgttgccaccctcggcctcccagactcccctggagtgcctaagggagccactgttgggactctaacagcaccttataatgatgctgaggcagttaaaaagctgtttgaggataccaaaggggaaattgctgcagtcttcccttgagcc

SEQ ID NO: 141232 - DNA, 1157 bp, Zea mays
  Clone ID: MRT4577_60285C.1
caggccaccaccactgcaccaccgtccacaccagagcacggcacggtacggaagcgaggtgcacccgcttagtcccccgccattactccgattccccttctcggcttctcctccttccccggcaattaatgcggccaacaaccagatccagccccccggaaacctaagctcccgcaaacaaatacccttttcccattctgcccctcccccgcgcagcatgccatcccgccccacgaccacagccccgccgccgccgccgccgccgcccacgaccaccacgtggggagcgagagaggcatgtccttccttgacccgctcgcctcgctcggcctcgggtacgcgatcgccatcgcgttcggattcctcgtgctcctcgcgtcggtgctgctcgcctcctacttctgcctccgccgcggggccgccagccaggggttcggcgccggagccggcgtcggcgtcggctcggctccgcccggcacgccgcctcctccgcctccagctccggccacatctccatcaccgtgccccgcgtcgtcttcgtcgcggaggactacgactcgcctgggtcctcctcccgcggccccgccgccgcggcctcccccgtcgggctcgacgcctccgtcatcgcgtcgtatccgatggtgcccttctccaaggccggggcgggggcggacacggaggtcgcgtgctccatctgcctctgcgagtacaaggagggcgagatgctgcgggtgatgccagagtgcaggcacaggttccacctcacgtgcctcgacgcgtggctgcgtcgtagcgcgtcgtgccccgtctgccgttcgtcgcccatcccgacccccgtcgccacgccgctctctaccccactctcggagcttgtcccgctgtcgcagtatgccgccgaccgtcgccggagcaggtttgggtgattaatgggtgatggagatgtgaactgttcggctagagctaccataactaggacaaaagtttttgcttgacagcagtacattattggacccaggaggaagacatgcagtgtacatacattgttcttctgttctaagatagtgtctatcaagtgaggttacctgtgatcttatagttgtacgcggaagattgttctatgaatcatcttatttcatccatgacttgcattgcagtgt

SEQ ID NO: 141233 - DNA, 256 bp, Zea mays
  Clone ID: MRT4577_60286C.1
gacacggcaggaggaagaaatgccggccaaggaggatgaactgcagaagaccaatgagcgtcagcagaaggcagacaaaggcagtgccagggtcatgcagctcaagaggcatctggaggaggctgaggaggagtcccagcgcatcaacgccaatccgaggaagctgcagctcgagctgtatgatgccacggagaaagccgaagcgatacctcggcgaggagctggacgccctaaagacagatctgggagacacact

SEQ ID NO: 141234 - DNA, 385 bp, Zea mays
  Clone ID: MRT4577_60287C.1
ggaccccccgggcgaaaaacattgtttttttaaaaacatgggggacagggcaaaaataactggggatccaattgggtaaaaaaacaacaccctttggatagggaatttcaggggggtccccccatgaaaaagacccagggtttttagaaacaacagatcccatgaagaccccccgcctggttgccccccatatacttggggggtggcactgaactttggggggcccttgatgaccttggggacagcatcgagaaaatccttttttggcaccgttttcctgggggcacgaaggggggaacatcccggtttttgggcaaacgctccttatatcagttccagaaaagtgggggcaaacccgggccaaaagctcgaaacgaatatttcg

SEQ ID NO: 141235 - DNA, 120 bp, Zea mays
  Clone ID: MRT4577_60288C.1
ggtccattgggggggccattaaagttaaaattaagggctgcagctgcaatccaacagagacaactggggacctgtcgccgaacgaaggcccaaagcatgttgcacgagtacgggttgcga

SEQ ID NO: 141236 - DNA, 562 bp, Zea mays
  Clone ID: MRT4577_60289C.1
cagaaaggcgaagagatgaagcaactgagaatgccctcgccgtgaaagggaatacccctcgcaactgagccctcgccgtgaaagggaatacccctgggaacaacggcgatgaccccggggcagcttagcgcacgccaaaataggcagaacaggatcatgcaaaccctcgctctgatccctccatcaggatctccgtttggcaggaatgaagaggttgctgccagccgtcaaaaactctaattcacttatgagcgccctaagaaacagtccgtgagcccccctagcgttttgcagtcctgtcctcctctgcgcaccatgcctagtatcgctgctgccattcagcttgcttttgggagacgcctatatattgcgcctgatctgctgaattacctagcagttgctattaatctatccagaagacttggactgagtttgattgctatgtaaccacgcaactgtgcgacattggccaatgtggtgccgttgaaccttatgtattattgtgccgttgaaccttatgtattattgtgccccccttcggcatttcagctcagcattcagc

SEQ ID NO: 141237 - DNA, 819 bp, Zea mays
  Clone ID: MRT4577_6028C.1
gctcgaggccggccggatcgaaatcgcaagcaagatctctaacgactagattggctagagagatcgcgatcgtggtagctgctggcttgtgatcgagacgagcaatggcgtccaaggcgtttgcgctgttcctggccgtgaacctggtggtgctgggcgtagccagcgcctgctcgccctactgcccgaccccgaccccgaccccctcgacgccgacgacgcccacgcccacgccgtcgtcgttcggcaggtgcccccgcgacgcgctcaagcttggcgtgtgcgccaacgtgctgggcctcatcaaggcgaaggtgggcgtgccgcccgcggagccgtgctgcccgctgctggagggtctcgtcgacctggaggccgccgtctgcctctgcaccgccatcaagggccaaatcctcggcatcaacctcaacctgcctatcgatctcagcctcatcctcaactactgcggcaggaccgtgcccaccggcttcaagtgctgagctgagcgcgttcgcctcccttgcatgcatatgcacgcacacgatgatgagtgaatgagtgatgcatattatggtttggttgcatttccacgtacgcgcgacgactagtccgcatcatgcatgtacgcatggccgtgatttgtattctccccgcctggctgctgcctctttatttgctccccgtgcatttgtcatgttgcaaagagttagccggctgtcacttgtatgccggtgatacataagttccaatcaagtttgtcttgcgctttatatttcaaaaaaaaaagaggcccctagggccggggggcgcttctaaaac

SEQ ID NO: 141238 - DNA, 392 bp, Zea mays
  unsure (1)..(392): unsure at all n locations
  Clone ID: MRT4577_60290C.1
cagnacctttgactgcactgatgtatgcactccaagtgatgaattttctcaagagctgttcataagaccttaggcatagagaggagtcaaccccatggatgctttgctgccccaaaagagacccatctgatgaaaacggacatgcacaaacccaccgcgacaattgactctctactggaggaatgatccaggcgcacttctttcaacaaagaagaacccctgctggacagacctggccacagtaatgatgacaagtgtaacgaaactaacaccgatttaggagccactggtgattttactgaccaaacaagtgaggtagcaacagatgtggaggactccactaatagtgactcacatgctgcacctgatgatccagctgttatctgtgatgc

SEQ ID NO: 141239 - DNA, 711 bp, Zea mays
  Clone ID: MRT4577_60291C.1
aaaatttggttaaaaaaacaaaacacaccaaccgatcgaccagccgtccggggatcgctcaccaccaacatcgtcctcgccgtcgccgtggtggcagcgctggtcggcggcgggtcgtgcggcccgcccaaggtgccacccggcccgaacatcacgaccaactacaacgccccgtggctccccgccagggccacctggtacggccagccctacggctccggctccaccgacaatggtggcgcgtgcgggatcaagaacgtcaacctgcctccctacaacggcatgatctcctgcggcaacgtcccaatcttcaaggacggcaggggatgcggctcatgctacgaggtgaagtgtgagcagccggcggcgtgctcgaagcagccggtgacggtgttcatcacggacatgaactacgagcccatctcggcgtaccacttcgacttctccggcaaggcgttcggcgccatggcttgcccggggaaggagaccgagctccgcaaggccggcatcatcgacatgcagttcaggagggtgcgctgcaagtaccccggcggccagaaggtcaccttccacgtcgagaagggctccaaccccaactacctcgccgtgctcgtcaagttcgtcgccgacgacgggtgacgtcatccagatggacctccaggaggccggattgccagcgtggaggcccatgaagctggtcgtggggcgcca

SEQ ID NO: 141240 - DNA, 1940 bp, Zea mays
  Clone ID: MRT4577_60292C.1
catttgagagcaggaggccggcagcatcacacactgacacacctcgcccccaccgcgacagtgattcggagcgcgaggcccgttcgcaggtcacttctcaattctcaaccttttcttctgccggcgtgcgctctctctctcctcctcgtgcggccgctgggtgaggtgtccaggtcttcgtcttgtcattcgccagcgacgagactcaccaggtttgcattgatcagtatggtgactgaaaatgcagatgaagaacatgacactggtccagaaaataagttaagacacaattttcgattgggagatataacatgggttaagtacaatggctcttcatggtggccatcccaggtcattgatgaatcatgtgttggtagcaagcctaagaagaaagacaagtatgattgcctagttcggctctatggaacatgtcaatatttatatgtagacccttggaagtctaactcagaatttgaaatgatgctgaagcaagaaaacaagagcgcaatggaagcattccgtgaggtgcttgagaaggagctctctggcgttaacttgcgcagtgattatgaggatggttatgaagaggaagatgtcaactcaaaaggcggtgacaacaaagggacctcaaagaagacctcttctagaaaagccagaaaacaagaaggtctgaagcaacaatataatggagaggaagaccaaaatggtgggagcaatgcaactactggaggtgctcggaaaaaaaagggtgggcatgtaagacaatcaagtgctactcatgatgccattgataaaaattatagtggcagttcagctgaaggtttaaggaacaagagacagaagtctgctgctcaaagcgcttcggtaggcagaagggaagggttgaggcaacgatctgatgccaagcaacatccagatgcagccgagggcagtacagaaccactcgctgatgtacctggaagcgatggtgcagctcaaggttcaatgcaacatggaacttcggctcctcataccgaaataaaagcgatggtcaggaacatactgttcaaggacatcgttgacaaggagcacgatgctgagatggcttatgtggatgaagtgatcaatggcatctgtaacgctactgacagcatggtcggcggcggcggcggtgatgcttccgcgaaaggcggacgaggctccaagcagagcggcggcggagtggagggtgagtcgagcaatgccacagaaaggcgaagagatgaagcaactgagaatgccctcgccgtgaaagggaatacccctggggaacaatggcgatgacgccggggcagcttagcgcacgccaaaataggcagaacaggatcatgcaaaccctagctctgatccctccatcaggatctccgtttggcaggaatgaagaggttgcagccagccgtcaaaaactctaattcacttatgagcgccctaagaaacagtccgtgagcccccctagcgttttgcagtcctggcctcctctgcgcaccatgcctagtatcgctgctgccattcagcttgcttttgggagacgcctatataatgcgcctgatctgctgaattacctagcagttgctattaatctatccagaagacttggattgagtttgattgctatgtaaccacgcggttggttctgtacttgtacgcaactgtgcgacattggccaatgtggtgccgttgaacctttatgtattattgtgccccccatccccatgttattactagcccccttcggcatttcagttcaaaattgaacctaaatttgttgaaataagtaacagttgatattaatttatccaaaaaacttggactgagtttgattgctatgtaaccacgcggttggttttgtaattttaagcaactgtgtgacattggccaatgtggggccgttgaaccttatgtattattgtgcccccccctcc

SEQ ID NO: 141241 - DNA, 330 bp, Zea mays
  Clone ID: MRT4577_60293C.1
aaaaaaaacgaaattaaccaaatttggtatcaacaagttcccttaccaccattagccattgggcccaacaccatcacattgcacacaaactcttaggtccaaacagacgcccaacaccggatcaacttatgcatacccaacatatccacaggaaaataggcaccctgatacactcaccaaccagttgtaaaatgctcactacccttattaattccaggcctgtcaacagatatgataagtccagtttatactgtgggaaaattaggcgaagacaaatgggcccaatctaaaacatttggtgaacactggatatgagcgccttggagagag

SEQ ID NO: 141242 - DNA, 130 bp, Zea mays
  Clone ID: MRT4577_60294C.1
gaggatgattgcactctgttttttatttggcacatcaacaactaccattgagccagctacgtgctgactacccaccagaattaccttcacttaaccgaacggccgcattgaactctccagcttatttaca

SEQ ID NO: 141243 - DNA, 319 bp, Zea mays
  Clone ID: MRT4577_60295C.1
ctcgcaccctaaaaaggggccgccacacgggcgcccgttataaattaattttttttttcattttttttaaagagacaaattattttgccggggacgcgggacgtggcaccacacagtaaataaatgagcgacccgggccttaatggcgggaaaaaaaaataaaaactgatggcaaaggcgctcaaccaagggggaaataaacgggccgggccaaccaaaagggcggggggtttttttcccccccaccaagggggaaaaaaaaaaaccgggccggcccccttgggcaacccccccccccccccgcgggggttcaaagggg

SEQ ID NO: 141244 - DNA, 138 bp, Zea mays
  unsure (1)..(138): unsure at all n locations
  Clone ID: MRT4577_60296C.1
ncggacgggacgcttctgccttctcctcacgaggtgaggaaaccatagcgactgaccatggcgctgctcccgccaccgaacggatgcgcttaaatcttacaccgcggccgaactccgacgacgacgctgacgctgcga

SEQ ID NO: 141245 - DNA, 508 bp, Zea mays
  Clone ID: MRT4577_60297C.1
catgtttagacaggatgccggctggccacggcctgcgctcgcggacacgcgaggtgttttccccccccttccttatgaaggtctactttccgttcaccacctacctctgcacctacaatatcggctattacttctgatttaaaggtttatctgttcctttccacaattaatatttctcatacatttttttatatacttttcttctcctaatctcattttttcaaatctttacctatatactcgtactttttattttttacaatttcttaatatatttttaacaattaataacttcttatttttttatattatattatggtgtctgttcgttagtttagttatctttcttaatttacttatttattttatctttcatttttttattaactatttttatttttattattgttttatttttatttattttcttttcttttttttactttatttatttttattttattatatttcatttattttttttaattttcgttttatttttttatct

SEQ ID NO: 141246 - DNA, 249 bp, Zea mays
  Clone ID: MRT4577_60298C.1
atgggagggaaatgcaacaatagcaggcatcaaagatggagcggaggggaggaggaagtagaacttggcatcccccatctggagcagaccctaagagtcgagcttgattggggcggacccgaggacgtgttgcacgccctcgatgaggccgttgttcttgccaagcacctagcggggtggggtatggggggagacccacctctatatgtgagcgagaggcaagatgcagtggtggaggagagggagtga

SEQ ID NO: 141247 - DNA, 297 bp, Zea mays
  Clone ID: MRT4577_60299C.1
cacctccaccaccgcggtacgtaccgtttgcgatcaaaagaaagtcgagccatatggcgaaggccgcagcgatgctcgtgctggtggcgctagtggtggcggcgatggcaacgggcggagcggcgcagtgcaacgcggggagcctggcggtgtgcgcctccccgatcatcagcggggccaagccgtcgacgacgtgctgcaacaacctaaagagtcagcgcggggtgcttctgccagtacgcgcgcaaccccgcgtactccatctacatcaacagccccaacgcccgcaagaccctc

SEQ ID NO: 141248 - DNA, 370 bp, Zea mays
  Clone ID: MRT4577_6029C.1
gccttactgaggaacaagacacacggccttatcatgggcgcttatcttgtcaaaagcctatgggtatgcaacgaaggtggcttaaccgtgcaagtgctgagggagctgagcaaacggctgtgcaatctgttgcatgacctgaaaaggaaggtagagcttgatatgtggaatgggcgcaccagggccgtggaggcgactaacttgcggagacttaaagaggctgtcgcactctatgatatcctgacgaggggctcttaacgcgtgctgagcatgactcggaagggtaatctcacgtactgctgtacgataatttaggattagatggtttgcatgtaacaggcggagactacggtgatactggggaaaacct

SEQ ID NO: 141249 - DNA, 143 bp, Zea mays
  Clone ID: MRT4577_602C.1
tcggatcattctcgagccatgagccaggcaggccctgcctccgacaacggtaagggggagagcctggaggacctgcatcggtagttctaggagctgatcttgaggccattgccattcttcttctttccatacgacgcagttgg

SEQ ID NO: 141250 - DNA, 342 bp, Zea mays
  Clone ID: MRT4577_60300C.1
aaataaaaacggatgttgtagaaatgggaaacaattaaaccagggcctcagacaagatgctactgatagcacgggggttcaaacaaacttagatgcatgaaacaaacaggaatgaactgggattcctcctccaccgtgaggcctttaaagccccgccgttcccaaacttctgatactgaaaacaggatactgatgttcccggctggggagaccggcaagcttactggtgaccacaatgctaacctgaggaggtccttccacaaattccttgggcctcttagatggacaccttgtgtgcaaatgaaacacagtatgtccaggcgggcatcataaggcactccc

SEQ ID NO: 141251 - DNA, 413 bp, Zea mays
  Clone ID: MRT4577_60301C.1
aaaacccccaggccccccccctttggttcagttttttttgggggaaaagggaacctgttttaaaagggccccctggcaaaaaaaaaaaaaccccaccaatggttaacccccccccccagggggatttcctggggcccccccttttccctttccaaaaaaggggggcccggggggtcccccccccaaaaaggcttttccggccccggaaacctaagccctaatccttggggggaaatcccgggccctgccttgcctttgtccccccccaaatccccttttagggacagaaaacccctgggggaaaaacatcgttttggaaacagttcctgatttaccttaatttcccggcccccgggggggaaaccggcaaaataaaaagtttccagccctttttaccttttttccaaaccccg

SEQ ID NO: 141252 - DNA, 460 bp, Zea mays
  Clone ID: MRT4577_60302C.1
gccagcgtctactaccgctacgtcggctcgctcaccgcgccgccctgcaccgagggcgtcatatggaccatcgtcaagagggttcgcagcgtgtccaagcaccagctcgagcttctcagggaagccgtgcacgacgacatggagaacaacgcgaggccgctccaggaggcaaacgacagagacgtcagcatgttccggcccaagcccaacaagcattattagggctcggcccgtttccagcctcgtattagtgatgcgtacatatgggctcgctgcgacacggcgggcgcctgtaggacacattcagtttcagtccgggtgaaattagattaagaaattccgtagtttctattgtttctattttttttctgtttatgttccttcgttgtatgagtaaataaaaatgcttattcatgttcactttcgttgtatgagtaaataaaattatgttttgtcggag

SEQ ID NO: 141253 - DNA, 357 bp, Zea mays
  Clone ID: MRT4577_60303C.1
gcccgcaacacacaacattttttttttttttcccccccgatgatgaggtgcttaattagaaccccgcattaagatcctccacctccgcagactaaaaaaaaaacggcggaccccacttttttttgaggggggggggaagacaagcccccctaaaaaaaaaaatgttgccctccttcccccctaaaaaaagaggggggggccacccaaccgaccaaaccaccgggggggaggacaaaaacctccagagcacgtcctattataaaaaaatattcctcctaaaaaaaccttgctggccaccataattggtggaggaaaaccaacttcttcaccggaggggcggccccgttcttcatcagg

SEQ ID NO: 141254 - DNA, 440 bp, Zea mays
  Clone ID: MRT4577_60304C.1
atattgccggatcgaccagctcactaatctgctgccgcccttcatctttttttgaggtgggaggcaactaacctcagtccttgcccaggctgaggtaacaaccattgtaggggtcgggatcaggatgagtgatacctacctcgtattggagtacagagctgtataccctgccattatgaacatcaccacactaagagcgctttacaatactagagtatacaaattcaccccgcctgctgctcaatattccgcaggacgactgccattggcgacccgctgaactatataactgctaacccacttaaccatttagctgggacaccctatatcaaatgcacaccattacgtctccttggacctacacaaactataggctgggactgtactccggacacaaaactaataagttagagggcgctactactcccatggccaagcaa

SEQ ID NO: 141255 - DNA, 343 bp, Zea mays
  unsure (1)..(343): unsure at all n locations
  Clone ID: MRT4577_60305C.1
attaaaatagattttaccgaaaaaaggagaaagacagaagttaccggacctaaaacgtaactcaagcagtaccataagctccaacagaggccaggctgtattattacaaaagacggggggatttataggctccttctatggggggtgtgcaccggaacactactcttattccaaaaataatcttttaancggatggacccgggggagctatataaagaaaacggggggccttgctgctgcggggggatgcgcttacaacatcagcgagatacccatcgtgaggccaccttggggggacagcgacagtgagccggcataacctggggctgggcataggacagga

SEQ ID NO: 141256 - DNA, 435 bp, Zea mays
  Clone ID: MRT4577_60306C.1
cttcagcgccttcaaggaggagatggaggtcaagcggcaactcgagcaggtgcaggtggcgctcgagggcgccactgaagacatgaacctcatgggccggctcctcgatctgcatgttactggggtgttgaagtgtataagtagatcgtctatcttctcctaatagcttaaacgtttaggttgaactggttattgcgttcgctcaaacaagttggtcgtcatcttattagtatctgtgtcattctgtttggtagttgttgtgctgcactaaaaatttacatgatatttgttataggaagagttggaaacacatgatggcgtgagcaaagggaagtataccattgggcttgggcaggaaaagtatgacatttccgcacttgaagttgagggatgttaatttcgatgagccttgacagtgggtgaagtccccttctg

SEQ ID NO: 141257 - DNA, 221 bp, Zea mays
  Clone ID: MRT4577_60307C.1
gttgtgggaccctcaagcaggcaccgcccactatggatctgttatggtccagttaagtgccagaggtgtgaaataaggccttcacagagactactagaagagatcctcaaatccctaatagccgacagttgactgcccagtcccgctcaggaatcctgatgagaagcccatattcatctaatcacatgctctagctccagctccagagcccatacctgttc

SEQ ID NO: 141258 - DNA, 853 bp, Zea mays
  Clone ID: MRT4577_60308C.1
aggcctcgcccggcccatcccgcaccccctacctccgaggctgcgatccgctcttgtaggctccctcgccaatccgctcctcctccctccctcccactgttgtgcgtgcagcggcgtcggagaagagatggcgtcggaggccaaggacgtgggcatcctcgccatggacatctacttcccgcccagctgcgtgctccaggaagagttggaaacacatgatggtgtgagcaaagggaagtacaccattgggcttgggcaggaaaatatggcattttgcactgaagttgaggatgttatttcgatgagcttgacagttgtgaagtccctcctgaaaaattataacattgacccaaagtgcattggacgtttggaagttggcagtgaaacagtaatagacaagagcaagtctataaagacatggctgatgcagatatttgaggaatctggcaatactgatattgaaggagtggactcctcaaatgcgtgctatggtggaacagctgcattgtttaattgtgttaactgggttgaaagcaactcatgggatgggcgttatggacttgttggtttgcacagacagtgcggtttatgctgaaggtccggctcgtcctactggtggtgcggctgctattgcaatgctgattggaccaaatgctcctatttcttttgaaagcaaatataggggatctcatatggcccatgtatacgacttttacaagcctgatctcgcgagtgaatatccggtggttgatgggaagctatcacagacatgctacctcatggcattggactcctgctacaatgtattttgtaaaagtacgaaaagcatgagggaaagcagttttcaattttg

SEQ ID NO: 141259 - DNA, 1842 bp, Zea mays
  Clone ID: MRT4577_60309C.1
acgacggggcccttgcaaaagtgtggagagatgctgcaagctgagcatgtcctgttcccaatcatatgtcgaatcgcaaaactcatcgccagtatcaacgctgattgacaagccatctactgtaaagtggtatgggagcatagcttatctttgtgttaatgcgttgctacaaaacaaatgtgaacttcaaactgtgtgatttaccaggcacgattgatattatgtgtgcgctaatgtccaattaagtggtaatgtgaagcttctcaaagtagctggctgagtgaagctgctaaactaagagtgcgggatcagaagaggttatacaggtgcaattttcaagtttcaaaagaacaaaaaattttgctcaatatatgataaacctgttattcggtcacctattgagtaaacctgttgccaacacggcagttgtcctgatcctgtagaatcaacgactaggaactgtaaatcaggtgccatagggggagaggctggcacagcgaagtaccaaggcaggaggaacctgtgaagaaaccagcgcctgtagtagaatcaatgcctacgactataaatcatgtgccagagaagaaagactggcgtagcgagttaacaaagctgggcgaacctgtggcaaagaagaagagcagcctcagggacaaggtggccttgtttctttgactgcatcagatgagatttgggcagtagattgtgattcgtatgggaccgtgtctgctggttctgagcgtgtcccagtcccacggcattgtttttgcatgtagttatacctttggttaataagctgtcctctttaaatctagcaagccagccctcactgttgctagatggtattcctgtgtataaaggatgcatggtgcattttctgttggttgaagtacgactgtatgaagtatcggtgttcctcaacgcgacaactacactagagggaagcggtttaaacatcgtagagttattaggcatggaggagcccagctatctccttactcgccatggagcctttgcagaagttgctggagactgacacagctgagagtggcctgttcccaatcatttacagtgctgcaaaactatggatcagtatgggcgctgatgatgcagccatcttcgtaaaagtggtaatggatcgttgtctatctttgggaggtttggttgctaataaacaagcagaagtccaatataatgtgatgaccttaacacgattgatattatgaggtggttaatgtccaattaagtggtaatgtgaagcttctcaacgaagctggccgagtgaaactgctaaactaagtgtataggatcagaagaggtttcctttggacaagctctggcgatcggcagatgcaaaaatttgggggggcattgagtgtcagacctggatgtgcacaaattgccactcccagtaatgctgttgacaggcagttagttcatcaaggccaacaccatcctcactcttggggatgaggaataccaatggacatgggcgtctaacttctacgccgcatgcaacaagaatagaacggtcagggacgttttgcacggagtatgtttcttgaatacgaaaacagtgacagggatggcagaattgttatgctatgggactttctcagtaacagaaagacctgacgagaatgaaaccggttagctctggcaccacaaccggaagagccgcgacaaaagccgtgggcggggcttgtgccttgtggggaggagtcctgtcaaacgagtttggctccggagcggggctcctgtctttatgtactcccctgttccaaaatagttgttttagccttttaacaaattcattcaataattaatatatttgttttgtat

SEQ ID NO: 141260 - DNA, 117 bp, Zea mays
  Clone ID: MRT4577_6030C.1
agtgtttgcagagctagtggatgtgtttgtatacaagtatgattgctgttacataacaccccagattgactcccagattagaacacagttgtgctgtcaatacctcatactgcgtga

SEQ ID NO: 141261 - DNA, 1423 bp, Zea mays
  unsure (1)..(1423): unsure at all n locations
  Clone ID: MRT4577_60310C.1
atccactatgtccgagggaaaacaccattattgaagtctacgagtgatcaacagatcgaccgggttattcattcggtaatggcagggtgaaaaatcaaaaaaggtgggggtctgtcagcatggagctatggggattcantagaagatgtatgtctttggtggaaaccacaatggtcgttactttggcgacattcaggaggagttcttcagccccttcaaggaggagatggaggtcaagccgcaactcgagcaggtgcaggtggcgctcaagggcgccactgaagacatgaacctcatgggccggctccttgatctgcacgttactggggtgttgaagtgtataagtagatcgtctatattctcctaatagcttacacgtttggttgaactggttattgcgttcgctcaaacaagtttgtcgtcatcttattagtatctgcgtcattctgtttggccggtggtgtgctgcactaaaaatttacatgatattggttataggctcgagggccgggtatatatacggcgccggcgccgaggagagaggaccccggccgatcccgcacccctgactgtcagccgcgatccgctcttttttgcgtgcagcggcggagcaggagagatggcgtcggaggccaaggacgtgggcatcctcgccatggacatctacttcccgcccaactgcgtgctccaggaagagttggaaacacatgatggcgtgagcaaagggaagtataccattgggcttgggcaggaaagtatggcattttgcactgaagttgaggatgttatttcgatgagcttgacagtggtgaagtccctcctgaaaaattataacattgacccaaagtgcattggacgtttggaagttggcagtgaaacagtaatagacaagagcaagtctataaagacatggctgatgcagatatttgaggaatctggcaatactgatattgaaggagttgactcctcgaatgcatgttatggtggaacagctgcattgtttaattgtgttaactgggttgaaagcaagtcatgggatggtcgctatggacttgttgtttgcacagacagtgcggtttacgctgaaggtccggctcgccctactggtggtgcggctgctattgcaatgctgattggaccaaatgctcctatttgttttgaaagtaaatatagaggatctcatatggcccatgtatacgacttttacaagcccgatcttgcgagtgaatatccggtggttgatgggaagctatcacaaacatgctacctcatggcattggactcctgctacaatctattttgcaaaaagtatgaaaaacatgaggggaagcagtttttcaatttctgatgcagattatgttgtgtccattctccatacaacaagcttgtacaagaaagcttcgggcgtttgtactacaatgat

SEQ ID NO: 141262 - DNA, 912 bp, Zea mays
  Clone ID: MRT4577_60311C.1
caaaatttgagtttgagtttgaaagaaggaagctggccagagatgatgttcgagaattaatttacagagagacattggaataccatcctcagatgttgcaggagtttcttggtggtggtgtcaaggcgaactttgtgtacccgagtggggtggatcgtttcaagaggcaattcgttcatctcgaagaaattgctgctaagggtgagaagactagcccacaattgcgacaacatacttccttaccaagagaaagagtaaatgacagcggcgacgaccttgagaaaccaagtgcagattactgcataagattgcatgtatgtgatcaactctcaagctctcgtaactttctgaagagcgaaagcatcagtgcttcccagtgtgtggtcatcaaaccgaagcgagagaaagatgaggagcccatatctgagtatgcgagcagtccagttgatggtgtgccaccgaggattgctcaactcaaaacctgagagccttaaggtacatccaagcaagaaggatctgtgcacatcgacctgttcttgaaccataggggaaaaaatgacatttgggaggtgcccaactattccagatacgtttccaatgctcaaaactagtagctctatatagcggcgcatcataagccgatttagaagaatagcagccggaactagggggaacatggcaaggctgattctatgatctttaaggttcagtagccaagagcgatacatcaagaggataaatagtcttggtaacctttaataaaagcttccttttttgaaaaaaggttcagtaggcagaattgctttctgatgattgtattgtgttgtaatggttccctttatctttctcccatggagctagatatatttgactcttgctccagaaatttttttttgtcggatggaattccaa

SEQ ID NO: 141263 - DNA, 365 bp, Zea mays
  Clone ID: MRT4577_60312C.1
gcacggaaaacggctcgaggccgcaagaccggcggcgttcgctcatccaccaacggccaccggcactacaacctggtgccgaccacgaacgcggccggcgcgggggacgcggagcgcgcgagcgcgaaggcgcagggcaccggggagagggccgcccacgacgcggaactggggccagaactggcagcccagcgccatcctcgacggccaggcgctctacctccgcagaaccggcagcgaccgccgcacctacacctcctggaacgccgccccgcgggactggcgctccggccagacccccaagggcaagaacctcagggaccgactgagagcccaagccgccagcggcgcggcgagaagaaacc

SEQ ID NO: 141264 - DNA, 449 bp, Zea mays
  Clone ID: MRT4577_60313C.1
aatccggaacaacggtctccttcccctggtcgggggttcagcggggcttctaaacttgggcggtcgacgccgggggggggcggggggccggggagagccccgggcgcgcgtgcttgggttcgctccttaaccccccgggggggggtcaagggtaccccccctttcacccgccggggggggggttgtttttgggggtgttcttgggggggcagtggccgtcggggttgcccatgttgttggagacgaggaaaacgatgcaaacaagggggacccgctttcagttccggtgggaggggggcacccccccggccttgcacgattggcaggtgtggcaaagcgcccgggcgtttgttgttccaggttttggaggccgggtcccttgggttggggggcaccggggtccatttcgggccggcgaccttggggtttccccagttgggggggggttt

SEQ ID NO: 141265 - DNA, 244 bp, Zea mays
  Clone ID: MRT4577_60314C.1
gcgcatgaattttatatatcgggcctgtcttaattcattcagctgcaacagatccaccaccttcatgaataaattaaaatatgggatgggcaaacttcactcggaatgcccgaacatatatcattccacccaggccccagcgccgccaaaccaggtcatgttcgtatataattcaaagggggaatacattcagtatttttcttgtgcagggcatttccacaaagcgttactactgcttttgctt

SEQ ID NO: 141266 - DNA, 3307 bp, Zea mays
  unsure (1)..(3307): unsure at all n locations
  Clone ID: MRT4577_60315C.1
cattgggtacctcgaggccggccgggatataaattagagaagcaatccggacgcgcgactctctctctcacttgctgcctcatccccgcccaccgtgccgccgcaacaaaaaagcgctgccgcccctcccctatcgtcgcgctcgccgcctctccttgcgcctcccaggtcgccgccgcgcgtgaagacggctcactcgagctctggctcgtctcccaggctccgtcggctagcacaaccagctcatatgcttcccatagccctgttgtgtcctacgaggagtctaaggattgtctctggcctgatcgggtgtttgcttgggtgcagactatacaggggaacgacgagtcgagggtcacatcactggtgtgggggcagagaggaggtgaagcgaccgggcggctgctctcgtccagcgttgatggattgttctagatactgttggaattccaatctggcaaatggcaatggagccttcagttgatgctaaaaatactgaaaataatagctcagagtttgctgtcaatggccatccagaccaaaatgactccagcgattctgacttaagtaacattgatgatggtgacaactctgaggatgaagatggttctaccgacacaatatcttcatatcatgtgaatgatttccagcgactggctcttgcgtgtgatgatggttctgtacgattgtataatgtgcctgaatcaggtgcattgacttactataggtctcttccaagagtgagcgtatctgngattctcgtcccagtcgacgaaaacgaacagcccctcgctttagattgccgcaagttcccccattcctggagatcgccggcccctcgctcggctcggccatgtcggccggctccacggcgtccctcctcgcggccgtcatctgccttgccctcgccgtgcttgctcccgtcgttcctggagatggtgccacattggaatcagttccagaccttgtgaaggcaatgtacctaaacgttgaaagcttcccttgtgtgaggctgttgaatctttctggtgaaattggctgttctaatcctggaagtgagaaggtcattgcaccaattgtaagacttagaaaaggcagtgatcaattggttcaaccatctactattctcctatccgtagatctgatgtcagatgtcattctgtgattgcaccatttgccagaatttgacaaggcagtggtaaatgtgttcaaccatctaaaatgcttcattactgagatcagatgtcagactccttacagaagatttccacaaaaccatttcgcaccctactcatgtcagggctattattggaatcctgatggtgcagataacatcttacaagagttgacttctgctataaaattactttaagaagagagtgcaaacactccaaaaaagatttcagaaaaaaatgagaagactggcaatggatataaagcaaatgttgcagaattcgaccttgttatgcagacaaccaaagctcaaacacatgattcagcatcctgcctcaaagaacaatcatgcttgcccttaggtggacacagtgtatggacttcattaccgccacttaataacggatctacagagcatccgaaacctttaatattggctattgcgtctcaagactctgcatcattttttcgggaccgtagtcttggttcagattctcccatatctggattgattgctttgctcactgctgttgatgctctttctcacattcatggtctaagcaagcttaagaaacagcttgtgttcgctgtttttaatggtgaggcctggggttatcttggtagtcggaaattcttacaggaattagatgaaggcgctgcttctgtgaatggaattagtagcttaaagattgaccaggtactggagattggttctgttggcaaggctatacttgaggaatatccatcattttatgtgcatgctgaagggaatccatcagcttcaaaggaaatattagatgcactgcaaagtgccagcaagtctcttggttctgataatgttaaagtaaaacaagcagcttcatcaaatcctggtgttccaccatcttcattaatgtcattcataaggaagaacatgtcaacttctggagttgtgttggaggattttgattcccacttctccaatagattttatcatagctatctggataactctgtaaacatcaattcctcgtcaatagctgcagccgctgctttggttgcgaggtcgatgtatattcttgctagtgatgactcagttgttgaccttataacactaaacactataaaagtgaacgtttcattggtcgaagaacttattggatgcctgcttacttgcaatcctggtctttcgtgcggccttgtgaaaagattcatttctccaagcaatccctgcccaagtcattatgttggtgtttttctggatgacccatctggcacgcagcttccttcatatgcagatgacacgtctcggtttgtatggaactttttggcagacagaactaattcagcaggcaataaaagctcatgtactggaaagtgtggtgatgaaggtgaagtatgtgtaggggcagaggtggagggtggaggtagatgtgttgtatctacaaccaggtatgttcctgcttattcaactcgggtgaagtttgaggacaatgcatggcacgttcttccagcgaactcgtcagatccaatgggtgctgcagatcccgtgtggactgaaagcttctggaacactattggcctcagggtctacgccgtgcaagatccagcttacgattggcttattcttcttgccgggctcggaatcactgctgcatcttattgcgctgtacactttggcagagcatacatttcaaaggtggcgaagcttgactgaagcgtcagtgagctgccccactgataatgggtatctagagctggaaatagaactaattaggctggcaattcgtagaacattagcagcgcatgagacagggtgattaagctgcgagaaagccgcaataaattatgagaaccaagcacacccgaagcaagtcctccatcattatgcggacgtccaggtcgatgtaatattaatgaaattgtgaccgtgttacgttttgtgttgaactggtactggtaggtaggttatgacacgcctctagctctagttggtggatgtttccggtaacgtgtttttctgtttgtggatcctgcctactcagttttggttgcgtataagcctgcccctcatgaatcctatgagctcgtgaacaccaactattatactggtactcttattcgcaaaaaaaaaaaaaaaaaaaaaaaaaaaaag

SEQ ID NO: 141267 - DNA, 519 bp, Zea mays
  Clone ID: MRT4577_60316C.1
acctcataaagctgtgacactagatgcatcattgattcgcgctgctcgcgcgcatctagctatgagcaagaaggatgccggctggacaaggcatgcgatctaggtccggcgagctgctctggcgcgacactccagggagaaggagtagatcgcggtcttcagctaccatcagctacgacggataaaggcgactaggacgaaggaacggggaaggcaggaggagactcaggtcgatgtggagcaccccctatcagaagaggcagcgtgagggtaagcggagcagagagaagcaccctgacagaattgcagagattgctgagaaaggtgagaggagtgacgttccggatctcggcaagaagaaagaccggggcgctgctgatctgacgagtggacaatccgcggatgaagctacgaagagaatcgaggtcagtgctgggaaagctatcttcatcgttgtgaagaacacccttcgaccagactgctgctctgatgtcttctatctgtgaaggggacgaggat

SEQ ID NO: 141268 - DNA, 138 bp, Zea mays
  unsure (1)..(138): unsure at all n locations
  Clone ID: MRT4577_60317C.1
tcgttgaccacctttttcttaaccggctccggcatcaacccgatcaggagccttggcgccggggnnaccttctacaaggacaagccctgtttcaaccacttcatcttctgggtggacccccttgtgggcgctgacatc

SEQ ID NO: 141269 - DNA, 238 bp, Zea mays
  Clone ID: MRT4577_60318C.1
ttctcgtcgcgttcgcggcctacttggctgcaaagatgctctactaatgtgtttagtgttacgttacgtacgataggtgcccagatcttataagcacgaatgctaccatctgttaggagatagtatctctatggtgcatgatgcatcttgattgtagctgtatcggaatttcaaatatttcttagggcatgtttgtttcgttggaactgaattttattttaataattataatttattc

SEQ ID NO: 141270 - DNA, 399 bp, Zea mays
  Clone ID: MRT4577_60319C.1
gtcgtgcgcgcgcgccgccatctccgggcacgggaaggtgcccagccagatgcgcgacttcttgcggggctccctgatctccgacacccatttgccccacgcgcgcatgcggacgccgcggtacgccggggcggagctggagctggacccgccgtcgtctgagcgcggacgtttcttgccgccgcccgatgcggcggcggcggcggcggagggcgccgcgcgcgggctggtggacgtggagggtccggacgagcaggaggacgtgcacgaggtgtcggagctcggctcgctcattgccatatacactactatacgacaccgagctggaggctggagcagtcgatcgggtatgtgtgtatgatgatcgagcaagagatggagacagcccgggaattccgg

SEQ ID NO: 141271 - DNA, 315 bp, Zea mays
  Clone ID: MRT4577_6031C.1
ctaatacagagtgaccgtgcagtctggtcatttgtcgagaggaagcatataagcgaattggccagtattaaacagcattgtgaatatacccgttatgcagtgttacctgtctcctggcacatgttgaagtattcgcgaaacaatgaccaataacatttatgtgctcagataccaatagcatgtactcatgtttcttaattcatactctagcaacggtgcatatgtgcaagctagatgttgcatcttggctggattgtactagttacgtcggtatgcctgagtcatatttggtgtcgacctgcagttgatttgagt

SEQ ID NO: 141272 - DNA, 470 bp, Zea mays
  unsure (1)..(470): unsure at all n locations
  Clone ID: MRT4577_60320C.1
gccgccctttttttttttttntttggtggtaatttaatttcacatagcattaaggcccataatatttcatatggtggtaatttggcttttggccctgtgccagctgctggcttttacatatacatacatatacattatataatgcagcaccgttgctacatgtgtgtgtatatagtaagaatcaggattcaggaaccctcgatcgatcacacaatcgggtatgcgaggtcgagcgcgatgccgcagagtcccccttgcctgacgtctttgcgcatccttaggtagccgcgctcgccccaggtctgtccccacgagtctctccccgagccagtacttgacccccgacgacgagacggcgccgtagcccacgacggtgatggcgtggttcatccgcgtcccgcactgccccgaccacacgccaccgctgtagaaccgcaggctgccgcccatctcgatggccagcgaccacg

SEQ ID NO: 141273 - DNA, 282 bp, Zea mays
  unsure (1)..(282): unsure at all n locations
  Clone ID: MRT4577_60321C.1
tgcgttcctcggtacagtttgcaccatactgggtcgcaatgacatttatgagaaaggcacgggggagaaatgatcttgtncaaaaaaaaaaaaaaaaaaaaaaaaaaaaaaaaaaaaaaaaaaaaaaaaaaaaaaaaaaaaaaaaaaaaaaaaaaaaaaaaaaaaaaaaaaaaaaaaaaaaaaaataaaaaaaaaaaaaaaaaaaaataatggggaaatatttttaatatgtntaatgatttcaattaagtaccaaaaactaagctttgtatggacaagttg

SEQ ID NO: 141274 - DNA, 580 bp, Zea mays
  Clone ID: MRT4577_60322C.1
attgggtacctcgaggccggccgggaactccatacatttatctgataccctactgcctgtaataacccctactcgtagtcttgtagattcatgatggggagccgatggcatcccatgcgcgcaagaagtcatctgacgttgacgccgcagaggagcagcccgacgccccatggtacaaggcccctgctcgcactaagccaaacgctgactagcatttccttgcccgaaaatccttcgcgaagccaaggcgatagttcaccaacaacggtcgataacaaggcccacaagagcgtgacagaaaacaatatctacatcttcaagtggccacaaactggtgcacccagacatcaccatcacctccactgccatgaccattatgaactcatccgtcaacgacatcactgagaaacttgccggagaggggcgcaagttctcccgctaaagcaagaagaccaccatcaccaaccgacagatccatacctcgggccgtctcgtgccacccggctatatccacaagcacaccgtgtcgtaggagaccaatgccgtcaccaagttaagctagatctaatctcctttatag

SEQ ID NO: 141275 - DNA, 525 bp, Zea mays
  Clone ID: MRT4577_60323C.1
gttagatggaggtttgcttggcgtagcgttcagttttggcctttcggggcagcactgtccccgccgcgcacgcgcactagagtcagtcccagctctcccaacctccacccgaaacctcgccatggccgcgccgtgcggccgcggcgcgctgcggctcgtgctcatcgccgtctccgcggccttcctcacctacaacgtgctcctctcctcccgctccctcctgcccctccccaccgcctccttcccggccgccaccaccgcctcctcctcctcgtcccgccgcctcgccgccggcggcaccggcgggcggaggctgttccacaccgcggtgaccgcgtcggggtccgtgtacaacacgtggcagtgccgcgtcatgtaccactggttcaagcaggcgcggcggcaggcgggcggcgccgacatgggtggcttcaccaggatcctgcactccgggaagcccgacgagttcgtccacgagatccccaccttcgtcgccgacccgctccccgacggggcggatcaggg

SEQ ID NO: 141276 - DNA, 384 bp, Zea mays
  Clone ID: MRT4577_60324C.1
cgactagttggagttgccgcagccgctgcagccgcatttctcctgcacgaggttgcgcctgccgccgctgtcgcacttgaagctggagcagcaggtggtcgtcacgcatgtcccagggctcgacctggagcagcaccggcactgcaggcagctgggcgaccccgccattattggtggcggcggcgccggagatcgccaccgccagctgcttcgccggcatctgcaccggcaccatgtcgtccaacgcggaacctcgaactattggggtgggcaagaggaggaggacgacggcgacgagggaggcgggcatcttgaagctaagcgccatggctggtggtcggtccttctcaaagacaaaggagaagatgtcactcgatcgatcgg

SEQ ID NO: 141277 - DNA, 425 bp, Zea mays
  unsure (1)..(425): unsure at all n locations
  Clone ID: MRT4577_60325C.1
ctgaaaatgaactttctaatttctggggaggccgccaacctcaaacataaaccttaatttttgatctttaactcttaaaaattctaaaagagggcccccccaacgatggtgatngggtagaaggctgatcggtttggcaaatcaagtagcttgaagggcaactttcgtcgcaggtgaaaaagggagcaagcgtcaggcgcagcgcgctggtagaacggaaacaactgcggttgtgtcatgaaggtagaaggcctcacaccacctagctggctgattggtaatagttgttgctgctgtatataagccagagacttcaaagctgacagctggttgaagggaaaatatagcagggggtaggcagcagatagctggctgattggtagatggtgntgctgcaaataagaagcagatttcaatgcagctag

SEQ ID NO: 141278 - DNA, 566 bp, Zea mays
  unsure (1)..(566): unsure at all n locations
  Clone ID: MRT4577_60326C.1
ccncgtctgttgccggaataagaacgcacgaagacgtccacactccatgtcgacactgctgcccccgcaccccttccccccgtgtgcgtaccacacacacccgtcgcaggggctcgcactggccggaggtccacgcccaccccctcagagatttctccctacccgatgagctggtggcggcggcgcggagaggagtccacggagtatgccgcgcgagggttgctgcaagagctcaatgccgagcgggcctccatggagatgacagccagatccgaccattgagtccctcaacgccgctgcttactccattcccgcggtgacctgctccccctcaggctcgatggtgctgccatcagcttactcctctctgtcacctgtagatagcgtgtgggtttgattcctgacgttttcttgcaaattcgggggcgatttggggcccctggatggcgaggatttgagagtaacaagtggaggtggaattctaatctaggggccccgtagtgctatgtgcaataaggaagcttttcttttgagtcatcctgcaaggagaccacgctccactccac

SEQ ID NO: 141279 - DNA, 263 bp, Zea mays
  Clone ID: MRT4577_60327C.1
ggggagacccaagcgagacggacacgcgaacggaaggaggcatttgccgagaagcacggcggagtgggaggcgggcggggcaggcgacaggggtagccacgccgtgctacagctgatcaccgcgggcggccgcggcggcgacgacgatagcctcgccaactcctcagagctcgagatccgccgcctgcgctcgcttgcgggggaacacgctaaaaacctcgcgatccataagggggatatccgggacacagatggattgaaaa

SEQ ID NO: 141280 - DNA, 243 bp, Zea mays
  unsure (1)..(243): unsure at all n locations
  Clone ID: MRT4577_60328C.1
ctcgaggatcagttgatttacacctancagcaacttgcagacgctaaccactcgaggatcagttgatttacacctancagcaacttgcagacgctaaccaaatgtcgacatcgagggaggagaggagcctgcctccagcttggacaatgctggctcagggagaccaccttcccctgagtcgagcgttgcctcgtttgctcactacgtcgcagggatccagttagaagtttgtgatggtagaac

SEQ ID NO: 141281 - DNA, 269 bp, Zea mays
  Clone ID: MRT4577_60329C.1
taggtctcgttccagatcatattctccagctcataacagagaaagtaaccacccaagagtatatcagaatcgggatttccgaggtcacaacagaggctatagaaggccctaatatttccgtgggcgtaacagaggcttttatccatggggccaatataaccgaggaggctatggaaactaccgctcaaattggcagaattaccggcaagcatacagtcctcgtcgaggccgttcaagatcccggtccccaaagagaaggtccccttcac

SEQ ID NO: 141282 - DNA, 267 bp, Zea mays
  Clone ID: MRT4577_6032C.1
ggggcgcccgaagaaaattctgagagttttggaggcaatgttttgctcccttttttacaaattataaaacggttggggttttatagaaatatgggtgtttttttggatccaaacataaaggctttttaaaagcctcccaaaagtttttttttttgaaaagataaaaccgtgtttacttggaacctgggttgttttaacaaaaagagcttgcccgtgttgttttttcctcagaattttttttttctttgggaaggttggacccaaact

SEQ ID NO: 141283 - DNA, 348 bp, Zea mays
  Clone ID: MRT4577_60330C.1
atggggagcgcccgcgttgccttcgtctcgttgtgggaggagcgcaacctcgtggaggttggcagcccggctgcatcccctcaccaatggtcacccaagacggtgaccaccagttcgatggtggggagaagcaagccgggctgcggcctccgccccgccctcagcttcaaggatcttcatcatccttgctggggcggagggcgagctgagtcggagctctacctcccgtacgggccggcaggccacctcctccttcaacattcaggggagagggcgctcactggcctagcggagggggcgggcttcgacaacgcggggccgattggccgcaagcgtcgtcagctctag

SEQ ID NO: 141284 - DNA, 310 bp, Zea mays
  Clone ID: MRT4577_60331C.1
actacatgttctttctttagaaaaagagataggccaggtccggtcacagttgttgtattcgcccgtttctccatgtcagtagtattttacagcaactcaactcaaaaaaaaaaaaaactggaatctacagggctgagagcaaaaggtggattgtaactaggcccacttggccagcatggacatgaggccggcgcctacgagcatggaggcgttgatgccaatctgcattttgccccggctctgcaccctagggttcatgaagtcctcggcgagcaggttcaccagcgccatgtacaccaggatccccgcc

SEQ ID NO: 141285 - DNA, 265 bp, Zea mays
  Clone ID: MRT4577_60332C.1
aaagggaaaagcggggcggggccgcacgcgtccacacacgcttccaaaagtggctcttttatggttctgtagatgtgcacattggcggcaatctgtccaccgagggtggcgcgcaccaaagcgtttatgacacacttgtgaaggtggttgatattgttgacacattccgtctacagtgccaacctccttttgacaggaaattatttgtgtattacataaaaaaatacatcaagaatctcactgctgcgttgtaccctgagaaagc

SEQ ID NO: 141286 - DNA, 325 bp, Zea mays
  Clone ID: MRT4577_60333C.1
aaaaacaaagggatttttttcccatttattttccggggcaccaaaccatcccttaaggggtaagcccccaatacagaccgccttttttccaaggcaaatcctccagggaaaaaaaggagctgtgtttagcgtttttcaagatcatgtgcaagggctttagtttgggcttcgagctgcactgacggttttacttgggaagggcttttaactgtaaagggcccttcccaggggagggattttggctttcgatgcccctgagcttgtttcaccattctttttttcactgcctttgggctagggttttttaaaggcccttaaaaatttt

SEQ ID NO: 141287 - DNA, 443 bp, Zea mays
  Clone ID: MRT4577_60334C.1
gtctacctcaggatgcgaatcatcagcggcgagcgacaagaggcatcccgacctcggcgtcgggctaagcctggtgttcctgctggccaagacgtccgacgagttcaacaagatggccaaggtgcgcgcggagatggaggcgctcctgagagagttaaaagacggggttaggaccaagagcggcggcaccgagggccacggcgcgccgaaagaccgcaaccgcgagtccaccacgtcgagctgcgtcaccgacggcaacgaccagaccgcaagcgctcgcctggagtaccagctcgcctcgtcttgcgtggagccggcgggctacgagaggtcgtccgaggatgacggaggctgttgtgcgaggatggagttggacgtgcttgaggagggttccacgccgagctggagctgcttcaaggtaactatgagtcaaggacaccatc

SEQ ID NO: 141288 - DNA, 1874 bp, Zea mays
  Clone ID: MRT4577_60335C.1
gccggtagaagttcccttgtacattatcagtcattagatacgcaccaccattcacgcttggttaaacaaaaaagcaagtgtttgtgtttgcgaagagaattaaagggaggccggcacaaaagcttccccgacgatgacgagggggcattggcgtcggtccttctttgggtcacctttggtgccaagatgacgccatagtccttgatatagtagtcgtcgaacgtgcaccacatggggaagttgaaaacattattcaaacaaaagaaattgcatgcaaggctcttctttaaatactactcccttcatccaaaaatataattcaagaatctcggtgatatttatctaatactacgcattgtgcaagggtagtaggtgggcttggagagagatatcgatgtagtagatgtgttttctattatagatgtagacacatgtggtgtagtggtagctattggtagtatttgtttgagaggtcgtgggttcaaatccctttggggtcatgtttatttttttaatttagctaggcgttggctgtacgagggaataagaatgggaacatgagaatggcctgtgtggaatggccgactactattgcagccttataagtagtagagatttctaaatggttttgtgaaagcacgaacgccattgcagtgcaggcgatgcaagccaggaacgggccacggacacgccagtacgcgcactttggtcgtcgtctccgatcctcgcattggagggtccttctagaagaccaccatgcctgtggattttttccaacctcaccatccctgcttcccgcctaccttcccaatgcaagaccccgacactgctgcgctgcattcccctacgttacatatatggacaatggggatgcgagggccacgccaccatcgtccccgacaccgttctcactctgctagctgtctgcctgcctgcatccgatggacgcgggccggggcagcagcgccaccatcttcccggtgccgcaggtcccggcgctagctctgctcttccccccgccgccgccggcggcggcggcattgccatcttcttccctctccctttcctcctcctcctcctcgcgccacgcgccatccatcaccagcttcccgatcctcgtgctcacggtgctgggcatcctcgccgcctgcgtcctcatccttgcctactacgtcttcgtcatccgctgctgcctcacctggcaccgcgaccgtagcgcgtccgacgccgtctcccgccgcccccagcgcgcccgcgcccgcgtccgcaccagcactggcggcaccccggcctccagcgccgagccgcgcggcctcgaggacgccgtcatccgggcgctgccggcgttcacttacaggaagaagcccgccgacttaccgccgtccgcacccgcgcccgcgagcgagtgcgcggtgtgcctcggcgagttcgaggagggagacagcgtgaggatgctgcccgcctgcctccacgtcttccacgtcggctgcgtcgacgcctggctccagggcaacgccagctgcccgctctgcagggccagggcggacgtcgatgccgccagctgctgccgcctgctcccgccgccgccacccgaggaggaggaggacgtagcggccatccaggtcgtcgtcgtcgtccccggcgcagaggaagacgaccgccaaggcacggtgccacagcggcagcgagaaaccaccgtggctcctgctgctgctgccgaggttgaaggagaagatcctcctcaggtcggtggtgaaaaggagaggaggaaggatggagatgttgcaccgaggacgaggtccttctccacggacggtgacggtggcgaggaggttcagagcatcttgcagaggaacggacagggactcccgtag

SEQ ID NO: 141289 - DNA, 282 bp, Zea mays
  Clone ID: MRT4577_60336C.1
caggcccctaaattgaagaccactttggtagcagaactgtagggactggtgagtcaactcacagattctgcagcagctgctccacccacaataaagcacacgccgacaggctagaccccagattgcaggggctgccacctacaaggtgggaccacaggctgcctcaccgggattgtctgccactaaatagctggagtcacagattgagataaatgccaccttcaaggttgcagtgaaaagcataatcctatgtgatgaatttatatgtgttattttttaaaa

SEQ ID NO: 141290 - DNA, 218 bp, Zea mays
  Clone ID: MRT4577_60337C.1
ttttatattacgcttgctattgtgtggtcgtggaatcgatttgttgatctgaccatttaagatctttagggatatgcttatatagtcgcctaccctggcatacccacggtgttctatgatcacttgtatgaccatggggggcctctacatgccgatattggtacactgctgcgagtcagaaagtgccgagatatacatagtcgatgatcagttctcaa

SEQ ID NO: 141291 - DNA, 405 bp, Zea mays
  Clone ID: MRT4577_60338C.1
aagaacacgctgtaacgcggttaccatttctcaagatcagacaaaacatgggtcaagaccaacacgtcctgtacaaaaactagccctgcggggggggggggggctcccgttattcgacttgctgcacgggtccaattcagttcatcacctacacgcatgcattggggcgcacgccactcacgagcgcggggcccatgcgcccacacttttacgactcgtcaccaaccaaccaaaccaagccacccagcgggtccagtccaggttgctgcgctcgaagtgggagtagccctgccccttgagcccgccccaggcgggcgggttcgagatccccaccccgttgccgtccgcgggggcccgctcccgcgtggcgttcgcgtccggcccccggtgtttccggtccggttc

SEQ ID NO: 141292 - DNA, 740 bp, Zea mays
  unsure (1)..(740): unsure at all n locations
  Clone ID: MRT4577_60339C.1
cagccgcatgccacgcaggccctatgacgcccgccatcctcatccaggagggcccgcacccccagcgccccttccacccccgcaccgccgtcctgcccctctcccctcccacacccactcccttcctccatctccatgctcggcgccctcaccatctcccctctgcctccgctccacctccctaaccgcctccgacctaaccgcctccccccatagaccgaacgggatcttcgcgtccgacgcgcccatcgacgtggacgccgccatggaggacgagctacgggagaaggaggacggtagccccaggcaactcgaaagaggtagcagctgcactgtctcaggctttaagaaattctttagaaagaatgagcagttcagagatgcacttgcgaagcacagacttctgacaccaacgacaccattagcaaggcagggatccgatgatatgtccttggtgtcatccgtgatataaaccacttcctttagtcatgtgctattcttcactgttattcatgtgtacagttgttcctttccatagtcacagagtgtaggtttctagattttttgcttgtgaagtctacccacgctgcctcgctcttgttctttataatgagatgaaattgtatggtggctttgcgagtgagatgaaatgtatggtggctttgtgagtgaaccattgtggtttaccaagtctatttcanctcnnnnnnnnnnnnnnnnnnnnnnnnnnnnnnnnnnna

SEQ ID NO: 141293 - DNA, 583 bp, Zea mays
  Clone ID: MRT4577_6033C.1
ccggccgggatacttagactattaactaatttgttatagctgtagataggctcatatagctgccacaaggtagctaggcatggatggaggggaacgaggaggacgtccgcctgggcgacaacaatttctcggatggacaggccatcggcacagaggagtggggaacgatcgaccaggactactagggggccgcgaacgacgctggtcttccaatcgggcgagctctgagtacaagatgcctatgtacacagcgccgttgatcggcgagttcgacgtgcacctcttcgtcttccttcgtacatgtccatccacaacggcatgtatgtctccaaccacagctcgagggggatcagcggaggagtccagatcatagactgttactatctgcgaggatgagcttcagcctcagatagtgcaccgaccggtgtctccagagcgtgcatctaccaagcggcgagattcatctctgtctatgagcgaggaaagtatgcctcaccagaagagatgatctacatacatggtgctgtgtgtgggtcacttctgctgcgcggtctgctccatggcactgcatactgagatgaac

SEQ ID NO: 141294 - DNA, 157 bp, Zea mays
  Clone ID: MRT4577_60340C.1
ccacgcgtccgctttacccatttgttttctaaatccattagttgcttctctgtgcattgaaacttatggtgcagcactacatcttatcaattctgtggcatgcatgctattaagtgctaactttttatcatgggtatctaattgttactcttgcagg

SEQ ID NO: 141295 - DNA, 868 bp, Zea mays
  Clone ID: MRT4577_60341C.1
tgtgcggacgctcgaggccggccggttcggggtcctcctacgcggtacgcgcacacagccaaaccatcctcctctccgccgcccgccgcagcagcacccaccgggcaagatgaagacgatcctggcgtcggagacgatggacatcccggagggcgtcacggtcacggtggccgccaagctggtcacggtggagggcccccgcggcaagctcacccgcaacttcaagcacctcaacctcgacttccagctgcaggaggccggccgcaagctcaaggtggacgcctggttcggcacccgccgcaccatggccgccatccgcaccgccatctcccacgtccagaacctcatcaagggggtcaccaagggctaccgctacaagatgaggttcgtctacgcccacttccccatcaacgcctccatcaccaacagcaacaccgcaatcgagatcaggaacttcctcggcgagaagaaggtcaggaaggtggacatgcttgatggcgtgaccatcctccggtccgagaaggtcaaggatgagctcatccttgacggaaacgacgtcgagctcgtatctcgctccgccgccctcatcaaccagaaatgccatgtgaagaagaaggatatccgaaagtttttggacggtatctatgtgagcgacaagggcgtcatcgaagaggagcagtgagcgacagagtagccgaaatgccaggagatgaatatgaatgtcgtttgagttgcaattttgtgagactgaatgtgaaccatttttctcattccttaaatagttgactgccggtgttcgtggtttcaaacggaatttagtcttattaactgaatttgcgtatacaaaaaaaaaaaaaaaaaagcggcc

SEQ ID NO: 141296 - DNA, 1054 bp, Zea mays
  unsure (1)..(1054): unsure at all n locations
  Clone ID: MRT4577_60342C.1
gccggccgggtccgggtaacccgtngccttttgcccaaatcacccatccgcaccatccgcgagcaagctccagcgatccagccgcatgccacgcaggccctatgacgcccgccatcctcatccaggagtgcccccacccccagcgccccttccacccccgtaccgccgtcctgcccctctcccctcccacacccactcccttcctccatctccatgctcggcgccctcaccatctcccctctgcctccgctccatccctaaccgcctccgacctaaccgcctccccccatagaccgaacgggatcttcgcgtccgacgcgcccatcgacgtggacgccgccatggaggacgagctacgggagaaggaggacggtgcgtatgtggaacgtctcagatctgccactctatctccggcaacctagttgcttcaaatggtttataggtagccccaggcaactcgaaagaggcagcagctgcactgtctcaggctttaagaaattctttagaaagaatgagcagttcagagatgcacttgcgaagcacagacttctgacaccaacgacaccattagcaaggcagggatccgatgatatgtccttggtgtcatccgtgatataaaccacttcctttagtcatgtgctattcttcactgttattcatgtgtacagttgttcctttccatagtcacagagtgtaggtttctagattttttgcttgtgaagtctacccacgctgcctcgctcttgttctttataatgagatgaaattgtatggtggctttgcgagtgagatgaaatgtatggtggctttgtgagtgaaaaaaaaaaaaaaaaaaaaaaaaaaaaaaaaaaaaaaaaaaaaaaaaaaaaaaaaaaaaaaaaaaaaaaaaaaaaaaaaaaaaaaaaaaaaaaaaaaaaaaaaaaaaaaaaaaaaagggggcggccccttttaaaaaaatcaaattttactaacccgtgattgcaaaagaaaaagtttttttttagggcccccaaaataaaattcacgggccgggttttaaaaacgcgggaattgg

SEQ ID NO: 141297 - DNA, 506 bp, Zea mays
  Clone ID: MRT4577_60343C.1
catgcaccattaaatacataccatttttgagcctttggcgaaaaaacaccttccttcttttcatgcttccgtgagaaggcaatctccgttaaaattattctgatgaatcacatccatgcctcgtgaaaacattcttcgaagctatactccgaagctttgcaacttcgatattgatctgataaagctcgcccatgtttcgtgaaaatattccccgaaactgtattccgaagctatacaatttcaatgtcactttctcaaagcatcctttcgaaggttgagagtgtctccttctcttgccaaatgcgatatgatgtatgatgcttatgctatgcaaaatgatgtgatgatgttatgttatgcatgtgacatttgttccggagatacacataaaatatttccggaagctctgcatttccttgggaacgattttggagcatcttacgcttttacttagacggtatcagcgttgacttttcgctgtaagccttccttcgggagcttcttcg

SEQ ID NO: 141298 - DNA, 317 bp, Zea mays
  unsure (1)..(317): unsure at all n locations
  Clone ID: MRT4577_60344C.1
aagctcggaacagcgagcgcgcccgccctttttttttttttttataaaaaancanatatttttgttcggttttatttaaggggggaaacgcaattttttactctaaccaccgcaaaatacacaccccctccccaagtttttggtcccgtttaacaggggaaatactacatggaaaaaacggccatatccccatggcctttgaactaatagaaaaaaaaaaacctgttcaacgccgcctaaaaaaaactgaattgcttgaaaaatcccccaaaatttcttccggccgtgaaaggattttattaagccggcagggcaaa

SEQ ID NO: 141299 - DNA, 661 bp, Zea mays
  Clone ID: MRT4577_60345C.1
ccgaggaggcccgcgagcccggggccgtcgcgcagccgactctcgctgtcggcgtgcgacctcgggtgcctgatgaaggcgggcgcgtgggagacggccgtcacggaggccgccgcgagcctcagcaaggacagcttctccacgtccaagatctggatggcgtcggccgccgggagagaggaagacggccgccggcccggccagagacgagccgcgtcgttccggtggccggcgatcgcctcgggcgcctgcaagtggcaccgcagggacgaggaacctttcgacgtcgaggcgggaagccccggcggcgacaatgccgtctcgtctctgacagaagagatgccaccgtcggtggctagggcggcgatggtctgggtcgccggcggggggcacgggagccattcgtgatccgcatttggtttgcacgttggttcaagttcaacacactacacacaagattggattttcttcttctttttgtgctcgtctgatttcttgtatgcttttgttttgttttgttttgtttcttagattgcttgctgtagtggccgcaaagcaagcaggaagctgtataaaaaggaaaatacgtgtgtgtaggtctgtaggagttgcattggtctgactcaaacatagcagagtataagagggattcgttctcggt

SEQ ID NO: 141300 - DNA, 976 bp, Zea mays
  unsure (1)..(976): unsure at all n locations
  Clone ID: MRT4577_60346C.1
cggccgcgtgggcggaatcgtgggtttttgcaaactcgcagaacaaggcgaaacaaggccacaccaccagctgaccgccgaacggaacgagcccggcgggcggagagaagggagagagcgcgccagagcggcgccgaacaaccctcgtccaccgcactctcctggaccgtggccatggccatggccgccgcgtcccggtcccgggcgctgtgggcgtcccgcgccgccgcctacctcaggatctccaccttccccagggccttctccaccgtgctgaaggatctgaaatatgctgacactcatgaatgggtgaaggttgagggcgattcagcaaccgtggggattactgaccatgcccaggatcatttgggtgatgttgtctacgtggaactgccagaagttggcgtcagtgtatcccaggggaagaacttcggtgctgtcgagagcgtgaaggcgaccagcgatatcaattcgccagtgtccggagaggtggttgaggtgaaccggaagctaagcgaggagcctggagtggtgaacgcaagtccatacgagaagggatggattatgaaggtcaagctcagcaattcaggtgagctcaattcgctcatggatgatgacaagtactcgaaatactgcgaagaaggcaaccattgaagaaatcggagtgtcttctgaggaccaggacctgtttttcaagctttatcaattatcactggtctccagaccataaccagtgataattgataaagcttgaaaaacaggttatggtctggagaccagttgtgacaaattggcaaggttcatcgcaaggaataaatgttaggatttgccaatcctacgagggcatgggaaatccaagtttgtgttgtcaatgacgtggtcatatttgatatttctttgtagttgtaatctcgtgaattccttctttttcttaaaaaggactctttttgattcanaaaaaaaaaaaaaaagaacg

SEQ ID NO: 141301 - DNA, 891 bp, Zea mays
  Clone ID: MRT4577_60347C.1
ggggcattggttacctcgaggccggccggggctcgggccgggcgggggaacaaggccacaccaccagctgaccgccgaacggaacgagcccggcgggcggaagggagagagcgcgccagagcggcgccgaacaaccctcgtccaccgcactctcctggaccgtggccatggccatggccgccgcgtcccggtcccgggcgctgtgggcgtcccgcgccgccgcctacctcaggatctccaccttccccagggccttctccaccgtgctgaaggatctgaaatatgctgacactcatgaatgggtgaaggttgagggcgattcagcaaccgtggggattactgaccatgcccaggatcatttgggtgatgttgtctacgtggagctgccagaagttggcgtcagtgtatcccaggggaagaacttcggtgctgtcgagagcgtgaaggcgaccagtgatatcaattcaccagtgtccggagaggtggttcaggtgaacgggaagctaagcgaggagcctgggttggtgaacgcaagcccgtacgagaaggggtggattatcaaggtcaagctcagcgattcaggcgagctcagttcgctcatggatggtgacaagtactcgaaattctgcgaggaagaagacggtcattgaagaaatcagagggtcttctgaacaccaaggacctgtgtctcaagctctatcactgttttctggtctggagacctgctgtgacaaatttaaattggcaaggttcattgcatgaaataaattagttaggatttgccctattctaccagggcttggtaaatccgagcttgtgttgtgagtggcgtggtcaagtttgattatctctttttagttggaatctcgtgatttccttcttttttaaaaa

SEQ ID NO: 141302 - DNA, 323 bp, Zea mays
  unsure (1)..(323): unsure at all n locations
  Clone ID: MRT4577_60348C.1
gaccattagctctttctactccagagcgcagaagaacccgatcgacaccgtgagggcgttgtacagggcccaagctctcctgcctctcgatgcgagcgccacctncacgcatacaagcggcagatgcagctgacagccaccggcgtcagaacatctacagtcggcaagcatttgccacctccagttcacctgccacctacggagcatctcttaccgccggtgcacctgacgccaacaggccacctgccaccgccggtccaagcaccggcgcagatagcacagcaactgacagccatgtgcgggctgcagcataagactccatg

SEQ ID NO: 141303 - DNA, 320 bp, Zea mays
  Clone ID: MRT4577_60349C.1
gctactttcaaccacacggggacgaggggcattaactgcgccagggcacctcaacatctggttctcttcaacaacgtggcggccagcgccgacggcggcggcggtgcacccagcgcggaactactactccatcccgaagcgggagcccttcaggtgcaggcggatcatcctgcaggagttcttcaagcaggacaagcacctgatgcagtgcacctaggaccacatcacacattattggtcggtcatggaaggcgatgagtgcatgcacctgagcgacgacttacttagaactgaatagaacggacctagagctgcccaaa

SEQ ID NO: 141304 - DNA, 763 bp, Zea mays
  Clone ID: MRT4577_6034C.1
tctcagaggagggcgagacaactgattcctccaagccaacccagccgatggtgaactctgtcactgtgtcttccaggcggcctgttgttcttgcagatggcacttacgccacacagagtgctgctactgaagccatttcgactccaccagttactgctggatcattggcatcgactctgaatctcagatcactcattctgtcaggtgatttcttcttggctgcagttgttgcctgtacgcttaccaaattggtattgaggctggaggaggtgcagccatcaaaggctgaagcaaacaaggcttgtactggggccttgctggtcatgacgtccattctgcagctggggctatcctcataccttccccaaccgcttgataatgattcatatgacaggattgtgctttgtgtgcggctgctttgcaatactggtgatgacgtgagaaagatttggctgcagtcatgtaggcagagttttgccaagatgcttgctgagaagcaattcagggagacggaggagatgaaagccaaatcacagatctctcatgcccagccagatgatcttattgatttctaccacctgaagagcagaaggggcatgagccagcttgagttggaagatgaggtccaagatgatttgaaggctgcaactggtggattcagtaaggaaacagatgatgcaaacaggcttaaccgcattcttcagttgactgggttcagtgatcctgtatatgctgaagcgtttgtgacagttcatcattatga

SEQ ID NO: 141305 - DNA, 736 bp, Zea mays
  unsure (1)..(736): unsure at all n locations
  Clone ID: MRT4577_60350C.1
gtgcaacccttgtctattgggatgccacaacatggagtaggcaagcatattatgcttgactgaaccacgtgataaaaattggcgtgtctcttgtgtcatttacttgattgcagtttttatctcttcctcgttctaattcttcacttgtgatattgatctaagtctaaattaaatcttgaaagagcaatcaagtgaaaggaacttctctcttctctctactctcaaacttggttttaattctctctaactcatattttagaccaagtttgtgtggttttagttaagttttgcggaatcacctattcaccctctctctaggtgctctcaagcaccaagagcatggtatgaatgccttaggttcaatctgattgcaaattcatttacagttgggaaagtcgatcctactttattcactaagatgattgatgatgatttatttgtatgcgaaatttatgttgatgacattatatttggttctactaaaaatcatgttgtgaagagtttagtaggattatggtcaacaagattgagatgtcaatgatggaggagnttgaagttctttctaggatttcaaatcaagcaactcaaggacgacagccaaacgatgtacactcaagacatactaaataagtttgggaaaccaatgggcatctcgatcttgatataggaggtaattatgttgatcaaaaggtatatcggtctatgattggttcattactctatttatgtgcatcta

SEQ ID NO: 141306 - DNA, 188 bp, Zea mays
  Clone ID: MRT4577_60351C.1
gatgcagttgcaaaaggaggtggaaggcatccagaacacaataatttttataaaatgagataaaggactgggaaacagtccaagatagctgtctagagcaataatacgcctcccctaattggagtgatagtattcattagatttattaatatccactgaaatacaaaatgaaataagaaacacatttt

SEQ ID NO: 141307 - DNA, 316 bp, Zea mays
  Clone ID: MRT4577_60352C.1
aaaaaaaaaaatggttttggcgggtgggattgtcccccggacacccacttaatttttttatttttgccggggtttggtttttaaaacaaagggaattttccggaaaacacgggggttcaataaaggggcaacgacgaggtcgctcaaataaaataactgtttaacaggtaggggggcttttttggctgaagccgggagaagccacacacataaatcccctttttaaaaaaccccgccgcccctttccaaaggggtaacccagagcccccttgcggggggttaaggaaggtttgttttatattccccttaccatttt

SEQ ID NO: 141308 - DNA, 206 bp, Zea mays
  Clone ID: MRT4577_60353C.1
ccggccaccacctttctgtgcatgcgccatcggccgcctttaccgttcgccgtcgaacggccgatgccaaagcaagccgccgccccagacgtgcgtacaccgacgcggcaggcgacacgcgagcgccggtcgccccgccgcgccggtggcgaccacacaccacacgtacgcaccgcaagaagtctgcaacgtgcatgtcggcggcc

SEQ ID NO: 141309 - DNA, 417 bp, Zea mays
  Clone ID: MRT4577_60354C.1
gccggccgggccgtgcataacccatactttgccattgatgatgaggaagaggaggctgcagctgaggcgctaaagttggatgatgaattcgagctatgattgaggggttaggaattggcatctcctccatgccagtggtgatattggtgttgtatgtcccagcagaggacaagtggcatagactggtacctagttcatatccttttgtttctccttttgagttggttacattttatcttaatgtaattgggtagtgacaacaaccctgtgtctgttaagcaatgcagcttggctttgccttaaattttatacacaaccattgagatgaggtgtttccattctagatgttcattttgttcacatagttaaaactgaccgtatgatactgaatgcaaaaaaaaaaaaaaaaggccccta

SEQ ID NO: 141310 - DNA, 128 bp, Zea mays
  Clone ID: MRT4577_60355C.1
ctgtttttataagttgcatgaacacagcaaacccaacaagggctatggtcatcctggttaattgcaatcaaagccctttgatggtttgctgaacttataagttgcatgaacacaacttctgtttggtt

SEQ ID NO: 141311 - DNA, 360 bp, Zea mays
  Clone ID: MRT4577_60356C.1
cccacgcgtccgaccacgcgtacgcccacgcgtccggccacgcgttcgcaaatccccccttggccttgcgagggggctgaggggaggtggtacgtggtagtggtagtggtagggtatacaggagtgctctgcccatggagaaggcggggcaacaacgccatgtcatcggcaggcagcaggcaagaaggcgcccgcgctggggctgcagaagcagaactcggggtcgacgtgacatcgagcgcgacgaggcttgggagcgccggcgcagggagcatgcgcagcgggggcacagcgctgctgcgcgctcgcagcgtcacggacgacgaccttgacgagcttcgaggatgcatcgaactgggc

SEQ ID NO: 141312 - DNA, 475 bp, Zea mays
  Clone ID: MRT4577_60357C.1
ttttctcctaccctagccgtgaccagccccatcccgtacctctccccacgccatcttgtccctgccgattctctctcacagcacatgccaccccataccctattcttacccatgaccgagacctcacctcccttgatgctagacgcccctcacgtgcagggagaagcagctctagctccctctgccatgatgttgctggccgcatggacaggctcaaatacctctcgtgtccatggacaccagcagtaggaggtgcctgaaccttacgctccggttactgacgaggatgaagaaatggatcgtcaggctcttcatggcaagaacagacatgagaggatagcagtacatgaaccttcaaatattgtgatagcgagggagatcatgcagtgcttgaataaccagcagaggctaaatgacgaggctatcaataggaatctagatcttctgagagaaagggaactaagagaacctcgca

SEQ ID NO: 141313 - DNA, 569 bp, Zea mays
  Clone ID: MRT4577_60358C.1
ggcgggcgggtcacctatccagagaatgcgatctcctttcacccagctccgcgtgtccagctatcacccttctgcgactcctatccgccgaccgccgctgcgcgccgtaactgaacacggtaagaggagaggtctagatcgccaaccaccagacgacactccaacctgcatgaagcggaccggcagatggacagcctcgagaactggatgaagcgtcacgacctgagggccggcgacatcaccatttactcacgcgcacagtacgtttgcacccagcacggtcttagatagtgacgtggactacctacaagcacccgctgtgtgcttttgatgaacatgtgtacccattgccatcaatggctctcaggactgcactcgatggtactgtcctctactctgtgcaaatcatcaaggtggaactaactgaaggtcgacactcttttgccgtgcggaatcacccttggttccagagatgttgatcggtgacttaggcgccctggattgctgccgagaagtgccctgtactgcagagcttcctcgtgctcttgattgttcgagtgagaactgag

SEQ ID NO: 141314 - DNA, 787 bp, Zea mays
  Clone ID: MRT4577_60359C.1
attgggtacctcgaggccggccgggttgctttctgcgccgccgcctccgacattctctacttccacacggaacaactatacggtcggggcgcaacgtagccatggaccctgtatgagatgctaccgtcgccgccggagctactacgcccttgcgctgcccgggcctccccgcttccgcctcctatacctaaagctgcaaatcctaacaccgagccggggactacgacaaccgccgccacttcagagcacagagcggacaccatggacgcggaaacgtggaggaggcgcgccctgaggcagcggatcaacccaaccggtgtggccgaggtggcggccgcctcgttgatccaagacgcgcctggcgctgccgcacgtgacagtgcaagacatcaggtggttcgactgagctgaactccgccgcgccgggttccgcggtgtcgatttcgacaaggacaacacgctcaaggacccctacggacccgcgatctggtcgccgctcgctgaagaatttgaccagggccgtgcgacgctcccatccggtgcggtcgccatctacagcaactccccacgattgaccgcatatgatccggacgatcgagtatgcgaggggcatcgaaacgatcatccaggggggtcatgtgaccaggcacgatataaagaaaccaggcggactagctactgaaatagagagatactttgggtgttcagcctcaaatcatgtgtcggatgttgaccggtacttcactgatgtggactgtggaaacagggatggctttcttacagtcct

SEQ ID NO: 141315 - DNA, 419 bp, Zea mays
  Clone ID: MRT4577_6035C.1
aattcggcacgaggcaacggtgcaaatctgccgtcgtcagaaccgatcgacgttaccatgaaataataacagccatgatgttgatgggaagagggagcgcatcgcgccgccttggtagctgacaccggtgtgcatcggcatcatggacgcggaccaagtgtcgccgtacgccctcctggcggatctgaagcatttcctgccgtcaaacgaggtgatggtgtacgaacgaagaccactatgaggccctggcggcggcggccgccgtctacgcgtacacatgctatgagttccgcaatgtactagttcaaggagcgtcggtgctcgcgcgggcggagccacgattggacggactgcccctacgcgcacccgggggagaaggcccggcggggcgaccccaggcggtaccactactccggcgc

SEQ ID NO: 141316 - DNA, 675 bp, Zea mays
  unsure (1)..(675): unsure at all n locations
  Clone ID: MRT4577_60360C.1
aataaatgtcaccagctatctgtaaggtgtgaaattaagatcgctctccaattttgcatgctagagtgaggtccttatatcaatagctatctgtaatcaaccatacaactacaatatcagtagctatgtttttaggtatgtaaacagacctgaaatttccatgtgatactgataggattttacaacatttgtcaaattttttactgtacttttcatcacaatattatgtcttataattgcaatcttcatctctgttcgaattgaataactaactttaggcaaaaaagataggcaaagtgtggtaactaaggtagtgaaccaaacatgcctttagccacgaaccaaacatgccttaaaagtagtatacagatttgttaacaaataggaggttgttatattatgtcttttttcattgttaaattcatttacacagtgctcttcgtcgtgcagcttatgtacaagttaacaaatttcaattaaaatgaccacaggtggagggcgcactccatttagagatatatccaacaacaggaacatcacaagtaagtttgacgcctatattggtctgaacttagttcatgtgcattatttatctatcatatactacgtaccacacttcaatctaatacaacctccgttcacaaatatatgacatcattgactttnttcgaaaac

SEQ ID NO: 141317 - DNA, 281 bp, Zea mays
  Clone ID: MRT4577_60361C.1
gctgttgttatttcagtgcagggcaaggccaagcaagggggtcgcttagggcggcgcgacgctttaccagacagggctctccacaacatcacaaaagtatcacttaagccgcaaatccacatgccgtcgacaaggaatggccagaaccgacacttcgaccttaactacgaggagaccctaggccagctcacgaacaacatcgagaacgttacacgacacagctacgacctacacggagcactcacaaacccaaaaccgtcaaccttatggaccttcgtgta

SEQ ID NO: 141318 - DNA, 820 bp, Zea mays
  unsure (1)..(820): unsure at all n locations
  Clone ID: MRT4577_60362C.1
cttccacccagacacaggccaggcgggcccattgttgcccaagaccctggaatccggagcaggagtcctctctctctctgactctctcctgagggggaggaggaggaggaggaggcagaggcggaagagcaaccaccaagcagcagagcgcgaggcgacacggggacggagccctggaggtctctcgcgagtccagaggcgatcgacggtgtcgcgattcgtctcccagtaccgactaatctctcgctcccgcttccgcttccgcttcgatcctgtgctgcttgcccactgctgtaatctcgtgcttgcccagtgctctagttcgagcactctcttgcttctcgcttcgcttcgctgcctgccgcgctgcgtcgagagctttcgccttgcaccggcgattgccccgacacgattgcgtccggtttttcttctaggttctgcgtagatagatagataggtatatatttttcgagtccaattacggggtgcttctggcactggtgaggaaggctattagggttgcctgcctgtgtgtgctgaccgtgaacggaagcgaaggtttctcgcgctaatctgccaggacgctttgttctttcctggcccttggtagttagcagggtgtctccaaccattacactgtcaagtctggactctggaagggttaaaatctcatgaaagtaacgacgccaatcgtgccagcactgctacgctacgtgccattgcaccgttctgtgtctctgcgtgaaccaacaatttccatgggtntcggccaaaaattcctgccctccgattatcctggttcttcctactactgaaagca

SEQ ID NO: 141319 - DNA, 365 bp, Zea mays
  unsure (1)..(365): unsure at all n locations
  Clone ID: MRT4577_60363C.1
tactgnngtggtgtnnttgannnnaagatnaggatntangatgttgngatgaagagaaagggtgttgatgattttttttanttgtgtgatttgggatggggagaaggagaatgtntnnagtgaggtttttgaggttgnnngtattgtttgnaataagtaaatgaaaaagtntgtaggaaaggatgntttngantttnggantggaatgaggggtgnttttgngaagnntaagggtanntgtgttagggtggagattggtaaggtnntnntttgtgttttatgnaaggnaaanaatgttgnanatgnnagtgaagttttgggtngtgnnaagttaaagttnnttggnnggtaaaagattattgaga

SEQ ID NO: 141320 - DNA, 415 bp, Zea mays
  Clone ID: MRT4577_60364C.1
agcggcccccccgacgggcacacgccattgttgccctcattccgtcttgtggtttctataaataatctcttttctgattgagattcatctcaatacctttcccctcaacaagacccctcttcctcacttccccggcccccccccacccccactcacggtcggggccggccgagcgccctccccgacaaaggcgcacccttgcgccctcctccgccccccccccacggccgcatgccgcacagtccctccctctcccgcacccgcgcgcccccgcctccacgccccgaccccctcccctgaaggccggcccccccccccttccccccccccccccctcgggctcggccccccccccccccccccgcgccccccgccctcccccgcgccccccccccccgcgcccgccccacccccc

SEQ ID NO: 141321 - DNA, 480 bp, Zea mays
  Clone ID: MRT4577_60365C.1
atggcgcagagactcacccggtccacgtgcgccggcggggttccgaactccggcgagcgcgattgcgcctttccggtggcgggggtccttggttcaagctctggcaagcttcacggcctcctacggaagctacctaggggcttggatcgagcagaggagggcgggaaacgatttggccacagtggttgtcctcgggcggctctggcgggtcgcggagaggtcgctggagctatgggcgagctccggggagttcgacgcggcacaaaggatgcaacggggaagatagccgagcactggggcgggctttatagccatggcgtgggcgtggtcacgggtggccgcgggcgcgcgagggggtgcattagggttttgggcaatttctcccccttctatctgcatggacccatggcccccgaagatgacattgacctccatgtcaatgcgcaggaaggcattgccaccacttccttcctattgtga

SEQ ID NO: 141322 - DNA, 729 bp, Zea mays
  Clone ID: MRT4577_60366C.1
ttcccgctcggccggctctactctccaccggcaccatcgcttcgccgccgccccatcctgccggactgcgtcacctctcgccggccgtcgcaagaggcgcagtaatgctagggcttcccgacgggtcgattttgaccgaggtcgccatggaaggtaagaagcagccgcaaccggcggtggcagactcctccgccacggtatcgaaggtgctcgacgatgacaacctcctcgttgagatccttctccgtgtcagcttccccaacaccctcgttcgtgccgccctggtctgcagacgctggctatgccacgtctccgacaaggccttccttgtccggttccgtaagctgcacccccctcgcctgcttggcttctacatcgacaccgggacggggccccgtttcacgccgttgctgcctctgccaccagagctcgccgccgtcatcgaccgtgcatgcttctgcccggacgcctggcagtgcatacgggctcacgtcctcgactgccggaatggctgcgtcttaactatgctcctagacggccctagattcaaacttggagtgcataccgctttgtgcctgaaagagacatgatgaccgtcctaccatttccaaggtataaccggccggagggcaggttctgcatctggccgtgtctcctctccaaagaacaaggcgacgacttgtcctagttttatgttctgatcgagtcttcagaggagaccactaaggt

SEQ ID NO: 141323 - DNA, 183 bp, Zea mays
  Clone ID: MRT4577_60367C.1
tccagagacatggcggccacgagctccgcctgcgcgtgcgcggcggaagcgctcgcgtggttcccgttcgacggcttcacctccgaccattaccgagtctcggacagcattcaccgtggtcagaggtactacagggccgtcaccgttagatgtttcagcacgtcgttcaacgttgtccaaggc

SEQ ID NO: 141324 - DNA, 278 bp, Zea mays
  Clone ID: MRT4577_60368C.1
ttttctcgtccgtaaatatataaaaaaagaagctagacttcatcaccaatttctttatctaacacccaaaaaccaaaaaaacgaatgggggcggcccgtctagggggtccatcgctacctcccgcgggcttgccccgttgttgtccttttatggggtcgcccaaaaccaagcgactgggcttgattgatctccgttgcgacggggagatcatcagccggctgcggcaccgtaccctggtgcagcttatcggctggtgcctgggcagctgcatcatgct

SEQ ID NO: 141325 - DNA, 247 bp, Zea mays
  Clone ID: MRT4577_60369C.1
cgtaatataatatgttgctgatgtctccctcgtagttcgggatctgctagtagttgatggcgcacacactaatcgggtggtgcttgggaccagttgtgtaggctgagcagagatgtagagtgggatacatgtgtgcggtggtatactgcagcttgatgcaaatccagatcctgttatgtagacctatacggagactacggacgggtcgactattgaggagagtgatactgccatcgtgtagtgctac

SEQ ID NO: 141326 - DNA, 341 bp, Zea mays
  Clone ID: MRT4577_6036C.1
tctctccagctcaaactattctagatcactaactacccgccttttttcaatttttttggaggccaacacatactattattcctcacaattataaaccccaatcttaatatatttatcatatcgccaaactcttcttctcattttctggaaataccataacactattcctcttcctgtcgcctgctcacaccttatagagattcatcaccaatcggacaacagactacttctcctgcataccctacaacatcacgctgctcaactgcctactatcaacttgttactgcctaccgttccactcccttaacaacattctgaaatcaactatcaacgacaacaaa

SEQ ID NO: 141327 - DNA, 756 bp, Zea mays
  Clone ID: MRT4577_60370C.1
ccggccgggattctcgacagatccggaatttctgtgtatacgaggactttagactgcagatcgaggtgctggaaacgatgcgaggcagctggacgattacgacaaacgagagatgatgcctcctcgagcagctgaagggactatgccgatatcaggaccgcgtctggacatctcgatcgggcggctccgcaagtatctgtgcgttccgtcggcgtcatatcagttgactatcttgtcgtacgctggagggtcagcgaccgcctcgtaggtttcggctacatatgaaacgactcggacagcgacgcgcaagatcgtgatttcgtgccccacgtggtaatcgacgtcgacgaggagcgcagcaagctatctccgtgtctggacgagggaacttctccgtccatctcaccatggagccatggcccgaggtagacctcaacgtaatcatcttgcgacgacgtatatctctacgaccacaacggggtcgaagaggccccctagttcttccgaaagtgaaatgacagatcccacgaactgagacatacggacccttgcaatcgttctcggcgaaagactatttctacttctcactcttccacgaagagatgcggccctggtccccatccgagctgtcggacgttatcagtatccgaggataactgcttactgctcgcctgagagctggtcttcgaacagactcggatgaccaagcctctggcactacgatgttgctccgaaactacctctcgaccgtcgaca

SEQ ID NO: 141328 - DNA, 303 bp, Zea mays
  Clone ID: MRT4577_60371C.1
tttttctgcttgcgggacttccatggcccgcaccctgctttctccctgtttaccaatttctcttgccacatcataacgagaccactgtccatccacaaagcgccaaccatacatctatctgtgggttgtcctctgcacatcacaattctgaaggcgccgatacaccattatgcccggaatcgccaatcgcatacaatgtcctcgttgttcttctaacacgtgctacaaaaaccctttagaagctaccagttcacttccagacaacacttcactgccttcctgactatatcgtttactcagacc

SEQ ID NO: 141329 - DNA, 270 bp, Zea mays
  Clone ID: MRT4577_60372C.1
ggacgagggaccaggtggaaaggcggagagcagaatcagtaacgattaccaccgacgggaagcagcagcagcagctacggcaccgtggacgtggtcaaggaccggcccgtgaggttcagctcgtcgcagctgagcgagttcaccgccaactacagcgagaagctcggcgccggtggcttcggcgtggtgtaccgaggccaggtgcagctcccggccggcggtcacgggagcagcatcagcagcagcctggcggtggccgtgaaggtgctc

SEQ ID NO: 141330 - DNA, 1714 bp, Zea mays
  unsure (1)..(1714): unsure at all n locations
  Clone ID: MRT4577_60374C.1
cattgggtacctcgaggccggccgggaacttattcacctttccacttcccgaactttacgccgcctctcatccccatctagtgtcctaatcgaaaaccccgtttgttagcttgaacagaagcctcccccgccgcacccgcccggcggcgcgggcgcgcggcaatggccgcgcagaacgctgggaccatcatcgattgccgacaggcgatgtcccccgatcccccggccgtggagttggaggtcatcggctcatcttctccgtccatcaggccatgtcccgctgcagcggcgctcgccgacgccgatatcgatcatgacggatgcaccgcggaattctcttcttcaactgatcgagaattacaggaccatatcagagagtgggaagggccctctctgcagggtgtactccgtaggatgccggatggtggcaagaagatgcagtcacttgtcctccggatgaagaaggagctcgagcggcggagggccagacagaggatggatgtcacgcccttgagacagacagtgcaagctaagcgtactggtggcagcagtggagaaatctacaacttaaagtctgatgatgagaccatggacagtacggctagcaaacactatccaaactcaagttgtactacatctacaaagacctatacccaggttaagggagctgcatatgaagaacaaagttctttaagccatggcaaatatgcttacccaaagaatggtggtcaaatttcaaaagagtcgttgaggcatcaatcaaaaacgtgcgcttatcttccaaagagtacatgctctgaacatttatatggatattgacagattgaaccttgccaaaaataaggcctcacccttggagattaaaaaggatgtagttctgttggatgacgatgatgatatagagcctgctagatcagctgatgttcagatatctaataagtgggaggagtcaaatatccactatccttcaagcactgatccagaagcggttgaactgacctactctgacatgaaatgtcttgaaccagaagaatatttaaaatcacctgttataaatttttaccttcagtacctcaagaaggcaagacctcgcagggatttacacatgtttaacacctatttttatagcaaactcgaagaagcactatccatgccgggtcaccatgactcagaattcagcaagttacggagatggtggagaggtgtagatatttttaagaaagcgtacataattttgccgattaatgaatcgatgcactggagcttgatcattgtttgcatgcctacaaaagaggcagattctgggccaataatacttcacttggactctcttggtcttcactccagtcaaaagctttttgacatagttgcgaggtatattcaagcagaacggtggcacctagggatggattcgtcttatgatattccattttcagggaggatatggaggcgtctttcgaaaaatatcaatagggaaaagattgaggtgccacgtcagcgtaacgagtatgattgtggcctctttatgctttactatattgacaggtttattcaagatgcgccagagaggttgacaaaagagggccttggcatgtttggacgcaaatggttcaaccatgaagaggcttcaacgtttcggggagggatacggccgctactgattgatctatttcatagngctctagacgacgatggaacctcggaggcagagctt

SEQ ID NO: 141331 - DNA, 112 bp, Zea mays
  Clone ID: MRT4577_60375C.1
attcggctcgagcggagcttgcttgcgaacgggtctaaacaggttggacagcatcatcgacccgggaaccgtatgcaatctcttgcagacaacgtttgccgccaataaaatg

SEQ ID NO: 141332 - DNA, 577 bp, Zea mays
  unsure (1)..(577): unsure at all n locations
  Clone ID: MRT4577_60376C.1
gctcgcactgtgtcattggcacagcatgaagtaattcgancgacattatcaatgaagagccctatggagcttgttcggattcacggacgcgtgggcggacgcgtgggaggaagttggcataccggacactgacatccagcccgagtcttcaagcggagatgaggagactgggaataaaactgtgacgacagaacaacaaagtgcagctggggctggctctatgaagttccatttctcgtgcactttatagaggtacccgttgctctgagtgctggtaatcgacttacctggtttcggcaggcaggcatacacgggcaccgcaccgactaatcacaagaggcagtggaacaactttctcctcgagagttcatttttctttgttctgagggcggcagttgaaagcctggacaacactagcaattcatttatttgtaatgatcctagcatagcagatgttgttacctacccaatgcagcgtttgtaatttttttgctgtaaaaatatcaaaggcagaaaaaagtactttcgcagtatacctgttttccgtgaacactagaaagtttttttgtttttgttt

SEQ ID NO: 141333 - DNA, 1339 bp, Zea mays
  unsure (1)..(1339): unsure at all n locations
  Clone ID: MRT4577_60377C.1
ggntgaanaaggactcgagcggcggagggccagacagnagatggatgtcacgcccttgagacagacagtgcaagctaagcgtactggtggcagcagtggagaaatctacaacttaaagtctgatgatgagaccatggacagtacggctagcaaacactatccaaactcaagttgtactacatctacaaagacctatacccaggttaagggagctgcatatgaagaacaaagttctttaagccatggcaaatatgcttacccaaagaatggtggtcaaatttcaaaagagtcgttgaggcatcaatcaaaaacgtggaaccttgccaaaaataaggcctcacccttggagattaaaaaggatgtagttctgttggatgacgatgatgatatagagcctgctagatcagctgatgttcagatatctaataagtgggaggagtcaaatatccactatccttcaagcactgatccagaagcggttgaactgacctactctgacatgaaatgtcttgaaccagaagaatatttaaaatcacctgttataaatttttaccttcagtacctcaagaaggcaagacctcgcagggatttacacatgtttaacacctatttttatagcaaactcgaagaagcactatccatgccgggtcaccatgactcagaattcagcaagttacggagatggtgcccacgcgtccgagaggtgtagatatttttaagaaagcgtacataattttgccgattaatgaatcgatgcactggagcttgatcattgtttgcatgcctacaaaagaggcagattctgggccaataatacttcacttggactctcttggtcttcactccagtcaaaagctttttgacatagttgcgagggaggatatggaggcgtctttcgaaaaatatcaatagggaaaagattgaggtgccacgtcagcgtaacgagtatgattgtggcctctttatgctttactatattgacaggtttattcaagatgcgccagagaggttgacaaaagagggccttggcatgtttggacgcagatggttcaaccatgaagaggcttcagcgtttcggggagggatacgggcgctactgattgatctatttcatagtgctctagacgacgatggaccatcggaggcagagcttgaagacaaggacattcagatggactgagcctgctgttgctgctttgattgaatatgtagtaacctcgttcactcccaagtgaagtttggccgtggagggaatgcggctacacacttttgtttacacgctcgttcattcggcggtggaaatgtacagttcaacgttatctaagggcctgtttggaac

SEQ ID NO: 141334 - DNA, 600 bp, Zea mays
  Clone ID: MRT4577_60378C.1
cggacgcgtgggcggacgcgtgggcggacgcgtgggcggacgcgtgggcggacgcgtgggtttaaaatcacctgttataaatttttaccttcagtacctcaagaaggcaagacctcgcagggatttacacatgtttaacacctatttttatagcaaactcgaagaagcactatccatgccgagattcagcaagttacggagatggtggagaggtgtagatatttttaagaaagcgtacataattttgccgattaatgaatcgtaagttgcttcttctctggataatacttcaatattaaatggatgcactggagcttgatcattgtttgcatgcctacaaaagaggcagattctgggccaataatacttcacttggactctcttggtcttcactccagtcaaaagctttttgacatagttgcgaggtatattcaagcagaacggtggcacctagggatggattcgtcttatgatattccattttcagggaggatatggaggcgtctttcaaaaaatatcaatagggaaaagattgaggtgtattcaagatgcgccagagaggttgacaaaagagggccttggcatgtttggacgcaaatg

SEQ ID NO: 141335 - DNA, 1761 bp, Zea mays
  Clone ID: MRT4577_60379C.1
tcgagccggccgggatccatctagagtcctatcgaaaaccctcgtttgttcgcttgaacagaagcctcccccgccgcacccgccaggcggcgcgggcgcgcggcaatggccgcgcagaacgctgggatcatcatcgattgtcgacaggcgatgtcccccgatcccccggccgtggagttggaggtcatcggctcatcttctccgtccatcacgccatgtcccgctgcagcggcgcccgccgacgccgatttcgatcatgacggatgcaccgcggaattatcttcttcaactgatcgagaattacaggaccatatcagacagtgggaagggtcctatgggcagggtgtactccgtaggatgccggatggtgatgacatgttcagggcggatttcttggcgtctatcaagaaatatcaacaggggagagccagagaggcgacggcagtctcgcgcgtgtgactgtggcctctttctgcgtttactgattgaaagatttattcaatgatccgccagaggaggtagactaaagagggggtcggtacggttggaagaagatatttcaaccctgtgagggctacagcgacaaggctaagcactccggggggacgcagtgaagaattctacaacttaaagtctgatgatgagaccatggacagtgcggctagacaaacactatccaaactcaagttgtactacatctacaaagatctatacccaggttaagggagctgcatatgaagaacaaagttctttaagccatggcaaatatgcttacccaaagaatggtggtcaaatttcaaaagagtcgttgaggcatcaatcaaaaacgtgcgcttatcttccaaagagtacatgctctgaacatttaaatatggatattgacagaagaaaaacaccaactttaaagagccgcaacatatccatgccgggtcaccatgactcagaattcagcaagttacggagatggtggagaggtgtagatatttttaagaaagcgtacataattttgccgattaatgaatcgatgcactggagcttgatcattgtttgcatgcctacaaaagaggcagattctgggccaataatacttcacttggactctcttggtcttcactccagtcaaaagctttttgacatagttgcgaggtatattcaagcagaacggtggcacctagggatggattcgtcttatgatattccattttcagggaggatatggaggcgtctttcaaaaaatatcaatagggaaaagattgaggtgccacgtcagggtaacgagtatgattgtggcctctttatgctttactatattgacaggtttattcaagatgcgccagagaggttgacaaaagagggccttggcatgtttggacgcagatggttcaaccatgaagaggcttcagcgtttcggggagggatacgggcgctactgattgatctatttcatagtgctctagacgacgatggaccatcggaggcagagcttgaagacaaggacattcagatggactgagcctgctgttgctgctttgattgaatatgtagtaacctcgttcactcccaagtgaagtttggccgtggagggaatgcgccccgttggctacacacttttgtttacacgctcgttcattcggcggtggaaatgtacagttcaacgttatctaagggcctgtttggaaccggattcagattcaacaaaaatatatttacgaaaatttagctaaatggtttagggtttagatcaataaaatccagattcac

SEQ ID NO: 141336 - DNA, 1618 bp, Zea mays
  Clone ID: MRT4577_6037C.1
cggacgcgtgggcggacgcttgttcgcccgaggagcgcgaccgcctcgtgcgggacattgagagcctaggtcttcctagaattgatcggattgtccgatgctcgcttagatcacaaggtgctcctataccaacctttgagcctgttcctgagtcaagtgtctcgacagtggatgacagaactcctgaggacaaagaaaggtggtggaggaggggcttgagagccatttcagaggggaagttggctgttgttttattggctggtggccaggggactaggcttggcagttctgaccccaagggatgtttcagtatcgggctcccatctaggaagtcacttttccaactacaagctgaacggattttatgtattcagaagctggctgcacagtgcactgatgccccaggtagcacagtgcaaattcactggtatataatgacgagtccttttaccgatgacggacgcgtggggttctttgaaacccacagatattttggtttggagcctaatcaagtgacatttttccaacagggtactattccatgtgtatctcatgatggaagatttattatggagacaccatataaggtagcaaaggctcccgatggcaatggcggagtatatgctgctctaaaatctaaaaggttgctcgatgatatggctgcaaaaggtgttaagtatgtagattgctatggagttgataatgtattggtccgtgttgcagatccaacattcctaggatacttcattgacagaggtgtatctgctgctgctaaggttgtcaggaaggcatatccacaagagaaagttggagtatttgttcagcgtggaaagggtggacccctctctgtagttgaatacagtgaaatggatgcagctatgacaactgaaatcaatcaaactactggccgccttcgttattgctggagcaatatctgcttgcatatgtttactttggattttctgaaccaagtgacaaacagtcttgaaaaggatagcatttaccatctagccgagaagagaattccttcagtccatgggtacacatcaggattaaagcttgaacaatttatatttgatgtattcaactattctccttcaacagctctttttgaggttttgcgtgaggaggaatttgcgccagtgaagaatgctaatggtgcaacttatgacactcctgacagtgccagattaatgctgcttcggctacatagccgctgggtggttgctgcaggtggcttcttgactcattctgtgcccttgtatatgacaggagttgaagtttctccgctttgctcttatgctggagagaatctagaagctatatgcagtggaagaacattccatgcaccaagtgagatttcgttctaggcatagtagttgttgcaagcaatctgaatacaggaagatgagatcaggccaattttgattacaacatgactactcttgcaaatagaatgttgatattagtaaactattgtatgttatgcaaggatcaaatattgtaacgcagcacctgaagttgcctacattctactctagcattaatgtgtatctgcctatcgaatgtagattatgacatgctttagtgtaatatttttttttgaaaacagcatatg

SEQ ID NO: 141337 - DNA, 1028 bp, Zea mays
  Clone ID: MRT4577_60380C.1
cgttctttacgccgcctctcatccccatctagtgtcctaatcgaaaaccccgtttgttagcttgaacagaagcctcccccgccgcacccgcccggcggcgcgggcgcgcggcaatggccgcgcagaacgctgggaccatcatcgattgccgacaggcgatgtcccccgatcccccggccgtggagttggaggtcatcggctcatcttctccgtccatcaggccatgtcccgctgcagcggcgctcgccgacgccgatatcgatcatgacggatgcaccgcggaattctcttcttcaactgatcgagaattacaggaccatatcagagagtgggaagggccctctctgcagggtgtactccgtaggatgccggatggtggcaagaagatgcagtcacttgtcctccggatgaagaaggagctcgagcggcggagggccagacagaggatggatgtcacgcccttgagacagacagtgcaagctaagcgtactggtggcagcagtggagaaatctacaacttaaagtctgatgatgagaccatggacagtacggctagcaaacactatccaaactcaagttgtactacatctacaaagacctatacccaggttaagggagctgcatatgaagaacaaagttctttaagccatggcaaatatgcttacccaaagaatggtggtcaaatttcaaaagagtcgttgaggcatcaatcaaaaacgtgcgcttatcttccaaagagtacatgctctgaacatttaaatatggatattgacagaagaaaaacaccaactttaaagagccgcaacataaatcaacaggaaaatagtactattgataaatgcaccaatgccacgtttggtagtaacaggaggtggaaccttgccaaaaataaggcctcacccttggagattaaaaaggatgtagttctgttggatgacgatgatgatatagagcctgctagatcagctgatgttcagatatctaataagtgggaggagtcaaatatccactatccttcaagcactgat

SEQ ID NO: 141338 - DNA, 255 bp, Zea mays
  unsure (1)..(255): unsure at all n locations
  Clone ID: MRT4577_60381C.1
tttttttnnntttttttttttacacgtaaacccccattttcttattacttctaaatactggtaaattacaaacaaaggactggctgatacataactacatatataacgggggaccaacccaaacaaacatgatctcatctggtccccctttacatgctgcacccttcctttttttggaaatcgatccttggcccggccattgctgggggattcagttccagcgccagatcatcaccggccctggctcggggagcg

SEQ ID NO: 141339 - DNA, 248 bp, Zea mays
  Clone ID: MRT4577_60382C.1
ggggccgccacacgtctgaaaaatcctcgccttaacaagggcagcggtgaagctattctgcgaccgcgagaagcgagtgagaccgggataacaaacgttaaaagataaaggctagaagcttcttagggcaatagacacacacgaatcccaatctacagtctggcacaaccgattgccgagggcaaacacaccaacgctcctggagaggggtctaccctgtgatcttttgtactgataaagggcccgtc

SEQ ID NO: 141340 - DNA, 768 bp, Zea mays
  Clone ID: MRT4577_60383C.1
atgggaatcttcgtctgggccgtgaggagtcagggcttggagccaagtgcaaaaagtttctatagtatgcacgagattttatatgagacgaagccctggggctcaagttgcccagtgccaacctttcggaagaggtggcctagagattggatgaaggaatggttctacgtgaaaagtgacttaaagacaagaggagatattaaagacatcatcatgcgccccatctggcagcgtttcggcctccgaaaaccgaaggtagagattggtgaggcagccgaaggatgccgaagggccttcggcacagtttgctctttcatcgggacaagggacctaatccaggagcacatagccttcagaatatggccacttttagagaagtgggaaatgccgaaggagactgtcactaaaactggcgaaggagagctggttcgactgaaatacagcttcaaatatggagataaatttgatgagccaaatgatgactggctgaaatgtatcgaagctacaagtgatgaactgcttgggccatactctaaagcggaagataatgcgttatctgcggccttcgggagccggaaaaagaagaggctaaatagagtttttgatgccatcggatttatgtatcctgactaccgctatccgtcgaaggggcaaaagagaaaaagtacaacttctgggaaggatgttgcttcagctgctccgagtgagcccgcaccgaagaggagaaaagtaaaggtacttactcaccgaccgtgtgagagcacctag

SEQ ID NO: 141341 - DNA, 2278 bp, Zea mays
  Clone ID: MRT4577_60384C.1
caagaccttcgttccttagctcaattacttcggaacgaaggttattcaaggccatggtatatccctcgtcttcaacgcttttttgcgccctaagggcgttgctaagaataaggccctgcaaaagaagtgtggcattaagtataagcaaacgaaaaaatcttgtttttaaacacaaaaaatattatcctctcacctttaagctgttgtacgctaagctgtcggctaattcatcttttgatagcaccgaaagcccgtcttctagcgtcgggaatccgaagcttcttcccatctcccggcagacagagatctccttgttgtccgggagacaatataagaagtcttcttctccgctgccattgaaaatcaatgcccccttcggatatttcaatttttgagcgtaaaactgagcttcttgcttttttcagtcaaaattttccccgaagcatgtcgtaaaatataattgagagcttttgaaaatgctacaggggtggcagtgccagtttcttcagccaaaatttgttctgccacttctgtttcttttcctttggtttctaaggatttatccttggcaggctctgaaggcccagcttcggtctcggcctagctctttgcagcttcggcttcggttagtttttgtctcagtctgcgtttttgaagcttcggcagttttccctggagtagagcttgaagtctttatcgtctccagcacatctagtacgttgaccatccttttcctcttgggggtcgctgtaagatctttttgtgccttcggcactgtcacttctgtcgaagggcttataacttctaatatctttgttctttcgacctctatctcttcaatattattggccttcggctcagctaatttggccgatgatgctttcggcattgcagccggctcttcaatcttctgcgtaagcgcaggttctttggcttcagtagccaaagaggtctcaccgccaaattcgggcactatggccggttcaatacagcgcggtcggtgagtaagaaccttcacctttctcctcttcggcgcgagctcactcggagcagctgaagtaacatccttcccagaagttgcactctttctcttctgcccccttggcgggtagcggtagtcaggatacataaatccaatagcatcaaaaactctatttagcctcttctttttccggctcccaaaggccgcagataacacattatcttccgctttggagtactgcccaagcagttcatcacttgtagcttcgatacatttcagccagtcatcatttggctcatcaaatttatctccatatctgaaggtgtatttcagtcgaaccagctctccttcgccagtcttagtgacagtctccttcgacatttcccacttctctacatgtggccatactctaaaggctatatgctcctggattagatcccttgtcccgatgaaagcgcaaaccgtgccgaaggccgttcggcatccttcggctgcctcatcaatctctaccttcggttttcggaggccgaaacgctgccagatggggcgcatgatgatctctttaatgtcttctcgtgcctttaaatcatttttcacatagaaccattcattcatccagtccccgggccatctcttccgaaaagttggcactgggtagcttgagccagaacgagcaacgaagctatagcaaccaaaattgttatgatactgctctttaccccagggcttcgtcttatataaaagttcgtgcatactgcagaaactttttgcacttggctccaagccctgactcctcacggcccagacgaagattcccattcttatgattgcttcgggagtaatttggtgaaggaaaatctggtatatctttaaaactttaaccacaaatctgcttaaggggaaccgaagcctagctttgaaaaagcttcggaagatcacgacttcattctcttcgggaacaggagcagtcctgtctccgttgtcagcccttacaatagacatatctcgaaaatatcttcccctcatattatcaagatgactctgtttaatagttgattttccgaaaactgcatgacttggttgccagggtcgatcttcggagtcttcgcccccactttccacatcataactatcgctgtcaccggtgtcttcaaataagccttctaaaatctccctagtaatcttttctatatttgtctttgctattgattcaataaagccaacagtcttctccttagaaagcttctcctcttcgctcaacttcgtctcagcaatagctttcttatcttgagacat

SEQ ID NO: 141342 - DNA, 819 bp, Zea mays
  Clone ID: MRT4577_60385C.1
gttgtggttgcttctggtaagaaattgtactgccttcatgtcaataacactgatgctgaggtcggcggcggagtgcgtcaaagggttagttcatccgaggtggaaggaaacgatggtgttttcagcacacaggaaagcgttaatgtatttgatttccgtgtacccgctggcatcgggcttaaaatagcgagacatggcggcacagcgaactcaatcttctcacgcggagactcggtatttatcggtagcacggaaggaaggctgcaaataaaaggagggtcgaggtcacgagtccagcattactcgctgagaaaggggaaacttgtcgccacctatgagctaccagaattcagcgctcatatccatcactccgcgataacccaggtatggggcgactcaaaccttgtgttggcagcatgtggtatggggctgtttgccttcgacacattcaaggaagacacgcagccaagccaacaacaacctacagcttcgaccgaggaaacaccgttggagtgagagaagcgattggccctgacgatttgtactgccctacatttgattactcgtcgtcaagggttctgctcgtctcaagagatcgcccggcacattggaggtacttgtaggctgtatagctagctatgtaacgttttttttgtatgtgagagtgtgtgcaacgtgtgtcatcatgtaatatatgtacttcgtttatgcttcacatgtgatgccatctgccgtgtcaagcatcttgctttcactgtagtacttgctagcagatgttatctagttcttacccctggaatgataaattagttaacgacc

SEQ ID NO: 141343 - DNA, 395 bp, Zea mays
  Clone ID: MRT4577_60386C.1
ccacaaggcttcgtccacacgtaaagtttcctggaagagctgtctcgaagcctattaggtgtgcgggtaggataacgccggccagtaaatgataaggggaccatctaattcaagttggggactccatagcggacacggaggctaattgccccatacaagaggcaccgacaatttgaattaattacagtggatattttgtcaactctcttaccacaaacatcagctacgctggccacaaagacattataactaatcaggaccaggcacaacatctcttgcttctttatcaacagaatcgagggcgtgatgactctcgtacagggactattgccccacattctgcacggcagataattatcgtccaaacttgttggggtccctgcacgagcaaaaac

SEQ ID NO: 141344 - DNA, 294 bp, Zea mays
  Clone ID: MRT4577_60387C.1
attccatcagcttccatcgaccaaagtatgtatgaccctcactcaatttggatatggaagctctttaattagatttactatgctaccaacatattcatgtcttaacactcaaccatgctcattcttccattgcggggcatgtaaatgtggtattcatttgaaaaactatcaacatactcatgtgcatcccactgtatcaaacattcaaacattatgattgatatgattccatgatacacgtgaaattagtgcttttaaacctgtcataggagacatactcctttcacaatttag

SEQ ID NO: 141345 - DNA, 409 bp, Zea mays
  Clone ID: MRT4577_60388C.1
aaaaaaaaacattcataaaacaaaggggaatttacccagagccccagaaacaaaaacaagtacccaagttcacccagaaagggcaaaaggggtgtttttgacaaaccaaaaaaaaaatgggggtttttgaccattttccgggggggttaaggaaggaaatatttctttgccaactccaaggccccgattaaattaagttttaagggggaaaaaacttggaggggggactacggacccaaaggccccccacattcaaactgaaccttgacaaaaacccgggacctttttgacccttattacgggttaaggacccacggatgggccggatcttccggtgattcatttgcattggtcgccggggagggcttttctgccccacatgggggacaatgtgccctggggccaaatt

SEQ ID NO: 141346 - DNA, 800 bp, Zea mays
  unsure (1)..(800): unsure at all n locations
  Clone ID: MRT4577_60389C.1
ggccgcttttttttttttttttttagctgtccctaagttgttgtaaatcaatattcttgggattgggatcttcacaaggcgaaatggataaacgtggaacgattgaaataaagacacgaacacgggggacagacacacacaaggtacaacgaaaaggagaaacaaggaaggtacaacgaaaaggaggaacaaggtacaaacaaactgaaaattccaaatattgacaagtgacaccaagaaaaggtacagcagtcatgaaaggggagtaatcagaatgactgcaaactacctaaaatcctcgaagcccaccgaagctggggatgaaaggctgcatggtgttgatgtatgggttgatcgattgcgaaaagctgctagaggaggagctttgctgcgattgctgcatgaaggactggaaggtgggtacgatttgttggaaaggagaaacaattccgccaaaggcggcaccgaagctggattgatagccttgcatcacctggttaagctggctaaagacattgctgatgactggggcaacaatntggagatccagagcatccacagaggttgatgccattgagggcaggctgtagctgcgaaacaagttggttaacatagctggaggcgacagactgtgaaatggcaccaccggagatggacccctgcatttgacccaaaaggccaagaacgggcgtaaaggcctggacggcctggctggattcctggtgagaaaaagactggatgaccggccgnaggatgtgccccaggggggtggcactcatggagctttgcgattgggagcc

SEQ ID NO: 141347 - DNA, 490 bp, Zea mays
  unsure (1)..(490): unsure at all n locations
  Clone ID: MRT4577_6038C.1
gtaccctncgnaggccgtgccggnaaaaaaaaaaaaaaaaaaaaaaaaaaaaaaaaaaaaaaaaaaaaaaaaaaaaaaaaaaaaaaaaaaaaaaaaaaaaaaaaaaaaaaaaaaaaaaaaaaaaaaaggggggctggggttttgattccagaactaaccccgaatcctgtttcttttggcccctccttttgggaaccgcctccgccccttaattttttttcgggtaatccgggggaggctcaagaaaactgaggccgggagccccccaaaaaatattttcaaccaaggggccgaaacccttgggggggcaaaagtaaccattgaactgtggaaccttggaagttggttaactggggaaaaactttgagctatgtaatattacaaaaaaagggggggaaacaggggtaggggccgaattaaaggaaatggggggcaagggggacatttcctgcgggaaaaatcaggatgggctccccgaggacctttgggg

SEQ ID NO: 141348 - DNA, 417 bp, Zea mays
  unsure (1)..(417): unsure at all n locations
  Clone ID: MRT4577_60390C.1
agcagtggtaacaacgcagagtacgcggggtaagcccggaacaacaagaatgtataggcacaccaggccttggctctcaaaaaaaaaaaaaaaaaaaaaaaaaaaaaaaaaaaaaaaaaaaaaaaaaaaaaaaacaaaaaaaaaaaaaaaaaaaaaaaaaaaaaggncctctgccttgtaacaactgttaaagggcaaatccaaaaaaactgggggccgtaacaagggaatccaacctcggaacaaacctgggcgaaaaaagggaaaaagcggttccctggggaaaatggtaatccgttaaaaattcaaaaaaaaaaacaacccgaaagaaaaaagggaaaacccggggggcccaaaggagggaccaaactaaaataaatgggttggggctaactgcccgttttcaaacgggaaaac

SEQ ID NO: 141349 - DNA, 141 bp, Zea mays
  Clone ID: MRT4577_60391C.1
cagacgcgtgggctatcaaagttggatgttgctccgcgtcttgatgatacatggaagacggggctctggttgtgaagatggcaggagcagcacttcgaatcgaaggccgactctagaacaaccaagacttacgcgcagcaa

SEQ ID NO: 141350 - DNA, 589 bp, Zea mays
  Clone ID: MRT4577_60392C.1
ttctgtcctgtctgcacacactgagagcaatatgggtggcaaggttcttctgatgagtgccgtcttagtggggcttgtttcactgagctcgtgcaggagcctgggagagttgcatgagcagaagacccactatgggggctcaccaactcccacgcatgggtcaggaggagactacaacccgacactgacaccgacaccaacttacggcactacaccgacgccatcttacggcactacaccgacaccaacttacggcattacaccgacgccaacttacggcactacaccgacgcctttttatggcactacaccgacgccatcttatggcactacaccgagcaccccaagtgcaccttcccatgatgtccctgcaagtccaaagaagcatgggttcattggatcctgcgactactggaagaatcacccagatgctatagttgcagctattgggtccctcggcaacatcggcaagacatttggtgctgcatgcagtatgataggtggcaagaagctaggaaatatgcatgatgcactctcaaacactagaactgatggtattggcgccctgatacgtgagggggcagctgca

SEQ ID NO: 141351 - DNA, 165 bp, Zea mays
  Clone ID: MRT4577_60393C.1
agacggcgtccggccgagccacagcgagagccggcgaccacactgcacggggacgccggtcgtcggattgcatcggtgcctgagacgctggagcgggacagggcggggctgggcaactgccgcacgccttcaccgcgcctgcatcgaccgttggatcgacctcgg

SEQ ID NO: 141352 - DNA, 442 bp, Zea mays
  Clone ID: MRT4577_60394C.1
aagaatttataattgtacttttcttatttctgggacgccacatacttttttcataaaactttatttttgaactataaaacacccgccctctcttttagggtggaaaaacccaaaaattggaaaaaaaaagagtgaagtttttacaaaagcacgccgtttttatgggggcccttttttaaccggaaatagggcgctttaacaacgcataacgatcaagtttggcgttaaaaaccgcccccccccttttatttcatgccggggaccttgggttggtggctaaacgataaaaggggacccccccccgcctttggggaaaaaaaaaaagtggtaggtgggggaaaaaaacaaaggggggggaaaccccagcacctccccgggggaaacccctttgttcttgaaaatttggggcaaattgccccgcggggggaggggcccccgaaac

SEQ ID NO: 141353 - DNA, 638 bp, Zea mays
  Clone ID: MRT4577_60395C.1
ccctcgagtttttttttttttttttttttttttttttttttttttttttttttttttttttttttttttttttttttttttttttttttttggggaaaaccagggcccccaaatttaagggaaaagggggaattttataaaaccggttttcccggcaattggccaagggccttttaaaaaaaggccccaacaaacgggggggttgggggtttttggggcccctttcctttaaaaagaagggggaaaaacccccgggggggccggaacccggtttttccccaccgggaaggcccgggctttgcgttgggaacccccaaagggggggggcctttcccgggggggacccgggggccggttcccccaggggggttgggcctaaacgggaaggcccccaaacaagcgggaaaaaccgcttttcgtcccattaggggttttttttggggctttcggggggccccctttggtcaagggcccccccgcccaatttttgaaaacaaccaccttttcccttttaattttgggaacgggttttcaatcaaaggggcgggcccccctcgaatataaattccccccggacccccggaaaacttatttttgcccgcgtcgggggaacccgcgggggggggggtttgttggcc

SEQ ID NO: 141354 - DNA, 1250 bp, Zea mays
  Clone ID: MRT4577_60396C.1
tcgtgattactagtatttagtagtgagtttactagaagagtgctatacccctttaaaatgctattaagcgtctattatgctactgattttttttcgcaatcccgtatttgtagctgagaatcatgaaatttaatgtcacagtggcatagagagttcacccaagcaatgttagcacagtgtgaaaatgtagttaagctgaacaacaattcaaacataaaagaaatgaactggaataaaggacaactacaaaccaaaaaacatgattaacatggtttatgagttgcgagttgatgctgttgaacaactaaacaaaactggttctttctcttacacatggaaactctgcggggcatttggttatcccttgaggggggaagtctaaaatagattttgaacgtcttgggccattttgtatgctataatgacaattttgagaaatttgtttagttgtaaaggaggctgttcagacagagaaggcaccaccagcactaggcccttattctcaggccatcaaagcaaataatcttgtgtttgtttctggagttcttggcttgaatcccgaggtttgcttttgcactgtcgttctatcattttcttgtttttttctacattgcttgtatcagtttcctggtttttccactggacgaaccgatcagtttgctggttgtaggtgaagagacaactaatatgcctttctgttttcagaccaggaagtttatctctgaaaatgttgaggagcaaactgagcaggttatgaaaaacatgggcgagatattgaaagctagtggtgctagctattcttcagttgtgaagacaacgatcatgttggctgatctgcaggatttcaataaagtaaacgagatctatggcaaatatttcccggcgccagcacctgcacgatcaacctaccaagtggcggcgctgccactgaatgcccggattgagattgagtgcatcgctgctctctaatcagatcatccaaccactcattaaatcatcaataagcacccaggaatttgtggtagaggtacctgtaccagttcagtgtctgaaaactgcgggtaacaaacctttgtgtcccggataagtgatgtgtgtgtgtgtgtgtgtgagtgaacagtgcatctagtaggagaattgttgcgtggtttgttacttggattcttcgctctttagacaagaagtaccatggcatcaacatcaatagcctactgttttcttcccaataagaatgaattggcttccccaac

SEQ ID NO: 141355 - DNA, 246 bp, Zea mays
  Clone ID: MRT4577_60397C.1
ggtcctcccgtcgttggagactcgtcgtcttgagtgttactcccatgggcaaggactcgcagccggagggacgccaagggaagggctagcaagctgcactgctacttttgcggagacgaccgggtgccgccatggaggcaagggcaagggcaagggcaagggctgcaagtacggttaccgactctgaacttgcacctacgtcaaaagcacctattgggtgagaagccagggaagatctatgaagct

SEQ ID NO: 141356 - DNA, 1415 bp, Zea mays
  Clone ID: MRT4577_60398C.1
ccggcggcggggcctttaaaatgctattaagcgtgtattatgctactgagtttttttcgcaatcccgtatttgtagctgagaatcatgaaatttaatgtgacagtggcgtagagagtgcacccaagcaatgtgagcacagtgtgaaaatgtggtggggctgaacaacaattcaaacataaaagaaatgaactgggataaaggacaactacaaaccaaaaaacatgattaacatgggttatgaggtgcgaggtgatgctgtggaacaactaaacaaaactgggtctttctcttacacatgggaactctgcggggcgtttgggtatcccttgaggggggaaggctaaaatagattttgaacgtcttgggccattttgtgtgctataatgacaattttgagaaatttgtgtaccccccctcgaggccggccgggaacactatagtggggcacaggcgatcgcatattcgcacccacccatcacacgacaaaatccctcaccctcgtgagtcctgacgccctcgcccgtgctcgcagttggtagggttctagccatggcgtggagcgccgccgccgtctccaggttcgccgccgcctccccacccgcggcacccatctccgtcaggcttggagccgccgcttctcgctcctccctgtccttctccagtgggcgccgacgccccgtggccgcgtccctctcgacctctgccaccgctgtaaaggaggctgttcagacagagaaggcaccaccagcactaggcccttattctcaggccatcaaagcaaataatcttgtgtttgtttctggagttcttggcttgaatcccgagaccaggaagtttatctctgaaaatgttgaggagcaaactgagcaggttatgaaaaacatgggcgagatattgaaagctagtggtgctagctattcttcagttgtgaagacaacgatcatgttggctgatctgcaggatttcaataaagtaaacgagatctatggcaaatatttcccggcgccagcacctgcacgatcaacctaccaagtggcggcgctgccactgaatgcccggattgagattgagtgcatcgctgctctctaatcagatcatccaaccactcattaaatcatcaataagcacccaggaatttgtggtagaggtacctgtaccagttcagtgtctgaaaactgcgggtaacaaacctttgtgtcccggataagtgatgtgtgtgtgtgtgtgtgtgagtgaacagtgcatctagtaggagaattgttgcgtggtttgttacttggattcttcgctctttagacaagaagtaccatggcatcaacatcaatagcctactgttttcttcccaataagaatgaattggcttccccaacagatcatggaaaaaaaaaaaagccgtcgtgcgtaatattgtttt

SEQ ID NO: 141357 - DNA, 316 bp, Zea mays
  Clone ID: MRT4577_60399C.1
tgaatgtacgatagaaactgaatagatgatttttgattagtatgttgcatatcttagtatgctatagcctataacggtaaggaaacattctttgtcaatgaattccatttaaattttagtattagaagcagtggttctgcttcaactcatcttctgccctacccagccttgtaaccctgctgttggtggccctgcaacgcttcaactcgcccatgaagtagatgcccttggtggtaaaattggaaaaattactgataggtgctacttgcaaaagcgtgtactgaacagctcaaaaggccctgctatatgtgcactg

SEQ ID NO: 141358 - DNA, 559 bp, Zea mays
  Clone ID: MRT4577_6039C.1
caaaaaaaatattacacaaaagcatgtcataatctacattcgaaaggcagatacacattaatgctaggggagaaaggaggcaacttcaggtgttgcgttacaatatttgatccttgcataacatacaatagtttactaatatcaacattctatttgcaagagtagtcatgttgtaatcaaaattggcctgatctcatcttcctgtattcagattgcttgcaacaactactatgcctagaatgaaatctcacttggtgcatggaatgttcttccactgcatatagcttctagattctctccagcataagagcaaagcggagaaacttcaactcctggaagtacaggcaatgttttaacaacaatcaatgtgttcccatcaaaaatattcttaccttgctgacagattccaaaacatatatactagggctgcaattacctgtcatatacaagggcacagaatgagtcaagaagccacctgcagcaaccacccagcggctatgtagccgaagcagcattaatctggcactgtcaggagtgtcataagttgcaccattagcat

SEQ ID NO: 141359 - DNA, 322 bp, Zea mays
  Clone ID: MRT4577_603C.1
ggttggcttctcctccccctccggttcgggttcgggtacgtgaggttctccggggttcgggttcgtgggtgagcggatcagagaggcggcgtcggatgttgagtaccgctgcttcgacggcggactcgactggaccacggacgaccactccctacacaacaccttcagcacctacggtgaggtcctcaagtccaagatcatcctggaacggaagacacaaaggaaccgaggattcagataaaaaacctactacacagaggaagcgatgctaaacatcatataggcgcataaacgaaaagaaactggacgaacactacatcac

SEQ ID NO: 141360 - DNA, 550 bp, Zea mays
  unsure (1)..(550): unsure at all n locations
  Clone ID: MRT4577_60400C.1
aattcngcacgaggggacgacgcggggccgtgccccccgccccaacttgtgaggggtcaagaggggcccctcctccctcgccgcgggacacgcgcgccgtgntcgccagcccggggtcatttctccgtgccttggggcggggggagccgagcgctccgggcatggggtgctatcggggggcggccgcgntctcgagactgcgatcacgcatggggcangaggccaccacgcgggggggggtgaggggggtgcanatgcgnagcgcgtgcgatctcnatcttaaggcccaggtgcgggagttgattccggacaacaggagcggttaaagaagctcaaggcagagcgtggaaagacccagcgtgggaacataacggtggatatgggccttggggggatgagagggatgactggaatgcgttnggaaacatccctacttgagccagaggaggggattcggtttagggggctctcaattccagaatggcaaaaagtgcgtggcacagcggtgaagggcggcgaacctttggctgaggggctcctttgggttctt

SEQ ID NO: 141361 - DNA, 258 bp, Zea mays
  Clone ID: MRT4577_60401C.1
gttttaggggcatgaactcttatatcgggcttgtgcttaccgtgtactctttaatttggagcaaaaccatttttgttgcttattacaatgcatttaataaccacagcgtacccgtcgggataaaaaaaaaaaaaaaaaaaaaaaaaaaaaaaaaaaaaaaaaaaaaaaaataataaaaaaaaaatataaaactaaaacaaaaaaataaaaaaaactgggggcggcccccatttattaacttgttcaacccggaaataa

SEQ ID NO: 141362 - DNA, 255 bp, Zea mays
  Clone ID: MRT4577_60402C.1
gatgaatcaggagtacaaaatcacgaggaggacgactttgatgacttagatcagctgctagagtgaagaaagtctgtaaacgcttaacgtcgtgtaaccctgtgattcagcatactgcgagatgaaatccttgcttgtctttacgtgcttctcatttttagttgttgactttctgttctcctaccctcactgaagcaaaatcttgtacatgatggttccagactttcagttttagtgaagcttgtgtcccgtttc

SEQ ID NO: 141363 - DNA, 205 bp, Zea mays
  Clone ID: MRT4577_60403C.1
gccactcgtacgaagacacgttgaaccggatgacgggggtgccattccttgcctacggtggcatctcgccacaataagtttcacacggaaccccgtacgaactacaggattcagaccacggcctacagctgtgacagtgcagatattttgaccgaagagctagcaccctaagacagtctaccgtgtcacaaaccgagtcctgggg

SEQ ID NO: 141364 - DNA, 813 bp, Zea mays
  Clone ID: MRT4577_60404C.1
attccactgtcacactgtctcactactactgctgatacttcactgctactaccagttcacttccttgggatctcggccaacatgtcgacggtgacccgcgcctacctcgaccagaggctcgccgccgccaaccgctgctccagagaggctgccatggccggagccaaggccgcggcagtcgccgccgtcgctgccgcagtccccaccctagcgagcgtgaggatgctgccgtgggcgagggcgcacctcaacccgaccgggcaggcgctcatcgtctccaccgtcgccgggatggcctacttcatcgtcgccgtcatcatggtcggcagccccaccaaagggacgcggttccggccgctgtcgctcaacgtgcccaagccgctcttcccgctcgccggccagcccatggtgcaccaccacatctccgcgtgccgccgcatccccaacctggcgcagatatacctcatcggcttctacgaggagcgggagttcgcgctctacgtctcctccatctccaacgagctcaggatccctgtcaggtatctgagggaggataagccgcgcgggtcggctggagggctctacagcttcagggactacatcatggaggacagtccggcacacattgttttgctgaactgtgacgtctgttctagcttccccttgccagacatgctcgaggcccataaaaagtatggaggcatgggcactttgctagtcaataaggtatctgcggagtcagccaaccaatttggcgagctagtagctgatcctgaaacaaatgaactgttacactatacggaaaaccagaga

SEQ ID NO: 141365 - DNA, 275 bp, Zea mays
  Clone ID: MRT4577_60405C.1
aaaaaaaaaaaataaaaaaaaaaaaaaaaaaaaaaaaaataaaaaaaaaaaaaaaaaaaataaaaagggaaaatataaaaaaaagaaaaaaaataaaacaaaatataaaatacctaaaaaaaagtggtgtaaaatattggtttaaagctatgttaaattatcatgataggatgttacaagatgaatactctatcatatcccttttaagaagaaactttatcttaaagttcatgtactacccatagaaatggatcctatagtaacacattgaacac

SEQ ID NO: 141366 - DNA, 413 bp, Zea mays
  Clone ID: MRT4577_60406C.1
atagaagacctgaattaggtaaaaccgccgagaactaatcaatgagggttaaaagtactgcggtgaacacaattgccacatgaagattcgcaacatttcttagatgacggtacataccgagaacctgagcctgataatatgctcggtccacctaatggccaagagggaacgccttactcactggtcagaaacaaagctggtcgctttacacctagcactgagacgcattctctcaccactgtcttcagcgccgcactgaggcgaactctgacctgtaacaatgggactccctaagaactcgagcatcaagaacatgttgagactgtggcttttgaccgccttaacatggagctgacataagcctcactttcagtttgagatggccaatgaggcaaaccttgcgtcagaataca

SEQ ID NO: 141367 - DNA, 347 bp, Zea mays
  Clone ID: MRT4577_60407C.1
acaaccatcattattcgtctccggctaaatcaagtgaccatacgtacgtacataagcacggacggctgtgcaggcacacgcagaagctagtaactggttgcatgcatacgagctcgtgcacggagcgttggtctatcgccgacagacccatactaccgtgggcgcgcgcacacgggcaggcatcaaggatgtgggtcccctgccaacacatgggggggacgggacgtctataggaaaggggagcgcaccaactggtgattcacggacccttactcacgctggcacggcaagagcccaaaactgctgctgcggtagctaacgccacgacatgtgcttcttgggccaca

SEQ ID NO: 141368 - DNA, 1533 bp, Zea mays
  Clone ID: MRT4577_60408C.1
tattcggcacgaggggcgggccagcagctggacaagcaagcaagcaagcaagccaataatggcgtctcactctcatcggtcccggtctcccacggcgccctgtcccagctgggggcacgcccacgcgccgcggtgccggcggcggctcgtccgggcactgctgctcgtagcggcgctggctggcggcggcaggtggtggtggtcgtggctccgcggccgccgccgccgccgccacccagcagaggatcccggccatcttcatgttcggcgactccatcgtggacccgggcaacaacaacaaccggctgacggaggccaaggccaacttcccgccgtacgggcaggacttccccggcggcgtcgccacggggaggttctccaacggcttggtccccggggacctcctagcttccaagctgggcatcaaggagctgctgccgccgttcatcggcaccgacctgcagctcgaggacctgctcaccggcgtggccttcgcctgcggcggcagtggctacgatccgctcacgtccaagctcgcgacgaccctgtcgagcgccgaccagctccagctgttccaggactacaaggataagctggcggccctggccggggaggaggagatggagcgggtcgtctcgcaggccgtctacttcacggtgatgggggcaaacgacatcgtaaacaactacttcatcctccccatcagacgccaccagtacgacctctcgtcctacgtcgacttcctcgtctcctcggcgatcaacttcacaaggactctgaacgacatgggagctcagaggatagcgttcctcggcgtgccgccactaggatgctgcccgtcacagatcacgctcgcggggagcccgtcgcgccagtgcgatccggcaaggaaccaggcgtcggagctgtacaactccagggtctccaaggagatagagcgcctcaacgcggagcggagcggttctggctccaagttcgtctacgtcgacatatactacaacttgctcgacctcatccagaatccagcttcgtacggtttcaaggacgtgagcgaaggttgctgcggcagcacggtgctgaacgccgccatcttcatcgcgtaccacagcgcgtgccccaacgcgcccgactacatattctgggacggattccaccccacgcagaaggcatacgacatcgtggtggacaagctcatccagcagaactccaagtacctgatgatgtgaagacagacacttgctgctgcatggcattgcacgagggctctacctttccccgtacaaacacacagccagctgacgtcgaccattcatggacgactccccacatggcagtggcatttgccaaatgtacgatacatattaacatataaatatactatacatgcctgtgcgccaatatcatacagaaatgattcattagtttgtatgtttttagctacaagtccatccttacgacgattattatatgttgtacagaaccaccacagatcgatctgtaactatttgtgacactgacagcaaccagccaact

SEQ ID NO: 141369 - DNA, 188 bp, Zea mays
  Clone ID: MRT4577_60409C.1
ccggcgcgggcgtacggctacgcacacggacatgcgacgaactggctctgctaagttgccccatatatctggttccaggatgaaggcgtgggggcgtagtgatacacaaaacgctctggacgccaatctgacgatacttgcctacatctacgctgaggcctttaacaaaattagccagaacgacacac

SEQ ID NO: 141370 - DNA, 2060 bp, Zea mays
  Clone ID: MRT4577_6040C.1
ccgggaagcacgcgcgcttgagcctcctatgttcgtctatgaacgcgacggtgtgccgattggaccaagggcgaactcagactggctctacatcgtgccttggggactgtagcaaggctctctcgctcacttcttcccagcggagtgcgcagtcgtcatggctaacgctagccgtggtcgtgtcggcggcggcgggcgaagttccgtgctcgcgctgcttctcctgctttccgccggaggagcccgagcgtcctacgacggcgagggcgaggcaggggcaggggcagaggagaaggagaaggctgcggcgtggacgggcgggctgagccggcggagctttcccaaggggttcgtgttcgggacggcggcgtcggcctaccaggtggagggcatggcgcacaaggacggccgcgggccgagcatttgggacgccttcatcaagatccccggcgagatcgcaaacaacgccaccgcggacgtgactgttgacgagtaccatcgctacaaggaggacgtgaatatcatgaagaatatggggttcgacgcttaccggttttcgatctcttggtcaagaatattcccaaatggaaccggagaagtgaactggaaaggagtggcgtactacaacaggctgataaactacatggtgaagaaaggcatcacaccctacgcaaacctgtaccactacgacctaccggaggcgctggaggtccggtacggagggctgttgagcagagaagtggtgagatcgttcgcagactacgccgacttctgcttcggggcgttcggcgacagggtgaagaactggctgacgttcaacgagccgcgggtggtggccgccctagggtacgacgacggcaggttcgcgccggggaggtgcacggggtgcgaggccgggggggactcgggcaccgagccctacgtcgtggcgcaccacctcatcctctcccacgccgccgccgtccagaggtaccgccgcaggcaccagccgacgcagaggggcagggtcgggatcctgctggatttcgtgtggtacgagcccctcacggcggactcagccgccgaccgggccgccgctcaaaggtccagagacttccacgtcggatggttcctgcaccccatcgtctacggcgagtaccccaagtcggtccggagaagcgtcaagggcaggctccccaagttcacggctgaggaggccggtctagtccgaggctccatcgactacgtcggagtcaaccagtacactgcctactacgtgcgtgatcgacggccaaacgctacggcggcgccgcccagctactcgtccgactggcacgctgagttcgtctatgaacgcgacggtgtgccgattggaccaagggcgaactcagactggctctacatcgtgccttggggactgtacaaagccgtcacctacgtcaaggagaagtacggcaaccccacgatgctcctgtcagagaacggtatggacgacccgggcaacgtcacggtgggccagggcgtgcgcgacgcggcgagggtggcctactaccggagctacgtcgccgagctgaaggcggcgatcgacggcggcgccaactgcgtgggatacttcgcctggtcgttgctcgacaacttcgagtggaagctggggtacacgtcccggttcggcctcgtctacgtcgacttcaggacgctccggcgctaccccaagagctcggcgtactggttcagggatgtcatcgccggcaccaactgaccacgtacggtctctcagtccatctgaaaaagggttagagaaggggaaaaaggatggggaaaaaacatgagtgtgtaatccgcgtaccgatatatataagtactcttgtcaaagttgatcttcagaccgtaccaattgcttccgagaagacatccagcggaacctttcaagcgagcaatgccagctgatttggcttggactttacgttagttcataagcttggtccccatcccatgcctcaagtaaaccctcatatatatcccggtgggcatgaagtcaaaaaaataataataacgtgatgtcccgtatgggttttggcccc

SEQ ID NO: 141371 - DNA, 470 bp, Zea mays
  Clone ID: MRT4577_60410C.1
ggggaacccccaacaacccccacaaaatccttttgaaggcccaacagaaacaaaacctttggggtacccccaaaaaaaaaaaaactttgggctttggagaaaaaaaaaaaaacctttgggaaaaaaactttacctaagggttaaactgggggacatttgggtttctaagggcaaacaggggaatcctgtctcccacaaaagggggggctccaaccgaaaggggatttaatgaaaaccccaacctttttaggggccacctgggcataaacggggggaacaggtggatccactaaaatcctggggacatccccaatttaaaagggggggcaaccttgggaccctttaaaaagccttttcagttaaacccatgtttttgggttaagccatccataaccaccgccaccattgggaaaaggcgacccaggggttttcagccttgggggccatttcttgttataaccagggggaaa

SEQ ID NO: 141372 - DNA, 531 bp, Zea mays
  Clone ID: MRT4577_60411C.1
agcagtggtaacaacgcagagtactttttttttttttttttttttttttttttgggtttttttttttttttttttttttttttttttttttttttttttttttttttttttttttttttaaaccaaaacccggccccccaggggaaacattgggaaaaaaaccccagggggggggggggggctaaacacaatgggccaaaaaaagaaacccccctttgggccccccacccaaaccaccagggggccaggagaaaaattggaaacaagccacccaaaccggagggggcatcccctaaaaaggaataaccccggggggtttaatcggcccgggaccccggggggggaccccccggtaaggggggaattcgggaaaaatccatcaccaggggggccgcccgagcacgcatttaaggggcccaaatcccccaataggagggagaataaaaaggacgcgggcggggattaaaaaccccgcggcggggaaacccgagggggaccccaacaaaaaaacgcgggaagaacaacccccct

SEQ ID NO: 141373 - DNA, 470 bp, Zea mays
  Clone ID: MRT4577_60412C.1
gttagaaaaattggaaaaaattggggaaatagggggaaataagggggaaaagggggaaaaaatgggaaaaggaaaaaaaatttaccgggggaaaaaaagccctttttgggggacaaaggaaaatttgttgaggcggcgtacaaatggggggggggggggtccaatgagaaagagggaaatgtggtaaaaaagcggggcacggggttaaaccgcgggcggggctttgaaacagcattgaaaataacataattacactaaattaaccgatcaaccggtgtaaaaccggaggaacaggggtaaaaaggacaaaggggggttatgcacaacaaatggcgggagttagcctgttagcttcagaatggcccgggggagcgacaaaagggagaatgtaggggccccacttaagggggcttacccaaaaatggggggggccacaaaataaaccaagggggtagagggaaatttaaaaa

SEQ ID NO: 141374 - DNA, 156 bp, Zea mays
  Clone ID: MRT4577_60413C.1
gacgatctgggcctcctgcagggcagcagcggtgacagcagggctccgggagaccagggagagaaatacatcgatctgaggcattagccccgaatcacttcagctcccttccctggcctggacaattcccagctccctgctcattgttctctcagc

SEQ ID NO: 141375 - DNA, 287 bp, Zea mays
  Clone ID: MRT4577_60414C.1
atggggcaaggcacaaattatctttatttaagcaccaagagcttttggaacaagtgataacaggagaggtaccatgtctactggctgcacacaacacacggcacaaggtttttcccaaaattaaactccagttcattggcacatttgacagaatgagcccattcacaccgagccacggacgttcatggattgagagaagagcgacacatatacatataccattactaccgaccacttgtatattctagggagtgttgcccattcattaaatgagaggacctaggagt

SEQ ID NO: 141376 - DNA, 130 bp, Zea mays
  Clone ID: MRT4577_60415C.1
atttgatgcaggggctggtgtagtacattgccacaaaaactgcctggagtgggctcctgatgtctactttgaagatgactctgtctttaatcttgcaaatgagttggctagaagtaaaagaatcaaatgt

SEQ ID NO: 141377 - DNA, 610 bp, Zea mays
  Clone ID: MRT4577_60416C.1
cccacgccttcgtagactacttgttgcattgattcttgtagagatcgaccttatggttgcaccataaggtgcaggatgtgttgaagctgcggatcaagctgaagctgcaggtgaagctggaagtgccgtaagaagtacgataccatgacacgagacgagcaccaccgcgcaggtcaccgtcgtcctcggcaagaacgccgagaacaaggccgtgcacgacttcgtcgaggccggggaggactcccacgagtgcggctacgcctgcagctgcaatagcaactgctagagctacccctgacattgctcatcacatatatctacgaccatgaataatataattatctatgtagcttgaacagtaggaagaacaatcataatcgatgccatacttactgccatacataggtattgtatagagagagagacagagagataaacagagctctttatctcgctatctgtctgtctgcatgcttggcgctaatctacgtgctcatacacgcatgtctacatgcatgatggctgatgctattgacctatctgaaaccatatattaataggtgcacgaagacttgatatgatactatatacttatatatatactaaaaga

SEQ ID NO: 141378 - DNA, 331 bp, Zea mays
  Clone ID: MRT4577_60417C.1
atctcaggggggtttttttcttttttggagcacagaatggttctatacattaaatctgctcaaaccagggtttagtttaaaagtacaccaaacttggcattattaaaaaggctttgttcaactagcaaaaaaaaaaaaaacaatgggacaaaatacccaaccatttttagggccaagaccttcaacattttccctcggaagggagcaatcttggaaggatctgacccatatttcataattcggaaccccgaaaggggctttgagatggggtcttttacaaaccatttgggggccaaccccatatgtttccagggcagataaggtaaggttg

SEQ ID NO: 141379 - DNA, 511 bp, Zea mays
  Clone ID: MRT4577_60418C.1
ttccggcgagatacccagcgggttgagccagtgcagggcgctcactgacctctccctcgacggcaactgtttcaccgggaacgtccccggcgacctgtacacgctgcccaacctgaggaggctgagcttacaggaaaatcagctcactggcaacctcggcagtgaccttggcaacctctctcagatcgtgcagcttgacttgtcctataacaagttcacaggctccatccctgatgtctttggaaacatgaggtggctagagtccgtaaacctagccaccaacaggttggatggaagagttgcctgcttccctgtcaagttgtccactgcttaaggtaatcagcctgaggaacaactctctgtctggcgagattgctatcgacttcagccggctgccgaacctgaatactttcgatattggaaccaactatttgagtggcgctataccttctggcattggtgtgtgcaccgagctcaagacgctgaatcttgcaaggacaagctcgggggg

SEQ ID NO: 141380 - DNA, 655 bp, Zea mays
  Clone ID: MRT4577_60419C.1
ttcaggcttgcagaggctgataagttaaatgtcatcaactggagaccatcctcagctgccgatgcctatgcgatgatagaagaatgtgggaaacgattttccagggatgaacgaggagaagcatgtgatgaagatgaacgagtccaggagtttcttgatatggtgaaggaggttttgccagcccctccgaaagcagaggtggagacagcagaggcagaggcagaggcagaggccgaggcggtggaggcagaggccgaggtagaggcaatgcaagagtgaatgtggtgtaagttaacatatttgagggccagattgcattagacactagtgctaagtgctgcaaggaaacttagaacactcaggtcggctgttagttctggaagctttccccctaatgcttcgtttgaatattatcgtattcatctcaatccatgtatattgaggtggattgaggcgtaaattaaactattttacactccaatctgcctcaatacacatggattaaggtgaatataggagtatccaaacaagccctaaagttttttactcttaaccatattctacactcggctgtgtttattgtgatatgctgtgatctgcattctgggcagtgcttcatcatttaacagaaaccccagctgtgtattgccccgcg

SEQ ID NO: 141381 - DNA, 443 bp, Zea mays
  Clone ID: MRT4577_6041C.1
aacggccgccagtgtgcgtgcaattcgccctttcaagcgggcgggcggggggaggggcgagctttttttttttttttttttttttttttttttctggaaagtaacttcttatttctaggaggccccatacatcatcccaaaaacttcattattgaattacaactattaagcaatctaaaaaaggcatccccaatggggggggggggggaaaaggctgctgggtttttcaaagcaagtgggacaaagggaaacaactgttgcagttctaaaaggggttcggggttagccacaaactgctggtataaccgaagcaattgttgttgtgtcaaaaaggaagcggggcttgttgtaactagctggccaaatgggagtaccatttgttgctggaaataaccagaggggttcatagcgcccaattggttaaatggaaaaaatcaattctg

SEQ ID NO: 141382 - DNA, 693 bp, Zea mays
  Clone ID: MRT4577_60420C.1
atgcaacaagacctcgaggataaaaagaacgaaattataaccgagggtctagagaacaaaattaaagagtacgaagcttctcttgaaaagaaagattttctactccaagcagtggaaggctcccttgcagaagtgcaaagtgaaaatgctagactaagcagggagcttctccaaaaatcagagggcttcgaacaggaaagaaaagacttgcaggcgaagtatgaagccgaagctgccaagaatacgaagcgacatctatctctgaaagagcttcgtaacatgtgcctgaactttggcagctgttgcgtagagcgactaaaaaaggtttttaactcggttggagccagcgctgaaaagtttactccttcggcaaaaaatatatcaagcacctttaagcacattgaaggcgaaattgaggcacttgatgaagtaatagcagggcatggtgacttctgcgccctgctagcctctcgtggcacggctgcagcttttttgaaagctagttgtacgcacgcaaaaatagtgaataggcctagcttcaacctatcttcgacagatttgactgatattcctggcaaagcccgaagcataggaagtagatttataacacaaatttgggcgaagtgtggtcgagacttggctggtgatgatgcccgaagcttattgaagctggatgatgatgccgaagattag

SEQ ID NO: 141383 - DNA, 509 bp, Zea mays
  Clone ID: MRT4577_60421C.1
aaaaaaaggggccaaattaaatttaatagatttatttggaaaaagaaaaccaaggggaataataaaacgggaagggtgggggggggggggtttatcggggtttcaaagggggtacaagaagccatggcctaaagtaccttgtacaggggggggggccgattggggggctggaattgggagaaaaaaaaggggggggggccaaaaaaggaaaaacggggggaaaaaggaaaattggggccattaaccctgggaaaagtgggcctttgaaggccttaaaaaaaaaaaataggggggggctaaaaagtggaaagggaggaggttcccggattgaggtcaattgggcgtgaaaagagtttgaaagaaagggaaaattaatccacgcgttaaaaccgggaaaaaagttttaatgggagggttgggggattttttaaagaaacctaaggggaagttttttggggaaaaaaatccataaaagggtgagggtatggaaacctaaaagccattggggg

SEQ ID NO: 141384 - DNA, 584 bp, Zea mays
  Clone ID: MRT4577_60422C.1
ctctctctctcccggcgctctccttccccagccgtggagctcccacgcacgattctctactccatctcctaaccgagccccctccagccacctccctcggcttcttcctcccatccgaccgcccctgctcatcttcctacctcccgcagctcccagccgagcggttctctccccctgtgcgcccttcctgcttcccctgctcggatttctactttcctccatggccgaacgtcctcttcatctctggtcgacctcctctcgcgctcggctcttcaccggcgagctccctggtgccgcgcccggctccttgccccaggaccttgccgcgcgagcttgcctctgctcggccgcgctcacgccggctccctgttcggcgatggaagacgcgtcgcgcgcccaagttcctgcgcgtccctctgcccctacgtgtgctcctatgtccatgccgcgctcccagtgtcgagctccagccgcgtccctgtccctgtccatggccgccgagtctctctgcgcgcggctcgcgccctgcacggatcccctccctctgcccagatctcgactttcggcccagctcgctccagctt

SEQ ID NO: 141385 - DNA, 179 bp, Zea mays
  Clone ID: MRT4577_60423C.1
aggcgcgcgaaaagcacgttctgtgcacattctatacatacaatgatataaatggcactggactctcgttagggacccgttagatcatatgatgccgagctacaaaccatatttgaccgtaccagctgcctaccaaacttcctccggctgtcaccaacaccactattccaccccttcta

SEQ ID NO: 141386 - DNA, 377 bp, Zea mays
  Clone ID: MRT4577_60424C.1
cgaaagtttacttctgcctgtctatgccgaaattatgaaaaatgatctgcagggcgaaatagtatcggaagaagaagagacatcccagttaggagcattattaatcggagttctttttgcctctcacgatacattatcaaaagcctacaatgggatgatatataatatagcaacccgtccagatatcttgagtcgtcttaaggacgaatgtgagaagggtggagtgccttcaaaggcggtggacttagataaaattgaatatcttagccacttcatcaaagaagtgctgaggttgtatggtgctggtggtggctttagacaatgcacggcaccagttaaattgaatgaaaagattaccttttccgctgggacaaagt

SEQ ID NO: 141387 - DNA, 654 bp, Zea mays
  Clone ID: MRT4577_60425C.1
ggccgggaggtggtccatctaattcccatcggtccttcgcttctacgggatgagatcctctgcccggcgccgcttccatcgccatggcaagcaggcgactcgctccttcgccttaaccgtcgtcttccgcccaaggtcccttccccgtcgccaactgctgccatagcggtctggcatcaccatgtcggatgctgcgggacccgtccaagagcgacagccatgtctcgcagtaccgtcggcatgtctgttctttttttttccccccgaaagcaggcatgactgttcttcgttcatctgcagactgcctccatggagtgctcgagcgacggtccgttgtgagatctcgacttcctcacgaatacggtggatgcccctgacgcccaaactagctgcagagccgtcagaccttactcaagagagcacagccacgaagctctctacctgcttcataggagggcgacagagacatgtattctgattagataggaaacaattctagattgagattgtggatcaatatcgagtatgatgattgtggatcaattctagactgatattctggtgctattgtgatgtttgtaccagtttgtgaaatatgaatgaaattagcgaacaagtttcagataggaaaaaaaaaaaaaaaaaagcccccta

SEQ ID NO: 141388 - DNA, 481 bp, Zea mays
  Clone ID: MRT4577_60426C.1
ttttgggttttttttttttttttttttttttttttttttttttttttttttttttttttttttttggccccgctccaaaaggggggggggaattaacacacccaagggcccttttttgggggaacgggggggttccaaaaaccgggggggggccccccctggaacgggtcatggtggtgttcaacacaggtaaaaaaacctgttgttcagggggggcccctacactataagggggggggccggctggaccaccttgttgaggggggggggcaaattcaccccgggcgagaacccaaaacctttacgggggaaggggggcgttttgacccccattacaggggcctaaagggaaaaaagggggccctctggggttcccccattttttgccgtattttgtttgtttaggcccaccggtacgtttttccattgggagggggggtttcccttccccaaaccattaaaacccccggggggggggggg

SEQ ID NO: 141389 - DNA, 415 bp, Zea mays
  unsure (1)..(415): unsure at all n locations
  Clone ID: MRT4577_60427C.1
acaggggggggggcactatcctataatattttaaggaatatagggaactaaaccgtaaataaagggcctatactaagggttcgcaaggaaaaaacaatcaacgtaaatgcagttgaacaaaaagatgacttttttttcaaaattttaactgaagggggagaaaaggatgaactatacttttaattgaccaacgcctcccctgaaggatccctataaagccctcaacctcctaaagccataaatatcagtattttcacacgagggcggggggggagcattttgcactatggtttcgtactcggcaaaagggggaccaccggacactatgatacaaaaaaattttttttggggggcattgaccttgacatgatcattgaagaagcctaccanattttcctttttgagctccctcagg

SEQ ID NO: 141390 - DNA, 639 bp, Zea mays
  unsure (1)..(639): unsure at all n locations
  Clone ID: MRT4577_60428C.1
cacaaagaataggggcatctatatttttgtacaattgaagtatatgcacacactagatgaacaccacttatttttacgctagagtacatttttacgatcctagtcgagggagtacacctaatcttacttggatttgtggggggtttgggactnccgtagggtatgcagttttcttgctacctccttcatgttcgaccgttgagatggtgatgaccccgtgcaaaaaagtgctacttgcagtagagccaccaggcatgggtacatttcgaagaaagttactttattgccctgaattaaatgctcgcattcttccacaagatgtgaatcgataatgtgaaatatttgatgcggaaaattgttcttgacgaagctaatgatgtctagttccccggggaacataggatctgttggccttttacctgtcaaaatctctaagaacaccactccaaaactataaacatccccggacgtcgatacagggccaccgcctccatactctggagggatataaccaattgtccccttaacaccgatcgaactaattgaacctgcccaaattgactgaggattggcgtanagacgtgtaatgccaaaatctgacaagagagcattcatatcgtcatcgagaaggatgttgct

SEQ ID NO: 141391 - DNA, 393 bp, Zea mays
  Clone ID: MRT4577_60429C.1
gcacgagggaatttgctggatgcctggatcggcaccaaaccaaaagcgcatcgctgagcttctgatggtttgtaaggacgagaagcgtggtcttaagctggtaaaaggaggaggaagaagaagcgggtgaagagatgctcaattatcttcgcaggaggaagatgtacgcttctatctactacttcccattcgtcgtcgtatgcttggagaaatcatcatggaaatcctgaaagaggtcctgcttttcgttggcagatgagataaaagtttttctattaataaatcacatcgatgtaacctaaccccctccctgctgtactaaaaaggcgttttagccacaaagagtaatgcaattcaggtggggatcctatctcctcctgtgacattcaaaat

SEQ ID NO: 141392 - DNA, 428 bp, Zea mays
  Clone ID: MRT4577_6042C.1
catcgatcactatctgttaaatgtttcaaagtttaatatccatatatgtattttttttagcttttgaacagtcttttgtatgcaccacttgtcataactttcatgtgaatcagaaaattaaccaaaaattggttgattcactttggagttagattagtgtgcatatataggattcattagctccattaaatccttgtcacccaatgtgtacttcgtgtttgcgtgtgctgcttcaggtgccagctctccagagattcatgcgaagtcgagcacacattcaccagcaaacaggtgtccacattacatcctcaactatctacacttctaccttacacattgctagggtaaatgtgagggaccctggtacaataaacgatggcctcggtgctgctcgtgaagcagatgccctattggttcaagatgagtct

SEQ ID NO: 141393 - DNA, 294 bp, Zea mays
  Clone ID: MRT4577_60430C.1
cggtgcgagcggaggaggcgtacgaagcgccacttgcttgagtagcgaagcgcgagagcaatggcgtcgctgtcgtgcgcctccacgctgccctggacccccgcctcctacccgcggacctcggtggggcgctgccatgaccactctctcaggtccggccgttctattagatccggattagcgaaggtgggcgccttcccgtcgctggacgtggtgccgctgatgctgacgatggtggagcacgtggacatgtcgcgtgactacgtcctgaccaagtccatctgccatctcacc

SEQ ID NO: 141394 - DNA, 254 bp, Zea mays
  Clone ID: MRT4577_60431C.1
aaatccaaagcttttgaagtgaagataaaaaagaatttagaacacctggacaacatgttcgggctccaatgtccaaattgtataattttgggtcggtgtaaacctaaaaaactatggcagtgggtattgtcatatttacatatttggaacaatggaaccctgtctgggataacaatttaaaacaagaaaagaagaaatttttttacgaacgatcagtaaacaaaatattggacggctaaaataattcgattttt

SEQ ID NO: 141395 - DNA, 217 bp, Zea mays
  Clone ID: MRT4577_60432C.1
acgtctgagagtgctgttaagttaactttctaacgagctacccagccgcaggtccccttattgcagagcagaaaacaaaggacttttgtcaaaatgttgaataggactgaggtgccggggcgcttagtcagaatcaaggccgagagcacagcagcctgataacacccctgtgcagccaaccagggtgagctgctacagctatcatctcttggcaagc

SEQ ID NO: 141396 - DNA, 814 bp, Zea mays
  Clone ID: MRT4577_60433C.1
gccgtctccctcctggcctcctcagtcctcacgagagaaacgcaagcgagacagcagcagagcagagacgctgctaccgaggcaggtgtcactggccgcctagccgtggccggggcagtggcatatgcactgaaagatcgattcaccacgagaagagaaccacatgtggcccgcaggagcggagcacccgatgggcacgggccagggccagggccccgcggcgccgtcgccggggtcgagcgcatcgacggcgtggcagtcgccggtgccgtactacctattcggcgggctggcggctacgctggggctcatcgcgctgtcgctcctggcgctggcctgctcccactggaagctgtccgtgtccggcggcagcctgctgccggccggcgggccggacgacgacggcggcggcctggaacgccaggatggcggcgggaaggccgcaggggagcgtcggcgggagcgcgtgctggtcatcatggccggcgacgagatgccgacgttcctggccacgccggcgctgggccggggcctggacgacgcccgtggcggcgtcggcggcgtgtgcggcgaggatgggaggtgcggggcgaggagctagctcttggctggcggccgacgacgcgcagagtggtggtagcactggtagctctgcggtaatcagtgagagatgaggccatctctccagcaagacgtcagacgtgtacctggtcatgcaaatcactgttcagattgtagtttgaaacagtgggtgattgattgtagtttgaacaaggagtgagatagaaaggccgctgagcgtatttcttgcttc

SEQ ID NO: 141397 - DNA, 316 bp, Zea mays
  unsure (1)..(316): unsure at all n locations
  Clone ID: MRT4577_60434C.1
cggacgcgtggnaaaaaaaaaaaaaaaaaaaaaaaaaaaaaaaaaaaaaaaaaaaaatatattgtcgaggacttaagcctattnttcaccacagtaaccttggaagttttcgccaacagggnattgtgagaaccacaaaaattcttttggcttgatcccacgtgacttcatccaaggtgaagtatatgtgaacttttggagagtgccagaaagtgttggtcagaaggtgcaacgcaaacatattcattatatattgttcacggttcattacccggtgctccagaatgctcattatttgcgggcacactgtattaca

SEQ ID NO: 141398 - DNA, 481 bp, Zea mays
  Clone ID: MRT4577_60435C.1
tctgtttcatgcttcttaaaaaaaaaaaaaaggaaaaaaaaaatcaaaaaaaaaaataaaaaataaattaaaaaaataaaaactaaaaatctatcttttatataaatacttaatattaataaatattaaggggggggccgtttttggggtcccaggtttcctcccgcgtgctggcgacgttttagtttttttttgggggcccctaatttaaattccctggccgttgttttacaccgttgggactgggaaacccctggtgttccccaacttattggctttggggcacttcccctttcccccagttggcgatatagcgaaggggcccgccccgttggcctttccaaacagttgtccatctttttgggccatggggacccccccttttggggcttattaagcgcggggggggggggggttccccccaggggccctatcattttccggggctttgggcccgtttttttgtttttttcttttcttt

SEQ ID NO: 141399 - DNA, 447 bp, Zea mays
  Clone ID: MRT4577_60436C.1
acacccaaaccttcataaggtaaaaaaaaggagaaaaaaaccccggggccccggccagcggaccacccaaaccaaaaccctttttttttggaaaaaacaaaaaaacacccaacgcgaccccactgaagccacagccacagggcgcccacggaacccttttaccacgcacgcacacaccaaaccaaaaaacacatcccacccgttttacaccatggtttgcccggcccctccgggcttagtgcacgtgaaaacaacccttacaggagctgaatgagggggggcgcgggcttttttttgcccaggccaacaagcaaggcgtattcaaaaaacggcccaaaaagcgggccgtcgggcttaatggggaaaaaggggccctgaaaaacaacccgggtccggtgggcaatggcccaaaaaaccaacacggcgcgcttgtatcctccggggccc

SEQ ID NO: 141400 - DNA, 238 bp, Zea mays
  Clone ID: MRT4577_60437C.1
gacgcacgcgttcgcccacgcgttctcggacgcgtgggtacggacgcatgagaaagaaagataaaataaaaaaaaaggaaagaaaaaaaaaaacaaaaaaaaaaaaaagataataaaaaaaagagcagaacaagcaatatgacctaatattgatatggcttgtcacaaacaaattatactgcgtattacgatatgtgaatgtaaagcaatatgtttactgttaaaagatcctaattat

SEQ ID NO: 141401 - DNA, 589 bp, Zea mays
  unsure (1)..(589): unsure at all n locations
  Clone ID: MRT4577_60438C.1
atatatataggcacaactaatatgggcncattatgggccttaacaatatcaaccatcaaatatgttaggcaaaatttgctccttgccatgcaaaacaatgccaactggctggtgaacatcatgaaaacgaatgttttctgggcaacacggctcactggatattatcttgtggacactacctcgaataaaatatggtgtccagaaagcgaagattttttattctaaataaatatcactgctgcccatttttggtgggttgacgaacatagagcagcacagcgaccgatgcatgtggttgatgcacgtttagcttggaattgggctcgcacatgagtccaattggaacaacgacacacataggatcttggggtcactggagctgccggtgggaagaaaagaagcgatggcggcccatggagatgggcgaattctgctcctggcatgctcaagtctgcctgaggcagcagaggttcattgggatgtggcaactggcaacacaccctggctgcctggtgccgaggaaagtgcaagagctctagaatggccgcacggtgagaaacaaagaagcagcgatgattttctgttgcga

SEQ ID NO: 141402 - DNA, 717 bp, Zea mays
  Clone ID: MRT4577_60439C.1
ccggccgggctcctgctccagatctcttcactcggccactccctagcacatcaaaccctagctccgcccagccccccacagtctaattcgcagttatagaactgcaggcaatatggcaatccaaagggttaaagagctggcagttagcatagaaggaaaaagccctgaagagaagaaatcactgctagccaagtgcgctgctacaacactctcttcaaaacttataggtggtgaaaaagaattctttgcttctatggttgtggatgctgtccttgccattggcaatgatgacaggcttaatcttattgggattaaaaaggttcctggaggtaccatgagagactcttttttggtgaatggtgttgcattcaagaagacgttttcatatgcaggatttgagcaacaaccaaagaagttccttaatccaaagattcttttgttaaacattgaactagaattgaaatctgagaaggaaaatgcagagatcagattgtctgaccctctgcaataccaatcaattgttgatgctgagtggaacattatttatgacaaactggataaatgtgtgaaaagtggagcaaagatagttctgtctcggctagctattggtgatcttggaacacagtattttgcagatcgagacattttctgtgctggccgtgtcactgaagaagatttgcaacgtgttgctgcagcaactggtggaactgttcaaac

SEQ ID NO: 141403 - DNA, 1229 bp, Zea mays
  unsure (1)..(1229): unsure at all n locations
  Clone ID: MRT4577_6043C.1
aggtaccttcgtgctgtttcattctggaagaacataaagcaactttcagaaaataccctccagttaatggtcagatcaaattggaacgatttcctacatattattaaggaccttcaactaccaagcatggatcatcttatttcgacaatagtgcaatggtttgagaggagaagtaaagcatttgagcctacttatttgtatggcgtggaaaagggttatttcttgctttctgaaggtgctaaaactcgtcatggtgtccgaacaatcaatatcacaatttctgctcgaaatccttgctttggaaacaggtggcagcaacttttgataaacagcattgttggatatgatactatacttacaaacagcttggtgaattctcctggtcatggctatttatacaactttcagacgaaggagctctatgatcttagttatgggcatgaaccacctatttactttgagagaaacacaatcccgcatgcttagattcacaggttggtgttctttctgtaggttgcggcctggactgctttgcacttaatattatttgattcacctagtgtgttgttcttccttaaaattttcagtgcagcttcaacaccatgcacgccaccacctgccaacctttcagttgatattcgtgcatgtcatcgaatcattggtttttgtgccggtaatgggaaatattctttggcgttttggagtatttgtagtttgtgatgaaaatacattcgctgcagaattcaccgaacttctatattagctcactcattattttgttctgatctttgtagattatgattgggattctcttttttctatttgagttctatgatgatcaattgcttgcgtttcttgttttgactcttgtatggttatgcgagctattcacgatgatcaggtaatggtttacatggaagtattactggattttttattatactctactcctgatgtgaaacacctacccttttagagaattcactgtttcatacaaattcctgatgggtctggtttgggtcgggtcgggttcatttgtgatccaggggcaccaaaatgaaaaaaaaactctcctctttcaggcgtaaagagtnatttaatggggccccaggcacccagctaacagctacaatttgacagcgcctttccccccaacagtgacttttgctgtgttctataggctagagctaataatacgaagtcgtgatgtcccacggcaaattttccta

SEQ ID NO: 141404 - DNA, 255 bp, Zea mays
  Clone ID: MRT4577_60440C.1
cgcggcggtactgctgggaccaaccacgccttcgtggatagcgtgcacagtaccagcacagggtgggcttttttagtggaaagggggggtaccccctatactgcccgttggaggatagaacaaaatcgtgccgcactaccggcaggttttctgggctaacgtggagttcatcggcataggtttctctagcacgaatggtgtgaagttatttcacttaacctttacaaggcaacaaggcacccgtatactggttag

SEQ ID NO: 141405 - DNA, 492 bp, Zea mays
  Clone ID: MRT4577_60441C.1
ctatctatattatttcatttttttttttacttcttttttcaccatgtctattttactgatctctttcttttactgaaacaaaccgcagccgaagctgggatgcatctacgaacaccacaccccgtgggggggccccagcagctgctcccgcaagtaggcaacacaaaaacaccacccgccccaaccactcagtgatggcaaaaaacgttgccgttgaaaccctgcgatgaatagaaaaaatagatgtgccaaagattgttgaaacaattgggcaaaagcttcttgtaaggccctcgccgcaagcgctagccccagcctataggctcgcacccctggatgggcgaagcccatacaagcaactggcgggaggaactggggaataatggcactaccagcaagggagcactgtggaataatgaacgcacctggtgcactcactaaacgggcaagaagcccaaggagggctaatatctaggtagccattgttcccgc

SEQ ID NO: 141406 - DNA, 2238 bp, Zea mays
  Clone ID: MRT4577_60442C.1
gcacgagcagcaggagacggacgccaggtttttttccttttagaccgcaacctcaaaaccctagcttgtccctcctgctcccagatctcttccactcggccactccctagcacatcaaaccctagctccgcccagcccccaaccatgtcggcgatgatgcaaccgcagatcatcctgctcaaggagggcacggacacgtcgcaggggcgcgctcaggtggtgagcaatatcaacgcgtgcacggcggtgggcgacaccgtgcggaccacgctggggcctcgggggatggacaagctcatccacgacgacaagggcggagtcaccatctccaacgacggcgccaccatcatgcgcctcctcgacatcgtgcaccccgccgccaagatccttgtcgacatcgccaagtcgcaggactccgaggtcggcgatgggacaactactgtggtgcttctagctgcagaattcttaaaggaagcaaaaccttatatcgaggacggggtgcacccccacagtctaattcgcagttatagaactgcaggcaatatggcaatccaaagggttaaagagctggcagttagcatagaaggaaaaagccttgaagagaagaaatcactgctagccaagtgcgctgctacaacactctcttcaaaacttataggtggtgaaaaagaattctttgcttctatggttgtggatgctgtccttgccattggcaatgatgacaggcttaatcttattgggattaaaaaggttcctggaggtaccatgagagactcttttttggtgaatggtgttgcgttcaagaagacgttttcatatgcaggatttgagcaacaaccaaagaagttccttaatccaaagattcttttgttaaacattgaactagaattgaaatctgagaaggaaaatgcagagatcagattgtctgaccctctgcaataccaatcaattgttgatgctgagtggaacattatttatgacaaactggataaatgtgtgaaaagtggagcaaagatagttctgtctcggctagctattggtgatcttggaacacagtattttgcagatcgagacattttctgtgctggccgtgtcactgaagaagatttgcaacgtgttgctgcagcaactggtggaactgttcaaacttctgtaaataatgtcatcaatgatgtactcggttcctgtgaggtattcgaggaaaagcaagtaggcaatgaaagattcaacatatttagtggctgcccttctggccagacagcgactattgttctccgtggtggtgcagaccagttcattgaggaagctgaacgaagtctccatgatgccatcatgattgtgaggagagcacttaagaactcgacagttgtgccgggtggtggtgctattgatatggaaataagcaagtatctcaggcagcatgcacgaacaattgctgggaagtctcagttctttgtaaattcatttgctaaagcccttgaggttattccacgccaactttgtgataatgctggatttgatgccactgacgttctcaataagctgaggcagaaacatgcatctggtgaaggtgctaattatggtgtagacataaacactggcggaattgctgattcctttgcaaactttgtttgggaacctgctgttgtaaagatcaatgctataaatgctgcaaccgaagcttcctgccttattcttagtgtcgacgagacagtgaaaaacccaaagtcggagagcgcacaaggtgaggctgctgccggtgcgatggctggtcgcggtcgaggtgcaatgcgaggacgtggtggcaggggcatgcgcaggcgataaactgggtcaagtagatcatggtgagattttttttgcatgtttgcgagtgcttttgtgccttactgcacatgtatggacgctgcacttactattgtgcgcttttggttgtgaagcagtcgtagacttttttttttgtttcagaagagatgcaccaggcgtttatcagtgtaccgtccgctggatgtgttatagtagacctgagctttggattctaatttgtttgacatttatcttggtttattggcttgtcttttgaacaatgagaaaaaaaaaaaaaaaaaaaaaaaaaaaaaaaaaaaaaaaaaaaaaaaaaaaaaaaaaaaaaaaaaaaaaaaaaaaaacaaacaaagagcacaccaaaaaaaaaaaaccaaaaataaacaaaaaaaaaaaaccaaaaacccaaccccc

SEQ ID NO: 141407 - DNA, 179 bp, Zea mays
  Clone ID: MRT4577_60443C.1
ggggcacctgccttgcccaaatatgtctctcatgattgttgacactggaacagccaataagaggaatttcccttgctgcggttgctgccaagaaacctatccggtgaaaaagcgaggctttgcgtttcctgagtctatactggacgaactctctgaaggagggggggactctctaggac

SEQ ID NO: 141408 - DNA, 224 bp, Zea mays
  Clone ID: MRT4577_60444C.1
atttccttttttttttaactcttttttaatatgccttttacatggcaaaaaacaactgtcattcgtccattttttttactgaaatagcattatccacagcaaattacaaggagttaagaaacaatggcctccatagcttctttatattgcacgaactaatgcccattttcgggtctctcaccaaatctctcctaccctatcttctctccctcccttcttgagac

SEQ ID NO: 141409 - DNA, 259 bp, Zea mays
  unsure (1)..(259): unsure at all n locations
  Clone ID: MRT4577_60445C.1
actagaacgagagcgggcgcgccagaggaaccaagcccacgcacgcgggcgcgcgacggcaaagcccnagcaaagcgacaccgaaacccaaancaaaggccgnggncggacaacgacaagaccgggaaaacccaggcgcnacccaacccaaacgcaaggcagcacaagcacaaaccgccagcgggcagaagagcaaaaaggcccggaccgaccgcccncgccaacagnagcacaggcggaaaggcgaaggggacgcgcc

SEQ ID NO: 141410 - DNA, 578 bp, Zea mays
  unsure (1)..(578): unsure at all n locations
  Clone ID: MRT4577_60446C.1
agcagaacaaggctcatctcgtcgttattgctgaggctccggccgagtagagctcaggccatgaacctctacatgcttacacaaacgtccctcctcctaccgctgctcctttgctgtgcctctgacaccgtccgctgctcggcagccccggacaccaacaccagcgcggaaacggacgcgctcgcgctgctcgagttcaagcgcgccgttagcgatccagggggagcgctgagcagctggaacgcgagcacccgtctctgccagtggaagggcgtgacgtgcgctgacgaccccaataagaacaacggagcatcatggcgagtgacggagctccggctcgcggggctcgggctgtcgggcgccatcgccggctccggcggaaacctgaccggcctccgcgggctcgacctgtgcaacaaccgggtctccggccggatacctgctgtcgacagtatccgcgggctccaagtccttgatctgagcaccaactcggtagggggggagcggccanaagcactcacaaactgcgccaccctgacaaggggggggggtctattccaacgggggtacgggggcaa

SEQ ID NO: 141411 - DNA, 285 bp, Zea mays
  Clone ID: MRT4577_60447C.1
tcttagtgtggctgcagtggtccacactactctctgagtttcgccatgccgcccaaagacgacaagaagatgaaggatgccggaaagtcggccaaaaaagacaaggacccagtaaataaatctggtggcaaggccaaaaagaagaagtggtccaaaggcaaagttcgggacaagctgaacaatctcgtcctgtttgacaaagctacttacgacaaactttgtaaggaagttcccaactataagcttattactccagctgtggtctccgagagactgaagattcga

SEQ ID NO: 141412 - DNA, 581 bp, Zea mays
  Clone ID: MRT4577_60448C.1
gcacgagctccctagaatattacctcgatagggcgattgtcgatttggaggccggccggggtgttgttcctgtggcgctggtggatgacaaccggtgaatgtcgcgcacgccgtggcctcatcaggggcgctcaacgactggagtagccgatgtgcatgcgatccttcgtcgaaatagatgcattgccgctgggacgttgatcgtcgcgtgcgacgctgtggcgttcaaatctaccggctgggctgaccggtccgccgctcgccagggccgtgtcgctggcaagcatggcgccgacgaggaagggtctgtgcgccaccgcgacactggctggggatgatgatgcgccgtggaccgttggatcgattgcggagggcacagattagatctaggcgtataacccatcgggccgtcgatcattgattcgatggctgcgatctcgttctggttcggtggtaagaaaatttaatcgtggcccttgttgcaggatccaactgctagaattaaccgataccctttcgaccaaaaaaaaaaaaaaaaaagacaaaaaaaaaaaaaaaagcggccctgcagtccacactgt

SEQ ID NO: 141413 - DNA, 396 bp, Zea mays
  Clone ID: MRT4577_60449C.1
tgcttgtatatattcgccgcatcgcttaaaaaaaaccactccctataaaaaaaaaaaaaaaaaaaagagaaaggacaaaaagaaaaaaaaagaaaaaaaaaaaaaaaaaaaaaaaaaaaaacacacatgtacaaaaaaaaaaaaaaaaggggggttatcccaaaggatttaagcccagacatttgcgtccgtaatgatacagacccctcaccgggtttttaaaaccaaacctaacggttggggcccaaaaatctagcaatcggaaaaatttcggggccattaaatcaaacttttccgtacaaaaatttttcccagttagacggtgcaaaattaaaaaggtttgaataaacggttcccttaaaaaaccgtttaattcaaaaggtaaacggaattttt

SEQ ID NO: 141414 - DNA, 276 bp, Zea mays
  unsure (1)..(276): unsure at all n locations
  Clone ID: MRT4577_6044C.1
tttgtttttttcaagaatcaacagcggatttaaagatgcagacttgcggagtaaattgtaagccacaaaatatgttcaccaaacaacttataaaaaagagtctaggctcctgccggatnnngagctngttntacataaagaacgacatcatatttctcgagacaagccttaccaggtaatgtttgacacttaacacgnacagtttttgctccattttgtcttggtgtatttcttcattacccttcttttttgtgagaaagaggttgctgtgttttg

SEQ ID NO: 141415 - DNA, 345 bp, Zea mays
  Clone ID: MRT4577_60450C.1
ggcgtcgaggacttcaagcacttgaaccatggggacggtgagaacttcaacgtctggaatgacaggattggcgagaactttaacaagtggaacaacttgaacaattagaatgacttgaatggatgaggtcggcgtggacctacaccacgtaacagatactaccagaactgccatggcaggtttagtcgggtgaacaatgtcaacaatcacgctaatgtagctgcttagaggcattaaagccgtaagcttacatcgatctcagaagcataaggctacattcgagtcatctgagtgcactgattattatgagtatgagcattgctagcatacaatgtggacattttt

SEQ ID NO: 141416 - DNA, 253 bp, Zea mays
  unsure (1)..(253): unsure at all n locations
  Clone ID: MRT4577_60451C.1
aacactatanaatatctaagcacgtcacatgcacgcgtcacgtaagctagcatcctttatagtcagacggccttcctttttttttttttttttttatatttttttttttgttgcgggcaatattacttgaatcgatcttcccctgaaagattcatttttacaaaaaggtttcattgaccaggtcactgaaaaaacaacttgctattttttctaattatacatgttattagacctttgcgtaaaaaaataaaat

SEQ ID NO: 141417 - DNA, 331 bp, Zea mays
  Clone ID: MRT4577_60452C.1
aaacaggaccagctgtcgctagcctagacgatccgtcgtcacgcgcgaacggtccggccatgcgcggaccgacggatttacctctgatttgcgtaggaggctgtggttgtccagggtacttatccgtcggtatcccgtaaaggagttgtgactgatcatgacaacctgcagccgatgaatcacgtgtattttcccttgattcaacctcgtgtgagggaaaatttgggacggtagatttatcaaatacgcgcactagcattttatagtcattttgcatacccatataatctgttgcatttggtctcgctgctcatctacgtaagctctaaga

SEQ ID NO: 141418 - DNA, 525 bp, Zea mays
  Clone ID: MRT4577_60453C.1
caaccaatacactcttttattccatgcttaattttactcgtcgatatctgtgagcacccatcatttccccttgagctaacataataaagggcgaaatacagagaagaacccctattggaaatcgaactaatccaagtccaataggactcaaatcatgatgtgcaattgctaacaataggctgcatagagcgggatatggaatccagtagcgtatgcaagggaattctatatatccggatccgataatgaatctaacttaggactgaaaaacaatccgtattcatacgctacttctattttgctcgcctagactcacatgacctatggaatgcgtttctaaggtcattctttagaaagccacacaaagtaagactgtactaataggcatagacgatttagatctaacctgcctaggccccccggaatgcatatctacgttacctcttccataatatagtctattctctgtactacaactctaggaatgtaaatcatacgcctttcgaaccatgcagtattccaact

SEQ ID NO: 141419 - DNA, 2693 bp, Zea mays
  unsure (1)..(2693): unsure at all n locations
  Clone ID: MRT4577_60454C.1
aattaaatgcactgcctctccaaatctttagtattatatcaatgggtaaagcccattgttctttcaaaagcatctgattttacgcattgtgtcgaatttaattatttttaaagtttttaaaaaaaacgcacatcaactctaaactttcgttgcaaaaaaacgtcgcaaaaccttcggcaatatacacctacaaaattacatacggagccatacatacaatcggatcgattggaaacacagcaaagcatagtttatcatcactaatgatgtctaaaactaatctgtcatcctaccatagagcttaggaacggcgccctctgcatcagaataagtctgacgtctcagattcgatggtaatgaacattgtataacatctgaaggtcaattgacggcctgaaacttaagttgccacaaggctgttcaactccgacagactgccctcaactatattcccagccggctcaattaagcgcacaaagcctgcggtgtaccttgaggagttgtcgagtgcagctatctcggggtgtgcatggaccgcacatgaggtatatcacgttacccaggggcctaatgtaaatatcgtcctctttacggagctgttgcaccaaggaacttgcgtagagtgaagcgtacccagcatcagctccctcagccttgagctcaattgcacacagagttcctaatgacaccacccttttcacattcggtagtgacgacaactgcttaacaagtgtgccatcccacaactccttgagcttcatgtggtcagtatcaaggtttgaattggtggatggaccccggtaccactgcatagccttgagtgctgcagtacagcccatagcatgagcagtgtaggaatggccatgtaagagcgccgtaagcttagagtcactttcgaaggattcaaaaacttcctctgttgctaaggttgcagctaatggtataattcccccagtcatcaattttgcatagcaggcgatatcaggtaaacaaccaagtaactcagaagcagactccacaccaagacgccagaatcctgtaaatacctcatcaaatatgacaggtatttttcgcacccaagtatcaccatgataggaaccatttatgtttcttttcaccatgatcattacgattcagagcaatattgcagtggatcatctgaataatagactcgagaagcccatcctttaccaactaagtaaaacttagaatgaagagcaggctcatgaacattctctggaaacatcacatgaccatatcttgcggcagcatagcccatatctcttgcaagttcaatctgcaagttagaatcaggcccttgagtccaccaacttgcgcatgcatcaaattgagggatgagcattttgtctttaatcttgtacacagaaaaattctcaccataacgtgaatcgattactgtaacagaatcttgagggacaagattgtgctgagtaaaaggccaccacagtaaagccggaagagatttatcctcgcggttcgattcctcttcttctctctggcgccgtgatccctcttgtgtctcctggcgagctcttcataccgtcttcgagcgcgatttggcgatggcggcggcgcaggtggtcgcgaaggggagcgtggtgtcgccgtgcggcaatcgagcggtgccgggcctcctgggcaggcggagggatgccgtggcggcgcagatgacgccgtcggcggtgcggatcgggggctcctggaggaagaacgcgtttcctggcgtgaggctagccttggggacgaggagatccaggcccgcgtcccggagtttctccgcctcgccggtgcagatgaacatgaaccttgcgattgggaaatcaatgaggtggtgggagaaggggttgcagcccaacatgcgtgagatcgagtccgcccaagaccttgtagattccttaaccaacgccggcgagaggctcgtcgtcgtcgacttcttctcccctggctgcggcggctgccgtgctcttcacccgaagatttgccaatttgcggagcggaaccctgatgtgctgttcttgcaagtgaactacgaggagcacaagtctatgtgctacagccttcgtgtccatgtgctacccttcttcaggttctacagaggagcacagggacgactctgcagcttcagctgtacaaacgcaactattaagaagttcaaggatgcacttgcgaagcacaagcagatagatgtagctttggcccaacccgggggcagaatcggagatagcttggcagcaaacaaggaactgcagtactgccgcctggcgaacgtatgaagcgctctaacagttcaaggaaatcctgcacaactacacctccatcagaatagccctcctctctaataatgctaaatatcttctcaaacacaccctcaaatacaacaattttttgaatttcctctgcatcccgagtcaaataagtaagaagtaacagtgcttcattccttatgacctcacggtccataagcatgtccattagaactgttataccacgaggaatcaatagaattgcttcttgtaacctttgcgagatcctgtcaatatttcttctcgacgtatgattactgctgtttcctccaataacatgcaacatatccnaaatgctctttagtgaacactagtacataattacagtcaccctctcggagctaaaatgtatgngagtcagaaaagtgt

SEQ ID NO: 141420 - DNA, 256 bp, Zea mays
  Clone ID: MRT4577_60455C.1
cttttcttcgttttttctttttttttacaggcagcacataccaaaccttagcaggattccatcatatgaaccataagtgtctgttgagactttaacattctactagaaaaactatgcagctgattagcatcagaccgcctgggtgcccacactaggcaaataacacatattagaccctgctacgctaactagccctaatttatgaagcggaaagaggcgggcaaatcatatactttccattcgaccaaggccgtta

SEQ ID NO: 141421 - DNA, 2281 bp, Zea mays
  Clone ID: MRT4577_60456C.1
gctagttatcacaggcttttctctctctattttttcgtagttcacgtgtatcttaattttttcttcgaagttttgcgattaatttagtttttatcccatccgaaaatcattttagttttcttctgcttaggtttacttttagcagtttctagtccgtttgaccaccccgggggagttttctttgattccggagctttaattttataaataaaaaaagaaactggattttcatctataaaaattaaaaataaactggaacgataaagactaatatgatctgttttttttttggttcatgagtcaatgccatagggcacacaaccttcaaaatatgaggagataggaaaacccattgcttgacatcgtgtcgagcgatttctgtcacgagagattgcaactcggtcattgaagacctccagtcttcatgtatcgtgccattgcttatctggtaaagacatctctcgacattgctgcatccaaggggcacaatggtaggattaactcacaaagtagacaccattacaagtagtcagaatatatccattccagaatttcttacagccaacaggggagaaaattgcagagtttgaagcccacgtggcgagcaaaggaagactgtgaggtgcattgaacgaccttcagtagttcttggagagataattaccgggaggaaaaagatgcggtgatttttcgctccggtaatccgtttaccttatccgtgtgggcctcctttttcaaaagtcttccacatcttccattcctcctcctctctcctgcgccgtgttccctgtgtctctctcctcgcgagctcttcatcccttcttccagcgcggtttggcgatggcggcagcgcaggcgatctcgaaggggagcgtggtgtctccgtgcggcaatcgagcggcgccgggcctccttgccaggcggaggggtgccgtggcggcgcggatggcgccgtcagcggcgcggatcgggggcttctggaggaagaacgcgtttcctggcgggaggctaaccctgaggacgaggagatccagggccgcgtcaccgacgcagatgaacatgaaccttgcgcttgggaaatcgatgaggtggtgggagaaggggttgcagcccaacatgcgtgagatcgagtccgcccaagaccttgtcgatgctttgaccaacgccggcgacaggctcgtcgtcgtcgacttcttctctcctggctgcggcggctgccgtgcttttcaccccaagatttgtcaatttgcggagcagaatccagatgtgctgttcttgcaagtgaactacgaggagcacaagtctatgtgccacagccttcatgtccatgtcctacccttgttcagattctacaggggagcacagggacgactctgtagcttcagttgtaccaacacaactattaagaagttcagggatgcacttgcgaagcacaagccagatagatgtagccttggcccaaccagggggctagaggaatcagagttattagccttggcggcaaacaaggacctgcagttcacctacgcgaaggaggaaccagaactgatccccaggggagatgctcctggggaggtcgttgctcccgagcctgcaaagcttcctgcggctccaaagcctttggtcaggctggggtccgaggagaggtcaggctggtctcgtcaggaagatgaaatgcatatgaggttatcatgaggatgattagatgcttccgttctgtatagttccgcggttcttggtgtgtacaggttgtagcttcccatggtagcagagtgcaggctaagattttttacatgtgaagcctgcccgcctgtcgtccagtagtttagctcggttggattagcaagtaccaatgagcggtgttgtggagctctgccttgaggaaatcgtgtggtagatgtatggatgattcgtctacatgctatttcgtcgaattctgtagatcaagtgtatgagtagctcttgtttcatttcccctgtagcgttgggatctgtccgtcgcagaacagaataatcgatcatgccttatgttgtgtcagacattgtggtgcttagagatcattgtttgttgtgatagtattcgagtccgtgactagtttccttatgttgtatcagacactgtggtgatcattgttgtgataacatttgagttttgtggctagttcctgccttgccttcggggcagggaacggccgattgagaaactggtgatgcttcaatagcgttgttgtgatcttccaagggtctttgtgatggaataagaaatatgaggcttgccttt

SEQ ID NO: 141422 - DNA, 500 bp, Zea mays
  Clone ID: MRT4577_60457C.1
gggagcacaggcagacggatgatatcaagaacatggaaacattcctcactgcggtcagctggaccaagacgctccagttgcacttatcgactgaatactccgaggttttggacatggtcaaggcttcaacgttgacgagtttgcccaagaaaaagtacctgcatggcttgaaatcactcagccttactctggaccacaaccatgcagttctagctactctagtctcatgcttgctgaacagctctcccaacctcaaggatctcagaatcattgagctccggcacccggggagccccgtgcccttggctgcggagttctgggagaagaagataaccgcggtcgggtttctgtaccacctggcgaggcgtaacttctacaaccgactcgcttcttggaaggccacccttgcgagggcatctgcaagttcctggtgatgaacgcgagggtcctcaagaggatgagcatcgtgtaccaccactcgcaggtcatgcccgagcatg

SEQ ID NO: 141423 - DNA, 450 bp, Zea mays
  Clone ID: MRT4577_60458C.1
cttggtgttttttttttttttttttttttttttttttttttttttttttttcccaaaaacgaatagccatgcattctgaccaggaaaagaacctccatttacccacaggggaggaccggccacaaccgggtaaacagcagcagccaacaccataaaggcccccagggaaaaaattcacaacccccacaaacttttccaatcacccacaaaaacaggcatgggggggagacgacgaaaagcaggcccaacccctggtcaaacagaccccaaaaagaaaaaaagaaaaggggaggggaaagaaaaaaatcaaaacacccctaggaggagaacagcccaccgtgcggctactggcggtttttttttttgagaaagcccccaaacttcttaagaagaggctggttctttttttgctgcggctgctggggttccgaaagaaacggtgccgtttta

SEQ ID NO: 141424 - DNA, 841 bp, Zea mays
  Clone ID: MRT4577_60459C.1
aaggcccgctttttttttttttttttcctaaaaagggctttgcaaagcccaacacttttaaaatggatatgaataggtaataacgatagatattcactcatactcacgccgttattttccgttaccaggaatattcgagaggccgctgctcgctcttgctgccttccacttttttttttttttttgaccacaacccaacgaatgatcaattccatggacggttccaatccaatgaaaggagagggagacagagtagcagcagcagcatagtagaagaatctgatggaacgaacgaaccgactgagagaattcagaagaatttggtgccggctcgtccgctgtggagcaggttgtgcgcgatgtcgtccctagccttggtggcgccgtccgaccgcacggggttctccggcaccgtctcgtcgtcgtcgatgtcgcatcggagcgcggggtccatgccctccccgcgcgactcgcagatgttgtgcagcacgcagcaggcgcccagcaccaccgggaggtcctgcagcttcacctccgtgcgcttctgcaggcacgcccaccggcccttgaggcgttcgaaggcgtccacggcgacgcgccagacctccgccaccttctcgttgaaggcgtgctgcgcccacgtcaggttggcctgcgcgtagggggccagcttcaatcggcggctcttggtctgaggcagcggcgcccggcttccgcgcgaaggagaatgcgacggcgatggaggagatctcgcgatggaggactcacggcgacggcgcttcccggccggacccgagtcaactagccctatttggacccggccggcctcgagcgggcgcac

SEQ ID NO: 141425 - DNA, 2839 bp, Zea mays
  Clone ID: MRT4577_6045C.1
catagaccactatctgttaaatgtttcaaagcttaatatccatatctgtattttgtgtagcttttgaacagtcttttgtctgcaccacttgtgataactttcatgtgaatcagagaattgaccgaagattggttgattcactttggagttagattagtgcgcatatatcggattcattagctccattaaatccttgtcacccaatgtgtacttcgtgttcgcgtgtgctgacgcgtgggttcaaatgtcaagccccaaaattacccccatcccccagaggccggccggccggtagctctcggtcgatccactgcggtttccagtcccgaataatcccaattcccaatcgattcgaagcttccttccttcgaggagagggggaggtggagggcgcgggggaagctttgcttagggttcggaggtggccggcgccgccacggggcggggacggcagggggatggatccggagcagacgttcctgcgggtgcacgcgcgcttatcggggacgctttcccagctgctcacgccgcggatccgcctcgtcctcgagtacctctacctcgccggcgccgtcgcgctcttctgcctgctcgtcgtcatgcacacgaacttcgtgcagcagcctggttgctcaagtgaattttctggaattgaatttggagaagcacaacttgtccaaatcaagattatcagtgggggattatggtccagcagaggtgcttcttacatcatggatctccagaacctgggacgttcagctgagaaaattttagaggttaatggtgataagttcaacaatttggcatctaaattttggtcaacctgggttggccctggagctaggaggagcttaccagatttgaaggcagccggagagggttctgtacaccaccctttatctgctaaggagtcatttaaagcagcagtgacatttttgttcagaaaatggtaccttcgtgctgtttcattctggaagaacataaagcaactttcagaaaataccctccagttaatggtcagatcaaattggaacgatttcctacatattattaaggaccttcaactaccaagcatggatcatcttatttcgacaatagtgcaatggtttgagaggagaagtaaagcatttgagcctacttatttgtatggcgtggaaaagggttatttcttgctttctgaaggtgctaaaactcgtcatggtgtccgaacaatcaatatcacaatttctgctcgaaatccttgctttggaaacaggtggcagcaacttttgataaacagcattgttggatatgatactatacttacaaacagcttggtgaattctcctggtcatggctatttatacaactttcagacgaaggagctctatgatcttagttatgggcatgaaccaccagaaggtcctacaagatttggagattactttgtgacaaaatgtggtgtccttctaatgtcactctttgtctttttcacaaccaccatgtctgtttcatttactttgagagaaacacaatcccgcatgcttagattcacagtgcagcttcaacaccatgcacgccaccacctgccaacctttcagttgatattcgtgcatgtcatcgaatcattggtttttgtgccgattatgattgggattctcttttttctatttgagttctatgatgatcaattgcttgcgtttcttgttttgactcttgtatggttatgcgagctattcacgatgatcagtgtgcggacatccatatcgatgcagttctttccacgcttcttcttgctgtattttttggttttccatatctacttcttctcatatacctatggcttctcatatctggctttctctgctacggcagcattcatgcaacacctgattttatatttttggaaccgttttgaggtgccagctctccagagattcatgcgaagccgagcacacattcaccagcaaacaggtgtccacattacatcctcaactatctacacttctaccttacacattgctagggtaaatgtgagggaccctggtacaataaacgatggcctcggtgctgctcgtgaagcagatgccctattggttcaggatgagtctaccaggagccagcaagagggtcaacagaatggaatttctgagccagctgccaacaatgctctccagtatcaagagcaaaaccctcagcgagctggaagtacccctgcaggctcaggctccctcaacccatttgggtcccttttgctgtggttgctgggaggcggtgcttctgatggcatagtttctttcttctctatgttcagagatgttcgtgatcatggtcaagattacaccgatccacctcgaaatggaaatgatcaggtgacatagaatcatggggatgaaagtgggccaatgactgaactcgagtgcttgggcggcagcagtctctttctaatatgatataatgccagcacctcccttcaaaaggataatgacgaatattggtggcaactatacagactggtgtcgctggagatgccatgttagtattatctgtttctcacttttttagttagtaggtaagggtgaaggttgtatctatattcattacatgtgcacattccctaccgtctgaatgggagcgcccgtcccagtcctgtacagaaatgtcaactcacagcagattgtgcacattctttttgtactcccatgggcgggtgctggcctggaacatgcagtgtgtgcaccactgtcactgaattggacagttaatggtttggatacatcgttgcatgtactgttccaacttccaaaaaaaaaaaaaaaaaaaaaaaaaaaagttccttaaaaaaaaaaaaaaagcggcc

SEQ ID NO: 141426 - DNA, 547 bp, Zea mays
  Clone ID: MRT4577_60460C.1
ctttagaagtatagttattatagaaccgatggaactggaacacatacaatgatacaaagatatggtttgccaagtgatgagatggtttgtgtactggaagtgggagtgcgcagggacagcgtgagagtggtcaaaaaggaccgctggaactggaacacatacaaaggtttgcgggtcggcatcaacgtcgtaagtcgagcccaccgttcgcgtgcctatctgcttgcgtccggtccggacacgttcctcgctccagtttcaactttcgtaaccattgatttgacatggctgacccccgactccaagtccgacctggaattggaatcagcgttcagcagcctatacaaactcctgctaacctgacggacggccataaatggcgtgcatcttgaattcttgaccgctagctctagtagccgtcgcacaagcagtgccaactgccaagtaactcgctgctgcaggtagaagacgtcaagatgaactgatgaacgatctcaatgtaaacgggaaggggagccaacaacgaagaggaaaacggcggaagaag

SEQ ID NO: 141427 - DNA, 219 bp, Zea mays
  unsure (1)..(219): unsure at all n locations
  Clone ID: MRT4577_60461C.1
cggntnnctgtncaagcagaggatcccgctgtcaaanaaccgttnatngagattggcagtgtangtttacaanatccngtnaggagttcgtnnacgngatcatgactgntgcccacacgtcnaggaggcgtacaacgaccattanccattaagctgatgcnccgctggntggtcnnnntaagttgggaaccantatgtggangtggntgaagccggaaa

SEQ ID NO: 141428 - DNA, 722 bp, Zea mays
  unsure (1)..(722): unsure at all n locations
  Clone ID: MRT4577_60462C.1
atatcatcccaagggatgagctcccgcgacagcacccgcgtcgggtgagcgcccccggcggcggcgcctcgatctcccatctccggctagctgtgcagctgcccaggccagatccggagtcccctgctcgccctctctcttctgctaggctcggctcggctcggcggcatgcgttgggaagggatggcgctctcgcgtccgcgcaagttgcggctgggcgggcgccgccgtcgcccggatctccggcctccgtcctccgttgcggccgccgtaaccggatccgggtaccccgtgaagatctctcccacgccagtctcggcggcgccccgtctctcggttcgcccggcaatgctgctcacccgagcctccgcggcggccaccactccgtcggcgtctccggctgctgcacccgtcgtccttgcgccgtctgcgtcgtgcgctcaggctgcaggcactacccncggtcgccggtgttctccctcgaccgcggccgctgcccccagcttccaggttcaggagggaggacgggggtcttaaggctgcgtgcacgccctgttcggagcctgtgtcgacaactgcttcggccccgacgcctggctcccctgtccttgccgatgccgcctcggatgtgttgctgccggcccctggtgcctctgtccatggggacgactgtcaatggggacgacgtaggctgtgaagaagaaatggccgtgacgctgcct

SEQ ID NO: 141429 - DNA, 328 bp, Zea mays
  Clone ID: MRT4577_60463C.1
gacaatgaacacattttttccttgaccacagaacaatcttttacataatggaccaaaccggaaaaccatggcgcgcttacatgcatacggcacacctagaggtcaccggtggaggctcaatcacttgcctgtgacgaatttggtggggtacgccccaccatcgctcctgaccggggcggcaaccacccgcacaggggggtctacaacgggccctttccgttgatcgtggcctgaacgaaaaatacaaccatgcgaaacatggcgaagctgactaattttagctccttgaccttgggctcttttaagggctcgccaccgggccctaggt

SEQ ID NO: 141430 - DNA, 385 bp, Zea mays
  unsure (1)..(385): unsure at all n locations
  Clone ID: MRT4577_60464C.1
agcagtggtaacaacgcagagtacttttttttttttttttttttttttttttggggggagaatgctaaccttatttgctttgatgttaaataaaaaaaaagagtttttttttaacccgcttgttttattctaacaaattccatatggaactgcccgctgaagagaaaaaagatctggttggctttcagcctatatcgaattttggaaagaaaaaaccagaattttctttttttttttattaacattaggaaaaaagaatataattaaaatggaattggcgttttatttttatgcgcttttgaaatgaatgataaaggaaggatttttgacaatngttatttgttgcctttttcctattatgaaaacctttcgatttggaaccggg

SEQ ID NO: 141431 - DNA, 249 bp, Zea mays
  Clone ID: MRT4577_60465C.1
gactggaaggagatgtcttggcacaacgcaaaatgcttgacaccgcgtacagcgcctggtaacgttctctcgaacgattcctggggctgtcgagagaaaagacctgatgcacacacagctgcaatgtgggcatctgacatttacactgatgtggcagggaagtgaacattgcagatgttggtggctcaaacatgatgatactagggcactcggtgtggcaggtggttgttgactatatgacgtggatta

SEQ ID NO: 141432 - DNA, 380 bp, Zea mays
  Clone ID: MRT4577_60467C.1
ttcttttttttttttttttttttttttttttttgttcttttttttttttttttatgaattctgagggtgattccccaggttctgggatgattttttacacccaaatcttcaaaaactagacctttttgaaggcacaaaactgggaccttctatttgcttccagagcccggacgcacgctgctgggctctttgtgaggcggaagagacgatttacgttcctacaattagacaattaccagaacataaaatccaagaatgaacccgatcttgtgtgcctatattttcggttagaggatgccattaggcccgctagacttggagacttccgactgccgggcaaacggtggaccaatcgcgggcgcactctccggggaacccct

SEQ ID NO: 141433 - DNA, 273 bp, Zea mays
  Clone ID: MRT4577_60468C.1
ggaagaggggtgggccatacaaaaaattactaggctactcatgaaggagaacaatagtcttcttttggggagaattattaaaattgggagaaaaaaaaaaaaaaacttcctcggaaaaaaaaatgaaattccttcaaattcaaaaaaaggaaaaaactggggaaaataaattgtaacgcgcggggcccttaaggggatgcaaaaatttaattttttgggtgggaaaaaacggcttaatttaataaaaaaaaaaattgggaaatttttttaaaa

SEQ ID NO: 141434 - DNA, 298 bp, Zea mays
  Clone ID: MRT4577_60469C.1
aattactgatcctagatgcaagttctaacttgcttaattgcatagatttgtgtgttgaacttgatctgcttccttttatgctatttattttgtgaactcaaataatcaactaatcttggaacgtactttcagagctggcataaactatcacgatagaatatgttcatactcataagttgattatttgagttcacaaaataatcaacttatgagtatgaacatattctatcgtgttgttttatgccaagtctgaaaagacgttccaacattagtttcaatgtctacatgttaaaacgtg

SEQ ID NO: 141435 - DNA, 2835 bp, Zea mays
  Clone ID: MRT4577_6046C.1
cgcagagtagcagacatatcagcgatcgaacacccgacgatttttacctgccacaccgctcatcctctcccgcgcgcttggccctttccgcttggccttccgcccctcctcttctccgcacggagcgccgccacaggtgattgctagggtttcggggccgccgcctgcagcatccctaccgtcagcgctcctacgcctgtgtccctgttcctctccgtcccgttctgccggcgtaccacggctgacggccgacgccctgcagatccagcaaaggcaacgctgagatccctacgacttcgaacggcctgtgacctgtggatctgtgccagcccattggctcgaggctccggccggggcgtagcctgcgatctcctcagaccggcaagcaccaagcacagagcatagccgcgctcacctccccagtccccacacgccctaggcgctggcgctgcaagctcgggcagtcgagcgctccccgctcggcggacgctggccgtggctcgccctcgctgtgccggcacgccggcaaccatctcccctccagatccgccactgatggttggctcaaacttatgaaaagagctagctaaggaaacagggccaaagtgagctccaggggagaaaaaaagagcaccatggagaaaggggacgtgctggtggacctggacaagctccctatgaagcgccttgaggccatcgacgagactggcaacgagcactacccaccggacactagcaacgaggagcagcggctcgcggccatccgccggattgacttctcttgggtcatagagaaggacgcaaagaaggccaagaaggcggctgaggctgatactacccagcaggcatggccctggcagggccttatggagagcctgcagcaggcacatcaggagctctccgtcgtcatagacctcatcggcacggttgaggctaatgacgccgtggcagtcgcctcgacaacgaagcccaagtcacagccaaacgaaatactagttgacatggcagtgtgtgctgccaccaagctccagtgccttaggcatttgtcacggtacttcaaacaatctgctacgacaatggagcaacagttccaaaaggagactaggttctacagctccttaataagattacagcagaactggaaagtgaagcggcagcggtctgttgggagtccaggaagtgagggcttcatgtttgatctagttgatacttctcagctagacacaacaacaatgcctcgattatcaccattatctttgattccaattgatcaagactcttcaggcactttgtctgtacaaattccacagaagtctttccgttccttgagccttcgatttcatggagacatagccaataatgcagaaaatagtgctgtcaaaaggaaagaaggcacattaaccaacactactaccggagccgaaaatgatgttttggagaatgatgatgtcaataagtctactaaacatgcacattccatcttgcgcgacatccataagtccatatttgaggagcaggtttttgatatggtgatccaggagacatttatccaatctcaaggcatcaatgttactggaatgtgcgaagattttctccaattagcgattggccaggagtgttctttgtgcctttcgcttgagctctctggacagaacaataatgcaggaacagtaggacagcaagatcatatggatacaaattatcctggaaatcttgcagtagccactgtaaatgggaaggagtcctcaaataaggatgtgagagggtttcctaaccccaaaagcttagaaatctacctgctccatatgttccatgaaattcttaggaaactcagggagaaatctcgtcatgtggttcgctaccagagttctgctcaagctgcacctgacgattgtggcctgctaagtcatttttgcatgacagtagctcacaggatattttctagcaaagtacatttggagcttgaaagtgtggttagtagggttccttatctccatctgtgttcccttcctacatggcattctcgaacgtcctcctggtctctctgcctgaaagttcctcagcctatcctggccactgatcgagtcagaaggccttcagactacagtgagttgaagtgcaaatccaggtcacagttcggtacaaaggtgatcttgaaagatggacagattagtttaatgggcgagggctctccaagcattgctggatcgttagctgggaagccatccgatggacgcctggtaaatagttacaattgtgacttggaagatctcccaatgatgcttctgcagcaggttgccagccaagtaatccactggctccacgatgaagcggtggtccttgggatgaacgcgacaatagatttcctgtgcctgtacttggaccttgaccaaggtgaaacactaggcctggtggcacacgttgacccggatgacacctacggctgcgtctcatggtacctcactcttgatcatcacccaacggaggaagggaagatgtcagcgggtagtccggagctagaggagcgcaggtttttggggtacctttccccggaattgctttactctaccctgatggacctggtaaaactgtgcagcacaggtgtccaacgctgagactctgcccacggagtagtgggagtctcatgcgcggtaagtctcacggataggggtagtaatgggccttaaaattttgcactgtgaaatttaagaattagattagattaggatataatcatcaaactctatctttatccattttaaactaaattagttaagaagtcaaacactttggatctgtgatccgttaccgataaaaaaaacgttaccttcgggt

SEQ ID NO: 141436 - DNA, 227 bp, Zea mays
  Clone ID: MRT4577_60470C.1
gcgggctttccgatccatccctctcagccatcttcctcagctcgccgtgcttttgcttcctccggcaccaccgccggcatggctgcgggctgcccctactgcgccgttgaggagtcctcccgcgagatccgctccgtggagtccccgcccgcggcgctccgccccatcgtcgagacaactggcgagcaccaggcgccctgaatgctacgacgctgtgcaggcgcgcc

SEQ ID NO: 141437 - DNA, 639 bp, Zea mays
  Clone ID: MRT4577_60471C.1
ctactagtagtgacgagtagtggtagcagcaattaaccaacgagacaccaatggcggtcgcaagtaatagaccagcaaccactctactgcccctggcggcccttgtggccgtcgctggctccctcttcctcgccggcccggccgcggccacggggaagaccgggcaggtgactgtcttctggggccggaacaaggccgagggcacgctccgagaggcctgcgacacgggcacgtacaccatcgtcgtcatctccttcctcaacgtctcggccggccccggcaacagcccgccgagcctggacctctcgggccaccccgtcgccggcatcggcgccgacatcaagcactgccagtcgaagagcatcatggtgttcctctccctcggcggcggccagcactccctgccgagcgccgaggccgccgcggacctcgccgactacctctggtacgcctacttcccggcgccggccccgcgcgccggcgtgcgccgcccgttcggcgacgcgtacgtcgacggcctcgacttcttcctcgaccgcggcggccgcccgccgccggaccacctcgacgcgctggccgcgcgcctgtggagctacaaccggcagttccgcgcccgcacgcccgtgcagctgtcggcga

SEQ ID NO: 141438 - DNA, 303 bp, Zea mays
  Clone ID: MRT4577_60472C.1
cagagagccagatgtgtgaatccgatcctagagaaatttctcaggccaccccagcaacaaaagcatgccagggacccaagcatcctagcggccccgttcttcccagttctgagcaaggacgaaagcactgccctgcagtggccgtcagaactgctcatcttcaccacagcagagcctcccatttcctacagctgcaaccctttatactttgactttaaactttcaagaaacaaagatgctagagctaaagggacagagaagccaaaagatgtcggagactcgtcaaagggtcatctccagagc

SEQ ID NO: 141439 - DNA, 745 bp, Zea mays
  Clone ID: MRT4577_60474C.1
ccggccgggattcagatgccacaagtgccaagtgctcgtgtccggatgcgccagcgccgcctggtcaacagatttttgccctgcgctgtcactccaccacgctgcttgtactgaaaacgctgcttgtactgaaagctttttcccagaataaaggctggggaggaggaagcggcggcggtggcggcgctcagaagagagggtgagatgaagactcggagctcagcgagaggggagccgaggcgtctcggaaatgcggctcttctggcgctcatgctctgctccgtcgtcgcgctctccctcatccgggggagattcgccccaattgggactgaccgcaggagatgccatcaaatccgaggacgacgctgcggcggctgcgctcagtgtcagcaaggcggccgtcaacgttgacaccggcgacagcgccgacgaggccgccgccgaagctgctgctgaggagaaagagaaggaggaagtccagccgaagcccgctgacggttccggctccggctccggctccggcggcggcgcagccaagccggtgtgctacgagacgagccgccgctccgacacctgcgaggcggctggcgacgtgcgcgtccttgggagtacccagacggtgtacgtggactcgctggaccgggagtggaagaccaagccgttcgtgctgtccacgggcgggttcaccggcaacccgttccacgactacacggacgtgctcatccctgtcttcattacggcgcac

SEQ ID NO: 141440 - DNA, 264 bp, Zea mays
  Clone ID: MRT4577_60475C.1
ctcatttagcagagacaaggctactatcacaatgaatatatcaactggcatgtctcacatgtggtgctgccagtgccagcaaatacatacattttcttttcctccccggaactgattgatacgagcccgtgcccttttgaatgaaaacatgacatagttgaatactaatcgtagggcctgtttgaacgtgcagcgatggtggtggaagagccagcgtttatcaagctggtacaagcactgtacatagtttgctggatctgtatc

SEQ ID NO: 141441 - DNA, 495 bp, Zea mays
  Clone ID: MRT4577_60476C.1
aattctatattttatttttttttttattttttaaccaccttattttttttttgttttgttagcgaattcattaacatttccgtctaaaccataccaccagtttcaccaccgagtactaaaacgcaagtcacatatttttaaattagccggcaaggcgaaaaggaatcccataataataataaaatgtgccggaaggaaggagagacagaattcttatatcttgtcgaagtcctcgtcctcaaactggatgtagctgaagacggcggtctcctcgtcctccttgggcccatcgacgtagacaccctgggtgagcctgaacgtctggggaagctccccgtaagccttgagcaggttctcctcgccggtcatgtacttgaggatgacgtgggccttgtctttctggtagtcccggaggacgacaaggaccatgtacccgggcgcgatccacaccttattgtgcatcttgccccggatatggcaaaggcgacccgtgcc

SEQ ID NO: 141442 - DNA, 386 bp, Zea mays
  unsure (1)..(386): unsure at all n locations
  Clone ID: MRT4577_60477C.1
actggatcaatgcataacatgggtgtaccaattcagcctgtgaaccttgctattagggcaggatctcgtcatcatcccactgaggacccagaggttcaagaagtcgacaggagtcaagtctcaaacaacaagggaaagaagaaggttgcccaacgaggaaagtcattcaccaaggaggaagatagagcaatttgctcagcgtttttgcatgttagcacagatcctattgtatgaactaaccaatctgcagctgggtattatacaagaatgcatcgacacttcatggagaacattggagtgtgnggtagtaataggactaaggtttccatagaaaatcggtggaccacaattcagaaggccgtcaataaattttgtggtttctttgc

SEQ ID NO: 141443 - DNA, 355 bp, Zea mays
  unsure (1)..(355): unsure at all n locations
  Clone ID: MRT4577_60478C.1
attttctcattttcatgatccaatnncnagcgtggnagtgttcatgtatcagtttactagaatagaaaaagaagctaattgggtaattctaaccggcctggtggtggctaaaccaactgataacaagggcctatggtgtaattaagtagctaaaaattcatactaactgcacttacgaagtcagaagaaaattcgtgtgacttcagaataacaatccctgaaatactggaggatgagtggttcaaaaagggctacaagcgcccggagtttgacgagaaatatgacacgccattggatgatgtggatgctgtcttcaatgactcagaagagcaccacgtgacagagaagaaagaag

SEQ ID NO: 141444 - DNA, 431 bp, Zea mays
  Clone ID: MRT4577_60479C.1
acggccctctcctgcttccacaggccctgcttctcgagcatcgcccaagtcatcgggcgcaagggcccgttctgcaaggcggacctattccacattgaatacagtctctccaaggactatcacctcccgggcttccgcgacggcatccactactgctacaactacgacatggtggcctgccctgcgcaagaagtccatcttccgactcgtctcgtcctacacgcagcacttactggcaaggatgctcatctaccctgaaatcatggtaccgttcctcgactagagcgcacagcggctgactgagcgccacgaccgcttcatcgctgacctacgcaaggtcggcatatcctgccatggcttcaacgcgtgcctcttaacctggatggacttgcctatcatgctactctagaagactcacgacacgacactcg

SEQ ID NO: 141445 - DNA, 598 bp, Zea mays
  Clone ID: MRT4577_6047C.1
cattgggtacctcgaggccggccgggactctccgttcttcaccggacgctagctgcacaacgagctgagcgctcatgggagagcacgcggggtcttgtcctcctcctgcggccactgctcggggtacatctgctgggaacccgcctggcgcacccccccccacaaaacgaccacagcctgcctcgagttctactacgaggcgctgagcccaaagtggtcgcgcctcataatgagccacctaccgcgaattcctcaggacgggctcttcgactccccccacctccggctccccactaactggaacgctcgctgggcatccaataccgagatctcttgcccggatgtcccaaaccagtggatgatctacaccgcgaaatgtagtcccttcgaacacatgctcggctataaatgtgcctttcagattcttctactgcggggagaacccgccgacgaaacggccacaccacgactggccatacactgatgcgagaaggtctgcctcgaccccaagagcgtaacataatgctacaacaatgagcatggctacaaactctaggtcaactacccgaaccagaccgtacacctctcgtgacctgcg

SEQ ID NO: 141446 - DNA, 307 bp, Zea mays
  unsure (1)..(307): unsure at all n locations
  Clone ID: MRT4577_60480C.1
ccaacactataaattaaggagctatttttagagaactactcgagttactctgatagagtgatcccgaaattacgagcccacaaaaattttaaattatcattaataaccttattttcaaccagaaaattaaggggaaaaccattttaataaaggcttgtttgggcaacctaattttccaagggatttttatttttcaaagaaaattagtctattttttcttgaaaggaaaatggaattcctttaaaaattagngtatcaaactagccctaaatgagcaagagaaattatgtatcgaactatcaatggg

SEQ ID NO: 141447 - DNA, 231 bp, Zea mays
  Clone ID: MRT4577_60481C.1
aacacccggggaagaaaagacgggaacaacccaaaaaaaaaatcccgaaaaaaaatcccctttttttacgggccagaattgggaaagaaaaaaagggcttgtttccgcgaagggaacccaccgccacaaaaagatttacgcggcagggggggaatttcaaaactgcccccttagaggaaaccttcggaccaggggccgaacaaagattccctgtataaatgaaccccctcc

SEQ ID NO: 141448 - DNA, 108 bp, Zea mays
  Clone ID: MRT4577_60482C.1
aattgggattggagcattgttatgctaggcacctttccttcgggtaataactccagctccttcttgtctagggcctccgtcagatggcgcccaaccggagcaagctcc

SEQ ID NO: 141449 - DNA, 1274 bp, Zea mays
  Clone ID: MRT4577_60483C.1
gagcttctctctcacatctcgtactgccgcatcgtcccacacgtccctccgtctgtggtctcatcggcgttcccctcccccgctctccccattccccccgcattctgtccgtggtctcatgggacaagacggtgaggctttacgacgccgacgccaacgtgctcaagagggagttcatgcaccccggggccgtccttgactgctgcttccacgacgactcctcgggctttagcgccggagccgaccacaccgtttggaggttggtattaagctcgtccaaggaagatgttttggggcggcatgatggtccagttcgttgcgtggaatactcttatgctgcagatacttttatttctatggattagcttttggatttcttttctagcgtttctttttcttctgcaaggtacttgtgcagcctgatgcagctagaccttacaatttctataaacagaacacattgatagctatttttgtacttgaattccaaaaacactatatatagttatgcggttatgcttttgaaagtatttactcctaggccaagatagaaattagattcctattgcttgatctgctacatggatttggttctgcacagtttacaatgccacaatgcaataaaacctttgtctctcgatttgaactgagaattgtacagatgtccttgccagaatcgtgtctttggtacctagtttttttccttttctttttgtccttggaatatattttgtagtatttcagttctcagcaacttaactatgcatggtcctcaatctaatcacaatctctgtccaatcgtgccatgtcgttgttctatatgatgattatggtcatgtgagagtagttgtttcgttgctattcaggaattatgttattaaattaagtgaaatttcctaagctgatgaaatgctctatcgtaatttcaattaatatctggggttgaagtaaaataatgaaaaaacccttccatgcagttggttttttttatgtattgtacttgacctgttgtgctttatgagtgattacctaatgggtctgaactgaactgtttgttttgttctatttaggtcaagtcatcaccggcagctgggataaaactgtaaaatgctgggatccaagaggagttagtggaccagagcgcacccttgttgggacatatgctcaacctgaacgtgtatattctctttcgttagtaggaaataggttggttgttgcaacagctggaagacatgtaaatatttatgatctgcgcaatatgtctcaacctgagc

SEQ ID NO: 141450 - DNA, 354 bp, Zea mays
  Clone ID: MRT4577_60484C.1
acccgacgatcccaagagacatggtgtcgtgactgtggctgatcgtgtggtgcatatggaactgactggctcacctctctatactgggaaattggactatgtatggacggggacgatcaaggattcttccttatagccagggttgaataacgcttctccaagtgtcacgccgccttctgcatcattggagagatgctactgactcgtgtagagagtacctgaactctacagagcgattcctgccatgatacggccctgagcgaaacctcaccgactatggcttagcgcggcttgctttcgatttttatgaactgacttggcgcacaccacgcgctgctaaggaagccccttgct

SEQ ID NO: 141451 - DNA, 580 bp, Zea mays
  Clone ID: MRT4577_60485C.1
ggtaccctcgaggccggccgggatcttcctttcctctcctcgctcacgagcttctctctcacatctcgtactgccgcatcgtcccacacgtccctccgtccatggtctcaccggcgttcccctcccccgctccccccattccccccgcattccgtccgtggtctcatgggacaagacggtgaggctttacgacgctgacgccaacgtgctcaagagggagttcatgcaccctggggccatcctcgactgctgcttccacgacgactcctcaggctttagcgccggagccgaccacaccattcggaggttggtattaagctcgtccaaggaagatgttttggggcggcatgatggtccagttcgttgtgtggaatactcttatgctgcagatacttttatttctatggatttgcttttggatttcttttctagcgtttctttttcttctgcaaggtacttctgcagcctgatgcagctataaatagaacacattgatagctatttttgtacttgaattccaaaaacactatatatagttatgcagttatgcttttgaaaaaaaaaaaaaaaagcggcctac

SEQ ID NO: 141452 - DNA, 1711 bp, Zea mays
  Clone ID: MRT4577_60486C.1
ctttgtgtgcctcgaggccggactggggcatccggtcccacgccgcggaatcttctcgcctcgcctcgtctcctctgttctccagttctctcatagtcactcccccaactctgctgcttcccgtggccgtggttcaaaattcgaatccagaaagacttccccaagcattttccgtttctttaaaccgtcatcgtcctccctcgtgctagcctcgctcgttgcgcgttcaaatttcgaaccacctccgccttcgacgccccaaaccctagcccgacccctcctcctccacctgcgccaccgcccaccatgagctccgccgccgcgccagctgccgtcggcagcggcaaggagcttgccaacccgcccgccgacggaatcaccaacctccgcttctccaaccacagcaacaacctcctcgtctcctcatgggacaagacggtgcggctctacgacgccgacgccaacgtgctcaagggggagttcatgcaccccggggccgtcctcgactgctgcttccacgacgactcctcgggctttagcgccggtgccgaccacaccgtgcggaggttggtatttagctcgtccaaggaagatgttttggggcggcatgatggtccggttcgttgcgtggaatactcttatgctgcaggtcaagtcatcaccggcagctgggataaaactgtaaaatgctgggatccaagaggagttagtggaccagagcgcacccttgttgggacatatgctcaacctgaacgtgtatattctctttcgttagtaggaaataggttggttgttgcaacagctggaagacatgtaaatatttatgatctgcgcaatatgtctcaacctgagcaaaaaagagactcttctttgaaatatcaaacacgatgtgttcgatgttttcccaacggaacaggatatgctcttagttctgttgaagggcgagtttctatggaattctttgatctatctgagtctgctcaatctaaaaagtatgctttcaagtgtcatcggaagtctgaggccggcagggacaccgtttatcctgtcaatgcaattgctttccatcccatatatggaacatttgccaccggagggtgtgatggatttgtgaatgtgtgggatggcattaacaagaaaagactatatcagtactcgaagtacgcatcaagcatcgctgctctatcattcagtaaggatgggcatctgcttgctgtggcatccagctacacttatgaagagggagaaaaaacgcatgaacctgacgctatatttatccggacagtgaatgaagtcgaggtgaagccgaagcccaaggcattggcagccccccagtagtgctgtgacctgttctggaggctagatgacccgtacttctctgcgttgatgtcaattacattagttgacggagtgcttgtttgtgttgaaagagctgaaacgcctgtgtttcttaatctggaaccctcttctcccgttttacttgtccgtggaaacatttcatgttccagctggttgtatattccgaaacagaccatgttttagttcactcggttcttcgttgacttaagttatttatcaaatatttaagtatcgtacgtaagtttgaaacctggggggaagaactatgctggctttgttgtactgccaatttcaatttaggaaggatgaaattgaagttaaaaaaaaaaaaaaaaaaaaaaatacaagaaaa

SEQ ID NO: 141453 - DNA, 663 bp, Zea mays
  unsure (1)..(663): unsure at all n locations
  Clone ID: MRT4577_60487C.1
ccgggntacaagttaatgtgattagtgccaattcaaagttttaattaataagtgtttagtataaacacgacgtctatagcgactctcgtgagtcttgcgcggcatcgtgttgttcgcgcgcgtagtcgcgttgactcgcgtgtgacatgcgctgtcgtgtacgttgttccgtgtgccatccgcgcgctgtttcacatagtgtcgcgtgtcgtcacgcgtatttcgcgcgtgttattaaattgttttcgtttatgatcattcatattaattaatcacctgtgtagctgttaactattagaatatcaaaataattgaaactaggcagttacgttaattcatattttataaatgccttctaatatgatcatgctgaaaataagtattatagttaatacccacttagcataaatgcgatatcattagtgattcttgcgtgtcatgccttttcaagatttactgtttaaatgtagcaaatcctatacaatgtttataaatataatatgattacttttaaagttgtaattagtatttaacatgactaatattagcttaactactttttatttatttaatatttgtttagtataaacgcgtcccctatttagtttttctcgcctatcgctcgttctattccacagcggtggcgttctgtcgcgcgtgctg

SEQ ID NO: 141454 - DNA, 423 bp, Zea mays
  Clone ID: MRT4577_60488C.1
cggacgcgtgggcggacgcgtgggctgttcagcagcttgtgtcggtaatcataactagggcaatcgcagctttctcagtgagaaatgttgacccacaaagttctctacccgaggatgaatggttcctcgacatggccaaggttgcaattaataagcaattagggacttcaggatctgagtccgagcttgaggagcctgtggttgtacatgatgaaatctcggattctgaagagagtagtatttcaagtccatcgacgataggatctgaagattcatttgcttctgcaaacaatgatgatctagaaactcctgtatatttcacggatcccgaggcataagagttatttatgcagggaggtgattgtagttatttaaacatctagtagtttaatgtcctatatacttgcagaaaaattgataatc

SEQ ID NO: 141455 - DNA, 257 bp, Zea mays
  Clone ID: MRT4577_60489C.1
tgtgggcttgcttttggaaggcctcaggcagacacgtgccctctgggtgatgtctgtctgctgccaggatggagcagaggagcgccacacatggaggaaagcccctgtaacgttacctaccttaaactccactcatcaaatctgagaaaagtatccactggtccccagggtttcagtcatgcttttgggggtcattgggtattagagaagtaagtatcttttctgagagagggggagtcacccccctactggggatt

SEQ ID NO: 141456 - DNA, 806 bp, Zea mays
  Clone ID: MRT4577_6048C.1
cattgggtacctcgaggccggccggggacatacctctccatatctaacaatatccgatactgatctccgtgttcgacatgcgtttgccccggcaagtgcgccaacgctctcgccgatccagttgatggctctcaccttatcactcctctgcgctggcgccggacctctcgccgaacggaactgcacctgccaaacaaacatctgctgtctgacagtctcatactagaagcatcaccaacgaatactggtgataggtgagacagctgggaccaatggctggtcgccgagattgataagaagaagcaacttggcctagctgatcctcctgctccttcttcagcctatgaagagccaaacagaatacggctgagaccgagaaaaactctctcacatccctatgggaatactagattgccaccaagtgcctccatgatgtctgcatgctacacgaaacgcgacgaagatggatatcttcaccgtcctacagagcgcgcacaacacctaccggtctttccagatacatcacccctgtcaatgaaaataacccctactgatacccctgctgcaattagtgacctggggatatacctcagaatctataatgctgctgcccgatggatatctcgtgtaactacacatacttagccttcaacagggtcaacttctcctgagacatcgaattaccttcggatcgaaacatgtgatcacttcactattatcaaggcggcgctctgggtctggatgaacagcgtgcacggggtggtgccgcaggggttcggcgcctccaccaggccatcaacggcgcc

SEQ ID NO: 141457 - DNA, 347 bp, Zea mays
  Clone ID: MRT4577_60490C.1
gcgactctgcatagatggataagcagatgcggattcactagcatcaacatgagagttctagacggatgtaacggagctgtcattcgcagctgacagcgctaatagctactcgcgtaacgatcattaacatgtactacatgttgcggcgcatggagactgctacgatgagttctctagagttctagattagagagtgctagtaaagtttgacctgctcagaacatgactgcttataacggatgaatctagctataatgtgtcacgctctcattctatagcaccagatgttgcatgccgatcatatgcaatcgagtcatcatacgtgtcggacttgctcacagctcaca

SEQ ID NO: 141458 - DNA, 563 bp, Zea mays
  Clone ID: MRT4577_60491C.1
attgggtacctcgaggccggccgggaatgcccctgtcgatcaattttttcctcctctgcgatctcaaccgcccccatgctacaccaggtccgcctgatctagtgtaatgtgtgaggccacggctgatgggtgcatttatcctacatggcgtttgcagtgaggtagcctccagttcgtacgaccccttgacaagagataccacctcaaaggatgcctcttgctctcggccgtccccgcttccgaaggaatctcgcaagaggaagaatatgaaaactgccctgctacatcacctccttactcatcgatcattttctccccatatttatcgaggtgaatctgctgcttactataattatctagatgcgctttaaggttgtccagcgcctcctgcagcttgatttcgccaatgtcgatttcctgcacgagagatgcgcgcggctcgattgctctcaatttcccgtgtgattctgatttgaatccaatagcatgccctcaatgtcgcagcttctgattgctctagagttgtgtaattgatggcttgccatatgcatgctaagatgtgg

SEQ ID NO: 141459 - DNA, 563 bp, Zea mays
  unsure (1)..(563): unsure at all n locations
  Clone ID: MRT4577_60492C.1
aaaaaanccccacctctagncgccctnncccctccccccgagaacccagccaggggcaccggggcgcccggaacaggcgccgagcccgccanngccggancccngccaggncnccaccccgccgncgcgcgcccggcccgggncaaaagggcgcggcgnggcanncccnnnncnncnngngcgcnaaccggggggcggcggcngggggggggggggcgggngcagcgcgccnngcgaacncnagcngnngcngcgggaggaccggccgccncgncgccgnngccaagngcgcncncccaaagcccgaagaaacgcccccnccgcgcgccccgngccgccgagaggaggncggacccgncggaacgggcgcccaaccggggagacccgacgngncaccggngccgccggaccccgccgacacggggaagcaacccaccggaaagccaccgcggaagccaangaaacccagcnccgccagcggggggccgccgccggcgccacaaccgccgccgcgcgcaaaanggagccccaccgcgggagaaaggggccccggggaagcccaa

SEQ ID NO: 141460 - DNA, 135 bp, Zea mays
  unsure (1)..(135): unsure at all n locations
  Clone ID: MRT4577_60493C.1
gcaggcaaacgaaaggcaagaacattacttattcctctggttgcaacacattagagcatttgtgnnnaattctagcaatgagaagcacatagtcaaggttttcaaaacccaaaatgaatcttccatcccatgact

SEQ ID NO: 141461 - DNA, 1693 bp, Zea mays
  Clone ID: MRT4577_60494C.1
aaaaatcgtgatagacgaggatgattaaaatttagtgacctttacattcacagctatcacgtgttaacgtccacgctcgtagtcgagtagacaataaacacctggggtgttacacaatctccacataatcacgctgatgaatgatgatagtatctgattaggaatgaagggtatatgtgtcttttgtattttctcttaatttgtcctaaaatctctaggatggagggggtagttccatagaattaccacaaagttgaactaacatgggccttcataatgtacataggaaatgccctgagtctttgtattaatacaattaggatcagataatcaccaaattctgaacaatgagaccctgaaataacagcgtacagcagcatccatgaatctggagaactcaattaatagcataaatagatcttatgctcagacacatgaaagctttatcagcttattgatatgatcttttatgatgttgggaaacaaacataatagatgcatctgcctttcgagcttttctagttaatttattatctctcactccttcatgaagaacttcataagcacgataactaatgggacccttcttcatcaattcctcaacaagtatctttggggcagctatctccttcttatcagtactcaaaatggtatcaacaacctcaggaacaactcccattctcaccataatgtgaataatagcaacagcttcagaaacccgatgattcattgcgagtaaatttaacatgcggccaaaagtagccatcgatggaacaaaacccttgcttatcatttctgcaagatgcgcatatgcacggtcaacatttgccgccttgcacaacccatcaactagaatgcgataagtatacaaatcaggtttatatcctttgctgatcatttcaccaaaaatcttttcagccatttgcatattcagcttactagaatacgcaccaatcagaatgttgaaagtgtcagctgttgcagagtaccctttctcatccaacttctgaaagagtaggtatgctccatcaagatcaccattcctgcagaatccatgaatcagcgtgttgaaactaactgcatcaggaaccaccccatcttgacacatcctgactatcacgccagaagcctcttccagttgattaatcttgcaaaaattttctatcagtatgttgtaagtaatagcatttggccggctgccgttttgtatcatctcttcaaatgtttcattgacttccttggctttgccagctttgcagagaccattcaaaactgagttgtatgtgataacatcaggagcaatgccatacgtccacatcctttcaacaagctgaagtgcactgtccagcttcaatctcttgcagtagccatcaatcaatgtgttgaaggtaaagacatctggaaggtatcctttcacaatggcatcattcatcacaactgccgcatctgaaatatttcccattttgcataggccattgatgataatattgtatgtccaaatgtcaggatggcagccttcctcgaccatctcattcatgacctgcaaggcatgcaagatcagaccctggcgacagagacccttgacaagagagttgtagacgacaaggtcaggcttcagatcttttgcttgtgcctcattgaagagttctagggccctctcaatgtcaccctcggcacacagtccgttgatcag

SEQ ID NO: 141462 - DNA, 229 bp, Zea mays
  Clone ID: MRT4577_60495C.1
tgtttttttttttttcgcaggtgcacccgaacgaacatttgacacatgtttaatatggtcccctggcgcacatacaactacggccctagacgcctactttgtcacctgttgcagagactaaaacatttggggaaatcagagctctttctatgtgtcgcgcataaagtgtgtgatcaatcccccccaagacgacggtgtaccccattttctcgataactgtcccaacact

SEQ ID NO: 141463 - DNA, 1231 bp, Zea mays
  Clone ID: MRT4577_60496C.1
ccctcctaaaggaacttcgctggagctcgagggccgcttttttttttttttttttatgctgatagacgttctatttctagtaacataatacatgcggtatgcaaggttcaggaaacaaaatagaaccagaaaaaaattatcaaggagcatataataacaaattaacaatctcgcattctcatttagtacatggattcttcttgttgtatagtaggtacagagacccatcttggagtttttcatcatctgcacactcatgtcagaaagcttgaagcattggatggcattgaaaattatgaagtgctcgtgaaatatctaggctgcaggcctgcagccttctctatgcaaatgcacgcagagggatgacctggatatggtcggcaaccaagctcatccggtcaagatttttcggcttcagaagctttcagtaagtgcgacctgtactgtatatccatagccgacaatgcgatctcagcacagcaacaaatcgaaatgcttccatccagagaagaaggttaccccgcattccctctagttgttaggcggagtagtcctgcggaatatggcactgggaccaacttgcaagatccaactactggtaagccattgtcaacttgggtacctacccacgaaaaagatggtggatggatgacactaattcactgttttgtagttgctatcatcttaagtcccagattcagtctcttctactatcatacccaaaatcctcgcaatcttttctctagtttcctttataagcatctgtatgtcagataacctttcccacttgtcacttctctgcttctcactgcccacctcttcaactgattgggaattgatgaactgttcaatttcatattccaatgatttcatctgcaaattaatatgctctataaggtcatcgtatgctgaatgattctttatgtagtttgctgggtcactattgttcaaaaatgagaagctatcagacatctgaagtgcactttgctcagcgtcgtcagccatgcttgcaattgcatgtgcctcatttctcaactcaaaagattccttttcaactgattttgggtgtgaatcgctactcccagctccattggttccaacattgactgtactggagaaaacccttatcttgtcatcagagtcttcaccattagatgtctctggacgcaaggcatactcaattaacatgtttgcttcatcgaaattactttggatggtgagtcggttcggc

SEQ ID NO: 141464 - DNA, 468 bp, Zea mays
  unsure (1)..(468): unsure at all n locations
  Clone ID: MRT4577_60497C.1
gaacgcnggcnnnggacnngngggngcggaacccgnncagcancnncggcacggcgggggccgccgacgcgnggcnggccagcgacacgncggcgnncgccaacacgnacancgagagccggggcggggggggggccnacgngnncagcgccgcgcncccgcccggcgngaggaaggaggaggncacggnggagggggacgagggcaacgngcncgncancaccggccagcgcagcgngnccagggaggagcgcgncggcgacagggggcaccacgncgagcgcngcngcgccagcnnccncggcaggggccaccnccccgaagacgccgccgncgacggcgncagggccgncanggacgccggcaggcncaccgncaccgnccccaagggcggngccgcngcngccgcnancgccgagaagcccaacgaggcgccgccgccggnggccgncgaggcggccgacggcg

SEQ ID NO: 141465 - DNA, 404 bp, Zea mays
  Clone ID: MRT4577_60498C.1
atttgtgggcagcgccttacgatcgcatcatataagacttcattatatgaacgtctaactcactacaactcctagaggaggcaccacctttgtatggtactctcggtagaacgctgttgtgtttttcaaaccacgttgtgtgtatggctgtgattgttgtaggcgtcagagggtgccaccgttaggcgcagtgcgctggggcacggcccaactgggttgcttcaaccagctggcaggcttgcactctcttgcttgtttacatggtctacatgtactatcgattcaatcagctagctagtttaatgccttgctaccgtttgtgttccaacaacttgctggtggcgggctgccagcacgctgctcctagcgctgggtccctgttgcaactgcgacgctgggtgcca

SEQ ID NO: 141466 - DNA, 611 bp, Zea mays
  unsure (1)..(611): unsure at all n locations
  Clone ID: MRT4577_60499C.1
cggncgcgtgggtttaaaactttaaaaaccgtgaaaaatttaataaataactgaattatagtatatatgatgaatggttggagacatcttgtatatgagaaaaatttttttaggataatatagtaaaatataatagaaagtatagatacgagaagaaattaatataggaggaatggttggatattgccggtgtttggttcctagacattggggatgggggcgttccgagcacggagtattcgtccgtcatctttattcactgttgggggtgttccgagcatggggtattcgtccgtcatccttattcactgttgggggcgttccgagcacagagtgttcgtccattggagatgaaaatactgcagacatacttacaaagtcattatctaataccaagttcaagcattgtcttaacttggtaggtgttcgtggagcttagcaccctagtggtgtttggggaaacagttttatagatttagcgttaagggaagatttgttgaataagtagatacgaccctatctctatctcgtttgccaatataaataggctccctgtaccctgtacaatacaccacataatagatatattttcccgtgattttttctcctcc

SEQ ID NO: 141467 - DNA, 965 bp, Zea mays
  Clone ID: MRT4577_6049C.1
ccggccgggtaaaatggaataaatctagggactaaacattagtccctagaaaccaaacacccccttaatgggcgagggctctccaagcattgctggatcgttagctgggaaagccatccgatggacgcctggtaaacagttacaattgtgacttggaagatctcccaatgatgcttctgcagcaggttgccagccaagtaatccactggctccacgatgaagcgggggtccttgggatgaacgtgactagggacttcctgtgcctgtacctggaccttgaccaaggtgaaacactaggcctggtggcacacgttgacccggatgacacccacggctgcgtctcatggtacctcactcttgatcatcacccaacggaggaggggaagatgtcagcgggtagtccagagctagaggagcgcaggcttttggggtacctttcaccggaattgctttactctaccctgatggacctggtaaaactgtgcagcacaggtgtccaacgctgagactcgggactgatgcccacagcccaccgagtgggagtttcatgcgcggtaagagagatgtgcaagtccagagaaacgtgcaagtgcagatagcagggaaaaagagagagagagagagagaagatgtgcactctgggccaggcctagtccgctgacctgtcaccggcccaccaaaaagagatggcaatccttccttccttcctagctcctttcccgactgcctctctactgtccgtgtcatgtcaagtcatctgatgatctccgtacccatgcccgtcttttactatttattcctcgtgagacggcttccagtggaaaaaaaaaccgacagctttggcagctagcaacatttctttcgctttgcgttttgaccggtgcacttgccagaagccaggagaaagttttctcgtgtgttcggtaacggttgaagccagcaaaaaaaaaaaaaaaaaagcggcc

SEQ ID NO: 141468 - DNA, 1822 bp, Zea mays
  Clone ID: MRT4577_604C.1
cggacgcgtggggtcgagcctgggtctggtttccagacctacccaaactgaaaaaattgttcttgcttcccgatttccagtcctctgtcgtttgttgtcccatactcccatctgttctccgcgaggcgcaacgaaggcacaaaacccttacctccatcaaaccctagcgctcgtgtccccgtttagctcccgtcgccgctaccatgggctcagatgcggatatggaggactacgggttcgagtactcagacgaggagccggaggagcaggatgtcgatatcgagaaccagtattacaactctaaaggtttggttgagacagacccagagggtgcacttgctggttttgatcaagtagtcagtatggagcctgaaaaagctgaatggggatttaaagctcttaaacaaactgtcaagctttactataagctgggaaaatacaaagaaatgatggatgcctatagagagatgttaacatacataaaatctgctgtcacccggaactacagtgagaaatgtataaacaacataatggattttgtttctggatcagctagtcagaactttagtcttctgcaagagttctaccagacaacactgaaagcgcttgaagaagcgaaaaatgagagattatggttcaagacaaacttgaagctttgcaaaatttggtttgatatgggcgaatatggtcgcatgagcaagatattgaaggagctgcataaatcttgccaaagggaagatggttctgatgatcaaaagaaaggcacacagcttttggaagtctatgctattgaaatccaaatgtacactgaaacaaagaataataaaaagcttaaggaattgtatcaaagggctctttccatcaaatcggcgataccacatccaagaatcatgggtataattcgtgagtgtggtgggaagatgcatatggctgagaggcagtgggatgaggctgccactgatttctttgaagctttcaagaactatgatgaagcaggcaatccgcggagaattcaatgcctaaaatatcttgtccttgccaatatgttgatggagtctgaagtgaatccttttgatggacaagaggccaagccgtacaagaacgatagtgaaatccttgcaatgacaaacctgattgcagcgtaccagaagaacgacatcatggagtttgaaaagatcctgaagagtaatagaagaacaataatggatgatccttttatccgtaactatattgaggatctgttgaagaacatcagaacccaagtgctgctcaagcttattaaaccgtatacacgaatcaggattccattcatttcgcaggaactcaatttcccggagaaggatgtggagcagctgttggtatcgctcatcctggacaaccgaatccaaggccacatagatcaggtcaacaagttgctagagcgtggagaaaggtccaaggggatgaggaagtacaatgccatcgacaagtggaatactcagctgaagtccatttaccaaacattgtccaacagagtttgatgagacgaatcgtggctgctgtatgctttgcacacctagaattgttgatagcctgttttggggatttgagggcaactgcaaaaaagagctgtatggcaacgcttgcagtagaatcttggatctgggtaaaatgagatgtccatgtaagcatttgatattagttttttcagttatattgactaggaggatgtccatgtaagcatttgatattagttttttcgttaatctcgcgttaaaaaaaaaaaaaaaaaaaaaaaaaaaaaaaaaaaaaaaaaaaaaagggcgggccgccgactagtgag

SEQ ID NO: 141469 - DNA, 450 bp, Zea mays
  Clone ID: MRT4577_60500C.1
taccgggcccccctcgcgagttttttttttttttttttttttttttattttcttgttttttgacatgataatttgcccttctgccgcaatccctggttagcgtattattctactgtggagctccggaaactagagctaggggacccggacccaaattataacgtaaacatcgtggcctccacgccgatatgggcagatacttagcaacagagctagcttatcataggcgccttacttgggggggggagcagtgaacttgagcaacgcaaacttaccggcgcacctaatacctctgttacctatggggagtgtatcgccggaacaagagacacagggttgggagcgagacctcagtggtgggaactctcgattaatggggtttttccaggttgtgcgggggcccgacgctaacatctccctgagtcatgatgggtgtcttgcccgcgttcc

SEQ ID NO: 141470 - DNA, 715 bp, Zea mays
  Clone ID: MRT4577_60501C.1
ctcgagtttttttttttttttttttggttaaaataatttatcttcgcaacgacaaatgagtagggttacaacgagattgttaacattacgtttgtttgggttgaaccaatcaatgtatgtttctcgctactgctagactgagatgagcatgtgcatcaccaccttgaagcaagaagacttggcgccacctagtgcctcgttacaccattcctaagcaagcttgcttctctttccagaaccgaagcaaccgaaaaggaaaccccagttccttcaagccgctgccacagcatttgccccattctgcagtaaacagcatcacaaaatccgccttctgctggtgctgctggccgtcggagccgccgcggtgagcgtcggcatcctgcacaagatgagggagcgccgcgtccttgctgtcctcctccaggaacgcgaccagcagctcatctccttccaagtcctcctcgaggtaccgggtatgcatgactcgttttcatgcatccgccgcgttcgagaattttttttttttgcatgaaccacaattgtgcttctaataggtagagctgttgcttgactgaatacatgtttctctgtgcctgcactttttggccgactctgtcagtagataatggataccctgcttttgtcacccagagtcctggactattaactactccatccgttttttgctagatacatagggctttgcgacgtacct

SEQ ID NO: 141471 - DNA, 847 bp, Zea mays
  Clone ID: MRT4577_60502C.1
cattgggaccctcgaggccggccgggaaagtacacggtctaccaatctacacagtttacacagtttgcgcttaccgcaccatttccaccatgagcgcagccattgctacccatccggttgaccggaaacaaacctccacaagcctcaacactccatctcaagtagcagcgcccaagaaaactaccccgactgccatcgtatcgttattctcgggcgctgtcgctggaggtgttgaagccacagcaacctacccgttcgaattcgccaagacacgcgcacaactgcaagtaggcgctggcggctcaaaaaatccctttaccgtcctctctcaagtcgccaagacggatggcgtaagggccatctacaccggctgctctacgttgattgtaggcacggctttcaaggctggtgtccgcttcctctccttcgactccatccgcaaccgcctcgccgatgaacgcggtgtcctctcaccagctcgcggcatgctggctggtatgctggctggcgccgtcgagagtgtggttgcagtaacgccgaccgagcgcataaagactgctctgatcgacaacgcgaagagcggcgggcaacgctacaatggaggcttccacgcttcgagagtcattctacaaaccgacggtattgctggactatatccgagggtttggtgtctacaactgcgaaacagtcagctacttctgcggttcgcatgggatcgtacatggtcctgaaagagttcgcgaggcggaaaaactcaagcagacagcgcactccttttggcatggtgcccggtcgcggtgtcatcaccgtctacgcaacacaacctttcgacactatcaagacacag

SEQ ID NO: 141472 - DNA, 265 bp, Zea mays
  Clone ID: MRT4577_60503C.1
gaaaccaccgtcgagcccaaccgcacaagcgcgcgaggcaggagagagagaggcggcgagcaaaacaatggaggggatagaggaggacgtgcgcctgtgcgccaacatgttgttggagcgccaggccatcggcacggcggagcacggcgcctgtgacgacaaggactacaaggagcccgcgacgctgccggtggtcgagcccggggagctcaagtgctggcccttgtacctcgcggtgatatgcgtgttcgcggccaccttactt

SEQ ID NO: 141473 - DNA, 353 bp, Zea mays
  Clone ID: MRT4577_60504C.1
ctgaaccctgctgtgaaccctgatgatcatctattaccactcatacagctatctactgagtactctaatgaccaccatcatcttccacttctcctatcgttcaacctgtaccccgctgttaacctggatgattatatgctactaccatttctactactatctacacagctccgtgcttccttcttgactcagttactgacgctgcatctgtacctgcatttctaccataaccccgcagctatcttacaactactacaactgctgccataagtgcaactcgctgtgacagacgctgcgacctactaccagcaacacttcattgatcacatcatctgtgataccgtttattagat

SEQ ID NO: 141474 - DNA, 127 bp, Zea mays
  Clone ID: MRT4577_60505C.1
aactcaactgaaccctgttagcagataggctcagaatcatctcaagggccaaatcacataaaacaacctaccctgagagattcttaagcagagctcaaatactgccgagctgatgggcatacatttt

SEQ ID NO: 141475 - DNA, 336 bp, Zea mays
  unsure (1)..(336): unsure at all n locations
  Clone ID: MRT4577_60506C.1
acaccacagtccgcggntagnagaaggttaaatttccccaaaccctagcttcggatctcgatggcgaacccccgcgtcttcttcgacatgaccgtcggcggtgccccagccggccggatcgtgatggagctgtacgccaacgaggtgcccaagaccgcgggagaacttgcgcgcgctgtgcacgtacgaaagggactggggtggggggggggtgcctttccattcccaggcatcgagagttcactggatggttcggaggggctgactgagggggaggatgactttgagctcatggatggctttaaggatcagggggtattggtactggacagtggt

SEQ ID NO: 141476 - DNA, 2045 bp, Zea mays
  unsure (1)..(2045): unsure at all n locations
  Clone ID: MRT4577_60507C.1
gccatccggnactgtggcgtcggcagggcggccggtgtggcatctatggagccaattctcctgagtgggtcatcagtatgcaggcctgcaatgcccatggcatctactgtgtgccactatatgacacgcttggtgccggggcagtagaattcgtattgtgccatgcagaggtacagattgcttttgttgaggaaaagaagatcggagagatgctcaagacatttcccaatgcgaccaaatatctgaaaacacttgtaagcttcggtaaggttgatcctgggcacaaggaaatagttgaacagaatggcttgtccatctactcatgggaagagtttctgcaactgggaggtaaagagaagtttgaacttccacccaaggaaaaggatgacatatgtacaataatgtacaccagtggaacaactggtgatcctaagggagtactaatctcgaacaagagcattgttaccattgtttcagcagtagatgagttcctcagcaactcaaacgagcagcttaacatggatgacgtttacatttcctatcttccgcttgctcatatatttgaccgggtgattgaggaggtgttcattcgtcatggtgcttcaattggattttggcgtggggatgtcaaactcttggttgaagacattggagaactcaaaccaacagttttttgtgctgttccacgtgttctagacagaatttatggaggattgcaagataaaattacagctggtggtttcctaaagaaaaccttgttcaatgttgcttacaaatacaaacaaggcaatatgttgaagggaaacaagcatgaagaggctgctgccatgtttgatcgcctggtcttcaccaaggtgaaacggggactaggtggaagggttcggctgattctatctggcgcagctcccctatctagacatgttgaggagtatctgcgtgtggtaacatgctcccatgtccttcaaggatacgggctcacggaaacctgcgctgggtcctttgtttccctgccgaacaacatgtccatgctgggaactgtcggccctccagtcccgtatgtcgaagtacggctggagtctgtccctgagatgggttatgatgcactgtcgagcgagacgcctcgtggggaaatttgcatcagaggggacaccttgttctcgggatactacaagcgagaggacctaaccaaagaagtcttggtcgatggctggttccacacaggagacattggtgagtggcagtctgacggaagcatgaagatcattgaccgcaagaagaacatcttcaagctctcacagggagagtacgttgcggttgagaatctggagaacatctttggtcaaactcctgctgttgattcgatttgggtctacggcaacagcttcgagtcgagcctggtagcagttgtgaaccccaacacgcaagcactggagcgctgggcagagtcgaacggggtaactggagaatttgccacgatatgcgaagaccctagagcgagagagttcatcttgggagagcttacaaagatgggtaaagaaaagaagctcaaaggctttgagctcatcagggctgttcatctggaccccgcaccgttcgacatggagcgcgaccttatcaccccgacgtacaagaagaagcggccacagctgctgaaacactatcagaccatcattgacggtatgtacaatagcatgaagtaggctctgcacggctccacctgttgcctcacggcatggagaatcaaaatgctttgctagccgtcacctcggcaagcagactccaatgtgaattgagattatttcattagattgtgtcattaaaaagttatgctacatgatgttagctaggttttttttatccctcctggctcctgaaattggcgtacaagctgcgtgaatgcacccgtgtcagtgttgccatctaaatacaatgtaattctgcagatacgcgtatgccctgcgcctcgattttttgaattttaccttttaaaaaaacatatttacaaaaaaaaaaaaaaagggcggccgctcgcgacccaccgtccg

SEQ ID NO: 141477 - DNA, 229 bp, Zea mays
  Clone ID: MRT4577_60508C.1
aggattagaaggcggttttaagaaggtgacttgtaggttcctaaaagggcgacagagaaataataagataaacacgggcacggcctatgtattccttgttatgtgaaatgagagatcccatcatcaggtttagtttagtttagcgggaggttagggtaggtagtttaatgaaggtttggagtaccgtgggtgctgttctgtgcccgagagagaggaagtagaagcgtcg

SEQ ID NO: 141478 - DNA, 1101 bp, Zea mays
  Clone ID: MRT4577_60509C.1
acaacatgtccatgctgggaactgtcggccctccagtcccgtatgtcgaagtacgcctggagtctgtccctgagatgggttatgatgcactgtcgagcgagacgcctcgtggggaaatttgcatcagaggggacaccttgttctcgggatactacaagcgagaggacctaaccaaagaagtcttggtcgatggctggttccacacaggtaccatcggtccctgttccagtattcctccagtgtctgatcggacgtgtccatgtcagcatcactgtgagtcaagaaaatgtcaagggaaagaaaatgtgaagggaactggtgctttcgtagccgtgctttgtcaacaatttgcattaactcccggaagatcattgataactgtcttgaaagagatcctgatttaacttgccatcagaaatgcctttgaaattttcccaagtctaacgtttgttcactgccaaatattaatatttactgcaggagacattggtgagtggcagtctgacggaagcatgaagatcattgaccgcaagaagaacatcttcaagctctcacagggagagtacgttgcggttgagaatctggagaacatctttggtcaaactcctgctgttgattcgatttgggtctacggcaacagcttcgagtcgagcctggtagcagttgtgaaccccaacacacaagcactggagcgctgggcagagtcgaacggggtaactggagaatttgccacgatatgcgaagaccctagagcgagagagttcatcttgggagagcttacaaagatgggtaaagaaaagaagctcaatggctttgagctcatcagggctgttcatctggaccccgcaccgttcgacatggagcgcgaccttatcaccccgacgtacaagaagaagcggccacagctgctgaaacactatcagaccatcactgacggtatgtacaatagcatgaagtaggctctgcacggctccacctgttgcctcacggcatggagaatcaaaatgctttgctagccgccacctcggcaagcagactccaatgtgaattgagattatttcattagattgtgtcatcaaaaaaaaaaaaaaaaaagcggcc

SEQ ID NO: 141479 - DNA, 837 bp, Zea mays
  Clone ID: MRT4577_6050C.1
gactagacaactcatatcttctttttttttactgatccttgcagtacaatacatgtaggagtatacaagatgtaaggacaggatttttgtgatgtagtacggtatatatgctgtcggttcgatcgaccatggccgtgaccgtgaggctgagtccagtgcacagcctccctctcgcccctgccacgttaggtatcgcctctgctgctccagtgcacaggcgcgcatgagactcccactactcggtgggcatatatcagtccgagtcgcagcgttggacacctgtgctgcacagttttaccaggtccatcagggtagagtaaagcaattccggggaaaggtaccccaaaagcctgcgctcctctagctccggactacccgctgacatcttcccttcctccgtcgggtgatcaagagtgaggtaccatgagacgcagccgtaggtatcatccgggtcaacgtgtgccaccaggcctagtgtttcaccttggtcaaggtccaagcacaggcacaggaagtccctagtcacgttcatcccaaggaccaccgcttcatcgtggagccagtggattacttggctggcaacctgctgcagaagcatcattgggagatcttccaagtcacaattgtaactatttaccaggcgtccatcggatggcttcccagctaccgatccagcaatgcttggagagccctcgcccattaaactaatctgtccatctttcaagatcacctttgtaccgaactgtgacctggatttgtacttcaactcactgcagtctgaaggccttctgactcgatcagtggccaggataggctgaggaactttcaggcagagag

SEQ ID NO: 141480 - DNA, 343 bp, Zea mays
  unsure (1)..(343): unsure at all n locations
  Clone ID: MRT4577_60510C.1
cggacgcgtgggctgggatggctgaaagctacaaagcgcacaagggctgtccttccagcaaggttgaggagcctagctttccagtttggtagcctatctgcaatcttgacaacccagttcatcaaaatattcctgctaagcttcttatctgagataggcagccccaagtaagtgcaagggaaggaagagggggggcattgcagaatgttacacccttcatgcagcaattccacttcacattttattggaatggcacaactcttgtgccaattttcttcaagggcggaagcttcacccaaacaatcaagaatgaggttgacacagnttaaatcttcctccctgg

SEQ ID NO: 141481 - DNA, 628 bp, Zea mays
  Clone ID: MRT4577_60511C.1
gccggcctgtcccggacagatcatctgccagaatatttcccacaatcttactagtggccaccattgacttcgtccatatctaccatgtatgactgcatcgcgcaaagggtctcaaagaactagctttggccagtttgaaacaccgccgtaaggatctcctggactacatactccggatcccctgtccgtaaatctcgaggatgacaaggaagtctgttgtgctgcacatctccgtatttatctactaatagacccaacacgagctctttatcttcctctacaatgacatcctgcactgtttcgcctatgccgccgcacgctcgccgcaagaccgtcaccgccatggatgttgtgtacgccctctagggccacggccgctctctgaacagtgtctcgccgcctgagtgcatctcttccctctcctgctatgcgatgccggcgacctctcctcaggttccctctgccttgcttgccttgatagtagagagttatcagattaaaatatctctgatgtgcttacatattgggggctatcatgagccccagcatagctgactaatcaagatcgagatgcatctctctttgcacaaatgaaatgttaaaatcgagatccgcatgtatctttctt

SEQ ID NO: 141482 - DNA, 151 bp, Zea mays
  Clone ID: MRT4577_60512C.1
cccacgcgtccgggcggaaggatccggtgcatgcaggtgtggccggcctacggcaacaagaagttcgagacgctgtcgtaccttgccgcgcttgtcacggacgacctggttaagcaagtggactacctggtgggcaacgggtggataccct

SEQ ID NO: 141483 - DNA, 254 bp, Zea mays
  Clone ID: MRT4577_60513C.1
acgcgtccgaagcacccgatcaagctaaacagctccccctacaatttctgcaacaagggctttcccgttgcttttgtttctcctgctcaccgtccaacttaacttgctctttcgcctaccctactccccctccacccttgacctctccctttacctctgcgggggaccagaccaacataacgccgagcaggatccacagcccccgctgctggtgcactcgacgtgcaactccaccaacttttacgacctctgca

SEQ ID NO: 141484 - DNA, 266 bp, Zea mays
  Clone ID: MRT4577_60514C.1
ggggtatattcaattgtttgggggcagaaggaaaaggaccaccgactagctgacatacgagccgagaccctagaaggtggctaacacaaaaaaaaccaaaggccaaaaaaggataccggaccaggactcaaggaactggtataattgcattgcatctagtattacaccaaagattgctaggagggccaacacttgccaaccagagagcaactacactcggttgaagaccaaacatagaaagaaaactaatggggacctctaggggg

SEQ ID NO: 141485 - DNA, 599 bp, Zea mays
  Clone ID: MRT4577_60515C.1
ccggccgggcacgggcgcgcgcatcggctgcctccagaactacccggccgacgtccagagcatggctctggagcaggtgaacctgtcgccgaggcttgcggcagcggtgccgtccccgcggctgcccatcccgtcgccgcgccccagccccaagatcaggctgtcgcccagcctgcactacatgggctgccccaccccgacgggcagacgctcttcccccaagcagcagcagttcatgggcttctacacggcgccgcccgtggcgctcaccctccccaagcacaaggtcaagtgatctgctcattgacacgacacctccgcagccacagcgccgttttccaaggtgctcgtgctactgcgttgcgttgcgccgttctttccttagcaccagggagggagggagggaagggttaacaatattgttggttggtttgttgcttcgttgtagacaaacatcgtttcggttgcgttctctgatcgggtagcattcttttgtacgtttcttccatcatcgctttttgacctgaggtgcatgcgctccgcctgcacaataaactacaggcctttgcaccaaaaaaaaaaaaaaaaaatttgcggcc

SEQ ID NO: 141486 - DNA, 422 bp, Zea mays
  Clone ID: MRT4577_60516C.1
aaaaaagggacccccaaactttttttaccccccttgtttttggggggggggggaaaaagggtttaaaaacaaaaagccccggccggaacccccctttttgaaaacttggcgccggggttgtttaaaccggggacccctttgggggggatacattaacacccccccccccctgggtacctccgtttttttaaacccccacatgcatgggggtgggcacattaatttaattcacctcccccaaagaaaaggggggcccttgtttcgggcaagggccccttcccaaaccgtttcaaacgtttgtttcccccccccccaaaaggactacttgggaaactgggactttttaaggccacccccccccctgggggggccctctccccagaacttttccggggggttaaaacccccctttttccccattt

SEQ ID NO: 141487 - DNA, 199 bp, Zea mays
  Clone ID: MRT4577_60517C.1
aatgcctgcgaatcctacacactcacctacttagctctagctacgggatcatatacggggaaaagtgaaaagacacgtactacccacggtacaggaaccatgacatacacggaggctactttgcaacaacattacgtaatcagactctgaatacatacctgtaccttatgcgacagaaaataaaccatggctatgttct

SEQ ID NO: 141488 - DNA, 1114 bp, Zea mays
  Clone ID: MRT4577_60518C.1
gccgttggtgtttgccataaaaaaaaaaaaaaaaaaaaaaaaaaaaaaaaataaaaacctcgtgccgaattcggcatctagaaactttccaggcatcttagatttgaaatgcagccctgttgaacctgtgtttgtctctgcagctgcatcaagacggcatggatcaactacatttgagagaacaggatttgccaacttgacagtgtggcatatgaaaacatggaagccattgactgtcctccctcttggtgaggatccacctgccattacttctctttgcttcaatcacaatgggaagattttggcagcttctgctacagatggaatgattcacatgtttgacatgtctgctggtcttcaaattacaggatggcctgcccatgattcacctgtgagctctgttctttttgggccagcagaaactagcatcttcagcttaggctcggacggaaagatacttgaatggagtttgcacaatcaaggtcagattctttggtcaagagattgcagcagattctgcaatccggagagctttaaaacacgaatgcatgaaatagcattggattcaaatggcaagaggctgctggtcacctccggtttggttcgggccccaatataccaggtacaaggccatgaaagcgaactgaggacactgccgcacagttcatctatcacaagtgtggattggcatccaacactgccaatgtacatcactgggtccgcagaccactctgtccgggtcacgtctatcttatgatgattctataaaacaaggtgctggcaacaacctttcccagctagcatgcatcaatttttattgacagtcttatccatgcgtgaggctcggtgtcacgctattttctcgcatggaagatgagctgtgttcttgttttgtggcttcgttgtgcgtctaattctgtaccctttggtgggttgctccaacatttttttttcttgttgtaaacaggcatagagttctgtggtcatttgctttaaaatgagtgatagatcaaaataagtaaactttgtagcccgttctcgaaattctcacttctgcatacgcagatatgctatatactgtatgtacttgtaaatgaatttgtagcccgtttcc

SEQ ID NO: 141489 - DNA, 286 bp, Zea mays
  unsure (1)..(286): unsure at all n locations
  Clone ID: MRT4577_60519C.1
gntgnactagaactactcaacattggcaggcagtgctttttatcctggtgagtacactggctatgcaaaaagaggttagggaatagagctttgggggattctcaagatacaaagggtccttaaatggaggagcgaggctaataagcttcatagcatgtcctatgatatctttgttgaagaaagcagctttcgacaacagtagaatgctgtgagcaagcacatatgtgcaaacaagactgggcatgagatatagaatatacctactgggacaaagtgcgcaggacat

SEQ ID NO: 141490 - DNA, 158 bp, Zea mays
  Clone ID: MRT4577_6051C.1
ctaaattctgttgccagtgccgtactaagcggcaaattgactccaatggtgtagttgcggcattttggtggcgcggttaacctgggtgtcactttcatctatctgctgagatatcagcaatgacagaagatctactggtttggtttacggactgaccg

SEQ ID NO: 141491 - DNA, 402 bp, Zea mays
  Clone ID: MRT4577_60520C.1
gaccactcatggccaggagcgagcactgccgatcacctctacgccgcagcgaccgcagcgccatcagaggtggagctcctagcggggaaaagactcggcacacatgccacaggaacagggccgaaaaacagagggaagagagataggggaccgctagggcggcgcccgaccgggccaagagccacgggctcttgcgcaggaagctcatgaggctcctgtcggtcgaccccttcgggtgccgagctggacccaccgacgacgcggccccccgccccgaccacgttgccgacgacgccgcaaggaggcggcagacgatgacggtgaacaaagccccccatgtgctgggggctgctgcgcaggatgctctcccgtggcggcccccgctcggcgaaatctgcgagg

SEQ ID NO: 141492 - DNA, 672 bp, Zea mays
  Clone ID: MRT4577_60521C.1
agctgctattcgtttattttcatttctcaaagaagatttaaaaacaataatgctcacaacagttaacaaacaggaagaaaatacaaaacaaaaaagaactgaaagacgtcataatgaagccacattcccatccatcaaattgtcaactgcgtgcagccaaggatcgtcccacgacaccttgtcatcggcgccacactcctccaggccggacgatcattcccaactgtcaaagcgtcgacatctgacaagggcttgatgtcccaattgagcctatcaggtccgatcactcctcctacgatcaaaacctcatcactcaaactcgtcatcgccattccgatcctccgcttaaactctgaggccgatgcaaccatcttccacgtgtcacctttttgcttgaacaccagcccatggctcatcacgtaaagcacgtcctcaacgaccaccattggaccttgcggccagccatagtctttgacatcccacccgagtttaacgctctcaagaacctgcaccgtggacaagcctttgggcaagacgtggactttcccgtttaccactagacccgagcaggcagagttatgagtctggtggagatctgggatggatgtccagacgtcattctcaggatcatacatctccgctccagatatggatttcctgcaaggggggaat

SEQ ID NO: 141493 - DNA, 174 bp, Zea mays
  Clone ID: MRT4577_60522C.1
gcgtccacgcgtccgggaatgtatcacatgatggtacttctgggttgctgctgaagcagagagagccatagtcgggtcgggatttgtacccacctagctgaacctgaaccttgaagtttggtgcaattgcaatcgattttgtaccactcttttaaaaagggtatcggtcaatgc

SEQ ID NO: 141494 - DNA, 293 bp, Zea mays
  Clone ID: MRT4577_60523C.1
cgctgctgacacgaacatagggttcgtcagtcgctatggcatgagactctaccagggtgccggaggaatcgcccctctaggagattcttatttctttggtgttcttcctattacattctacaacgcttatatagaggtatgcacccctgactcaattggaaagccaactaaccaatgtaaacaaactaggaaacaacaaattgactcagaataggaagcaacaaaccgactcctaaacaaactatttaaggatatctctgtttttaaacttatctgattgccaattgttaatc

SEQ ID NO: 141495 - DNA, 291 bp, Zea mays
  Clone ID: MRT4577_60524C.1
agcgtggtcgcggccgaggtacttcgtgcggaggcaattttgaagagtttttggatcaccgggtggctcattctttcatgcgtttctatttttgatctttttaactggacaaggcctttggcactgagaaataacaggtggttgatccacaccttcttgcaactgttatctgttagcaagaggccctccgtggtaggtctatctatattcgctcaaaccggcacgcttttgccttgccccaggggaaaaatggaactaaaaaaaaaagtacctgtccgggcggtcgctcga

SEQ ID NO: 141496 - DNA, 263 bp, Zea mays
  Clone ID: MRT4577_60525C.1
tgttgtccaactgacagtaaaatttgtacaatgtggtatgtttccttttccttttgtattgtgatataacagtacaatattgcctttttttcatgtgcaatgcagttgaagtgagaactgagttgttctttctgttttctcatgaatatattgtctgttctgttacataaaatgactaatatttctaattcatttcacttaactctggggtgctgcaagaaatttacttcaaaagaatgtcatctgttagtagaattagtggt

SEQ ID NO: 141497 - DNA, 528 bp, Zea mays
  unsure (1)..(528): unsure at all n locations
  Clone ID: MRT4577_60526C.1
agagtcagtgcaccattagttcatgttacgcactaagcttcttctgtgtacatgaggaatgacagacaacagcatggcgatcacgcgtttacatcatatttggttgctgcaagagttcattttaacatgggcacgcacctatacatattggtcgacgacaggacatccttgacgcgagatgaggatttacgatcagacgaattgctaattgtctgtcttatcagccgtgcttgatggagcaagccaccacctgcgcccagtgcctcagcctcgtcttcacaagctgagggttgtcacctggggtaaaaatcttccatgagtcggcgccgccattggcggttgcaccggcgttggggctgcgtgggctcgggatgtcagggagcgtggacgacgaagacacggccgataaagtcgacgtggggctcgccgttgccagcgtccgcagcttgcggtccgacagctgccggttcacagcgaagtagaattcgagggcgggcagngtgtcacgcaagtgtgttccggcggtgt

SEQ ID NO: 141498 - DNA, 154 bp, Zea mays
  Clone ID: MRT4577_60527C.1
ccggccgggaggcacaattaacataacaggaacagctatggggcaagcctacccacggcttgccctagtggccctcatggcggtggggactggcgggctgttgcggcatagcgaaagggaacggagaaggacaaggtgcatgggggaggtgacg

SEQ ID NO: 141499 - DNA, 485 bp, Zea mays
  Clone ID: MRT4577_60528C.1
gccggccgggctgcgattctttagtcgccgccgccgtatttctgcctccatctccgtttccgtttcgttgacatgggtaaggcgtacggatcgttggcgcgcgccgacaaggtccgcgggcagacccccaaggtggcgaagcaggacgagagagaagaaggcccgcggccgtgtgctctagaggatgcagtatgatggccggttcctcgccgccgtccgcgtcttcggcaagaagcgcgaacccaactcctccgagaagtaggagctgctcggctcgtaccggttcctcatccttcctgctctccgtatgcttatgctcttgatgctctactttctctgttcgcaagtacaggaagaaacttctgtagattcggttttgctgtccatgtgctcagatgcgaacttgttattgtatgaatttgggatatgctgatatgagctgatgatttttattatgttaatgatgaaaaaaaaagagggcccta

SEQ ID NO: 141500 - DNA, 749 bp, Zea mays
  Clone ID: MRT4577_60529C.1
ttttttttttttttttatatctaagaaaggttctggaacaactaatacatggtgcacggtaccctagctgtggtggggtggcacaactgcactgcagtcgaagcctgcctgctaccgaaaagaataaaaaaagatcgaacagggagaaagtagccacgacatgttgttgttgtatgacctcatcagatgacaaattataaactaatttgtttctcggaaggagcctgcctgccctaccctgaatggcacctgcacctaccaaacggacgaacatttcaaatgcccaggacaatcagagccacacatatagaaccaagcgctcgtattttttattttataaaaaaaagcaatgcaagaagagagtgaagaacacatagggtacaaaaacaactaaacaaacaaactcaaataagcatggcatcacaaaactggagggagccgttctttatcttcttctcagcgcacagctccattaattaaacttgatgctaccttaacggagccttgcttaataaacacaccgagcaagggaggaggctctgacccagcgcaagcgaggctcgtggaggggcgcccggggcacgggcacggcacgcgatggcgcgtctgcggcggtggctggcaggcggcgacctgcggcggagggaacgtgtgatagctacttggggtagtagaaggaagggagaagcagggaacagagaggtaggagcggacggattcgatagcttctggttcctcgtgccgaattc

SEQ ID NO: 141501 - DNA, 294 bp, Zea mays
  Clone ID: MRT4577_6052C.1
ttccagtttgctttctttatcattcacaaaagcttcagagatgatcagtcacaaaggctccacagggacatcttttcactttgaagcagtttaaaagcccacaactacatcacttatttttaatatcactccagcttttgttcaaaagcccacaactaccagctctttttttaaatcaaccgttgaaacaacaaataggagcttggcaagctatgctagatatgtatttcagaagaggattctggattgacagatatttgtatggaataatgaacttttacatggaaagatgaa

SEQ ID NO: 141502 - DNA, 1186 bp, Zea mays
  Clone ID: MRT4577_60530C.1
ccggccgggataaggtatttgtctcttcttccacctccagcctcacaagcctgcggttaggggggcataaccccaaccggagaggacggccgacggctacgagctacgtagccgtggtccggcaagtcggggattccaggtccttgacattatccttcctccaagcctcgggctgaccaggttgagtagggttttaggtgctgttttagccttgtttcttgagtgggctcttccccctcgttttctctttcttaagggtgcgtttggttgaggagtggaggagaatggagtgactcgacctcgattcctattttatggatgttttgtttccaacaaaagatgagcggagtgggtcctggagtctacatattgaaatttaccataaataactggaatgctcccgctccaccaaaaggaccggatgcgagtgctcctaggacgggagcggtcttctccctctccttccctctacactcatatggctctccaaccaaacaaagaatagaatgacgccactctattatattcttcaaccaaaaaaaaatggagcaactctgttctatttgccaaatacagaatagaacggctctattctcaaaaactagaatgaagccgctccattctagttgactctccaaccaaacgtaccctaatataatggtatacaactcttctgtgtgttcgaaaaaaaaaactattagccctacggatccaaacaggatctacatctgtcttccaatgaatagaaagaagttctgtgttgagtttataactaaactttttcccagatttggcagacatttgagtggtaacaagttacaacttcatcccgtagtggcatagtgaattacagctgctcggtatttgtgaattgtgatattattgactgttgatgatggaggtcctagagaataaattaggaaattcaacattttccttgtggaccgggacctttatctctttatccattggcagagttttgttagtttacatatttatttttaactgatatgttgaacatgatatgggttaagtatcattcagtacccgttgtggaaactctacaacacattatatatcatcagtcatcgcacgctagcactcattattcaagagacattctcttatctctatttgagttcattaattcattcttggatctaggcttattctcaaccttgctatt

SEQ ID NO: 141503 - DNA, 213 bp, Zea mays
  Clone ID: MRT4577_60531C.1
tcgcgggtccacacacgcgtctacaatgcattgtactacacccagactgttatttggaacggccccatgggagtgtttgagttcgataagtttgcacctggcactgacgccattgccaagaagctagctgagcttagaaccaccaaaggtgtcactaccatcatccgccgccgccactccgttgctgctgtccagaaagctgggctggcccac

SEQ ID NO: 141504 - DNA, 424 bp, Zea mays
  Clone ID: MRT4577_60533C.1
cgcccgagcatgaaagtcctgtggggttcgttcgaggcggcggcggcagcggcggtggcgtgcgaggtgaccgacagcctgcgcgcgttcgagatgtcgatgaacacgtgggcggagtggctggagcgccacgtcgaccgcgcccgcaccgggctcttcttcacgagcatttcgccgacgcacctgcactccgacgagtgggaggaggcggccgggtccgggagcggcgccggctaccaccgatgctacggcgaaatggagccgatcacggcggatgggcaccgtgggcgggacacggacccggcgttcgcgcgcgcggtggatgcgcatgtggcgcggctgggcgcgcgcggcgtcgccgtgcgggtgctcaacgtgacgcagctgtctgagcaccgcaaggacgcgcacccgtacgtgcacc

SEQ ID NO: 141505 - DNA, 191 bp, Zea mays
  Clone ID: MRT4577_60534C.1
agccccacaaaatttctggattattggcagcgcaaatacaagcattatgcctttaaaaactaaaatttaaaaaaaaaactctactctacagcctacgctaacgaccggggcctcagtgactgaaaacccctacgggtgaacaatgtacaacacaggtccgtccacccaacttattcaagggcgcggttgac

SEQ ID NO: 141506 - DNA, 502 bp, Zea mays
  Clone ID: MRT4577_60535C.1
ccggccggctcccgacccatactatctcgctcattctgtctcactgctccctctctctcctgttgcatctacgatcgaccgaaggagccgagcacaaactctctactgcacatgcatagacaagctcgagccctccccaagcatgccttctgtgcataacatacggacacctcatcgaggtcttccgccatggtaccgcacttgtgctcttcctctccccagagcacacctttcccacaatcctggaacaaagcgagatgaccaacatcaactcggacatccactacgctgcgactctgctccacagcatgactcttcctgttgcacaccctgcacctggtgctcccacgcaagatcctggctgtgatccgcaacaagaacggaattgtcatccataattacctacaagaccctcctcgtcctctggtacggcatctacgagcagcccatgacccctgtacagtgcaacatcgaggttgacatgctcggcgactacctcgca

SEQ ID NO: 141507 - DNA, 176 bp, Zea mays
  Clone ID: MRT4577_60536C.1
ctttttcgaataaccttggtcaaaactagagaattttgagacaaggctaaaagggcttacaatttgaaacgaaacaaaaggaataaactgtcgttgtccatgttggggcacagctaatcattgctgcatctgaagtgctaatccaaagcttctgaagtgaagataaaaaagaattc

SEQ ID NO: 141508 - DNA, 143 bp, Zea mays
  Clone ID: MRT4577_60537C.1
atgacgggtaggcctcgtcctaagctgggatcctctacagcgaccaccctttagatcgtttttgagcgacacccgacaccgacatactaaaccgccttagccataagaaagtaggggggttgtaaatactcttggaataactc

SEQ ID NO: 141509 - DNA, 306 bp, Zea mays
  Clone ID: MRT4577_60538C.1
ttttttttttttttttttttttttttttttaactttaatcattgttcgagctttagcaagaaatccaattttgggacaattttttctaaaacaaacccttttgagttcatgtgacccgggacaacttttgttgtggatttggacatagaacattgatcggacccagcatgggaaacgaatttccgcgcaagcctacaacttaatcctcttatcaccttgagaaaaatactggaatgttgggttgccggcaccctccttggaaagggggaataccaaaaacccatcctacttcatgggctgaacaag

SEQ ID NO: 141510 - DNA, 459 bp, Zea mays
  Clone ID: MRT4577_60539C.1
ctgggttaaactaacacctgtaacattcatcgtatgtgctggtggtgcatcgaatgctagcccagcacttatacgatacgctggcgcttcgcaatgactacatagcgacgtatcgccaactgataaccaccttattgcttgggatgcactatccaatgaaggctcatgatcagaaggcttagacgaggctttcaatccctcttcttgagctgctcgatgtcacccacccctaataccccgcttttgacatgcaggcctcaatggaagacgacacatgcccttatccatgcccttaagccggcatatgatagacctaggagtagccctacttaaccactgccacagctcccccttgcacttcggcatccacgtcaggatgtacatcatattcacggccacgttcctctgttaactggttatcatgaacctcatccggaagttgagacacgccatctactt

SEQ ID NO: 141511 - DNA, 496 bp, Zea mays
  Clone ID: MRT4577_6053C.1
attcggctcgagaaacatgcctcctactatgtaatccctggcctcagcatgcggatcctaaagccatgttacaatcatgttcatcttaaagttcagggagacaaccgattgtatccatacttcatgaattgcataggttcaatggatggaacccatgttccagtatcaaggccacccgaccaacccgcaccatcaaggaataggtcgggagtagttgggcttgataccgtgcagctggcaggaaatattggacatatggagacagttttgcacagcaagatgcgtgccgatatgagctatatctaggtcgaattcactccatgtgagggctcaccatgtaataaaactgaatgaaggtcgttgtgagactagtatgacatgcttaaatttctggattaaagctaacatattataagcgtattacatgcttaaaatcctagagaaatgacacgagcaatgattaaatttctagagaaatgacatgttagatgcttaa

SEQ ID NO: 141512 - DNA, 1726 bp, Zea mays
  Clone ID: MRT4577_60540C.1
aaggccttccacgcgtccgggccttcccccctcattcacttctgcctttcctcatctgcccgtcgtcgtatcccccggtccgccggtcacctcgacaaacggcgaagggcggcaaaatgctgcagtgcatctttctcctctccgattccggggaggtgatggtggagaagcagatggcggcgcactgcgtggaccgcgctatctgcgcctggttctgggactacgtcgtcgcccacgccgccggcgatccttccaaagtcttacaggttgtggtgtcaccaacgcattacttgtttcaaatctatcgcaacggtgtaacgttcttggcatgcacccaagtggagatggccccactgatggcagttgagtttctctctcgcgtggctgatgtcttgacagattatcttggagatctgaatgaagatataatcaaggacaactttgtaattgtgtatcagattttggatgagatgatggataatggtttcccactcacaactgagccaaacatcttgaaagagatgatcaccccacctaacattgtgaacaaaatgttgaatgttgttactggcaagagttctacccttggcagcaaacttccagatgcagctgcttcttttgtaccttggcgaagaacaacagtcaaggatgcaagcaatgaagtctatgttaacatagtcgaggaacttgatgcatgtgtgaacagagagggggttctcgtgaaatgcgaagcatacggtgaagtccaagtaaactgcagcctcccaggtgtgccagagctgaccatgtcctttgctaaccctgcaattatcaatgatgttaccttccacccctgcgtccgattcaggccttgggaatcaaatcagatcctatcatttgttcctcccgacgggcagttcaagctcatgagttacagggttcagaaactgaagaagacaccgatctatgtgaaaccacaattaacatcagattccgggaactgccgcgttagtgtgatggtcgggattcgaaatgatcctgggaaacctattgattcgataacagtgcagttccagttgccccctcttattgtttctgctgatctgactgcaaactatggcacggttgacatccttgccgacaagacctgtttgtggacaatcgggcagataccaaaagacaaagcaccggcactctctggaaatttacgactggaggaagggctcgcacaactgcatgcattgccgacatttcaggtgaaattcaggattatgggagttgccctatctggccttcaaattgataagctggacgtgaagaacacaccgaacgctccgtacaaaggttttagagcccagactcaagctgggaagtatgaggtcagatcgtaggtgcttgcaggggggcagctgttagttcattcttgtagaaaacgaatgatgctgcggacctggctcatggcctgttaacacattgttatgatcatcagttgagggttcacggccagctgcatttgggtcgttgcatttgatgggaggtgccattgttctttgttcaggtcaataggtgtcctgtacctgtacctgaatcagattatcctctgtggtgtgaaagcaacagaatactgcgaccctaggcctatctagatcaaggttttggattctggcaccttgtgttataaaattcacttgagtatagaatctctattttttttgttataagaagaaaaaaatctcttttttgttag

SEQ ID NO: 141513 - DNA, 1686 bp, Zea mays
  Clone ID: MRT4577_60541C.1
ccgcaccacgcacgaggctttcgctttatcacctgtcgcccccgcccccgagcctggtcgccgcttcacccgccgtcgccgtcgtcggtcgggacgcctccgggcggccgcgccctcgacggaggaatgtcttctgttgctcccgccctcgtccaccaccgtggggtctcaggcagagcaatcttacctttgcatcatggagaatgcagagtccctccaggtgcttgtttcatgggcacatcacctacgttggggccaatgagggtatccttggtatgtaatgcaagccccaaccaccataggccaaggaattcggatatatcgcgacaacaaaaaggggggtcctccagaggaaaaggcaagtcgtaccaggataaagatgactctgagaacattgatgaatttgatagtgatatcatgttctccaagaatgggccaccaatctctttggcaagcaattcccgtcctcaagccacatcggctcctggggaaagagagaaggagatcgtggaactctttaaaagggttcaagcacagctgcgagctagggggaaaagcagggaagacaagaagcctgaacatgcaaaagtgcagggtgaaaggggcagtgttgattcacttcttcagttgctcaggaaacactctgtggaccagagaagaaagaatggtgacgacaaagagcagaattccgatgtattgaggagaggcaacgattctggaaatagacaaggttcaaccgtctttggcacaaaaagtgacatccaggaagagaagaagaagccacctccggcacccttcataaggccagcctcaaatttcaggcgaaggtctcctgttcctggagtgaagttccagcctgttatcaatgcggatctggacactgatgacgatcgcaagtccatcggcagtaatgccgtggatgctgtacagaaagctaagacagctcttgatgagaggactgctacagatgagcctgactccatgtctccatatgaggcggattctgtaatagaaccaggaaacatttctttgaatgacctcgatgacattttacatgacgatgaagaattcgatgcggatgaaccagacgacgagtatccagaaccttctttgggtatctctgatgtcacagatacggatgagtcgcacgagaacgactccacccccacgggaagtgcggatctaagctctctgaaggttgcggagctgagagagctcgcaaagtctcgaggaatcaaagggtactcgaagaagaagaaaaacgagctggttgaagtgttgagcagcagcatggattgatgataagtgggtggtgacctggcgctctgtttgaagtttgaagccactttgcttggccccctctagaaaattgtaaatgagcaaggctaactctgttccggtctgtgctgatcttttgctggttcattttgtacgcctagcttggtagccgtttagctgaattctgtggtgagtggagtaaggtagctgagagccttagctgtctgtgtactaaatcaatgcactgcatccgttctagggtgttgttcgtctgttttccgatattgtcttgttctgaaacatttgtggtttttttttgttacctgggtggcaactggcaactcccctgaacgaaatgttgccacatggtgttgcattgcaggccgcagcaatcattgtctcgagctc

SEQ ID NO: 141514 - DNA, 360 bp, Zea mays
  Clone ID: MRT4577_60542C.1
cacaacacagccataaagcatacggtttttacttatttgtggccctacggttgtagaacatattcaatgtgttagcattgccacaccattgattttaatgcaggaatcactccgcaaatgtgaatccatgaaactggttgagatttttgttccagagtggaaaccactgttttgtatgtttgaagagccacatgaatctaccgatgcagaacagcagaagctggaatattaataatattttcttttaaaaaatgaaagtagtggcagccgacgagcacctaacaatgaaccacgacagtaactaatttggattcatgttgtgactgtttggatcaagtgctgttacttgtttgaaccaat

SEQ ID NO: 141515 - DNA, 279 bp, Zea mays
  unsure (1)..(279): unsure at all n locations
  Clone ID: MRT4577_60543C.1
ggtgttgggttttttaattttttttttttttttttttgtttttttttttttttttgaaaaaccacattttattgggatcgtggctttgaggccttttgtcaaaccaaacacgatttacggaagccaacagtaaaaaactttagtgaattaggagtagggtcacccaaaccaccccttaatattatttacacaccacaccnttacacaaggcccttccccacttaacctaataaatcccccanccccannntacttanttnctaaactaactaattaata

SEQ ID NO: 141516 - DNA, 334 bp, Zea mays
  Clone ID: MRT4577_60544C.1
aatgcctaagctcccaccagcgcagtttacctaatgcactctaaagtaggggcccaattgactataagcctgagcggctggacgccttatctcaatgttcaaatccacgagaaccaccttcagacatgaatctctgtaccaaatgaaatccaaattttgctagcgctaccatgaacatgacactatgcccagattggcaacatgcatccttatcgcctgactcgggcgggcttccatactgggaatccgacgaattttacttgtccacacttccaggccaacccagagaataaaaagactattcttccctgtgtgcctacagattgggatgcta

SEQ ID NO: 141517 - DNA, 270 bp, Zea mays
  Clone ID: MRT4577_60545C.1
cccacgcgtccgcagactcttaggctgagtccattatagaaatgtttatgccaaaaaaagaaaaaaaaacaaaataaaaaaaaaaataaacaaataacactcaccctttctactcgaacactctaacatccatctacatgcacatctatcacactcacataaagctacctaaaatcattacttagaccctttcattactaatccgttactcggaaaacccttgcctctcccaaatcaatcaacctcaatgacatattgctttaatcaact

SEQ ID NO: 141518 - DNA, 445 bp, Zea mays
  Clone ID: MRT4577_60546C.1
gggaggggaaatatgaagtaaaggggcaagcccttggctgaagggagtaacatagagttatcatgtctctcctagcatgaatatgagggcattctttaatgactccgctgggggactactagagggggtatgagctataaattttacactataaaatttaaggatcgaatcgtaattaggatcgaactctattcgtatttatttttgagctaaaattaattaaggaccttaacttattgggaaaaattatttggattgggatccattaacaccccattttgagaagggatttgtatcatatgaccttctggggtttttgctaacccatttttctcattttttccaccctattgtttctcgacaggttaagaaaattggtaaagttgtttgtcaattgctatcatgagctacccaatccctaatacaaatgagtccgactcgattc

SEQ ID NO: 141519 - DNA, 758 bp, Zea mays
  Clone ID: MRT4577_60547C.1
ttctatataaaataaataaataattgcattataaggagacaacggtccagcaacccaaagttgattgggagacgacggcctagacctctcacgaactcgccacagcatcctccatgcgcctcatcctgcggtacctgttcttgacctgggacttgagattccaggtaccaggatgatcttcagatgactcgtgacctcactgctggcatcggatcacagccttcaaactgacgatcgacggttcttattggattaactccggatccaatcccacccataccattccggatcggacgggcgtgagatggccttcttcctctggctgtggatacgacggtgcctgcgcagagggatcgggatgccaggcgcgtcatcccggtgccggtgaggaacaggagcgcggactgcgcgcctgggtgccccgccgctgttgtggccccgatctacgcagcagccgtggcaaacaccgcgtcgcggttatagtgctcgacggccgacccgacgaaggacttgcggtatgcgtcgctgccggccatgaagaggaagaagatgccatggatccaggggagcttggattcgagggaggataggtgctagaggctgcagggcgtcgggtctgagagcagagagggggggcgctagagatggcgcccagcgcggcgagctgcaggagaaggggccgcgtagcaacgtcttgtatccgccatgtctcgcattccaacaaacgatgtgcatgcccaggagctgcggaccgatcc

SEQ ID NO: 141520 - DNA, 680 bp, Zea mays
  Clone ID: MRT4577_60549C.1
aattcggcacgagaagaaagctcggaggatccgaacgacgctgacggcgaggccgtaaccgcagagcagcggttcttgggatctcctgctcctggtcctggatgctggcacttgaattccagcatgaggtaagctgcagattcttccttctagtctgcaaagagaagagaggggtcatttcttccggcttgatgggcggttcgttcgcttcatgggatcccggcccagttattgttatacaaaaagtcgctttgctttcgtagctgcgttcagtgcgtcctttcaattggggatccaaatctagtgtcttataaagggccgtcgagttcgtcgtgttaatccttcttgattgaaaggagggaatttttttcccctggggagagttgactcagggtgctatggagctggattgttccgccactcagcctcgagtggaattggaggattcctgagcctgtcacgcaagtacgtaacacgatgcgtttgagcaatgactttggctgccatctgtattagggggagtgctcacgttgcgcttgaacttttgaaagataaattagaatctatatacggtaatttctaaagggaagtgaaggattgtcccaatgatctcgagactgaaaggtgccaaatgggtgtctcgaacacccgctacagtgtttagaagagattctgaactg

SEQ ID NO: 141521 - DNA, 379 bp, Zea mays
  unsure (1)..(379): unsure at all n locations
  Clone ID: MRT4577_6054C.1
acggaaagactgagagagaaaggaggaggagaagtcggtggngcatgaatatggtgatagcgatgagaaggcgatcaataagaaggataaaatggtgaaagacatgaaaaagaaggaagatgatggagattcagggaaggcagagaaagataagaatgataagaaggctaaagagaaagacggatcacagtttaagggttcaagtggtgagaaacaagagaaaatcaaagataagaaagggacaggggatggcaaaaatgtgggggaggaatataaactcaagaagattgtaatcaaggacaaagattagaaggataaaaaggccaaacaaaaaggtgggtcggaaccaaatggtgacaagggtgaagatcgttagaag

SEQ ID NO: 141522 - DNA, 236 bp, Zea mays
  unsure (1)..(236): unsure at all n locations
  Clone ID: MRT4577_60550C.1
ggtgggttatcaaaactgtagggagaccgnnccccgccaccacagcaagacggaaaaagcttacccccaaatgacaaggccttggggggcaagggattaaattgccatccccggtgtgggcgcccattgctagactggactaagcccagaggagcaccaacgcgccaacagggctaagaacaccctatcttatcaacccgccaaccggggaaaaaaacacctagctttaccccccc

SEQ ID NO: 141523 - DNA, 838 bp, Zea mays
  Clone ID: MRT4577_60551C.1
caaagatagtgtgggggtgaaacctgtaaatctgagagagaacaagacagctcccgtggacaaagatagtgtgtctgtgattttagaatcttctacagaaaataaggcacaccaaaagactcacaactcaattggtgagggacttgtaacactgaaaaatgctaaggaaagccatggtactgataagtgccttgagcttccttctatgagtggagcctccacaaagctggatgtcttcaaggatgtgtcaggttcatttccggaggctcgctcatcagtaaatgccagcgatcttggagaccatggtaatattagtccaaactttagtccattagcaggaacatcacaagaggacacaaccagtaaactggtatcagaagtatcttgcgatggtgggatgcaacacacttctcgtagtaatgaaaagctacaggaatcctcagatgtatctgatgttgctatttcccagggaagtaacattaaatcattcattctagaagaacttaaagaatctgatgtatgtgatgctttcatgaggggacctaatggaaaagggcaggaagctgaaaattatggaagagaaaaaatcagctttattgatggatcactcttgctgcgaccacacttccataacaaaggtgctaagatgaatgtaatctctgaggaagtacagaaagtcaaaaatgaggagaaacttggtccgtgtacacaccccgaagtaacaattgtggatctggatggtgattgtcctaaagatttgaatgatgttattctacaaaatgatgactttgcagacccagaagaatcaaacatgcctaatgtatttgaggtagctagc

SEQ ID NO: 141524 - DNA, 1156 bp, Zea mays
  Clone ID: MRT4577_60552C.1
gcacgagatctcctctccatgtcaattggtaccttgactttggagaagatacaagagctcaatgctgagaaacaaaagttggtggacgatgttgtggaactgatgaacacatcgccaaaatcactttggttgaaagatcttgatgcttttgagaaagaactggatgtgcttgatcaaatggatctagcagaggaggtgcaaagggaaaagaggataaaggaaggcaaaaaaggcggatcaaaagctgcacccaagaaacaacctaaaaaggctgcacctataaagctggaaagcagtacagaagacaatgctgctgaaccagtagtcgcaaagcgtggagctcaacagaagaaagcacccaaaaaggctcccgtggacgaagaggaagttgatatgccttcactgaaagaccgtcttgctgcctttaatataaatgactcatctcctcctgatcactctgctatggaaactgaaacaacagaacagccggctcagaagaaagggagaggaaagaagcctgccgccgccgctgtgaagccgaaggctcctgccgccaggaaaagggcgccgactcaagggggcaaggcaacgcagaagaaaatagatgagatgctcaaggtcactgaggataacaccagcagtgctttgtcccctgagaagaaggtccggaaggatgaggccctctcccttcaacaagaagagtggctcaatcttacagagaggctcgactgccgcttctgcaagctctgaaactatcgctgaagcttcaccaccctctggtagctctgaagagccagttgctgcagcaaaacctagaaggacagccagggctacgaagaaacatgtctatattagtgaaagcgatcctgaggatgaagtggtggagttgagtgatgattcggactttgatttggatgctgactctgactagtgagggtaactgtcatccgtagcatgtgctacctttattgatgatgcatttcttgtgcatgtgctactttaattgacgagtgcgggtaactgtcaatctgtcatccgtgttgttctgttgactgttgtatgtgtgttttctgttgactgttgtcgggaacccaagacattgtctggttaactgatttgtctgtctataattttggcattcaagtgtgcttgtggt

SEQ ID NO: 141525 - DNA, 298 bp, Zea mays
  Clone ID: MRT4577_60553C.1
cggcggtgggtggggggtggtttttttttttatgccgcagggagagaaaggcggggcaactaatattgcagtaacaattatcaaaaggggatcttcatcaagctccctaatccatcatgatcaccatacatatttataaaaggtcccgaattactttcacaaactaaccacaccacatttacctcaacccaccctgttacataaattacctacagcccaaaagcataaaccgtggttataattaaaacttttaaccacccaaatgacatcaacaccttccccatcaggttactctctt

SEQ ID NO: 141526 - DNA, 384 bp, Zea mays
  Clone ID: MRT4577_60554C.1
cgacttctatgacgaaagtgcacgcgtccgtaagctcggatcctgtatagcgggcgcccttcattctttctttctctcttacgcagtcgtgtcttatgatctaacctatgtgtacatcacaaagaagctatgcatggaacgagataacgttgagagctacaaaccactcgacgtttgatctgatgctgttatacagacgaacatgatgatttttggcgcactccttgttatacgtgaagtggacatgaacatgttcatttgctgaccaggggagtggtgtaccccacaaccgtggaccgcgtgtggacacgttcacgcccttttctcggccgataatgagagatcaaaaactaattattctccctctataacagcattagatga

SEQ ID NO: 141527 - DNA, 223 bp, Zea mays
  Clone ID: MRT4577_60555C.1
caatcatcaaccctaatacatcaagtacctttggggcatttaatggcaccaaacaggctgggacaacaacctccacaacttgggctagcaaaacttggttgctacttttagaacaagcggttctttcatttcaaccactaactgcattggactctggttcttaattgcaacaacaacaactaccaattcagcagctacctgctgcctacccccagcaatttct

SEQ ID NO: 141528 - DNA, 851 bp, Zea mays
  Clone ID: MRT4577_60556C.1
ttcctcgaccaacgcaaatctgcctcgggacgaacaatgcgtcgtcgtccatcgatcatgaggcgtctccgacggagctaaaagagaccgatcagtgagcggtggtggattgaagaatcgagggcgaggaggaagacagggaggatggaggaggtggagcagcagctgaccaagaaacagatcgaggagttccgggaggcgttcagcctcttcgacaaagatggcgacgggacgatcacgaccaaggagctgggcacggtgatgcggtcgctggggcagacgccgacggaggaggagctgcagggcatggtggacgaggtggacgcggacggcagcggcgccatcgacttccaggagttcctcaccctgatggcgcgccagatgcgggaggccagcggcgccgacgaggaggagctgcgcgaggccttccgcgtcttcgaccaggaccagaacggcttcatctcccgcgaagagctccgccacgtcctccagaacctcggcgagcgcctctccgacgacgagctcgccgagatgctccgcgaggccgacgccgacggcgatggccagatcaactacaccgagttcaccaaggtcatgctcgccaaacgaaggaaccaggagctggaagaccatgggagtgagtcatctcactccaagagactctgcccctcctgtacaatcctctgaaactctactcactctgccaccttagtttctagctgtcaggagaaccaaatgtaactaacagcaagcaaagcaagaacctgcatgatttgcggtgtacatggtacaaaaaaaaagactactgaaatgatggccgagtactaatacgagttcccaattcagtagtc

SEQ ID NO: 141529 - DNA, 189 bp, Zea mays
  Clone ID: MRT4577_60557C.1
atacaagggccggggttgtttagtaaatacataagcacagcaactgaagaaaaagaattgaaaaggctggcaaaacgtaggatgacagaagcgccacaggaaaaagggtaagtgaaagacattactgcaaagacattaaactgagacattaggtgtaaaggttttttgctagctggaggcacgaacata

SEQ ID NO: 141530 - DNA, 425 bp, Zea mays
  Clone ID: MRT4577_60558C.1
tttttttttttaagtcccggcggacagaaagcccagaatcctagcatgcctcatcgcttaagcgatgctttgaaaaccatgatcacaaaagaaaggtgttaaaaagttgagggatggatgtggtgccctatttcacacactggtgaagcttcattgatgtgtgccactggccctccttaattttccatattgctttgaagttctatacttaaccatgtttaaacattgctaattgagctattttagcactcgtggccccctctaatatttatgagatgctgtttccacaggagatttgtgagatgattcttgacactagataatatgcaatgaatttcctgtcaccaagtatgttctgcactctatgtgttgagaattaggggaacacctcatacccattgcggaatcacgaggatccatgtggg

SEQ ID NO: 141531 - DNA, 222 bp, Zea mays
  Clone ID: MRT4577_60559C.1
ccaaaaaggcagagggttggataccataaacctggggagcacctggattgtccaaccggtcctttctgcgaaggcattacctggtattaaaccctacctggagacctttccagtcaactagccaaccgaccttaccctttgggcctttttaagctacttgggaggtttgggcggctttttgatccatgagacctgttccagaggttaagctgaacctacagt

SEQ ID NO: 141532 - DNA, 762 bp, Zea mays
  Clone ID: MRT4577_6055C.1
tcacctctcctccgcctttcccgtgtcgtgtcccccgcagcaatcaccgcgagggtttcttccaatcccgttcgttccgttccagttccagcatggcggagcagccgcaggaaggcggcgcgagccccaagcacgagtccctgatggagaagctcgccgacaagctccacgtcggcggcggcaagggcgactcctcgtcctcggactccgacagagacgagccgccgaggccaaggccaaggtgttccgcctcttcggccgcgagcagcccatccacaaggcgcttggtggaggcaagcctgctgatgtgttcctgtggaggaacaggaacatctccgccggagtacttggtggagccacagcaatctggatcctatttgaattgcttggctaccatcttcttacttttgtttgccatggtctcatattctctctgggtgttctctttctctggtctaatgcttcatcgtttatccacaagtctcccccaaagatcccagaggtggtcattcctgaagatttagttgtcaacattgcggtatccactcgttatgagatcaacagggcctttgctaatctccgccaaattgctcttggccgggacattaagaagttcctaatggttattgctgggctttggttgctttctgtcccttggagttgctgcaacttattgaccttagtctacattggtggttgtggtgctgcacacagtacctgtcctgtatgagaagtatgaggatcagattgacacctatggcg

SEQ ID NO: 141533 - DNA, 329 bp, Zea mays
  Clone ID: MRT4577_60560C.1
gaaaaaaactttttattttctttatttaaaattttgaggttacatgtgcacaaacaaaaaaaggacaagttccaagcctagatgaatgcacgaatcataactttttgttgggggccaattgccttaacaaaacccgggatcttgagctcgcaatgacatgcaaggaaattacattccacgtgctttaccaatggaaggacgggtacttgttaacttgttggtcaataacaaggttaaagcccttacgaccatttttattttaggccggaactttgggtcggtttgtgaacacagggccacaccaaaagccatttttgtgacattggtta

SEQ ID NO: 141534 - DNA, 398 bp, Zea mays
  Clone ID: MRT4577_60561C.1
cggacgcgtgggcaaaaaaaaaaaaaaaattataaaaaaaaaaaaaaaggaaaaaaaaaaaagaaaaaataaaaaaaaaaaaaaaaaaaaaaaaaaaaaaaaaaaaagggcgccccttttatcgtatccattcttacttccccttccttccaacttcttacctcttctttattgccccctaatttcatttcactgcccgtctttttacaacttcttcccttgcaaacccctgccttttcccaacttattcccctttcaccacatccccttttcgccaattggcttaatcccaaaaaccccctaaccgatcgcctttcccaactttttcccatcctaaatgccaaatggacccctccttttaccggccctttaacccctcctgttttggtggttacccc

SEQ ID NO: 141535 - DNA, 311 bp, Zea mays
  Clone ID: MRT4577_60562C.1
ggaaagaaaaacaaggcatttttttttccatttaaaatagcaaagggcaactctgcattagggcacatacacccacaagcacatttgacccatctacagcctacgcatcaccgtatactggtttcaaggtcctgctaaacattacatcactccaaacagctagtctatgcctttttgggggacttggcggcctttttgggcaactttgcctccttgttccccacaatggacaccttttccgccagttttttgggcaacaaaacagggtgatattggggagcccacccccctgagccatggtcccccccccc

SEQ ID NO: 141536 - DNA, 383 bp, Zea mays
  Clone ID: MRT4577_60563C.1
cggggcccataccgcctaaccacacaacgggagccgtagtctctgtgggcgctgcgggtctctatgctctcgaatcgcctgggctaccgcttccaattcggcagaccatggatggtgctgatggcgaacatggacgggtccatcgctcagctttgaagtgggggccatctactcacccgtagccgtttgttacgcaggcacgtcggcgtcatcagttggccgctagcggagcacctctacctcgctcctcctactgcggggtcacgggccgaggttcctctatctgcgaggcgtgcggctactacgaccgcggttgagagccctgccgagccttgaacgacgctgggcgggtgagcaggaagatttctggtgcgctccttcag

SEQ ID NO: 141537 - DNA, 924 bp, Zea mays
  Clone ID: MRT4577_60564C.1
agtcccgcgcgcacactcgcacgcactcgacgctcattcactgagccatttactcagatcaccaactccagatctcaatggcgcactcgcgcagccaccaccacctcctcctgctccccgcgcccatggccacggcgtgcttgctcctcgccaccctcctcgcgctctgcgccgcgccggcgccgacccacggcgcgcgcgtcctcatgccgggcggcgcgggcgcggtgaccaaggcgcagcagggtggcaccggcagcggcagcaacgcgacggcggacgagtacctggcgccgcacaaccaggcgcgcgcggcggtgggcgtggccccgctgcggtggaacgcgggcctggcttcggcggccgcggggacggtggcgcagcagcggcggcagggcgggtgcgcgttcgcggacgtgggggctagcccctacggcgcgaaccaggggtgggcgagctaccgcgcgcgccccgccgaggtggtggcgctgtgggtggcggaggggcggtactacacccacgccaacaacacgtgcgccgcggggcggcagtgcggcacgtacacgcaggtggtgtggcgcaacaccgccgaggtcgggtgcgcgcaggtctgctgcgccacgggcgccacgctcacgctctgcctgtacaacccgcacggcaacgtgcagggccagagcccctactagcttgctgaggtcatcaggtcatagcgacggagccccactgtcgccggcggcggcagcggagtacgtaggttcatcactcttctctagttcggtcacggaaaggctgttttgtggtgtgatccggtggtgttcttggtgttgttgagaactgctttggtttggtgtatcagcttttgttgccgggtaaaacgcctgtgagctgtgatgtgatgcttcatcctaaaaaaaaaaaaaa

SEQ ID NO: 141538 - DNA, 727 bp, Zea mays
  Clone ID: MRT4577_60565C.1
cattgggtacctcgaggccggccgggaagatgtattcctctgacctctagatactttactctattcctctctgcgtattccaatgcaaagatgcttcataaatgaccgactctacctgcgctgatatcatccttaatacagatcgatgctccaccaagcgaacctatccttgacaccatcactgatgtggacacccatcttcttgcgagctattgaaattccctgaagtaattacgatagttcctgcagagcctggccttacatgcgtgaactcagaccccctaatcgactttatggtgaacaactccctttatcacattttgtacatccttacacatgtcaagaatcggctgaaactggaattggacttaagggcttacgataacatatatattccgctcgagattgtcattgagtcttcccgtgaatatccacaaactattgtgctctcagtattacatgaaactggcgatcttgtactcgatagaatgagaccactagctaccctaatcagacaacctgataccacgaatcttgaacctaatctgtccgtatctaccgaagcaaaggctgatcatctgtcatcgaacgctgcagacctgatcaccgtcccatctcctagcccatgtgagactgcatctccattgcaatcatcgcttctcctagcatgccgacatccttgtcagcttaccctgcatctagtctccctggtccagctttagcccct

SEQ ID NO: 141539 - DNA, 434 bp, Zea mays
  Clone ID: MRT4577_60566C.1
atggggccattcaacttaaaaaatcttgaagaagcacacccgtacaacacaagcagaaaaacaaaaaaacgcaggagcaaaagacaacaatataatgggggaaccaccaaagaatgggagaccacccgcgggagaaacagcaaacagggggagggggggtaatagaacaagcggaaaacaaaaaaaaaatcaaaacacccctcctctaaaaaaacctcatccttcttagcctcctcagcaggaggtgcggcacccccagcaacagctgctggggcccccccggcaacagcaccaccacccgaaggcgccaaagaaaaccaggcccccccagcagcaaaaaccactggtgtggtcttctctttgaggacttgcggccgggaaccccagtggttcttcttaccgcacgcccggcgggacgccgggggggggccccc

SEQ ID NO: 141540 - DNA, 305 bp, Zea mays
  Clone ID: MRT4577_60567C.1
gagtcttgttgtctgatatttgccactgagctggtgaagcccctctaaagagatctcgaccctggggagcagaattcttgtcatctatgaggggtcctgagaaagacttgtcattttttttcctggagttcttcccattgaggtcctaggatttgcacaccactgtcccacaagagctttcctgcctaatgaaaggaggtcttgtggtgtgtgtctcctctcttctctatagttcccgagttggcccccattgcagcccccaccctgtgggtagtcttccagaagtgatgcagtggtgtgagatg

SEQ ID NO: 141541 - DNA, 227 bp, Zea mays
  Clone ID: MRT4577_60568C.1
cgtcgacatacatatacctctggttgctaataacgtatttatacaactcttgtgtggacggggggctacagttagcattacacttgcttccactattgtgtagtcatctgtttgcgtatcgctctcatacattcaccaactatcttatgtgagaagattacaattcctgacccatatccgatacatgaacaaattaatacttgcatgcacagctttaaatattcatt

SEQ ID NO: 141542 - DNA, 511 bp, Zea mays
  Clone ID: MRT4577_60569C.1
atgggccgcgacgaggtgtccgcgctcttcgacgccgacgagcccagcttcgccgaggtgcggggcgccttcgccgtcttcgacgccgaccgcgacggcttcatcggcgccgaggacctgcagtgcgccctggcgcggctcggcgtcaggcaggacgccgccgcgtgccgcgccatggtcgtcgcggccggcggcggccgggacgcccggatgagcctgttccagttcgtcaggttcctcgagaacggcctgtgctgaagccacagagggggcagagaagctgtcccttcattttttttcttcttcttcgttcttcttcgtttgcctcggctgctcgtggcaggagatgagacagtgcaccattcggagaggtgttcactggctggcgcgcgtgtgtttttccctcctgccatgagctttgggggtggactcaactgtgcagcaattaacgcactaattcccaaactaagaactactatgatttaatggaactaatttgccggttgcaaac

SEQ ID NO: 141543 - DNA, 1717 bp, Zea mays
  Clone ID: MRT4577_6056C.1
ctaacgcttgcttcaaatttgatcaatgcaagtcaatgcacttgggtacttatctgaactgtatgctgctaatatttctcaatgttaggcttgtccgaactgaggcacgcaacatttttacagtgtctggtctgccagacgaatactgatgccgtttcggtaacagtcatactgctactgactgcttgagtaacctttaaacaatactgccaaccgcttgaattcatgtggtctgtcggtgtttaatatggttggaaccaattgcttatccgcttagggatgctttgtcgtgcctgcaagcacatttcaggggtgttatgtatttttgtatcagatcaatgctgaagggcccttatggttgttttgtgctaagattatgaaaatatcaagttttaaaatttatttgtaaaagaaacatcttgtaggcttcatgttatgtttctctcaataaatggcatttcattggagctgtttggtactacattatctacactgaaatggaaggtctttctttggagaaattgtgaatgcgttgtgtttttgtgcctgatgatacatgtctttaatgtaaacaaatgacaaccagcgcactataacctcattggtttgtgtctacagctggtactctcttgtcgtagaactgatgattgataaacttgatcgatgtaatgagaattgtgagacctaaataccttatcgtctgtcattgtacccaccaccgtactcattgccgttctctattttgtagctgctgatgtgttcttgtggaggaacaagaacatctctgctggaatacttggtggtgccacagcaatctggatcttatttgaattgcttggctaccatctccttacttttgtttgccatggtctcatattcgccctgggtgttctctttctctggtccaatgcttcatcgtttatccacaaggctccaccaaagatcccagaggtgatcattcctgaagatttagttgtcaacattgcgctatccactcgttacgagatcaacagagcctttgccaatctccgccagattgctcttggccgggacctaaagaagttcctaatggttatcgctgggttttggttgctttctgttcttggaagctgctgcaacttcttgaccttagtttacattggtaagggatccaaacaacttctagagagaaccttgcttttcacccctcctgaaatgtatctaattggctgacactgggtcgtcttctcttctgcaaaaaaactgtctttgtggttttgcacacagtacctgtcctgtatgagaagtacgaggatcagattgactcgtatggcgagaaggggtgggctgaaattaagaagcagtatgccgtgttcgatgagaaggttctgagcaaagtatccaggggtcctgcgaaagacaagaagcactagatgcaagtgattcgaggtccctgttagtagggaatgctagcaaaaccggttcgagtttctccggaggggcagcacttgtgggtgtgagcaccagtttgccacctgtgcattacgttgcgtatggctgcttagttgtttggtcttgatggtagtaagccgaattgctagctttgcgcttcatcagtgatgcagacgcagcatacgaatttctgtagtgctgtttgagtttgatctgtgttgtatgatgtgtgcagactgtgtttgcgacacttttttgggacttatatatcgaatgcattttggaa

SEQ ID NO: 141544 - DNA, 587 bp, Zea mays
  Clone ID: MRT4577_60570C.1
agcagtggtaacaacgcagagtacgcggggtgtggcgcagtggtgagaagcctttctagtttccactgagccaaaggtcctaggttcggtgcaatctctgtaaaagtggagacataagacatgtctcggttatttcttctctaaatcttacttctgtttaagccgctagcattagatctgttttatatattaaaaaggacaggaaacaaacgccttgatatttattgtgctccaaattaatttagtctagagcttctctttaatttaattcggagcctcgcttctacgagcaacaatattgggcctcagagaggggtgcatgttagtagaataggttgtggagcgtattgtaacgacttcttctaagatttatttactgttctcgtcttacatttcaatttgtcttagatagaattgcattttgtaccatgattgcacgtgtgttgctccaactcatatggactgtaaaaaagctttatccaatgatcacattatgtgttccaatttatcttgtgaccgcacttcggcaaacaaaaaaaaaaaaaaaaaaaaaaaaaaaacaagccctcccccctgttaccactgct

SEQ ID NO: 141545 - DNA, 642 bp, Zea mays
  Clone ID: MRT4577_60571C.1
cggccgcgtgggcggccgcgtgggcggacgcgtgggcggacgcgtgggatttcatatctcatacttcccatgttgctataaatgcatatattgttgactcatgttttgttacctatgcataaggtaagttagtctattcaaatcatgtcttgcacctccatttctcacatgctttttcctaagtagaagatcactgtcagggggagtatttcttcgtttctaaagggggagaaaattctttctaaaggagaacactcatttagggggagtaacaatattgtgcttcaattggtattaattgtcaaatcctttatgagggcaagtcttatttgcttcctacatgctttttaatgtcttcctttttggtggttgatgccaaagggggagaaattgtagggaccaaagcaataaaatgttatcaaacaccaaacaccaccaatttaaaactttaattcttcaagtggttttggttctttggtataaaacaggaagtaagtgaattatggagttaggggaggcttaagtccataatctcactctatggggacaatcatccatcctagcaagtaggttgcatattttcattcaaatgtttgttatatttgcttgctttggttgtgttgtcatcaatcgccaaaaagg

SEQ ID NO: 141546 - DNA, 248 bp, Zea mays
  Clone ID: MRT4577_60572C.1
ttaattttattactggaaagaaaaagcagaagacaaatacaaagaaccacaaaatggcgggagagaacgcggaagacgttgcctgaatcggaggagcctggtcggacgacccttcgcagcctgcagcatttttctgctggggatgctcgcggcgtctctggtgcggcccgtggttacgctgcttcacgcgtcaccgatggggctctgcgtggacgctatgaccgcggttctacctaacctgcggatag

SEQ ID NO: 141547 - DNA, 284 bp, Zea mays
  Clone ID: MRT4577_60574C.1
taacttctcattatttgtttgctcttggttcttatcgtgcattttatttattaaattggatttatcgttactttgacgatggtttccatgaatggattgctatctttgctggtatcattcaaactgtactttactgcgatttcttctacttgtatgtaacaaaagtaattcatggtcgttctttccgtttaccagcataaattgcaaatttatttatttaatttgattatcgtttgttgataatcaataagaaagcaatttaaacaatttcgatcaatagttac

SEQ ID NO: 141548 - DNA, 594 bp, Zea mays
  Clone ID: MRT4577_60575C.1
ggaaacaaaaaaaggcaaaattaaggaggtcaaaaaaggtctggggaggtttccttttttttgccgggatccaagacgacgacttttacagtaaagggcccaactgtttaaacaggcagttcacaactatcacccagtaagggcagggtttttgggaactcgatcagatgaaacaaatccaagttttgcccccccaaaaataaatcaataataatccaagagatatgaaaattaaaattatcctatttttttttcaaaaactatacttggggggtaacgcacaaaacccaagggagggggagcctaataagatgaacaacaggcccccaggggggaaaccttgtatggtcggaaaaaaacgtccaggctaacatccaaatgtcatacgggggctgtctaaagcaaatatgtatcttgcagcttcaaaaaggtcttccatcagccaaaaaagaaaaaactcatataagtctcagctcatatttgccagccatcgggatatatctaacccaggggagggcctcgaaaccactctttccaattatcttcagataacggccctgaatacctgaaccagggaaaaacggtatctaaaat

SEQ ID NO: 141549 - DNA, 374 bp, Zea mays
  Clone ID: MRT4577_60576C.1
caaatgctttcagagaagctataattggtaacactcttgatcttacagcagcccatcagaggataggtctcacgacacaatgacaggtcctactaatgaaacagacttattatcccatattcgacacttatatcgagcttgacattggtgaccacacatgcgatgatcaccacaagctattacttgcatatctagggattccaccctatgaactgtccccaggttgatcctacaatggtcacacatcattcagatgatctgctcaaagctcgagatgaaacgctccgtaccgaccagatacaacttataccggttctcactgatctcacgtgcgtacactcgccatttcgatcgtatgatcaccatcatatctc

SEQ ID NO: 141550 - DNA, 795 bp, Zea mays
  Clone ID: MRT4577_60577C.1
gtgattgattatattcatgatttatttattattaaacttttgtccgcaggccttacagaactgttttctttttagcggaataacatgtattgatgacttagttgtttggtgtagcattcaactctgtggtgaatacaaagaagggaaatacaagaacaaaaccactccctctttctaaaagacttcgcctagaagcacagagggtcctgaaggagcgtgttcaggacattgcagataagaaaggcatcaagctgagattttgtaatctcagagaatgtgaaagccacatctggtcgttggatagtccgtgtgagaagactagagctgaaattggatggccacaaggggttccatttgtccatccacatgacctcccaaacaaggcaaagcttgggtttttggaagcttacgaacctggatggacggcctcccaacaagaaatggaggaggcagcctcggtaatttttgatgtattaccagccttggatatgttttgaatttcagggttggtcaacagttcatttcttctacatgttgcagaagtagcaatgtatactgacaccaaaaaatgtagatacatagatgcagtattgacaacgtgtaaatgcaattacctgctgtttaaattgaaaaccacgcctattaatttcgtagatgagttagcttcagaaaaaactttctacgagataatcaacaatgcattctaacggaaattgcttgtaagttgtaacccaactccacatttccgttatcatgacaacggaaattctaataagaaccctgatgtggagatcc

SEQ ID NO: 141551 - DNA, 457 bp, Zea mays
  Clone ID: MRT4577_60578C.1
gacacaacgagggccctttcttcatttacggagagtacctctgtcacctacaccacacttggtatcgcctactgaatcttagagaacatataccccaatcgtaagccaaactctcggtgactcgtgcctgaagaccggcttactcgactaccacgctggagcccatttgcttgtccctcttctcggaaggttctgtatcctccttttgctccttggggggaatccacactgtattgcccgcgtctgattcatgatcccacccccaaacctcagcatgagtcccttgggtactcgcttgtttcttgcaggagtgttgagcaccaggtacaccgtgctccacatataccaggaacgcactacacttgtacccagttgatcaacgtgctgggcgcacacactaatgggtccgtatccatgattgccaggtgggagaaaatcgaccatggcaaacaccacc

SEQ ID NO: 141552 - DNA, 260 bp, Zea mays
  Clone ID: MRT4577_60579C.1
gtcgcgcctccgaggcgcatttgccgttctccgtgggaaattgggacgcgcgcggaaaagattgtttttttttgtaaaaaaaaactttatatgaataacgcgttgctcatcttgatgcgtaaattggcggctgggtttgtcgcctttccatgcgcacgtttcgtagttgctgcttagacagtattttctttttgtatgtactaggtaccgatgaatgtggcaattttatgatgccacttgttgtgaggctcatgttgtta

SEQ ID NO: 141553 - DNA, 1411 bp, Zea mays
  Clone ID: MRT4577_6057C.1
tagtttacattggtaagggatccaaacaacttttagagagaaccttgcttttcacccctcctgaaatgtatctgattggctgacactgggtcgtctttttttttgcaaaaaaaaacagtgaccctcgaggccggccgggagatctccccaatttcctccacgccgccccctccgcatttcccgtgctcctctcgttccggcatggcggagcagacgcagccacaaggggaaggcggcgctagccccaagcacgagtccctgatggagaagctcgccgacaagctccacgtcggcggcggcaaggccgactcctcctcctcctcggactccgacagtgacgagcggccccgcccctcggcaccgcctgccgacgagctcaagcagccctccttctccgacgccgccgccacggcggccgccgaggccaaagccaaggtgttccgccttttcggccgcgagcagcccatccacaaggccctcggtggcggcaagcctgctgatgtgttcttgtggaggaacaagaacatctctgctggagtacttggtggtgccacagcaatctggatcttatttgaattgcttggctaccatcttcttacttttgtttgccatggtctcatattcgccctgggtgttctctttctctggtccaatgcttcatcgtttatccacaaggctccaccaaagatcccagaggtgatcattcctgaagatttagttgtcaacattgcgctatccactcgttacgagatcaacagagcctttgccaatctccgccagattgctcttggccgggacctaaagaagttcctaatggttattgctgggttttggttgctttctgttcttggaagctgctgcaacttcttgaccttagtttacattgtctttgtggtgctgcacacagtacctgtcctgtatgagaagtacgaggatcagattgactcgtatggcgagaaggggtgggttgaaattaagaagcagtatgccgtgttcgatgagaaggttctgagcaaagtacccaggggtcctgcgaaagacaagaagcactagatgcaagtgattcgaggtccctgttagtagggaatgctagcaaaaccggttcgagtttctccggaggggggcagcgcttgtgggtgtgagcaccagtttgccacctgtgcattacgttgcgtatggctgcttagttgtttggtcttgatgggagtaagccgaattgctagctttgcgcttcatcagtgatgcagacgcagcatacgaatttctgtagtgctgtttgagtttgatctgtgttgtatgatgtgtgcagactgtgcttgcgacacttttttggtacttatatatcgatgcattttggaatttgatgatgtgctgcaaaaaaaaaaaacccacgcgtccgcggacgtttgtg

SEQ ID NO: 141554 - DNA, 679 bp, Zea mays
  Clone ID: MRT4577_60580C.1
cccagcgtccggcggcgagaggtggaggaaaggagggagataaagacgctgccgctgccgccgccgccagcatgtacatgcactacccgaggttcccgttcccgggaggctactacgcgccgcctccggggtacgtctaccagccggtgtacccagcgccggcgtacgcggcgtacgcgccgccgcaccaccagcccatggcgccgcagatcttcagcgacgagaaccccaacgcctgctccgtcatgtaactaaaaaacagaaggaccctggcgagagcgagagagggggagaaaggggaaaaaagaataataagaaggtgggaagagcgagggagctgcgtgcataacccagagccagagggaggttgtcttctgcgagaaatgcagcacccagcagtgtcccctgagcgaagcaaatgggcaacttttgtttgaaacaaaacaaaagtaccaggcttttttttgggggaggggcggttagatttcgctcttcttattttttttcttctttcttttgtaattttaaccctttctttcatcttttttttccctggtgtaaagcaagcgtggactttgtcggtttatggacgctagctatctttatgtaggatgatgtcttggcatgtactgcttgcagcttcagacttcatatatatatatataactgtatttattat

SEQ ID NO: 141555 - DNA, 1081 bp, Zea mays
  Clone ID: MRT4577_60581C.1
ggcacgcgtccgcccacgcgtccggccggtgatcgccgtggtgctgaaggtgcacatgcactgcgaggcctgcgcccaggggatcaggaagaggatcctcaagatgaaaggcgtgcaatctgcagagccagacctcaaggcgtcggaggtggcagtgaagggcgtgttcgaggagtccaagctggcggagtacgtgtacaagcgcaccggcaagcacgcggccgtcgtcaagtccgagccggtcccggcgccaccgccggagagcggcgccggcgacaacacgggggccaaggaggaggagaaggggcaggaggaggagaaggagaaggaaggaggaggcgatggcggtggcgaggagaagaagaaggaagggggcaaggaggaagagaagaaggacggcgagaagcaggaggaggagaaggagggcggcggtggcggcgagaaggtggaggaaaaggagggagataaagacgctgccgctgccgccgccgccagcatgtacatgcactacccgaggttcccgttcccgggaggctactacgcgccgcctccggggtacgtctaccagccggtgtacccggcgccggcgtacgcggcgtacgcgccgccgcaccaccagcccatggcgccgcagatcttcagcgacgagaaccccaacgcatgctccgtcatgtaactaaaaaacagaaggaccctggcgagagcgagagagggggagaaaaggggaaaaaaagaataataagaaggtgggaagagcgagggagctgcgtgcataacccagagccagagggagggagggaggtcccctgcagcacccagcagtgtcccctgcaactttgtttgaagcaaaacaaaagtaccaggcttttttcgggggaggggcggttagatttcgctcttctttttttcttcttctttcttttgtaattttaaccctttctttcatctttttttcctggtgtaaagtaagcgtggactttgtcggtttatggacgctatctttatgtaggtcgatgccttggcatgtactgcttgcagcttcagacttcatatatataaaactgtatgtattataattttt

SEQ ID NO: 141556 - DNA, 189 bp, Zea mays
  Clone ID: MRT4577_60582C.1
aaaaaacataaatactaaattatactaataattatttaaatgaacaaataaatatcggggtgcggaaaaatgtatgtagtaaacaaaccaaattacactttctttatcataaaacaacattaatcccaagcttgtgatcctccacatgaacatgggcgtctatgtatataaaaatataatgatcattac

SEQ ID NO: 141557 - DNA, 834 bp, Zea mays
  unsure (1)..(834): unsure at all n locations
  Clone ID: MRT4577_60583C.1
ccnggccgggattctntttctctaaaatatatctgcatcatcagccttgtacttcaatcccacgttcgcgtctcttctcggtctagtcaggaccactataacgcatgggcttatcatagcaaaagatgggactcgatgccctgaccaaactcgcttcagcgggcgaagcggtctaccagaacctctctaaaaaatgggaacataaaaaaagaaaacaggctgaaaaggaatggcttgcaaaacacgcagaagaaatccgtcaaagaaatgagtttctatccctcgtatcaacaaaaatcacaggcgattcatctctcgagatggcacctctaatatgcaacccgtacgaatgcaccgcgcagttttcctcatcacgacgcncatctctttcggtgtactcgaggtttcgcagtcgagttacaagctgcttgcgcgacacgttggaatgagtttgaacagcgttagtcattgggctgtttgcgtcattgatagagggcttggggaatgttattgctacgatttgatgagcgataggttggagttgacgatggttggggaagaattactttcgcgttgcagctatcacggcctgagtttggttaacacgtggagttcgtgctattatatcggtgagacgacnaagacgcatgatgaaatacaagagattggtaatcgacatatcggacgcaatcctcggtattcgctactatcgaataactgccagcaccttggtcgacagtctcgtcaaggaactatngtacgncaaagttatcagtcaaagcaagctagatgagggactatctctggcctcacaaagatgcgcgcgacttgctt

SEQ ID NO: 141558 - DNA, 319 bp, Zea mays
  Clone ID: MRT4577_60584C.1
cgtacgtatgcacgcgtatgtgatcgagcaagaatgggtgatccagtgcctcattgttggggagagaattggattccagcagcatccaaaatactaatcatgattatgtttctcactaaagatacttggtcttacgggtttaattcccggtaatggggaaaatgtggtttaatcagggtttaagtgtggcttgtgtggaattgtaatgctttgcatggacctggaacaaagtttaattggttggactttaatgataaaataaatgttgaatctctttggttgtagtaactgggaaaaataagttagtagcttctaaagt

SEQ ID NO: 141559 - DNA, 243 bp, Zea mays
  Clone ID: MRT4577_60585C.1
aacgggacaggcctttgaagactgtgatatgtgaatgaattcttgtacagagtgggggagttaaattcagtgttaatgatgattgaataactgaacaaaactggtatcctggtattgttaggattctttttgattaattttatagtgaggagacttgcacagtctttttaatgggtgagagaccaaataccataagtttaattgacagacgcttattaaattgagcttatgttgtatgagttg

SEQ ID NO: 141560 - DNA, 206 bp, Zea mays
  Clone ID: MRT4577_60586C.1
acccgggttcacagctggtagaaaccagcgcgatcggttaaagacaacattggatcagccaatttattcctaacgccaactgagcacatgagcggtatgaacatcgccacatccatgcgctgggttccccaggctcagctgcatgccatgtgcccagactccatatgagtccatgacttcgttacacctaggtcggaaaggcattc

SEQ ID NO: 141561 - DNA, 571 bp, Zea mays
  Clone ID: MRT4577_60587C.1
cccagcgtccggcgaaccgcgggatcaaggggggggagcaaactttagctgccaaagggcggaagtggaagagggcagcacattctgtagtctctatccatttttttggcaccataaactttattatgaaagtggctggagccaatcgtatcaaaaaattatccaaagcaatctagagccacctctcgagtgcagggatgtcaagtcttttcattcactgtagtgaattcatgcaagaggaacaagttaccaaccagttggcagcaacaacatatacgtccacaagctcataattttcatgttattacttaatttccatttgaacatgttggctaatggaatatctactgccacatctctcctttgttttgctgattttaggcggttcacaagatttgcccgtgaagacaagaaggggagatgcctgcctccgtcagcccgtcgtctccaggtgcagatacaccatctccatgctcttcgatcccgacgtcgtcctatcagttgtcttcggcaagaatggcgggctcgagcagatcagtattaggaagggctatgtggacatgtgcactgt

SEQ ID NO: 141562 - DNA, 286 bp, Zea mays
  Clone ID: MRT4577_60588C.1
gcgattgggtttggcgccgcgaattgggaatccgtcgggtccgcgcttcgtggcgtggccccgtcccgatcgcgttcaggtgacttcgggtgctttgatctgtgctgcatctggagcattttgtttcggaactagttttcgcgtacctggtggtcgtttccttttatttcttgcctccatgcgtgggcttcgatttggattcgatacgtgattgtctcagttcctggtttctagcttgtattgattactctggcgccagcatagtgctcccggctccaattggcag

SEQ ID NO: 141563 - DNA, 581 bp, Zea mays
  Clone ID: MRT4577_60589C.1
gtgcggcgcagtttcagtatgcttgctccaggcgcaatggtcatcatcagcggcagcaacttcccagcggattcgtgatccttccgcgatgggtcccgtcgccaacgatgcgcgctgagccagcagcagaggaacccgacatctgtgagaataaatgtaggcctgcaggcagcgaggcgttgccgaggggcatcgtgcaggacaagtccaacttcgagatggagtcgctgggtggcaaccctgaacggaaggagaagaagggcaacggcaggcactcgaaaagcctcctcgccatccccgtcggcatcaagcagaaggcgatcgtcgacaagctcgtatccaagttcccggacaccaatttcatcgtgatgctgttccactacgacggcgaggtggacgggtggcgagacctggagtggtcgggccgcgcgatccacgtcggcgtgcgcgaccagaccaagtggtggttcgccaagaggttcctgcacccggacctggtggcggagtacgactacgtcttcctctgggacgaggacatcgaggtggacagcttcgacccgctccggtacctgcgggtcgtg

SEQ ID NO: 141564 - DNA, 1260 bp, Zea mays
  Clone ID: MRT4577_6058C.1
gagcacaaaaaccatcaaattccaaactgcatcgttatcaaaaacagtgtctcaggtacagtattggcatgacatcttacaacacagatcaaaatcaaacagcgctaccgaaaaccgtatgctgtgtatgcatcgctgatgaagggtaaagctagcaattcggctactcccatcaaatatcaaacaaaaagcagccatacacaacacgatgcataggtggcaaattggcgcttcatacccacaagcgctgtctcctgatgagactcaaaccgattgctagtattccctactgagagccaaacctcgaatcacttcttctagtgcttcttgtctttcgcgggaccccttggtactttgctcagaaccttctcatcgaacacggcgtactgcttcttaatctcaacccaccccttctcgccataggtgtcaatctgatcctcatacttctcatacaggacaggtactgtgtgcagcaccacaaacacaatgtagactaaggtcaataagttgcagcaacttccaaggacagaaagcaaccaaagcccagcaataaccattaggaacttcttaatgtcccggccaagagcaatttggcggagattagcaaaggccctgttgatctcataacgagtggataccgcaatgttgacaactaaatcttcaggaatgaccacctctggggtctttgggggagacttgtggataaacgatgaagcattagaccagagaaagagaacacccagagagaatatgagaccatggcaaacaaaagtaagaagatggtagccaagcaattcaaataggatccagattgctgtggctccaccaagtactccggcggagatgttcctgttcctccacaggaacacatcagcaggcttgcctccaccaagcgccttgtggatgggctgctcgcggccgaagaggcggaacaccttggccttggcctcggcggccgccgtggcggtggagtcggagaatgagggctgcttgacctcgtcggtgggcggcgccgaggggtggggcggctcgtctctgtcggagtccgaggacgaggagtcgcccttgccgccgccgacgtggagcttgtcggcgagcttctccatcagggactcgtgcttggggctcgcgccgccttcctgcggctgctccgccatgctggaactggaacggaacgaacgggattggaagaaaccctcgcggtgattgctgcgggggacacgacacgggaaaggcggcggccggcctcgaggtacccaa

SEQ ID NO: 141565 - DNA, 302 bp, Zea mays
  Clone ID: MRT4577_60590C.1
ttttttttttttttttttttttttttttttttttgggttttttttaattaaaggacagagcttctattattaaaaaaaaggtttcaaccatcttttaaaaaaacctcccttacatatttggccccaacccattggctggaacccaaccttaaaatttcataaaatcaacctaacacggaatgtgcggccgcacgcaaaactagttttgcacaaaaggaaggaactgggttaccaaagggctacacaccatacatagctttacaccccgttgccttgttatttccaaagggtttacttgcccc

SEQ ID NO: 141566 - DNA, 384 bp, Zea mays
  Clone ID: MRT4577_60591C.1
tatcacgcgtagggaaagccgaatatggcagggggggatgctgccttacggtcttggcttcacggagtgcgggcacccgctgtgtagttgcactgcgggactatgaggctggtgccagcttctggacatggactattcatgatgcgggaggtgctaatggtccggttaatgcaactggggcaggccaagatggaggggacagaggaggaccctcagttggggatcaatctacgtcaccaggcccagagactaaaggtggtgacatgaccttgtacacaagacacaagaggggggaggacgttgttcatcgtgccaataccatgggtgagacctggcaggtttcgagggatactgcaaaggatgttaacggtgataaagataaac

SEQ ID NO: 141567 - DNA, 468 bp, Zea mays
  Clone ID: MRT4577_60592C.1
gaccggagccgcaacgtcggggtcgtcgacagccagtacgtgctccaccggggcatccttacgctcggcgacggcggcaaggcgacggcgacggctcccgcgtcggcagggaccggttagcggtcaggcagcggtcctacaccgagctgcagctgttcaacaggaggtggaagaaggccgtggcggaggacggatgctggaccgacccttacccgaacccggcgacgaccaccggctgaccgttggacggagcgaggcagcgcagggaagtacagtagttggtagctgtcagattgaccttgcctagaagatggtagtagatcatacactcgcattaatttacaggttcacagagagctatacatataatgtacagaactacagattgttttttttcctgtctcttgcctgtgatccatacaagggaataagcgtgcatgaataaaagaaattttgaaaatcataaaa

SEQ ID NO: 141568 - DNA, 1731 bp, Zea mays
  Clone ID: MRT4577_60593C.1
ggtaccctccgggtccggccgggaccggggactaggatttgggacccctttggccggccgggattaacaaaaatatccctccattaactctccaactcctcttcctcttcctcttcttctgcctcttcatttccaattccggcttcttcctcgcatcacaaaattccgattgcggcgcaatttcagattgcttgctccagggcgcaaatggtcatcatcagcggcagcaacttcccagcggattcgtgatccttccgcgatgggtcccgtcgccaacgatgcgtggcagaagcggttcttcagcgtcgcgccgccggccacgctggtcttcttcttcgtgctgatattcgtcgccggtgcaattgttacgcttgatcataaggagagcctggccatactgcagctgcagccaagaggagtgatcgcagcagagcagatgaggcctccagcgacgagcgagctgcgcgctgagccagcagcagaggaacccgacatctgtgagaataaatgtaggcctgcaggcagcgaggcgttgccgaggggcatcgtgcaggacaagtccaacttcgagatggagtcgctgggtggcaaccctgaacggaaggagaagaagggcaacggcaggcactcgaaaagcctcctcgccatccccgtcggcatcaagcagaaggcgatcgtcgacaagctcgtatccaagttcccggacaccaatttcatcgtgatgctgttccactacgacggcgaggtggacgggtggcgagacctgagtggtcgggccgcgcgatccacgtcggcgtacgcgaccagaccaagtggtggttcgccaagaggttcctgcacccggacctggtggcggagtacgactacgtcttcctctgggacgaggacatcgaggtggacagcttcgacccgctccggtacctgcgggtcgtgagggaggagcggctggagatctcgcagccggcgctcgaccggcggtcgcagatccaccaccggctcacggcgcgcgccgcgcggagcgggggcgtccaccggcggtactacaagacgagcgggcacggccggtgctacggcaacagcacgggaccgccgtgcgcggggtgggtggagatgatggtgcccgtgttctcgcgcgcggcgtggcggtgcgcgtggcacatgatccagaacgacctcatctacgcctggggcatggactacaagctcggctactgcgcgcagggcgaccggagccgcaacgtcggggtcgtcgacagccagtacgtgctccaccggggcatccctacgctcggcgacggcggcaaggcgacggcgacggctgccgcgtcggcattggggacggcagaccggttagcggtcaggcagcggtcctacaccgagctgcagctgttcaacaggaggtggaagaaggccgtggcggaggacgggtgctggaccgacccttacccgaacccggcgacgaccaccggctgaccgttggacggagcgaggcagcgcagggaagtacagtagttggtagctgtcagattgaccttgcctagaagatggtagtagatcatacactcgcattaatttacaggttcacagagagctatacatataatgtacagaactacagattgttttttttccaaaaaaaaaaaaaaaactggcctgtgatccatacaagggaataagcgtgcatgaataaaagaaattttgaaaaacaaaaaaaaaaaaaaaaaagcggcc

SEQ ID NO: 141569 - DNA, 151 bp, Zea mays
  Clone ID: MRT4577_60594C.1
attcggctcgagaggcaatcagtagctgcggccccaaaacgaccacttctttgctgggagtccttttggattcagtagtgaaccatgtaactttcgagattttggatacaaatcggaaaaatccatttatattgtttttacatcgacttgc

SEQ ID NO: 141570 - DNA, 312 bp, Zea mays
  unsure (1)..(312): unsure at all n locations
  Clone ID: MRT4577_60595C.1
ttgctcatgantcntttgctcgcagtccgcatctagatgttcggctctagcgtgtagggcacagttaatccattctgatgtgtgttcgtctcgactgtggaaaacctcggatgattcagaatggcttcattaaaggtgaaaactttgaagtagggtccatggttcagtttttctgtaatgagggctatgagcttgttggtgacagttcttggacatgtcagaaatctggcaaatggaataagatggcaaatccaaagtgcatgcctgccaagtgcccagaggcgcctttttaggaaaccagctagtattaaa

SEQ ID NO: 141571 - DNA, 309 bp, Zea mays
  Clone ID: MRT4577_60596C.1
attgtgtctgtgtgtgtattctacgtagttcggaaggagaatatgcgatgtttgcatcttgtcattgtgacacagaacatcaggtgccctcaccagataaagaatcttgtgaagggtgatttgggattgacacaggttggaaaaaattatagtatttgggggccagaaaagcagtgagaaaagcctttgaagaaatagagtgcctttggtgtgtaagagtttgctgcaacatacaccaatgtgattcttacactcagattgcttgtgcctgaaaccttcttcattctcaaacacaagtcctctaggaaa

SEQ ID NO: 141572 - DNA, 253 bp, Zea mays
  Clone ID: MRT4577_60597C.1
ggctctttcatccgcacagtatctctccgctctttttctttaggccaccttccaccctgccctcttcttcttttccgagctcctcacactctctgtcctgtccatgctcgattgcactcattactcgtctttactggacttgctccggctcttcttctatggcaccttgaaggactataaaaataattcaggatccctttcatcattgtttcctgtatcagttccgtaagctaatagcaaacttattgtgctt

SEQ ID NO: 141573 - DNA, 577 bp, Zea mays
  Clone ID: MRT4577_60598C.1
taattgtgttggagcaaggaactacaagtattttctcctttttctggtgtatacatttatcgagactgtgctggataccttggtactacttccaaacttcattgaattttttcaagatgaacataggcgttccagctctcctggggatattgctattctatttcttgcttttggtctacgaaaggaagaagtcggtttcatggaaatacgacctaggatggaaacgaaacttggagcaggtctttggtaccaaaaagttgctctggtttgttcccttatactccacagaggatctgcacaacatccccgcgcttcgaggcatggagttccctactcgctccgacgcaatcgtctaattgcatgtgatgcctagcagagtgttctatgccatagggtttgtctcacgtttacactataggatttctatacggagatctgttaattcttttctgtacagaaatgcacacgcagttctttcgtgtaccagctgtaaggaccagacatgtatttacacaattctgttaattctttggttggtttatattttagacaaaaaaaaaaaaaaaggcggccgctc

SEQ ID NO: 141574 - DNA, 1401 bp, Zea mays
  Clone ID: MRT4577_60599C.1
cattgggtacctcgaggccggccgggatgttttctctcaccgggcatcaagaaactgtcactcgccgctgggtccgcctagtcagcgacgcaccaagcccagcaagcaacagtccaacagccaacaaccagccagcgcgcgccgccaccgacacgcaccgtccggtccgccgctgcgttgcctttgccccctcctcgaggctagccccgcctcgcgggaggagatggactgctgccggcacgtgaacccgttccgcgcctgctcggggctgcgcgggctgggctacctcatggtggcgctcgtcgccgccatcgtcgccgtgtcctactacgccgtcgtcgtctacgcatggggccccatgctcctcgccgggggagcagccgcggcaggtgctgccgccgtgatcgccgccttccacatactcggatcttgtttcttctgcagcttgcaatgattctttggtgctatttgatggctgttttcactgatcctggtgctgtacctgaaaactggagacatgatgctgaagatagcgggaacccttcattttcctcttcagatgagcaagaaagtgctcctagatattgttctcgctgtcaaaatggcaaacctccccgatgtcatcattgttctgtttgtaacagatgtgtgcttaaaatggaccatcactgcatttgggtagttaattgtgttggagcaaggaactacaagtattttctcctttttctggtgtatacatttatcgagactgtgctggataccttggtactacttccaaacttcattgaattttttcaagatgaacataggcgttccagctctcctggggatattgctattctatttcttgcttttgttctcaatttagcatttgcgctgagcctcctctgtttcattggcatgcacgcgtctcttgttacacgtaacacgacttctatagaggtctacgaacggaagaagtcggtttcatggaaatacgacctaggatggaaacgaaacttggagcaggtctttggtaccaaaaagttgctctggtttgttcccttatactccacagaggatctgcacaacatccccgcgcttcgaggcatggagttccctactcgctccgacgcaatcgtctaattgcatgtgatgcctagcagagtgttctatgccatagggtttgtctcacgtttacactataggatttctatacggagatctgttaattcttttctgtacagaaatgcacacgcagttctttcgtgtaccagctgtaaggaccagacatgtatttacacaattctgttaattctttggttggtttatattttagacaaattattttcctccaaaaaaaaaaaaaaaagggggggcggtgtaaggagtccaagctagcaagcacgggcatagcggcgt

SEQ ID NO: 141575 - DNA, 424 bp, Zea mays
  unsure (1)..(424): unsure at all n locations
  Clone ID: MRT4577_6059C.1
cgccgctcggcgggccacgcggacgctaagcgcgctccccggggtgacgccggaggggccgcggctcgcgccgtgtgccttacttgccggaatctccttcgtcgggttcgccgtcgtcgaccgcctcctccggcacgggtacacggtccgcttggcgctggaaacgcaggaggacttgaccaacttccggagaatgaaatatttcgccaggaccgccgggatgggggggtgtcnaccgtgatggcgaacgtgatggacccggacggcctgcgccgcgccttcgacgggtgcgccggcgtgttccacaccttcgccttcgtcgaccccgggggcatgtccggctacacgaagcacatggcagcgttagaagcccaagcagcggagcgggtgattgaggcctgcgtcaggacagagtccgtcagga

SEQ ID NO: 141576 - DNA, 2034 bp, Zea mays
  Clone ID: MRT4577_605C.1
ccgcgggtacgcctcgagcccggccggaaaaaaggtccccctctcctcgcgtctcgttgtcccatctagcccatctgctctctcagcgaggacgaaggcacaaacccctcacctccctcaaaccctagccctcgctctcccgcttgttcccgtcaccgccatcatgggctcagatgcggacatggaggactacgggttcgagtactctgacgaagagccggaggagcaggatgtcgacattgagaaccagtattacaactccaaaggtttggtcgagacagacccagagggtgcacttgctggttttgatcaagtggtcagtatggagcctgaaaaggctgaatggggatttaaagctcttaaacaaactgtcaagctttactataagctggggaaatacaaagaaatgatggatgcatatagagagatgttaacatacataaaatctgcggtcacccggaactacagcgagaaatgtataaacaacataatggattttgtttctggatcagctagtcagaattttactcttctgcaagagttctaccagacaacactgaaagcgcttgaagaagcgaaaaatgagagattatggttcaagacaaacttgaagctttgcaaaatttggtttgatataggcgagtacggtcgcatgagcaagatattgaaggaactgcataaatcttgccaaagggaagatggttctgatgatcaaaagaaaggcacacaacttttggaagtctatgctattgaaatacaaatgtacactgaaacaaagaataataaaaagcttaaggaattgtatcaaagggctctttccatcaaatcagcgatacctcatccaagaatcatgggtataattcgcgagtgtggtggaaagatgcatatggctgagaggcagtgggctgaggctgcgactgatttctttgaagctttcaagaactacgatgaagcaggcaatccacggagaatccaatgcctaaaatatcttgtccttgccaatatgttgatggaatctgaagtgaatccttttgatggacaagaggccaagccgtacaagaatgatcctgaaatccttgcaatgacaaacctgattgcagcgtaccagaagaatgacatcatggaatttgaaaagatcctgaagagtaatagaagaacaataatggacgatccttttatccgtaactatattgaggacttattgaagaacatcagaacccaagtgctgctcaagcttattaaaccatatactcgaatcaggataccattcatttcacaggaactcaattttccagaaaaggatgtcgagcagctgttggtgtcactcattctggacaaccgtatccaaggccacatagatcaggttaacaagctgctagaacgtggagaaaggtccaaggggatgaggaagtacaatgctatcgacaagtggaatactcagctgaagtccatttaccaaacattgtccaacagagtttgatgagaaggatcgctgctgctgcgtgcattgcacacctagcattgttgatagcctgttttgcggatttgagggcaactgcaaagaactgtctggtgacgcttgcgatagaatcctggatctgggtaaagttaatattgactacgaggtcgtctctgaattgaatctggtgttttgatagtgcaagactacttgactggtcaaaagccaaatatacgacgatgcccttctggttggtctttgattgcagttggagcgatgacggtctttaacctcccaaacttgcctgcacacgctgaacgttaagtttcaggttgagagtagatgcgctgggtgaagtggcgcggcttaaatgttgaaacgaggtgagcgcagacactaccaaagaagctgggcctgtttggttgcctccgaatcagggtcgcgggatgcaggtagctagcttgcgtttggcttcctggtccaggcattgagccaggcttgtggcgtgctacgttcctacaaattttatcttggaaaaatcattgcatatgatcgtataaaatattgtttcgtat

SEQ ID NO: 141577 - DNA, 403 bp, Zea mays
  Clone ID: MRT4577_60600C.1
gggggtcgagctacaccatccggggatacggacatggcttgattaccaataagggttttaagggctcattcggcggtgtagggttctctttctagacttctgcaattctctctgtcgttcagagtttggaaatatgcttgttgcaaatgctactctgccaggataacatcgtctattcttgtataaactgctattgcactagcctttctttggacttttcagtggcgccacaggcattgatccaaaactgtaccaccttctcatcattctcatgcatcatggatgggctcaataagcatcattcttcaatggctcgcacgctttgagcgactgtctctatggccgttcatgagaaatgtgttgttctgtccccgttcacgctaccacctatttttgatgcatt

SEQ ID NO: 141578 - DNA, 623 bp, Zea mays
  Clone ID: MRT4577_60601C.1
ggaccgcgcccctctcgagttttttttttttttttttttttttttttttttttttttttttttttttttaaaggaatccaaccccaaataagggcggggccaattttttaaatattttttcctcaaaccggggggggtgcccaaaaattccaaaaaaaccgttggggtttttttaaatccccaggggggaaccaatttaaaacctttggcaaaaatggggcccttttttaagggccaccctttggctatttaacaaaaaaggacttccgggccaaactcaaagcgggggggacaaaagggaaaccttcccccttttgaccaactttggatttcatagcccttcccttcccagtgggggaggttcttcctttttttggacccccaattttgggtggcccaggttttgtccctcggcccttacctgaggaggctaaggcccgggttttggtcccgggggggggggctgcaagggccccccataggccgccctttttcgctgcagcgggtttaaagggctttccaaatgatttgggagggggggccgtttttgaccccaccaggccaccctcatcgttatggaaggttgagggcttgatgcctgcaggttttgctgccctttgggg

SEQ ID NO: 141579 - DNA, 330 bp, Zea mays
  unsure (1)..(330): unsure at all n locations
  Clone ID: MRT4577_60602C.1
ntccgggctttgcagcaccaattaacgtttattctacttccacgagcagcaggaaggaacaccgatacgacagccatgcaggagtgttcgctcggttgcctctcgcatgtgctggctactcgctgccgagcgccacctccacgcatacaagcggtagctgtggctgtcatccaccgccgccggatcatctaccgccgtcggtgcatgtgccacctacggttcaactgtcaacgacggagcatgtaacaccggcgggccacctgccgtcgtcagtccagctgctaccacaggtacatgtgctatcaccagatcatctgtcggcgccaccat

SEQ ID NO: 141580 - DNA, 259 bp, Zea mays
  Clone ID: MRT4577_60603C.1
acaggtcttgcggtcttgtccattatccactatagcgccatgcagtccatagactggctatacatgtcagatgcccatctacccactgggatcttcaatgacagctgcatttggcttgcttacaatacctgttgccttctcctcacagcgtttttaggctgactttacaccttcatattggtttcaaacttggaattcatagacactctggctctagagtacttaaggggcaatccaaaggatgactttatttcacatt

SEQ ID NO: 141581 - DNA, 262 bp, Zea mays
  unsure (1)..(262): unsure at all n locations
  Clone ID: MRT4577_60604C.1
tttcttgcattccgctgccgcaaactnntggtaggctttattccaaagaccgggtggtcanatcaacaacaatcatataccacaccactctacttactcccgacaagcagtctaacattttccttcaaccattgataattataatactcacattaacattgcgatcatttcccatgtctactctttcaaagtttaccaccaacttccacctttatctacaacctttttaatttatttaccaaacctattttatttcattata

SEQ ID NO: 141582 - DNA, 158 bp, Zea mays
  Clone ID: MRT4577_60605C.1
gactggactgcactcaaatacttaatcaaattgtactataacaagtctacaatccatcctggagatagtgacaatttgcatgatcttataactgctataacagatttcacatcactagccacttagcatttgcactgatttacacactaatcctaaac

SEQ ID NO: 141583 - DNA, 422 bp, Zea mays
  Clone ID: MRT4577_60606C.1
gactattctttctcctgtcggttactcagtgaggggggggtgttgttttattcatgtagctactgactactttgagcaacaacatgttcttagatttaatcaattggtcgcactgttacctgttgcttatttgtagcagcaaatactactaccatttatccagttagctgtatgaaaccgtgctcccttcttgacacagtaacagttgctgcttttgtatcagcattttgcgggtaacccctgatccctcttacatctactactattgttgccctttgcctaacttgctttggcagacccagcgttctcctaccaacaacacattattattgttgtcctcttttacattgcttattacttgtaattcattactacatttttttggatgatgtatgtgttcaaccttatataagaattacatt

SEQ ID NO: 141584 - DNA, 421 bp, Zea mays
  Clone ID: MRT4577_60607C.1
acaggaaaaagcctggcttctcatcaaagaatttggttttaacatgcataagcctaacaatacatgtgcggggcacattttcgtttttgggggacaatggtacaatgtaaataaacccccacaaggggtttgatttgggatgggggtcatcatcaaaaccgcagttgggaaaaagccttatttccatgggtgctatcacccttttaacatgaaaaactacaactaccttcgcccaaaaccgattttttccaaccatgcctgggaccgatacaaattggatgcctgttttttcgcatgcatgctggaggggcaaccataaacaaaattttcatttgggatggggttttgggtttgggcttggctcacattatttttggggaaaagaaaaaacacccctaagggggggtgtcgggcccccccc

SEQ ID NO: 141585 - DNA, 379 bp, Zea mays
  Clone ID: MRT4577_60608C.1
aaaactttaattgcaataaccacattacatgagtttttcaggtaatatgttatcaatttgctgtagctaaagcttaccaagcaatcaaagttgcagtgtctgttatataaaattcacattattattaaaaaacagttcgcacacactcatggactcatggctcttttaaaaaatttacgattttcagcaagtttaactgatgaactgtatattagagttacatttattagttaactatcttcaattataatgcataactagtcagattaatttactataactaaacaaagtaaataataattctttagaaagtttcatagcgttaaattataaatatattacacttaaacacttgtcaatacaaactctatacttttcc

SEQ ID NO: 141586 - DNA, 365 bp, Zea mays
  unsure (1)..(365): unsure at all n locations
  Clone ID: MRT4577_60609C.1
agaccattagctttatctactccatttctttgaacaacccgatcgacaccacgaggggggtgcttattgccctggctctactggctctagctgggagcgccacctccactcatacaagctgcagctgctgctgccagccaccgccggcggttcatctaccgccggcggtgcatctgctcacctcctgttcacctgccacctacggtgcatctnccaccgccggtccacctgccgccgtcggtccacctgtcaccgccggtacatgtgccgtcgccggttcatctgccgccgtcaccatgccactaccctacgtaaccggcccggcctcaggctcattcccagccacacacatgcgcgtgccaaca

SEQ ID NO: 141587 - DNA, 1295 bp, Zea mays
  unsure (1)..(1295): unsure at all n locations
  Clone ID: MRT4577_6060C.1
attcanggttcaaaggccaaaatagaagtgaaatggtcattctaaaggcaagcaaacttcaatatttatatatgatggattgtacgaagtgttggaatgttggcaagaaggcccaaaaggcgagagggtcttcaagtacaagttacagaggatcgcagggcaacctgaattagccctacatgcagttaaggcaacgaggaagtccaaagttcgtgaaggtctttgtttgcctgatatatctcaaggaagggagcggatacccatatgtgtcatcaacacaattgatgacatgaagccagcaccatttaaatacattaccgaagtcatatatccagattggtatgaaaaagaaccaccaaaaggttgcaactgtacaaacggctgctcggactctattacatgtgcttgtgcagtgaaaaatggaggggaaatcatgttcaatttcaacggtgcgatcgtcgaggccaggcctctcatatatgagtgtggtccatcatgcaggtgcccgccaacatgccacaacagggtgagtcagcatggtgtcaaaattccactagaaatattcaagacaggcaagacaggttggggtgtaagatccctcagttctatatcatcaggcagtttcatatgtgagtataccggtgagctattggaagatgaagaagctgaaaagagagagaatgatgagtatctatttgatattggtcataactaccatgataaagaactttgggaggggctgaagtcagtggttggcctaggatctgctacttcgtcttctgagaccatggaaggcttcacaatagatgcatctgagtgtggcaatgtgggaagatttatcaaccatagttgttcaccaaacctctatgcccaaaatgttctctgggaccatgatgatatgaggatgccacatgttatgttttttgctgttgagaatatcccgccactacaggagctgacctaccactataactataagataggggaggtctacataaatggcgaggagaaggttaaacattgctactgtggcgcctcggattgctgtggaaggctctactgaagcattattgactgctgttagctctatgttttgaacacctctgtcctgtctctgcggtacccttcttttctcagttcgccttgtcttgtcggcgttctgatgtttacagcaagctgcatttgatcttgctgttttcatttagaaaaaaaaaaacattctgcttcgctctactgtgttttgaattgtgaatgaattttgaatggaaccccgttgtaccatgtgttcatgtggc

SEQ ID NO: 141588 - DNA, 502 bp, Zea mays
  Clone ID: MRT4577_60610C.1
cctcgaggccggccgggaacactgttgatcatcttattcacgggaggaataagcttcggctctagcccctgctcgcaatgtacgatgaccccaccagcacgcagggcttgccggagcgcgcccgggctgccccgccccgagcttcgacctctctgccagcacctcccactcccctgtctccatctcgcactgacacgaggtgcacacctctgctcgaatccgcacggtggcattgccgctgaagacagaaaacgacgatgaagacaatgtcgatgaagctcactaatactaggcttgtaatgaaatatggataactgagaaggagcaacccatgctggggctcaagaacatcaggatggagaagaacatccaaataattaccgaccaattatcacctgattatgaaagaatcccgttaagcccataatactgttcgacggaacaatactcgtgttaggaactcagagcgtaattctgatagaaagaaagcatatcgcagaat

SEQ ID NO: 141589 - DNA, 972 bp, Zea mays
  Clone ID: MRT4577_60611C.1
gcagcgccggccatgatcgagacaggatgacgtccccgccgacgccgctgccggcgcttgcgcgccaggccatgcagtcgccgtcgccgccgacgaaggtgggaccaccgccgctgccaccgccgccgctgccggccgtggacgcggccgtcatcatgggcgtgctcacggccgtgctgctggcgctcttcctcttcctcatctacgccaagcactgcaagcagcgcggccccggcgagcggcccggcggcctgggcctcggcttcgcgccctcctcgtgcgaccgctgccgctcggggctcagcagctccgcggtgggcgcgcttccggcggtccggttcggcgacggtgacgtcgacgtgggccgcgccaccgagtgcgcggtgtgcctgggcgccttcgacgccgccgagctgctccgcgtcctgcccgcctgtcgccacgccttccacgccgagtgcatcgacacctggctgctggcgcactccacgtgccccgtctgccgccgccgcgtcaccgggggccacgtggacgactccgagccggaggactcggcggcgacgcggcagcacggccggcgctcggcggacgacgcggaggtgcaagtggttgtgcaccgcgcgtgggaccagcggtagtccaccgaaggcttggtgggccgggccgcgtacctcgaggccgccaggcatcggagcgacgacctcggcgtcctggtggtcaccgccgacgggtcctgctaggtagctggatgcgctcgtctgctgctccgagatcgatggagcttctgaatcctaggtagctcacgctcgttcacctatcggtcccgtgcatgtacatagttggggacacacgtcgctaggacgatgagagagagagcatggtagggtgaagactggaagatgcttgtaaactgtaatttgatcttggctagagattgggccacctgaagtttaatattaaaaaaagcctgcc

SEQ ID NO: 141590 - DNA, 1013 bp, Zea mays
  unsure (1)..(1013): unsure at all n locations
  Clone ID: MRT4577_60612C.1
gctgacaacaccaagttaaagaaaactcgagaccggccggggaaaagaaaatcgagggaaaggaacgcgaagcgaaggcacgtactactgacgcgcacaaagatacacacacgcgcgcaggcaggcacaagaaacaaaaccgcgcctctccccctcgtccgttccgatccccagcggaaagcggagccaggaccgggagctgaagcggttgtcttccccccctcgtctccgtcaactggcacccccacaagccagcaagatggacgggttcgtggaccccttcgtcccggaacaggcatggccgcaggacgccatgttcatcggctcatcctggccatgcgccggcgccggcgccacttccctcgccgaccctgcagggacgtacgcgtacctgggagctcaggctgcaccaggccaaggcgcaggctttcacctccaagacggctcctccacggcgctcgtgccgcccttggagctgcaccagcagttcctgagcgcgcacctgccgggcgacgacgtgaccgtgacccaggaggagggcctcggcttcgaggtgaacagcgcgctggtggccggcatgctgggcccggtcctgagcgcgccctgcgcggtatcgctcgccgacagcgcgccggtggtgtgcagctcctccaacgacagcagcggcgggagcgagcagtccggcctgccgccgccgccgcggttcctagtcctgggagagcagcccgcgtcgtggccttccgcgttcccgcggatctcgtcgctggccggggccggggaagagacttcgcggagcttcggtttcggcgcggttagcgacaacgatctcctgctgcgtggatcctcctgtgtcgcggacgtgaacaagtatccacagataggcaatgcgcggctacatgtagaggatgacgttgagttcacactggaaagatgctgtcgttcgctcctgggcttgactttggcgatctgcagctcagnncaaaggaactcagcggtctgcgtcacctgagctc

SEQ ID NO: 141591 - DNA, 681 bp, Zea mays
  unsure (1)..(681): unsure at all n locations
  Clone ID: MRT4577_60613C.1
aacgggggtaccctcgcggtccttccgggnaaaaaaaaaaaaaaaaaaagaaaaaaaccgtgtcgtctatgtagggtgttccgattgttgccgacgacgatgctcatttgacattcctggaaaagacgcctgctgctagactaacaatactagaggccgttttttctgacctacacaccgacgacggtctcaattccatagaggctaacctaaaggggaaaacctatgtgtctggagactccattactacggacgacattaggggcttcgacggggagccactgaatgctggggctgaagttcctaatgccgcccggtgttaccagaccgattgtggggctggagcactgaagatcccctggcaaggctggtgaagacaatatgcctgctggatcaagttctgaggtaactgctcatgctgatgacggtgaggacgacaatcacctagccctttttggtgatgaaactgcagatgacaagaaggcatctgatgagcgtgcagcacgatgcacaaggacttttctataaagaacgaaagtggacaatcctccgtgcttagggataacaaaccatgggacgactatactgtatctataagaaactggaggaggctgttcgcacagtacatatggaggcaccgacttgtggagcactaaagctcgtgcctggagggtacggact

SEQ ID NO: 141592 - DNA, 377 bp, Zea mays
  Clone ID: MRT4577_60614C.1
cgtacgcgtgcgggggcgcgtgggagcccgcgggggtttttttttaagtcgatggcgacggccgacgcacgaaactaggagatgctaggcctgtattggtcgatcgggaggttcagaacccaactgtcttgcgacccattccgtgggcggaatgaaggacactttgtgtgcggcagcaggggcaaaggatttcgtacacgagcgcattcgaaggcgagatgtgctgtagagcctgactaccggtcagggattgaagaaggagtttagcttccgcaagatccctaaagatctcaagaaagaggtcttgttcgaatggtgcacggggcaaggacccagtgtctgacaagggtattaaacttcggggggatcagaggaag

SEQ ID NO: 141593 - DNA, 399 bp, Zea mays
  Clone ID: MRT4577_60615C.1
ttttgagaaaatttcagaattttgacttagggagacgaataacagggaaccaggtctcgaacatattcaatattatccaacgattacttgattctggaacactccataagaaacaaaaaggaacataaaaggccagatggccgctaacatacattgggcacacgtgccttctctaacggacagttagttccaacctacagggggatcagctaaaaccagaagaaaaaattttgactgatttagtggaccattacggtgactggggtatttttgtgaacaacccatgaatatggcaccactatagaaattggtgcctcgtgaggaccacaacaattgtaggggtccctggcgtctttggaaaaacgagcatgctcctgaatcccaacgcccggaaaaaga

SEQ ID NO: 141594 - DNA, 331 bp, Zea mays
  Clone ID: MRT4577_60616C.1
tcgcgatctagaactagggccgcccttttttttttttttttttttttttttttttttttttttttccagacattcaagtccccctatatatcgaaaccatcactctagcaaatcccacaaacagaagttaaaaggtacccagctatgcctgggtagcattttttatgttgcagcaaaaaaggatacattccccgcttgcgaggtcgattcagcttcctatttcccagctcggcgacagcaaaaccagagatcactcccatgctttaagggcaaccccttccaaatggcttgatggaaggccggttaccggtgggcgcactggactttttgg

SEQ ID NO: 141595 - DNA, 615 bp, Zea mays
  Clone ID: MRT4577_60617C.1
gcaacgcgagtgggagcaccaggatctcgggctcggaacgagactgcacggtgagtgcggcgccggggcggggggcccacccagggtgtggtcggatccggtgcaccgggcgggcgcgccgcaaccgcgacaggcgcccttctcggaccggacgcaggggccggcgaccacgccctgggaccgagaagaggggtgcgggacgcgcccagatcctcggccttggggctgctcggcacgccttggcgcgagtgccacgtcgagaggcgtcggcggggagcgcggaaggggacgctggcccccaggcccaggctcggggccgtggtgagactgcacggattgttttaagaaaatggcagacaaaccagacatgggggaaatcgccagcttcgataaggccaagctgaagaaaacggagacgcaggagaagaacaccctgccgaccaaagagaccattgagcaggagaagcggagtgaaatttcctaagatcctggaggatttcctacccccgtcctcttcgagaccccagtcgtgatgtggaggaagagccacctgcaagatggacacgagccacaagctgcactgtgaacctgggcactccgcgccgatgccaccgg

SEQ ID NO: 141596 - DNA, 240 bp, Zea mays
  Clone ID: MRT4577_60618C.1
atgctctacaagtcctccagctacagcttccccatgaagctggacgcccaccaggtggaaccgtcgcagaaggaggacaacgacgactacctgacccacttgctgttcaccgaggacaacgacaaggacgagctggtgaacgtgccggggtctgtcaccgacgtcatgcgcggtgcgagggagcaggaggccggcgaggggattggggaacaactttgctcgcgaatatttgagggatag

SEQ ID NO: 141597 - DNA, 302 bp, Zea mays
  Clone ID: MRT4577_60619C.1
agagtatgttgaccaaaaggattatgcatgaatgcattaaaaaggtggtgggaaaccatgaagacactgattagaagaacatataatcattatgcaaatcgttgagttcaattgctgatacaatggaccatgccaaggcaaaggagcagcatggatgcctattgcactctgatgcagatgatgtcaccatattagacaccgtctgttcctgcaaggtttgtgcaaacaaataccatctacctaatgcgctatatctggtcgccaaggcgcaaagtcaagtggccaccaaatactgtataggt

SEQ ID NO: 141598 - DNA, 758 bp, Zea mays
  Clone ID: MRT4577_6061C.1
ttactaaaagaatcagtttcttcaacgctgatattgaatgttcacattgctcaagctgatcaataagacttcaaaaacgacggacaaagagaggaagataccgaatacagctaagaagaagctatgagagagacatgatggaggcccagatgccattacgttaggtatctgcgaccctaggaaaggctcacctctacccctctagcacctgcatccagactaccatcacagaatgataccattatgagtgctcgacaagaacaattccaatagcaataccatcacgctgccccactcgacctccgcacctgactcaatgatcacaccatctccagactccaacgaccccatgtagttatgccgtgatctctgttagtgtacgacgcgctggcctgatccttggataattgtgcatgtgaagataaacttagcatgcctcatgatgcagagagtttgcgtgcctcgtgacatgcaactggcaacgttcgtgcaacatggtgtaccaaatgaacactagctgttgtacgttactgtgtggcaaatatgtgaatctgctgcatgttcacctctcaaaccagaacttcccccaatacagcatacgatcatgaagtaatatgaacactgggatgtagcatctgtacaatgagatgatcgataccacgctgcacttaatatttgccgagtacgaactctgacaactactgattctattacccttgcctccgggacgtcatgtatacaacccgattcatgtatgt

SEQ ID NO: 141599 - DNA, 237 bp, Zea mays
  Clone ID: MRT4577_60620C.1
ggttggtatagttcgtaccaactcagataggtcgataccgactgtcatgtatcgtcttttgattggtagtacatgatattttgatatccaaaaaactaaaagaatatgtttatgaactatgtatccctttagttttagatattatattttttatgtttataaatatgtcgattttatttatggtttgtaaactatgtaatgtgtatttatatttatgaactaaataattttttactt

SEQ ID NO: 141600 - DNA, 287 bp, Zea mays
  Clone ID: MRT4577_60621C.1
ggaagaccgggccgacccacgcgtacggagaccgaagcgcctgtactataccacttcacagcgccaccggcatccgagaagggagacttcgcctagcccgtcaaggacgagcttgtagcattcaaggtgacgacagcttttgctgtgtatgcatagaaggtaaacttggcgctaacgttcctccatagcctacattattcataaccacagggtgagagagagaagcactgcaacagagtgagatgcgaccagcgaccggagtaggtatgatacgttttttatgctta

SEQ ID NO: 141601 - DNA, 578 bp, Zea mays
  Clone ID: MRT4577_60622C.1
ctttcctggcttctgccccgctctggtggtcatcagcgcttgcgcgaggagttttcccactcatggcagctcccaatctaccggtccgtcgtgtttcccggggaaggagttggataaaccagacagacgcctcctcaccccttctaccaacaacaaaggtgatagaactgagggaatgcattacgtgtctgattgtgaactggacagtgatggtgaagagggctgggcagcacagatgcctcgttaccctttcgaaggtatacttccaaggagcaggcaccgtgattgctctttatacaggaacacacaaaggtggtcaaaagaatttcgtgttgcaaaccgtaatgagactcttttggagacagtgaagttattagatcccacaaattgtgtcttccgcgatgatggaacttgtgtactgcattcacctcatcagatgctgcaaattttctcattgaagttggataaaattcatgtggatggtggcttggttgagttgtatggatatatagcagcacgggaccgtattgatcgattgcttaatcatgtcgtcaattttagtagggatgaacccatca

SEQ ID NO: 141602 - DNA, 623 bp, Zea mays
  Clone ID: MRT4577_60623C.1
gccggccgggcttaccaacactaatcatcccacatccgcacctgtctgcgtctcccagctcctccgccttcttctcgatccagccaagccatccaatcgccatggtggactcggaggagcaccaattccaatcaaaagaaggccccgctaggcccaacagctacccaaagaaagcaggccccggccgtaagaaccgtttcatcatcattaacaaccgcccctgcacagtgatgctgaggttctctacctaaaaaactgctaagtatgatcatggcaagatgtcactattgaagccatagacataatcaacgggaaagagatcgaacatattgtgccgtcctaaaacaactgtgatgttatcctgctcacgtcagatgtgaacagtacagatgatctcagactcccagctgatgatacacttggggcccacatcaaggaaggctttgaaagctcaaaggatcttgttgtgactgtacaaactgctatggggtaggagcagatctgcgcgctgcacgatagagccccccagaaacttcctgactaggaatactgtatctcaaaaccctcatctagacaagaagtgtatcaaggattgctacagagacttccatatgtattgagct

SEQ ID NO: 141603 - DNA, 301 bp, Zea mays
  unsure (1)..(301): unsure at all n locations
  Clone ID: MRT4577_60624C.1
ccanngcagacaaggaggacnacggcnacaaannnnnngagaaagagggcccnggngangcnggcnnccagaaggaggagaaganngacancannggngngaccaaagggaaaggnnangagggcgnggncacccgnnggggngncacccgccnnccccgcaaaacccacaggggncnccgcaagggngcnnggancggngcaaggcancccgcgaggggcnccaaaacagnngcccgngccgggcagaacggggaccaccaccgcacccgagagaacaagaaagnnnacaagaacggcaa

SEQ ID NO: 141604 - DNA, 1503 bp, Zea mays
  Clone ID: MRT4577_60625C.1
atcaaactgcaccccacgacactggagcattcatgcccattgaaccaaatattagttgtcctcctcataacagaggcaactttattttctactacttccattctaaaatattagttattttagcccttaaattttgttttgggacgggtggagtattaaaaaaaaagaactgcctaatctatagtctaactaaaggcaaagttgaccacgtgacatttactgaaaccaacgcacgatcagtcttaatctcttgactaacgcacccatgttggttcgccttgaaggaacagcaatgctccacaggtaaggatgcctctgaacctaccttgaacttcaaatccatagaagtacccatcctcacagcaatcaccgatctctttaagacacctgactcgtcaacggcaccatcaaagagctggatttcttcctgcagcccgctggtaaaacatccgagatgcatattgaagctgctatacacttcagatacgagaacttgtacagtagcctcaactgcatagttaagacgtgacatagatatctcaactacgccatattcgccacggattcgtcttgtgaatacgtcacggtcctgggtgctcatgtcgtccttgactgatacaccatcaatcagctgtagatcatcctgttctttgtcacctgctgcacaatgatgggatcatccctactaaaattgacgacatgattaagcaatcgatcaatacggtcccgtgctgctatatatccatacaactcaaccaagccaccatccacatgaattttatccaacttcaatgagaaaatttgcagcatctgatgaggtgaatgcagtacacaagttccatcatcgcggaagacacaatttgtgggatctaataacttcactgtctccaaaagagtctcattacggtttgcaacacgaaattcttttgtccacctttgtgtgttcctgtataaagagcaatcacggtgcctgctccttggaagtataccttcgaaagggtaacgaggcatctgtgcctgtgctgcccagccctcttcaccatcactgtccagttcacaatcagacacgtaatgcattccctcagttctatcacctttgttgttggtagaaggggtgaggaggcgtctgtctggtttatccaactccttcccctttacaccaatgccactcgtcatgttccgatatccatgtggagatcgggaaacacgacggaccggtagattgggagctgccatgagtgggaaaactcctcgcgcaagcgctgatgaccaccagagcggggcagaagccaggaaagggaggagagcccgcgacggcgagtgatgggataggcgatgcattggggcagaagcgacggtaatattagggtgtaggaggaaacgaatcgagcgtaagtggacctgcatctgctcctctcgtatttcggtagctggtttcttcgcagcagcggctgcgggcgggcgggcgggcggggtcccggccggcggaccggccggcctcga

SEQ ID NO: 141605 - DNA, 401 bp, Zea mays
  Clone ID: MRT4577_60626C.1
ctccactacgcctgcgctcagccttgctttactggtaacagctccagcgcgagcgacagaggtccgtgggtcaagctggtgggacatatgatagggctcaggcacggggccgtcaagatcctaccaaaatgtggagagggcgcgaccagaacatcacaacactgtctgataacaaaagaaacacatccattcacattccgcaaacacagaagaatgctcctaaactaagaatgccagttttgcatgctctgaggagagaaaagtctggctaataatctggtgcacccgcggctgacattaacagatgcacagagatgccagaagatgctacaaactttacaagagccagagcagcatcctgctgaagaccagactcacctgtaagaactatatagacagac

SEQ ID NO: 141606 - DNA, 265 bp, Zea mays
  Clone ID: MRT4577_60627C.1
caatgctgcccgtcacctccgcctgctcacttgggctcaaagtgtgtatccgcttccctgatgcgtcaattcgatgaagttgatgtgctgaagctgaagctgaacctcctcaatattaagggaacagaggcatacacaaatttattgaatgaaacggctgcactacccaagtgtgaggaattaaagttacgagtgtcattaagggcttcccaacacaactttgcatcaatcatgtttcatatcttaaggagctgcaacaatacaa

SEQ ID NO: 141607 - DNA, 216 bp, Zea mays
  Clone ID: MRT4577_60628C.1
acgacttgagtcgactttgtggtcaaggaggttaagtccgtgacgcacgaggaggtcactactaaggtcgaggaggaggtgagtaaggtcttgatcaccgtcctcaactctgtggtggcgaggaccgaggaggacgataatcggagtgttgtcttttcgcaggtctccgggttgcagtcgacctaggtggaaggaattgctgtagtcggaggtttg

SEQ ID NO: 141608 - DNA, 356 bp, Zea mays
  unsure (1)..(356): unsure at all n locations
  Clone ID: MRT4577_60629C.1
ctgttgacacaaaatacatggtttgtctggggccggccgttctcttcccgccacacgattgctaaaaaaactgatcatgtaccggctgggacgtttttctcctggggaggaaggggaaccataacgcttaaaaggaaaagctgttggggatgcccttgggggggagccctgcgccagcgccactgagagaaaaggtgttgggataaacccctatggaggggaacttgggggggcccttcctgttcctaaggtgggggtaaagaaatnttcccaccaacttgccctggatcttgacctgtgcgtaactgaacctcttgaacgcccccaacccccgggcgtcggaggttcacacgggg

SEQ ID NO: 141609 - DNA, 122 bp, Zea mays
  Clone ID: MRT4577_6062C.1
gaggccgtattaacctcccttaataagtcaattcctccaggggccatagggcaaaaggcaatccaggtccttcacagtttcaagtcacatgcactgcatgataaaaataagtcaccgaaaaa

SEQ ID NO: 141610 - DNA, 374 bp, Zea mays
  Clone ID: MRT4577_60630C.1
acgtgtaaattttttatggttaactttgtacggagaaccaaacgggggatgcaaatcaccttatcattcgtggtcagcaccaagaggcgtacaacacctttctaggtgcagaaatgccaatatgtgtaacagcatctacccaacagaaggtgcaatttctacaactgtggctacagaaaggaatgcggtgcaaaaaccaataagttgacggcacaagcaaataaaaatgctatcagaggaactcaccaagctaacgcagatgcctagatcatgacctcacctgggaacatgccaccggcatgagccgtatcccaaaagggggtcagcacatttagccatgacaagggggctacgtagcatatcttgccctcatg

SEQ ID NO: 141611 - DNA, 1950 bp, Zea mays
  Clone ID: MRT4577_60631C.1
gggaaaagaactcaggaagtggttatttcgagcattctccgcggcttgcacagcatcaccggacaagcatgatgaaacctgacaagccaattgacttgcttaggaaggtggctggcaataattgctgtgctgattgtggtgcttcggagcctgattgggcatccctgaaccttggaattcttttatgcatagagtgttcgggggtacacagaaatatgggtgtgcatatatctaaggtaagatccctgacgcttgatgtcagggtttgggagcaatctgtaatcaatctctttcagtcaataggcaacacttttgccaattctgtctgggaagaaatgttaccttcatcaagctgtgttgaccatggtgatatttcaagggctgttggattagaaaacatgttgtttggttttgttcccaagtagcctaataaatcccgttagggcattgttcttttagtcccctggaggggcggcttgctagtattcatggcgtacacatgtcgcaaaaggaagttgctgttttgaaaggcgtccgccctcttttgggagaaatttattcatgccaagtatgctgagaaggatttcgtgcggaaacatggtatggatgggattcaacttgcagaacagatgtgggacaatgtaagttcgaacaacaagaagggggtgtacagcttgatcgtggggtcaaatgccgacgtagatttttcctatggtcatacatcattcaattcggctttgactctggcgaaaagctctcctcctacaagagcaatcagcctctcacatctaacggaagctctagatgttttgaccgcaatccactcgacacagggataatcggggattctatttgtcccgcccgtctagccgggcgcacattggcgccgtactgcaagagcagctcaaccatgcccaggtccgcggcgcggcatgctagatggagcaaagataatccttcaacagattcaagagggcggacgccgcttcatcacagcatcatgaaagggcgacatgtgtacgccaagctactgctttccaggggcgccgattctcaagccgcggatcgagatggtaggacagcgttacagtatgcaatcgacagcggaaccatagaggacgaagagatccttgttttgctagaggacccaagtagataaatcacgtaggtgtagtagtccaagtctcgagttcctgccgtcctgcggtggtgcattgtggctgccttttgcagtcacctggcacacacagggtccgaggatgccttgctagtattcagtctctgcctttgtggcaagaggaagttatagtttttctaggtctgtctgcggttttggtcgcgcttagggtaaaagtggcctgtttgtcgtggatgcagtttgcaagttgttggtttgcctttgtttgcagatgtcgcagtgtacacttgggaagtggctgccattgttgcgactgatgtacatatagcgatgtctgatacaggttatttatgcaagaatttagatcggtgaaacagaatccccggtacaacccttctcgagtggattgcggtcaaaacatctagagcttccgttagatggagaggctgattgctcttgtaggaggagagcttttctcagagtcaaagccgaattgaatgatgtatgaccataggaaaaatttacgtcggcatttgaccccgcgatcaagctgtacacccccttcttgttgttcgaactctacattgtcccacatctgttctgcaagttgaatcccatccatgttatgtttccgcgcgaaatccttctcagcatacttggcatgaataaatttctccttcgctgcaatagaatcagactgtttaggcttccttgggtgcaaatgccatggcacatgttttgataatccaccagccctgcagaaagtagaccttgcaagtggcaataaaaggaccatccattctacagcatct

SEQ ID NO: 141612 - DNA, 169 bp, Zea mays
  Clone ID: MRT4577_60632C.1
tcttccttacccattacagtcccttcagcatcctcttcacccacccctccctctccttctgtcgttattcctgcacctccgatcgacatctatcacattgctgctccccgattactacactctcctccaagaattgcctctgctcattcagctcttctttcgattaccc

SEQ ID NO: 141613 - DNA, 383 bp, Zea mays
  Clone ID: MRT4577_60633C.1
ttgaactgtagaagaacaccgcaattatttcattctcattgagcgaatcatttctctttatcacatcaaagcgtaggtacagtactattgtttaaatctgttggttgactggagagaactgagtataagcaggtggttgcgatcatgcttgatgttcaccaaacagacagctcagagctaaacttgtccattcgggggcttgggcagaagcttccactcgatggtcgagtggtcgccatactgtttcctgcagctgatgtggtcggtccccagctaggaggcaatgtcgccagccagtggtgtgccaccacccactagataggcccacccaaagtgctggggattggtggcgatccagtgggggcaaaaacctcggagatcct

SEQ ID NO: 141614 - DNA, 527 bp, Zea mays
  Clone ID: MRT4577_60634C.1
ggtaccggcgccccttctcgagttttttttttttttttttttttttttttttttttttttttttttttttttttttttttttttttttttaaccccaaaaaaacaaatttttttcataaacaaaaggggtccacaaatttttccccataccaacatgctctttggggaaaacccagttgcccccctaaagcggcatacttacttattcaaacggacccagcggggggcaacgggggaagttcacatgcttacaaacaaaaaattttcaaaacaaaagctgggttggggtgcttcccaaaatacccaaccgacccccccgaattggggacgatttaaaaaaaacacctcaaaagcaaatcgcccccaaaagcccgttttactaataaagcactcccgccttttcctccagggaatccgtttcctcctcccaaaaaaaaaaataacccagtttgaacccctttttcataggaggaggagcactttccacgttctcgccggaaaagcaggggaaaacaaatttgggcgag

SEQ ID NO: 141615 - DNA, 288 bp, Zea mays
  Clone ID: MRT4577_60635C.1
cggactcaagtgcttaaacagtacgcttttcagtttgaaaattaagctctcttgctagagtacatgtatgtttatactattcaaactctactgtattagacttgcatctggaattcattactccgtatctgctatcaggttataaggtataagctgtgacaatcattgatatgaccattagcatcatgaatgataacatataggcttctctgactgcgcatgacaaagtatgcattctatcaactttgcatgcgaactgacacagaattgcaatggttgatgattgaa

SEQ ID NO: 141616 - DNA, 640 bp, Zea mays
  Clone ID: MRT4577_60637C.1
ccccctcgagttttttttttttttttttttttttttttttttttttttttttttttttttttttttttttttttttttttttttaaacccaaaaaaacaaatttttttcaaaaacaaaaggggttcaaaaatttttccccatccccccatgctctttgggggaaacccagttgcccccctaaagctgcatacttattttttaaaactgacccagctgggggaaacgggggaagttcacatgcttacaaacaaaaaattttaaaaaaaaaagctgggttgggttgtttcacaaaatacccaaccgacacccccaaattggggacgatttaaaaaaaacacctcaaaagcaaatcgcccccaaaagcccgttttactaataaagccctccccccttttcctccagggaatccgtttcctcctcccaaaaaaaaaaataacccagttggaagccctttttaaaaggaggaggaaccctttccactttttccccgaaaaagcagggaaaaacaaatttgggcaaggaaaaaacagggttttaaaaaaaaaaaaatctttggaacacaaggagcccccctccaggaagttcctgctccaccatgttgttgaagtaataaacctttgaaccaagtgcctttcccca

SEQ ID NO: 141617 - DNA, 164 bp, Zea mays
  Clone ID: MRT4577_60638C.1
cggcagcaagcttgtacgaagcccagtgcacttcaagtactggtgcgatgccatctccggagctagtagcagctgatgcaggagaagctgtcagacttcttgtgcccaatgttgacattggcatgggcagtttatcgcctgcccgaccagcagattgcttgaat

SEQ ID NO: 141618 - DNA, 362 bp, Zea mays
  Clone ID: MRT4577_60639C.1
gcaccattcactgaacccaaagaatgaactgaccctgcggctaaccatctcacagcaatgctggcagacacctccaacctacggaatacttgccgagttgggacgccgacctcctcgaccctgtggaaccgaaaggattaggccatggttgtgtctccctgtgccagcacctctggggaatgaataagccagctgctggccaacatgacgccgctgcagggatccagccaaaccatcctcactgaccaatgccattaccaatcgaagattgctcgcagatagtacccgattctggagaacttattgacactgatcatgtgatgcgtttgaaataaaaggagcccattagaaaaaaaaactac

SEQ ID NO: 141619 - DNA, 323 bp, Zea mays
  Clone ID: MRT4577_6063C.1
aaaagagctcgagaccgacaggacgagactcgcagctatgctgacacgtgtcgagaagcagctggggagttgaggcgtagtacgtacccagcagcagttagcactagcagtccatcggagcgacgatggtgagaaggacggtgctggcggcgctgctggtggccgccgccctcgtcggtggtgcgcgggcgcagctcaaggaggggttttaggggtgctcctgcccacaggcggagaagatcgtgaaggactacgtgaaggcgcacattcttcactcgcccgacgtcgcctccaccctgctttgcacccacttttataactgc

SEQ ID NO: 141620 - DNA, 1555 bp, Zea mays
  Clone ID: MRT4577_60640C.1
caagaagctcattgcaattaccagtgtttgcatccacaagtgtttgtgccatatccttcccaagcctctgtagaaaggaagttggacattgccgacatcccacatctcccatactcatattttgcagcagatatcaccttatcttttgctgcgacagccatatcagcaaaaacatcccacattgtcatctccttattgtcttcatccagctcccagctgaactcttcttccgggaagtacccaccattgcaacgaaaccctctgtgccaatcctcgctggcctgcgctgtcataggcgggacagaaacagggacccagatgccggtatgatcatgaagcaggttcaagacatttacaggttccgactctacagaagtttcggttgtttcagtgttgcatcctttagcaatgggagtgcagttagtatcaaggctgttggccatgtcgtttttggttggtgactcctctgcctcttggtcaaatatgtggagtcccgccaagccttcgacacgtccgccgccgccgcagtcgtcgttatcgtcgtcccacctcgccggcgagccaccagcaccgaccacgacggagcggctgcccgcgggccgcggcgggtcaatcgggcggtggagccgctcggttccggccatgggccactcggttgggtcgattcaccagcgatcaagcggagcaatccgggaatctagcttctgtttctggtaaaagatacgcctttttctgttgccacggattgtagtttgggacggagttgattggagttggaagggatggatcaacggatgtggagagcgagacgacagacgatagaacgagttgagcagagttttctgggaatttaactggcggcctaactcgaggtctgtttgcctttaacgacacatagctgtgtttcagtgtgttagcagatgggtgcggatgtgggattttgggcactgtatcctcatgttacagggtacaaccttcttgtgtgattcgtatcctagaggttaatatgtgacacggtcttagtgattctgtttacacattctagacaagaatttggatgtctcaaccggtcattacaaattcatgattccgttatgtttatgactgaaaacgtagagcagaattccatttcctattgttaactgaaatgctaaactactaacattagcaagaaaatgttggccatctcaatttgatatgtagcatcagaagttagtttcaactgcgaattgatttctcgtgtgaaatttccacaacattgtacggttggcacttggcattgtaaaccggtgatgtttatttcctacacagttacactaatcgcagttgaaatcgctcggagaagccaggactcaggaagcctttccaactgaattagttgtatttctgtctcatcatcacaaatagtcagttgaaatttccctgctttcggttctcctccatctcatgttgtatgcatgtggttttctaaagtagtttataacagttggtcatgtaaaattacttaaccatatccctgttttcgggaagaagactgatatacttcttttttttt

SEQ ID NO: 141621 - DNA, 524 bp, Zea mays
  Clone ID: MRT4577_60641C.1
cttcctcgagcctcgacccttacgtcttcgctcgcgccgtcggcgtcgactgtcgctaccccccgcacctcacttcatttctcgccttccaagcatgacgaagcgcactaacaacgtaggaattgttggcaaatatgcaaccagacatggtgctagcttgcgccaccaaaccactaagatgcaggcatctcagcattgccaggacttttgcaagtactgtggaaagtttgctgggaagaagaaagcagtgggaattcgaggatgctaggactgtcgaaaagcgcagggtggagcggcttacgccaagcaccctgctaatgggtccgccgacaggagcaccctccgccgcctgctgcaccagactggatgatgctgtacatcttgacatcatcgagaacatctgcactggcacctcccaggcaggctgtgctgtccttatcattggctccagcgctgtcgctgtagaggctggtatgcccaaacaaggccacatacgtgtgcatgatctccttgcatctcctctt

SEQ ID NO: 141622 - DNA, 444 bp, Zea mays
  Clone ID: MRT4577_60642C.1
gacttcttcaagtcaaagggtcggtggaactgtgggtggcacatttgtagcaactgtcagaaacctgcccgccatatgtgctacacatgcaccttttcattatgcaagacatgcatgaaagatgcaaagtttagctgtgtcagagaaaataagggcttctgtgatacatgcatgaacactgtgatgttgatagagaatagagaggaggctgcggacccaatggaggtggattttgatgacaaaggcagctggtggtatttgttcaaggactattggttaaatttgaagacaaacttgtcgttgacagttgaggaaatatcagcagccaaatctcgaaagagtggagagttacctgatactaatgatgaagttaattcagagagttcatcagggcgcaatctagaaagcaatacatcaaaaaaacaaaaaaaggggggccgcgga

SEQ ID NO: 141623 - DNA, 434 bp, Zea mays
  Clone ID: MRT4577_60643C.1
gtacggaatcggagggtcgagccagacgtacgcgtacgaaaaccctaaccctcgcgccgtcgtcgacggggccagcggtcgagcatcgcgactgccgggagatcgacacgcagcacgactatgaagctcaatatggtgaacattgctagcgcgtgccaaaagaagttggaaattgatgacgacgagaaactacgtgcgttttatgtgcgacggatatcccaggacgtgagcgcttatgctctgggtgaggagtttaaggtgtatgtcttcaagatcatgggtggatgtgacaaacaaggcttcccaatgaagcaaggagttctgacttctggtcgtgtccgccttctgctccacagaggcactccctgcttccgcggttatggcaggcgtaatggtgagcgcaggaggaagtctgtccgtggttgtattgtgag

SEQ ID NO: 141624 - DNA, 563 bp, Zea mays
  Clone ID: MRT4577_60644C.1
cccatcatactcctgattccgaggctcagacattgtctcgtcgtcgcctctactctaaccataattctccgctccttaaatgctggtacactccgacctcctacctgtccacgacgtcctgtattattcgttcacctacctagacctcgataaccgcgacctgtgcaaggcctgagggaaagtggtgcaaccgagggcctgctgatgctgacattgccgcaaccacatccgcctacgctacgacatgatcatagaggtgcatgtacacagccggaataggcgtgcatatcggtgatctcttgccacgtaccggagctgcctccttttaacaagatatcatttttatcttacatatacacatacatcgatattatctactgctagtgactgacccagaggaggcaggatgagaactatgagagagcctaggaagagacgcagattctccttaacgagctgtcatatcctagaatttttagagtggaaaggatgactgacaaagcccccgaggtattcatctactactgggatggtgacaataatacgaccttccactatgtctc

SEQ ID NO: 141625 - DNA, 800 bp, Zea mays
  unsure (1)..(800): unsure at all n locations
  Clone ID: MRT4577_60645C.1
aagagaccttaaatacagagagacagntacatcaccagatgtccagatcactagaatagagtaggaacaagaagaatagtaggagattacgttgctttcgcccagctctaatttaataagttcatgtctaagagtacagtttacatcaccagaatagagtaggaataggaagaatagtaggagattacaaagtgtagggccctaggccctaagggtcatcaagataaagtccttcaaatgcttcttcaaggtcttcgtcctgtgtagagtgttggccagtatgagcagggcagtaccggccaccgcgcgcgccgggagaagggagcagggcagcagggagcccgacgcgcagggagcccgacgcgccgagagcagggagggagcagccgagcagagagcagggagcccgacgcgccgaggaccgagaggacggagggagcgccaccgccgaggaccgagaggacggtacgccaccgccgcgccgaggaccgagaggacggagggagcgccaccgccgaggaccgagaggacggtacgccaccgccgcgccgaaagcaggtagcgcggaggcgcggagcgccgcgcgaggggacggagaccgcggcctgcgccgagaggagggagaagggagcgccgcgccgaagctaaagaggatggagggagcgccgcgtcgagattgagagcagggagaagggagcgccgcgccgaggctagagaggatggagggagcgccgccgccgcacggagggagtccaggacgcaggagggagcgagtgcgttaggttcgcagcccggccggc

SEQ ID NO: 141626 - DNA, 740 bp, Zea mays
  Clone ID: MRT4577_60646C.1
tgcattctttgctagctcatgaggatagagagtctcaagacatactcctcttacttgagaacaattctcaagttatggtaccaatcaataaagtttgtttcagtgagttttgtttgtcaaaaattggtggcaagttaaaaccgataggagtattaggtgccatcactacaacaaaataaaaggaaaagtttagcactatgtatactttaatattttaataaaagattctccccactatatgttctgtaatcgaataatcatcttcctctaacaatatatagtggacaagattcatgtttaataagttgtattgagctttggcaacacatcttgaaacataatgatataggtaagcaatatttactaatcatatccgatgtgactcttgtctgctgggtggtatccaatgcccttgctcctaacatcaagcccaagtcacaaatccgatttgatagtctgtttaaggaaaccaacactatacatgcagatgtctgatatccattctattagattaaactaatcgatggcactcttctttgcctggccaacaaagtgatggttagaatcattgcaggcccccccccccgaaggacatcaaaatgcactcttagtttttctaagggaaactactgtatcacatttagcgcatggagaaaaagtaagatagtaattaaaatcacttataatcatattaaatgtaagataatatgtccctttaaaaaaaaaaacccccccccagc

SEQ ID NO: 141627 - DNA, 304 bp, Zea mays
  Clone ID: MRT4577_60648C.1
ggtgatgaaagctgtatcggacttcaaacatatttctcagccactttcaaggttcgaagatgatttggaatcaaacagagccgtgagagatcaaggctggggttcaccgcagcttgagcaaaatataactcgcttggagaaaattgtcgaaattttatcacaggacaaattctgttatgaagctcacatactacgggatggtgcattccttcaacgagcattatctttctacaggttaatgatactctggtcagttaacctagttggcggatttaagatgcctttgccatcacaatgtcccaag

SEQ ID NO: 141628 - DNA, 431 bp, Zea mays
  Clone ID: MRT4577_60649C.1
atgtttccctcgctacgaagagtcaccgctcgcgttgccatggcggaccacctcagcgacaaacagacctactagttcaaggagggcttcatcctcttcgacaaggacgactacgagtgcatcaccaccaaggaacttggcactgtgatgcgcttcatatgagccaaaaccctactgagggtgagcttcaggacatgatcaatgaggctgatggtgatggcaacgcaaccatcgactttactgagtttctcgacctgatggcgcagcgagatggaggcacaccgcacatccgaggaggagcttaaggaagccttctgtgtgttcgacaaggaacagaacggcttcatcacccgctgttgaccttcgacatgtcatgaccaacctacgagagaagctgacgtcagaagaggtggacgaaatagatcattgaa

SEQ ID NO: 141629 - DNA, 762 bp, Zea mays
  unsure (1)..(762): unsure at all n locations
  Clone ID: MRT4577_6064C.1
cccacgcgtccgggcgtggtcacaatccaaggaggtgcggttttcatgcgcaccagcgctggcggctggtaacctgcaccaggatatgcctctgggaagacctggcaacaacatgactccccaggggaaaatggagaccaaaaggcttgtgaggttgcagtcgctactccatcgctctgctccggcaatggcgagtcctggcgcgaacaaaagaggaagagtcaggccgaatgttctgcaagtcaagacgatgatcttgatgatgagtccggtgggatgcgaggatcaggcggcagaggtacgaagcgcagccgcaccgcggaggtgcacaatttgtccgaaaggaggagaagggacaggatcaatgagaaaatgcgcgccctgcaagagctcatccccaactgcaacaagattgacaaagcctccatgctggatgaagcgatcgagtacctcaaaaccctccagcttcaagttcagatgatggccatgggaagtggactgtgcattcctcccatgctgctgccgcgagccatgcagctgcaaattccttcaattgctcatttccatcatctcggcatgggattgggttatgggatggggtgtcctcgatatgaacagcacagcggcagttccatttcagcccatccctggtgctcactatacttgtccgatgatcccaggcacgccaccacaaggtcttggaattggaatgcctggcacaaacacgatgccagtgtttggactccctgggnncagcatcca

SEQ ID NO: 141630 - DNA, 765 bp, Zea mays
  Clone ID: MRT4577_60650C.1
tccgggattatccgactatggcccacactactagcgtagctgagactctgagattatggccgactactaccacggtcgggatgacgtgtactccactgtgacctctgctatgacaactgcaggttcggcgtgagcgtgtgggcgtactcgcgcaccgatgatgactactacatcgtgaaccatcgcatgaggaggcccgcgctcggcgtcgacgactgcggctacggtggcattgagaccgccgtgtacgtctacgagtactcccgtggggcccgttaccaaagctacggcgtcgagcatgagcacttcactagggacgataacgttgataagcacaacgatcgtctcacattcgcgggcgacctcgcgacctccttctttgctctgtaccatgttatccgtgctgacaaggaccctgataatgcgcacatgaacgagatcgaggtcggagtgattaccgccatcgcgttgtgcgacagtgactacgctatccactatgaccgatgatgagattgaccgccacttacgagagcaaagcagcaggattgcatgtcggctctcggtgaccggcacgattactcctactactgcgactgaaactactgatcatcacatcggtcgagatatgcatgcagaactcgatatatatacagcccctagcagcgtacacgtgcgtgcgtgtaagtatctagatgcaacggcgtatcgtgtgtgttgctctacactactccatcgatctactattatcggctgcatagtacgact

SEQ ID NO: 141631 - DNA, 2238 bp, Zea mays
  Clone ID: MRT4577_60651C.1
gacatgatgggatgatcacttaaataagtttgtttagttcaggatcaaggattgagacagaattattctagtattgtccccagttgttccttaaaattggagggacaagagaggataccaggggacattcctgttttggctatccagcaaccaaacgcacccttaaatctcagatccatgcaagcaacatgatagcacaattatgtctcgcgctcatgaaaaagaaccagcaaaattttcactatgattcagatcgtcaaaattgggctggcgtgcagaaagtgttacagaacaagaataaccacatgaactggtttcagggatttgttagcttccagctacttcccgttagcgctcttgtggaaaggccagaggctagccaacctttcaagcacccctgcccctttggagaagtagcccaaggcttgtggcggagcggcaggagggaagtcctccggcggcatggcgaatggccgcaccattttctcgaacttgtccatggtcaggcaggacccaacttcctgcagtctctcgggccccattatgggcaaggtgtgctcctggagcaaggaagaactttcactggttttgtcctctaggggactgagatcggcgccacgactgaacgtcatttcaatcctgaacctcttctcatcttccaaaggaacctctatgttttcaaacattctaagcacaatattactcatgtaatcaagctccctagttctatgtagacggtccaaagcactctggcagacaaggctttcctctccttgtagactttcgtccaaattgcagtaacgaaggacattcatcaatgagtgtatatgagattccgatgtgaagtaaagcctagtgcggacatggcgcccaggtgtccttacattggcatacttgggatctaatcggtatttagtttctctatcatcttcatcttcttggtccaatgacttctcactcgtagagctagatcttcttccatcctcatttctaacatgaaccttctgctggtgctctgcttcttttgttggtaggaatagagcttcgtcttcaataaattttggttcggcaacactgatagcttcttcacgagtgttgcgtagatcgattaggatttttcccaataaacggcgcgctatctttgagccgattttcagtttttgctttgggttgatcccatactcatttggaataacaccatcagcgagtatttgagcaactttgaatagctcttccaaacccttaagattgagatgagcattatgcaaaaggtcatacttgcaggaatcatatacatctgggatctgtgtaatgtcaaaacggtcctttctttcattgtataaatccctctcaagttttctccatctggcaaacatcaagaggaagctttcactaccacatggcaacccggcagcaatacgagccacatcaatagttgtctttccaagagcttttgcctggtcatattttgaaaatgtgctcgtcaacgcaagtctttcatctacaagttcgcaagcacgattacttgtgaagtcacttctttcgtcaacttggccatcttaggcaggagctgggaagcatttgcaggcaatcctgcaccatcaaccatccatggaaattccactggcccttctgtgttctttgctttctcacttgaaataataatctcatgcaatctagccttagcttcatccatctcggtgcttgcatcttctagtccatctagcatagatgagtctttacttactaaagataccagtatcggagtcaactgcccttccaaatcaagaaggccttttgcaaatgctgctgcagacatctgtacacgaccttcgtccgagctgtatatttttaaatcatgtctataagtgctatgcagacgaagcaaaccagttccttcacctggatatatgttatttctgaaaaatcttcccagctcctctgcctgttttctcccagcatgggtgagcacaccaccatatttcagaatcatcagggcttcaatcggtcgttcctcttcaccatcaccattacgctttggaacttttatccatttcaatggctttagctgcactttcctataaatgccagagaaatgtccaccctcctctaggactgctttgacttgacgaagtttctcgaggagctcaatatcatcagcatcactatcactctcccgaccagacctagttggtggtacaagttgtcttgtagcatccagcaagtcttcccggcaga

SEQ ID NO: 141632 - DNA, 611 bp, Zea mays
  Clone ID: MRT4577_60652C.1
ggagtagtcgccggtcttgtcttcaccactcaaccgcaatgcggcagcccggctgaaatgaatgggccagcagaggttaggcatgcgcatgcatctagccgccacgccgtatatgtcgccgtctgtaaagcagtcagtcatcgcacgcatgcatgcatgactatggaatggagaagtcgtgcagggttctggtgttagtcgccgtatatgctcgagagattagggaggtgctggcatttttctctctcttcaagatgttctattgaagatttcgcctacaccgttgtgagaaaaaggttagcaagttgatcctttcaccttgtatggtgacatcttgctgtgggcagtgtcatttcctccttctgttttatcgttattatgtagcgacaacaacgacgacgaccaccatcatcagtgagaaacctcttgcctctgtctaactcaaaaaaaaaaaaaaaaaaaaaaaaaaaaaaaaaaaaaaaaaaaaaaaaaaaaaaaaacactaaaacaccaaataaaaaaacccttaaaaaaagaaaaaattgcccactaaaaaaaaaaaaggggccccgcagcccccagttttgaacccctttagggggggaaattcg

SEQ ID NO: 141633 - DNA, 479 bp, Zea mays
  Clone ID: MRT4577_60653C.1
cccacgcgtccgaaattatccagcgagggacgccagcattgttgcgttgccctgctccctggcatgcccgaggaggggcggactgtcgcgccataaacagacagaaggagagcgcgatggagcgtgacgtgcgccggataggcacgacgctgccctccctagagaccatgacgagcctgctcatactcgtgaacgttgagagcaccgaccacgatgacgatgcgaggactacgatccaggacatggcaccgatgccggcacaacagtagccgcggacgtcggccggctctcagttcactgactgccggatatgatcatacgacgacattcatatggagagcacactggacctggtgctgcgtcaccaaagtggacagtagatcatgatgcggagaagctagaaacgggcccgcttgctaggtcacagctctgtaatcagaagaacgcacaagaatctgcggctcttgtcaagaggacag

SEQ ID NO: 141634 - DNA, 197 bp, Zea mays
  Clone ID: MRT4577_60654C.1
cctgtatagcggacagcgttcgtccttttttttttttttttataaactactgagcttggggttttttttttcacggtaagcgggcaaggatcatgcccatccattctgtttgaatatgaatagggggtacaggccgtaccaaaatggatcaagcgcgagcacccatatagacatggctggcttgcttattataccaa

SEQ ID NO: 141635 - DNA, 492 bp, Zea mays
  Clone ID: MRT4577_60655C.1
aatctcaataatgaggtaaggatacctgttagtcacactttaaacaaacatgtgatttagatttacaaaacaggatgctgctcatgtggaacatgagagaatccgaatctaataatcaataacctgtaagaaggaacctagagaacctttaaattacagtatagtaaaccactacttacttactatgtaactatgaatagtaataatacaagtactttgtcaccttaagatcactaaagaaagaaaagcttttgggaaaactaaattcacaagacctacggactacggtgtgggtgagttcagaaaagaacccaaagagaaaactaagtggttaatcggtggagccctgatctccatagccataagggtttttgctagcccaattccattgatcacggcacatctcatcaatgccatattttgccttccatttaagctctctttccgctttctttgttgatgcataaacaatttcagcatcaccaggtctac

SEQ ID NO: 141636 - DNA, 1558 bp, Zea mays
  Clone ID: MRT4577_60656C.1
gccggccgccctaccagcttccaccctccaaatcgaaaccagattgaaatcctaggggctagggttaccctccatcccatcgtccgatccgatccgatcccgccgctcatccatgtcccaccacgacggaagcaagccataccagccgcgccgggggcccgagcggcacccgcagccagcggatgggatcgccgccccgcctcccgccgccgttgccccgtcggtggagcacctcgtggcggccgccgccgaggcggaggcattgaaccgcttcgccgcggaacaacagcagcagctgcaggggcacgagcaggaggttggggaggaagaggaggaggaggacgagcaggaagacgagatggaggaggaggacgaggatgagcacgaaggggcgcacggcggcatcggtggggagcacgttcccatggacgcggatgctgctgccgcggcggcggcggccgcagtctcgcagatggacccgcactcggcgttggtggctgggaccgtgccacccatggcgaccaaccagctcaccctctcgttccagggcgaggtctatgtgttcgactccgtctcccctgataaggtccaagccgtgcttttgctgcttggaggcagggagctgagcagcctgggcggagcgtcgtcctctgcaccttatagtaagaggttgaattatccacatcgggtggcatctctgatgagatttagggaaaagcggaaggagcggaactttgataagaagatccgatactctgtccggaaggaagttgcacttaggatgcagcgtaatcgaggtcaatttacatcttcaaaaccaaagcctgatgaaatagcagcatcagaaatggcatccgcagatggctccccgaattgggcattagttgaaggccgacctccatctgctgccgaatgtcatcactgtggtactaatgcaacagctacaccaatgatgcgtcgcggacctgatggaccaagaacattatgcaatgcatgtggcctcatgtgggcaaataagggtctcctgagggacgtaacaaaatctcctgtacctctccaagctacgcaatcagctccgcatctagatggtggtaatggaagcgccatgtctgcgcctggctctgagctagagaatgctgcagcagccatgaccaatggccacgagtcatcgagtagtggtgtttaatccagcgatggggtaaaagccacgaggagcatcatcccggagtgatctctgcagtaggcggtcagctgctgtactataattgagttggaggctgcttagatatggaatccttccatttaccttggtgccctgtagttaagagctatgacagtgctttatcccgtgtcatgtttgcagccgctgcgtctataacgaagctatttcttgtcttgaggcgtgactgttaagaaccgttgaagtccactcagttttaaccgtgcaaaaaacaaacgaaaaaaggaggaaaaaaaaaaaaaaaaaaaaaaaaaaaaagggcgcttatcttctgggcgccttgtgttttggttgcggtcgcgtgggcggtcgcgtggg

SEQ ID NO: 141637 - DNA, 543 bp, Zea mays
  Clone ID: MRT4577_60657C.1
ccctgatggcgtcgcctcctcccgtggcgaccgcggggcctcacagcgtcttcgtgtacggcacgctgatggaagaggaggtggtgcgtgtgctcctgggccgcgccccgccctcctcctcccccgcgctcctccccgaccaccgcaggttcagcctcaggggccgcgtctacccggccatcctccccgcccgcgcccacgcggtgagcggaaaggttatccaggggctcaccgacagggaactccatgtgttcgacatgttcgaggacgaggagtatgtgaagacaaccgtcgaggtctcactgactgagtggaggaaggtgcatttgaagtactaccttgagatgactcgggaattcatgctggaactcgggcaattttaaacacttctctggtttgtaactacacaggagtcagaggatccttgcaaaactaccatagaataatttgtgtcttgtgctcgacgagttcttgctactatgctgctttgggaacatacacatgttatttgagccatttagtcatttggatgtgaacaaatca

SEQ ID NO: 141638 - DNA, 358 bp, Zea mays
  Clone ID: MRT4577_60658C.1
tgtcgcaacatttgaattagtcgcaacatgggaaattgaaaaaaaaaactctcatgtgaaaaaaaaaaaaaaaaaaaaaaaaaaaaaaaaaaaaaaaaaaaaaaaaaaaaaaaaaaaaaaaaaaaaaaaaaaaatgggccccccatataaaaaaccccccctttacctaacaccttcatcaaaaaaaaatctacttaaatagcggcacctaagttaaaatcaccggccaccttatcacatccaactgacttggaaaaacacactggtttcccaaaattaaatcctcttgcaaaaaaatccctatctgccaggtgtgacattaacaaaaaggccccaacctatcaccctttacaaacat

SEQ ID NO: 141639 - DNA, 743 bp, Zea mays
  unsure (1)..(743): unsure at all n locations
  Clone ID: MRT4577_60659C.1
ccggccggaggccacggctgggcgacaccctgatggcgtcgcctcctcccgtggcgaccgcggggcctcacagcgtcttcgtgtacggcacgctgatggaagaggaggtggtgcgtgtgctcctgggccgcgccccgccctcctcctcccccgcgctcctccccgaccaccgcaggttcagcctcaggggccgcgtctacccggccatcctccccgcccgcgcccacgcggtgagcggaaaggttatccaggggctcaccgacagggaactccatgtgttcgacatgttcgaggacgaggagtatgtgaagacaaccgtcgaggtctcactgactgatgcatcggagaaatcactcgcctacgcctacatatggggtaaccagggtgatcctgacctctacggggaatgggattttgaggtctgactgaatgccatcgtatgatgctcgtgtttctgtccgtatgttgcttcgatttgtattgatgtctcggcttctggtctttaggagtggaggaaggtgcatttgaagtactaccttgagatgactcgggaattcatgctggaactcgggcaattttaaacacttctctggtttgtaactacacaggagtcagaggatccttgcaaaactaccatagaataatttgtgtcttgtgctcgacgagttcttgctactatgctgctttgngaacatacacatgttatttgagccattcaagaaaaaaaaaaaaaaaaagcggcc

SEQ ID NO: 141640 - DNA, 288 bp, Zea mays
  Clone ID: MRT4577_6065C.1
aaaccagggaagcaggcgtccgaaaatttaaagaaaaaaggggggaaccaaaaaaaaaccataattgaaggccggggctaaaaaggaaaagcccccggttccttaaacacacacaaaaacaaccagggggttgttaacacgggaagttcccccctgaaaaaaaaaaacccatgggaatcggggaaaaaccaccccccgccaaaaaacctggttccagcgaagttaagggggacgggcttttcccccaacccctttttgggggccttaaaagggggcaagccgaaaccc

SEQ ID NO: 141641 - DNA, 861 bp, Zea mays
  Clone ID: MRT4577_60660C.1
gtgtaactattggtcccttcatccccgtctttcgcccctccccccgtcacgaaccctagccccggcggcgacaacggccgatctggaggacgcgacagcccgaccccctgtccattcggcctctagggcgggcgaagcagtgaagaaacattgtcgtcgttaatcttcaccagtgtcaaggaaaggcggcaaaggttctgcaaagcgagggaaatccatagcaacaccgcagcgccagccaagcgacatcctgccacgcgttcgcgtgcaagctacaatatcgaacactccgtaagataccctcaaatggctatcaaggagatggaagacctcgctacgaccattcggcaactggtgccgaatcctactgacgaacgagttcagtgccaccatgtgccagagctccttgcttagatcctttacttggctgattggatccataaggtctctattcagtgcaccaccattcttgccaagtacaaccccaaccctccagacacaggcgtcacaatcgaagacgaatgagttgtcgctgatatggaactaacgccaacaccgtcacctaaatccgttgaagaactgtacgaagagcggagcatgaactacgacagcgatcaggctagaggcatcagctagctaggtttttagttaaatgtagtcggttcatggtagtattttgtcagtcatggatgtagtgaagtaccctttcgagttatttgtaggggatccatgcgaactatgtgtctgttcttggcttttggaataaaaatgtgcctctgtcgttgctatgtgctgaaccttcgcacttggttcagaattgcatggggacactttgacgaaaaaaaaaaaaaaaagggccct

SEQ ID NO: 141642 - DNA, 897 bp, Zea mays
  Clone ID: MRT4577_60661C.1
gagataaatactatttattgtaaatctgatcaaaattgagctagtttgacgcgtacggattccataccttctcattccggagggagtattaaggttcagaagttcggaccaataatgcgaggtaaaccatggccagtcgacgatggtgtagatagggttccagtggccgcttcgcttttttttttttttttttgttcacatccaaatgactaaatggctcaaataacatgtgtatgttcccaaagcagcatagtagcaagaactcgtcgagcacaagacacaaattattctatggtagttttgcaaggatcctctgactcctgtgtagttacaaaccagagaagtgtttaaaattgcccgagttccagcatgaattcccgagtcatctcaaggtagtacttcaaatgcaccttcctccactcctcaaaatcccattccccgtagaggtcaggatcaccctggttaccccatatgtaggcgtaggcgagtgatttctccgatgcatcagtcagtgagacctcgacggttgtcttcacatactcctcgtcctcgaacatgtcgaacacatggagttccctgtcggtgagcccctggataacctttccgctcaccgcgtgggcgcgggcggggaggatggccgggtagacgcggcccctgaggctgaacctgcggtggtcggggaggagcgcgggggaggaggagggcggggcgcggcccaggagcacacgcaccacctcctcttccatcagcgtgccgtacacgaagacgctgtgaggccccgcggtcgccacgggaggaggcgacgccatcagggtgtcgcccagccgtggcctgcagaagcggagcggggcgatcacaggaggaagatgacgacggtgacagcgacctcgtgcgacc

SEQ ID NO: 141643 - DNA, 437 bp, Zea mays
  unsure (1)..(437): unsure at all n locations
  Clone ID: MRT4577_60662C.1
tagaagagctacgacgccggatcgcacgcgtacgatagacgtctgggactctctatagagcgccaccacaccgcctcgcgttagagaagcgtgtctctcgttcaagaatgaggggatggaacaataaagtcgacatacagggggtgtcggaactctcctatccgtatccaagggctcggctgctnnngctgtgctttgnngtggtgtctgaccaacccatctgtgattgcttcctgggtacccacgtgtgcctgtatttcttggtgctgctttctggcacccaactgtatctcaaatgtgtctganntattgtaggnngccggatgagtctggtctttacgctnngttgagttcttctcacnatgatgtggagagtagacctcttgtcaacattggcataagtaagagggactcaatgggtgatccctcaattattg

SEQ ID NO: 141644 - DNA, 144 bp, Zea mays
  Clone ID: MRT4577_60663C.1
atttcggcacgaggtgactgctgattggcggaagaatagcagtgcgaaagggcggtgaacggcgctagggactctttgctccgttgcggaggatgacgctggcgctgtggttgagattggtgctggggacggtgatgagacaaa

SEQ ID NO: 141645 - DNA, 172 bp, Zea mays
  Clone ID: MRT4577_60664C.1
tcgcttatttaatgcgcgtggcatgggcatgtgtggacaaaccaaaattgagatgaggggtgtgattacgtcacatagttgatcgttgatgaccaatacccgaaaaccttggccactagagtgatggcccctgatcatggcatgctaggcggggggaggggattctacctta

SEQ ID NO: 141646 - DNA, 402 bp, Zea mays
  Clone ID: MRT4577_60665C.1
gaggctgatcgcccggggagccagacagaacagagaggagagagaggagaccgaccctccctccctgcctcccctctgttctagctcctcctcctctgtttccggtctcccggtcccgggctggtccgccgcctccgtggagccgtaagcagctgcttggtccgccgttccgaggcggccagcggggcggcagacatggggtgcgcggcgtcgaggcacggggcggtgtcctctccgccgtacgatgtgtcgtcgtcgtgctcctacaacatgtcccgcagcgcgtcggcgtcggcggacctaggctcgtcgtccgcgctgtcgatatggagccggccagtgcggctggaggcgttcgacgaggaggacgacgagcggtggtgggtggtcgcgagggctccg

SEQ ID NO: 141647 - DNA, 1156 bp, Zea mays
  Clone ID: MRT4577_60666C.1
aattcggcacgagggccgcgcacgcgccgcgcgaggcccgtcttcgttcccccaccgctaatctcgccgcggcatccatggcgccgccctcgccctccccccacatgtccacgccggcgccccctccctcgcgccccacctcaatctcctccattgcgcgcccgagaacgcgcaaatcccccattcccgcgcctctccctcgcgcctcgatggaatcgccacggcatccatggtagggtcctcaggatccacctccaccgcgtcgccacagtccgcaggggccgagggtgccccgacggtggggacctagactgtggtcaggtgcacgcgtattcaagcaggcgctcttgcttttcgtccacaacaagttctccatgtgccctgggcacgcgacacatgttcggggtggtgggcattaccgtcacctccctcacgtcccgtgccgccgcggccgaggtctgcttcctcgccttccgcaacgagcagtccgcggggtacgccgccgcctacgacttcctgacgggctccccgggcgccctcctcatcgtctccggcccaagatacatccacgggctcgccggcctctcccacgccaccgccaacgcctggtcgctcctcatgagctccggatcctgcgaccaggctgacgccggcaggggcgacttccaggagctcgaccagatcgctgccaccaagcccttcgccaagctcgccgtcaaggcaacaaccatcctcaacgtatctaggtcttccctgccaacaagaacaaatggcacgcccgccgtgccgatttgaggtggttttggaggtgaggaggggtacgatttcggtgaccctaggccttgcgggtccggtggatggaagcggtggagctgccattaccagctaaggtggagttcaggaagccaaggtaacgacagcaaaaatatctcttctggcgtgtaaccgtgtattgtgaagttgccataggttcagcgagaaacactgaagaacttactgttctggctatggttgctgaaaagtttggtcatcagcagttggatttgttaccagttggtgtatctcttgtgcttcgccatatgagtctactctctattctatgttttgatatggtgcagttgaatttttctagaaaaaaaaaaaaaaaaaagcggcc

SEQ ID NO: 141648 - DNA, 2741 bp, Zea mays
  Clone ID: MRT4577_60667C.1
gcgcgacggtggagacctagactgtggtcaggtgcacgcgtattcaagcaggcgctctgagcttttcgtccacaacaagttgtccatgtgccctggccgggtgagggggagaaaggcgacccttctctcccccggccgggcgtcgagcagagacgaagtcggcaggacgtcttttcggcggacttcaccgcatacaccgctgcccgcgcgcagccgcgcaggtgcatctgcgccgccgccggcccgccgcacccgcacgtctccttatacccatccggccatctacacacggcagtccacgctcgtggcaccgcactcactccgaatcctgaagcaacaaacaccagaagcgcaccaactccccaaccaccggagaccgcaccccagcaaaggatggcatctgactccacggccgccgtgacggtggacggcagcgcgcttgcggggcgcgcgctggccgcggcgggcacgcggcacatgttcggggtggtgggcatccccgtcacctccctcgcgtcccgtgccgccgcggccggggtccgcttcctcgctttccgcaacgagcagtccgcggggtacgccgccgccgcctacggcttcctcacgggctccccgggcgccctactcaccgtctccggcccaggatgcgtccacgggctcgcgggcctctcccacgccaccgccaacgcctggccgctcctcatgatctccggatcctgcgatcaggctgacgccggcaggggcgacttccaggagctcgaccagatcgccgccactaagcccttcgccaagctcgccgtcaaggcaacaaccatcgccgacatcccgcgcctcgtcttccaggccctcgccgccgccgtgtccggccgtcccggagggtgctacctcgatatcccgtccgacgtcctccaccaaaccctccctgaatccgaggccgcggctctcatagcagcagcagccgccgattcggccgcatccgatccttccccgtcaatgcacaagtctcttgacgagggaatcgccaaagctgcggacctgctccggtgtgcggagcggcctctggttgtgattgggaagggtgcggcgtatgcgcgcgcggaggaagcgattcggaagctggtggacaccacgggcatccccttcctcccgacgccgatggggaaaggggtcgtgcctgactcgcatccactctccgccacggcggcacgctcactcgccatcgggcagtgtgatgtggctctggtcatcggtgctaggcttaattggttgcttcactttggcgagccacccaagtggtccaaggatgtcaagttcattcttgttgacgtctccgaggaggagattgagctccggaagccacacgtggggattgttggggacgcgaagagagtaactgagctgatcaaccgggagatcaaggacaatccattctgcttggcaaggtcgcacccatgggtcgaagcgatcaccaagaaggccaatgacaatgttcttaagatggaggcgcagctagcgaaggatgttgtgccattcaatttcatgacaccattgcggatcatccgggatgcaatccttgccgaggggagtcctgctccagtagtggtatcagaaggggcaaataccatggatgttggcagggctgtacttgtgcagaatgaaccaaggacaagactggatgcagggacatgggggacgatgggggttggattggggtactgtattgcggctgcagcagctgaacctgaacgactcgtggttgctgtggagggcgattctggattcggcttcagtgcaatggaggttgagacgttggtgaggtaccagctgcctgttgttgtaatcgttttcaacaacaacggtgtctacggcggggaccggagaagccctgacgagataaccggaccctacaaagatgacccagccccaacctcatttgttccggcagcagggtaccataagatgatggaggcttttggagggaaaggctatcttgtggagacaccagacgagctcaaatctgccctttcagaatcgttccgcgccaggaaaccagcggtgattaatgttatcattgatccttacgccggcgcagagagcggtcgaatgcagcacaagaactgaaggcgcttgcttggcttttgtaccataccatagcaggatgcagatgcgacttgatacaaataagcagcaaccgtcaatcaatccttttgtttcttttttacgacctcgcttcgttgttcgtggtacagacgtggggcgcttttaattggaagtcccatttgaaggcatgtgaatgtgttatgattatctaaatgccacgatgcaaactttaaaggcgtgttgatgaggatgtgtggaaaacctgtgcccatatatgagcctgtataattatttctcaaagtaataaagtcagcgttttagggcctgtttggaagcaacaagaacaaatggcacgccccccgtgccgattttaggtggttttggaggtgaggaggggtacgatttcggtgaccctaggccttgcgggtccggtggatggaaacggtggagctgccattaccagctaaggtggagttcaggaagccaaggtaacgccagcaaaaatatctcttctggcgtgtaaccgtgtattgtgaagttgccataggttcagcgagaaacactgaagaacttactgttctggctatggttgctgaaaagtttggtcatcaccagttggatttgttaccagttggtgtatc

SEQ ID NO: 141649 - DNA, 592 bp, Zea mays
  unsure (1)..(592): unsure at all n locations
  Clone ID: MRT4577_60668C.1
gccggccggtccgagaatagaaaanaattaatcccgcgtgggatactggttgggggaaggtccttggccaatgaaatctatgtttggatagttttttatgttatggttgttagaagccgaagaaaaaaaactctttgaagagctttggagcacacagacaagccaaagatgcatgaaaaggaagataaaggatttcggctccatagtaaaggatttcggagaagagaagattaagggagcgtctacaaagagaagacgtgcccaacacgcctatgcaacaatatgacattgttgtactctcctaaatattaaagcaactttgtaatagggagggatagaaattttattttacatggagatataactgagcccgaccttataaataaatgaacggtaccaccattctgaagggctggccatttgtagctttcttgtccatggcatttctgtgattagagagtttcagaatttattgatatgttgaaactattgtattaagcatgtgctttcctagcgtttaatctttcaaatactctttgtcactgatgttttaagttgatacacataaaaaaaaaaaaaaaaaaggccccta

SEQ ID NO: 141650 - DNA, 165 bp, Zea mays
  Clone ID: MRT4577_60669C.1
atattatcagatatagagagcataggcgatcatgaacgaggacggaaggagatgcgcgatgagctctttcccatactgcggaaccgtgcaactcatgcagctccagcgacggtcatggccgcccgatctccgcgcggagccgtgccgaatggatccctcgccact

SEQ ID NO: 141651 - DNA, 484 bp, Zea mays
  unsure (1)..(484): unsure at all n locations
  Clone ID: MRT4577_6066C.1
gccaagcccgccacccgcaccgccaagcccggcgcggcnccgaagccgaagccagccgccggcaagccgaaggcggccacccgaggngccncccacccgccnnacnncgaggaaagaaagaggcnancacggcgcnaaaggagaggaccggnnccagcangcaagcgaacgccaagnangngggggacaagcacggcgcgncncngccggccaaccncaagaagaagcngnccanccagcnccgngggnccgcagccaagggcaagcgcgngaaggncaaggcnnngnacaagcncncggacgccgncaagaaggcaacccccaagaccaaggcnaagccggnaaaggccgacgangccaagaccaccgnccccaagccggccaaggccgacgacgncaagncaaagaaggcagngacngccaagacaaagaaggccgcngnngcnnggaccaagcgcaaagngcccgagaagaaggacgcggc

SEQ ID NO: 141652 - DNA, 401 bp, Zea mays
  Clone ID: MRT4577_60670C.1
attttcttttttggaagaaacggaattactttcttgattaagcagaccttcctatagacacaacgcatgacattagcacaactgtggggaaccattacaactggttggcaaattattaggaaaacgagccactttatattgtctaaaacccaaatggtggcaagtggcatccttattgtatatctagattgaatcattgaaggagtgggagacaataaacttaacaatgtactgccagtcaattttggctgatttgtctgacttcatgttacattaatcaccctaatgtcgtgtaataagctaaaaatgatgagctaaatcataataacttgttgattgagctatgcttcctttttttcctactgctttatggcttacttgtctctctggatgacagaaca

SEQ ID NO: 141653 - DNA, 495 bp, Zea mays
  Clone ID: MRT4577_60671C.1
atgctttccttgcagaacctacgcccggagcccccctgacctggtcaggagcacctccgcagctgccgctccggagtccgctggtcgcaggccgctgaccctcctgagatgccaggtcgattaggagttgatcttcttgactccttggatttcttcccacactacattgctacacgcactacccactcttgcctcccagatctcctgcatcgccgccagctatacatcacttctcctccgatagacggcccacaccgaaaactgccacgagacgacgatgagatcatccatttctgaccactaggacctaagagactcttctggagaacccttctatgacatccgctaaggcaatgtccttgatgtctataaaaacctcaaagcttgtcaaagcccttgcaacacatcgtgactacatactgcaagctatggctacgaaagctactcttctgcgtagacaaacctgctcaatatcttgctgcacataatgcaacg

SEQ ID NO: 141654 - DNA, 816 bp, Zea mays
  unsure (1)..(816): unsure at all n locations
  Clone ID: MRT4577_60672C.1
tgtggggaaggggaggcttggtaggttgagtgttttaggctggttgctggtgagtagtaatgcgatgggacgggtagtgtaatcatatcctttgcgctgttgnntggagtcccaatgggtgtagtgttgcatgaancggcgtccnccgcctgtcgtgtcttcgggtgggtggaagtgcttattgaatgccttgcgactgttcagtgaccgtggttagaagtgagcggttgcctttcccttctataaataacccttttgcttctctggtttcttcgcatctcttcgttgctccttactgcctcttcccctttttctctcccaaagctctcaaccatgggcaagaacaataagcgtaagcgtgagccgactcctccatcagaggagtttggcgactcggagtactcggaggaggagttctcctccgagcccgaggggtctccggctcccgtctctcccccggcgtcgtccgatgactcggacgactcccaggggatagctgcggaggtctggacatacatccgggccgtcgagcgcgccgggctcgaaggctcggatgagtcggagtactcctcggatgaggaggactcggacggcggcgaggagggtgaagacgacgacgacgacgacgacgacgatgacgacgacggcggcagcagtggcgggggcgacggtgacggcagaggcggcaccaagggcggcagcggcggcagcaccaagggcggcggcggtggcagcagggacagcaccaagggcagcagcaggggcagcaccaaaggcggcggcggcggcaggggcagaggcagggccagtggctag

SEQ ID NO: 141655 - DNA, 280 bp, Zea mays
  Clone ID: MRT4577_60673C.1
agggggatggggaatttttatataggaagcatatctccacattaagaactgaacaaaatccatttttacacaaaaacacgaaagcaggacctttttttacgccatatataaaacttattaaattgggcccacaagctaaaacaaaaatcctccaattgaaggtgctggataattctaataaacaatacaacacctaaatgacctctaaaccctataaaaaatcctactccttttaaataactctataaacacccatatgattaggaatatattctttcat

SEQ ID NO: 141656 - DNA, 110 bp, Zea mays
  Clone ID: MRT4577_60674C.1
cggctcgaggagactgttgcgtccacctttgatgagtttgatgatgtggcagaaaaactcttttcaagtcggaacatgacacacgtttctcttgggaagaagttgaagat

SEQ ID NO: 141657 - DNA, 306 bp, Zea mays
  Clone ID: MRT4577_60675C.1
tcggcgcgtgcaaagggttgctcgaatgtatctatgtacgtttaggaatcacagcgtactatggttgacgaaggtgtatgttttcgcacctttggcagcgtcagttgatttgtttagcgctcaaaaatcggaacacacaaagggggttctccgttctttaaaaaactgggccagtcgtctacacacacatcattaatgtggctttgcttggtcattgtatccatggcccgggagtatgcatgtgctgtggctacagctggggggacacttgtcaggcccatctatttataagaaaagaaatataag

SEQ ID NO: 141658 - DNA, 683 bp, Zea mays
  unsure (1)..(683): unsure at all n locations
  Clone ID: MRT4577_60676C.1
ctcgaggccggccgggagcggctgttcctcatcgatttcaaggatttcctgaaccagatccttcatcatggtgtctattcgtaccttcctcactggtggtctccttgccattggcgctttggcatcttcttctcccttcactctcgagaagcgtgccatcaaccctggccccgtcaagggtgacaccttcatccacgacccaaccgtcgtcaagaaacccgatggcacctacctcgccgccttcaccgccaacggcgtcggtctgaagacctccaccgaccgcaccacctgggaaggacgtcggcgccgccttccccaacggcgcctcctggacaaccacctacacaaagggcgacaagaacctctgggcccccgacctttcctaccacaacggccagtactacatgtactactccgcctccagcttcggcacctcgcgctcggcaatcttcctcgcaaccagcaaaaccggtgcctccggctcctggaccaacctcggnctcgtgatcgagtccttcgccaacagcaactggaacgncatcgaccctaacctctacgtcgcttccgacggnaagtggtggntcgctttcggctctttctggggcggnctcaagctcgncgagctgagnccctcgaccggnnagnccatnancgcgaacaanctgatctccatcgccgcgcgc

SEQ ID NO: 141659 - DNA, 233 bp, Zea mays
  Clone ID: MRT4577_60677C.1
attcggctcgaggttcgaccggcaacttttttgctgcagggctcgtggagagtacctgcgggggaggttctaatgctgggtgccttttcagcagctccatcaaagatggaatagtgcgacgccgtgcgtaccagatcagtgcgctgcccatgattatagaggctgccataaaggcttcttctaatagactggagggtctcccacttggaagatttgtagatggaacacgcatt

SEQ ID NO: 141660 - DNA, 621 bp, Zea mays
  Clone ID: MRT4577_60678C.1
ccctcacccaactccgtccctctctcccagctcagatagatctttcccccgtcctccctcgccttcgccttcgccttcagcggaaggagattaccaccaccacagcgggaccaccctgatcctctttccctctatggctatgaccgatactgtcgagctcaaggtggccatggactgctagggctgagctgtagatggcaagctggtcctgatgaaaatggaaggcgcctactactacgacgtaaagatcatgaaacacaacgtcaccgtgaatgtgactgctgcacctgacgtcgacctggaaactgataccgagactgacaataagacttcgtactgtgaggctgaggccaggacaagcgactccgccgcagctgccgccgccagcgactgacaaggaccatgatcaggaagtgaccgggaaggagaaaaagaagagaatgtgaatgtattgaacttgtaactgatacaagtaattggatactgctagctcgacctgtaccagttacaattgctatactgggactgtgacgtactcgtaaggatatgaagatgcaataccagtatgagaatgatatatgtgtccagaaccataaggtaaggctttgacgtagcgctatc

SEQ ID NO: 141661 - DNA, 595 bp, Zea mays
  Clone ID: MRT4577_60679C.1
gaagccaaactttttttgataacagggagacatcattctggacttacattaaccagagtaacgtcttaggcaaaggtaagctaggaagcgaaacggctaaaatattcaaatcgcgtaactctgaacaaaacactgctaatggaaacctagagccctagaccttcaactaagatgtagcaaccacgacatagtcgtccagccaaccacgaacacacagccacagcgtatattattacagatgctgggaaacagcactgaatcgccaaccctttagccacagtatcaacaacctgaggaaaagaagactgacaacagtgacacgtagtaagcagcttgacagcaaccagatcaacaaatacgcctgtccaacggcgccagcccaagtcacgactgaagatttctttagccatttttttgatgcaccaacttcctgccgccagcttctctctttccctctcttttgtgtaagaaggcgtccttgtactcggctctggatatgactttctcagtgaccttgatatctccattggtttccaatctgctgctctttctagtcccttccactagttcaatcatcttccctttgcctttttta

SEQ ID NO: 141662 - DNA, 425 bp, Zea mays
  Clone ID: MRT4577_6067C.1
gggcaacaaaacaaaaaattttttttataagattttggcgtgcatacccttgggccagaaacaacccccaactggagtttttgaaaacccttttgaattttccagggtttactaatttagcagattaaaacatgggcaaaaccaaaatgccaggaactggatttccagtttccatgatttgccctaaaaggggcaagggatcttacttgcattagctaacagttttgcccttttttggcctgcaaataataggatttttgcactagaggacataaattttctttgtacttggggtttgccatcacgaaggggtccccaataaccaaaacaaagatgaagttgcccaggaaattggcaaaaaagcccaggttttgattgtaaaaaattttgcccgccgggccgccttggcttttttttgctttgcc

SEQ ID NO: 141663 - DNA, 507 bp, Zea mays
  Clone ID: MRT4577_60680C.1
ccgggcctgcagccgctccctccatggcgtccttcgtcgtgcaccaccacggttcgccgctggacagggagggcaaggtcaagatgtccgccctggccctgaggagtagcctcaggccgtgcgaggccgccgaggaggtcggggccgggcaggcgtggtgcagaggcgcggacatgggcatcgccgcctttgccgacgagttctccgtggaggacttgctggacctcgaggacctctgcgaggttgacaaggactgcgccgagctgggcgacacggtgccagcggcggagtctgtgcaggaaggggacaaggtgtccagtgactcccacgggtcgtcggtgctgtcctacgagctcatgacgctcccggttccgcacccgatgattgacctcccgttgccggcccatgacgccgaggagctggagtgggtgtcccgtatcatggacgactcgctcgccgagctcccgccgccaccgaagctacccgcggcgccgttgggagctgcgc

SEQ ID NO: 141664 - DNA, 357 bp, Zea mays
  Clone ID: MRT4577_60681C.1
atcggctaaaatcaactaaatcagacctcagataaatttatccgatttcgaatcgagtcaaactatgtcgcaagtactgtcgaccctttagttatcactgaaaattctcattccgaaatatctacaattttcattattaaaaagaatgggaagagaaaattaaaaacaaaaatctgctcatgtcaatctccttctctccctgatttttcttctggcgttcctatcttctcagttctcacacgccgcttttctgttggtcctatcttcaatcgccgttcgctggagcttgctgctagttcgtggcgctcgctgctccagccgcccgtggctcttgattttttttccgccatactcatc

SEQ ID NO: 141665 - DNA, 454 bp, Zea mays
  Clone ID: MRT4577_60682C.1
ggacaggggaacaaacaggcatttttattcaaaacaaaggggcagccaattcccaccatactaggaaccaggccagggctgcccaaaaacccccaaacaggggaaaaaaaacgagaaggaccccaagttttgggaaaccaagtccccaaaaccccaaaacccaacaaaaaaggcgaatgggggggaaacaaaacaaaaggcaggcgagggttccccggcccgggcttttttttttttttttttccccggccaaaacaaaggacaagggaacccggcttgccaggctacgggacttaagggggaaaaaaaactcgaagaaacggggggtcccccccccccccagggggctaacgtccttccaaaacccgaacaccccggggaggggaaaaaacccctgggagaaaagctcccagggggccctccaaaagaatctcgggggcccgccctgggaaaa

SEQ ID NO: 141666 - DNA, 370 bp, Zea mays
  Clone ID: MRT4577_60683C.1
agaggatcacaaattcttccttggagggtgcattacaacacattcaaaaaatgctctcatgccaaaatttgagtacccattaaggtttctcacacatgataaaggcagatgtttgaaagcacaacacattaaaaaaacatgaaccccacgagcaagagaattagcagtgggcgtcttcaaaagattggcatccgttcaactaatcactctgtcgcttgttcacacttttgtgccatgctcgcctctttcaccttgtgcattgtctcacttaattctcgactgaagatgttgtagctattcaccactttgaggtctgcaggtctcagctcactttgagaggctagcagatttgcttacttcagatattttg

SEQ ID NO: 141667 - DNA, 372 bp, Zea mays
  Clone ID: MRT4577_60684C.1
tcgacccacgcgtacgcggacgcgtgggcggactcttgggacgcgtttctaggaggtttcagtttgcacaaccctgcggatacctggtgcaaggatgcatataacctgcttcagaacttggacataaggtgacttctgcgcatggatattctattagatacaatcaacctttccaaaaaagtgttcagagcatgttaagagaatcaaccttacatccagaaaggctatgctgacaagaaatgttatgaaaagatcccaccgtctatcacggtgaacctttctgaaagctgatctgagacaaactcgatatgcgggcaacaaggaccggaggctctttcttccatgaccacgccatggtgtatgcgataaatg

SEQ ID NO: 141668 - DNA, 234 bp, Zea mays
  Clone ID: MRT4577_60685C.1
atctacaagcgtgtggctttattgttgatgctacatgttacagatttgactaatgggaatgctgagctaggaagctagctaacaagctcaatcattccccttagtcaaatctgtaacctgtagcatctacaagcgtgtggctttattgttgaaatcctgatgtttatcgttctctataaacacaaaactgaacaaataacctcgctgctatgaataaactcaggtgttcagtgt

SEQ ID NO: 141669 - DNA, 385 bp, Zea mays
  Clone ID: MRT4577_60686C.1
atcgagctccttggacttgtcctcacgttcaagcccttcacggcagcatgctttcttctttccaggtgaccagatggtgttctttcttctcaatgccatcgagctccttggacttgtcctcacgttcaagcccttcatggccgcaccagagtccagagcagcatgatgcagacgacgcagatggttcgtggatcactaatcgatcagaggtcgagcacacgtaaagatggcaacggtgaagattcgtcggattttgcatgccactccgaattcgccccgtccaatatttgtacccagtacaattctataccgtaccatgtgggtattctatacccgatggatatacatacccaataagaaaatatacaaatataacgaatatgaa

SEQ ID NO: 141670 - DNA, 1372 bp, Zea mays
  Clone ID: MRT4577_60687C.1
caccgctgcaggctatatagctagtctgcagagatgcttgggaggagcaggaggaggagaggcggggcctcgccatccaagtcgcaggaacccaccaacaccggcgcggccgtcactgctgacgccggccagggcgcggcgaccggcgcctcgcggtcgcagctcgtcacgcggctcgatgagtctgccacgacgaggctgcaacgcatgagccacaggctgagcactgctcgagcagcacatggaaacactggaggccgacgttgccaaggccagcacggactcgtacgagtagagtactcctaggtaggagatcggccgggacgaacgagcttgtcacgttccagcgtcgaattcagcatggctactccaccagccagtgctatctattgctcgggcggctaagtatataatttttagaaggatcatggatacatttcgtgtccgcagatagtaattgtttatctgtgaagactacgggcaacacagacttgctttggggctgactcgccggcttccgaaacacggaacggatcgggtgcttgacgacgcctttgcgccgtcgtaggggcgttggctgtcgtatattttgaagcttgttccccgaaagtcagacctgcaactgcaatgggttggggttccaacccaccagaccaatggaaaagaaaaagaaataagacccctccttttgttcatcgatgaaatttttaccattcgattattgaataaacatcagtaatccctgagatgaatatagatccgaaagaaagtgaagagtcttaaacaccacggatgtgtcatataaaacacttagaagcaaggtgcgtagtaataataaaagccagcaatgaagtgataatatcctctaagtaacatagaagatataagaatattggtgatttgggcaattgaattatcccatacatgtcaaatgcaagactggatttatttagtggtagagtccaaatctagtggcacaatccaaatcctgaagatttgtacaacataaaatttaaaaatctgctcagaaaaaaaattataagtatttaaacttcagtataggatttgaggcactgtctagaagatattgaatgcaatgtacttttctctccaagaaccatatacactaaaatgagttttatggtaatcatccgagagtgggtgttgtaaaacatatggagtctattttagaaggtgagagaatgaagaatactaatgctagtcctagtccatttgtatatggcctcttaccaaacttttaagccttggcaggactttattaggtgggagcttttattgtaatcatctctgtatttttctttcgtctactatgttgattacaagagctaaaaaaaaaaaaaaaaaagcggcc

SEQ ID NO: 141671 - DNA, 282 bp, Zea mays
  Clone ID: MRT4577_60688C.1
gttggagcaagcattgcagttctggaagcaagagtttatcaaaggaaagatggacccagacaagtttgataaaggttactcttacaatatccgacatagctttggaaaggaaggcaagaggacagactatacgccattcagttgcatgaagattatcctgaccaacccaccaagccagggggatttccatgggtgcccattccgtcacagtgatgcagagctgctgaagcagaagatgcagacctacaagatccctgcctcggggatcagccagattttgga

SEQ ID NO: 141672 - DNA, 207 bp, Zea mays
  Clone ID: MRT4577_60689C.1
ccagcctggaaaggagggagacaaagcgggcgaacggcgccaaccaggagcggaccgacccggccaaagggaagggcgggacggtgaggaaggcgacggagcagaacgagagacaagccagagcgcacaagccgcaagagaagcagaaacccgccaacgaaaaggagcactacgacacgacgggaccggagagctgggaggacacgc

SEQ ID NO: 141673 - DNA, 439 bp, Zea mays
  Clone ID: MRT4577_6068C.1
catgactaaaaaaacacacatcaatacgttaagtatttggttgataaaaatacttttatgggattttatgttgtttgataatagtcaccccactagattaaatttatttgatgcatgctctatgagtgtcttcatgattaaagcatgtgcccggcattggtgtagtgaggtttgggctaataatcatgttctcgctgctagcgggccaccactagttctcttgttaatgctcatttatttaatgaatgtagatacatgagtttagaatttgtcaacccttgactgataagtgttgttagtattgtttgtcatgaatttggtttgtttggtcaaagtggtgacgtggagcataggtttgaggtataaatgatgtgaagaatatgaattataggcagggtgtgatttgattaaaaatactctatctgctaagtcataaaat

SEQ ID NO: 141674 - DNA, 318 bp, Zea mays
  Clone ID: MRT4577_60690C.1
acaacaaccaaaaagagtacacactaacaacaggagcacggactacaaaaagacaccaaaaaagagaaagaagaaaacaaacaccaagcccaaaaaagaacaaacacaaacacaaaaaggggcggcccccacctgctggacttgtatacccgggaataaatcacgacccgggccatgcggctgcacaaggtttgcctaaacagagactgcttaacgctcggcttaatggtggacaactttgacccccgctacaaatggaagtgcggtcacaattatgcctacaatccgaccgcgagacttaaagcgcaaacccggggg

SEQ ID NO: 141675 - DNA, 114 bp, Zea mays
  Clone ID: MRT4577_60691C.1
ttcattaacgggcccaactagcaggccgacatggcacgcgctgccgagttccgcctatagcccttcaattagtccgagacgttcctctggacggcctacaccatgaagctcaac

SEQ ID NO: 141676 - DNA, 168 bp, Zea mays
  Clone ID: MRT4577_60692C.1
gcgggttctgggtttagaagtgttgcgaacggtgaaagcaggggtttttgttagggaagaagtattatacgttctgggaacagatttatttttttttgtgccaacataaacaagcttaaaggaattggcttccccaacattacacaatatgggggcaggtttccttgt

SEQ ID NO: 141677 - DNA, 774 bp, Zea mays
  Clone ID: MRT4577_60693C.1
acacagcaacgcgtatacaccaccgaaagcacaaggcatcagcccagacgccgacgccgcccaacccaagctctcgaactcgaagcgcccaccctctctgaccgcggcgccggcggcgagccgcggcggaggccggccgatggggtccaacgaggcggacaagccgctgcggcggatcggcgcgtcgttcgagcagctcgcggccgtcgcgaagcagcagcagccgcagcagcccgcgatggcggcgggggacttctcgcgcgcctgctccaacgtctccgtcctcttcggctgcctcggcatcgccttcaagttcgccgagatggactacgtcgccaaggttaatgatttactggaggcatccaagacgatttcaacattgccctccatggttgagcttgacattcagaagggcactgtcaggcaggcggggagccatacgaggaatctactgagggttaagcgtgggattgatatggtgaaagttctgtttgagcagatattggtcacagaaggcaactccctgaaggacgcagcgtcgaaggcttatgctcaggtgtttgctcctcaccatggctgggccataaggaaagcagttggtgctggaatgtatgccctcccttccaagtcgcagctcttgaagaaactgaatgaagatgaaaaatcggcaagggctcaaatgcagagtttcgtcaggtcgtctggaccagtaattctctacgtcgaagactcttccctccaagaattagggctagactggtgagcaagcctata

SEQ ID NO: 141678 - DNA, 377 bp, Zea mays
  Clone ID: MRT4577_60694C.1
gggggggggcggggataatttctcaatctttgttcctggggacaacatgcatgcgttttctttattatggagcacaagcatgaggcaccacatgttgggcttcatggggagccggggggaaattttcatccccagcgacgcgtcccacttggggagggggggtatccaaagggacctgagctccggggtgacctttgggggcccgagcaaggcggaaaaacccctaacaaatcggtcctggcgggcggggtcccaagaccggaacctttcccctggctgtttaaaagcgtgggccttgcgaaggggtgccttttccctcccccccggaaccggcctgggcggcagcggggggggccgcccccccctggcgaaggggc

SEQ ID NO: 141679 - DNA, 247 bp, Zea mays
  unsure (1)..(247): unsure at all n locations
  Clone ID: MRT4577_60695C.1
cagcgtccgnggagctggtctagagtnaaaacctaagtagggagttgatttatccgctgcagccatgagtaagatgcagtctgagtctgtcaaggatgccatctaccagattgttggggatgccaaggagaagaataggtagttcactgagactgtggaactaaaaattgttcttttataattatgaggcacagaaggacaagcatttaagtggatatgcaaagacgccccatatccctcaagtcca

SEQ ID NO: 141680 - DNA, 526 bp, Zea mays
  Clone ID: MRT4577_60696C.1
gcacaattaatatttactagtactttacaaaggagccttctaactacacgttatgacacataataattacaacaatggctttacaatacgaccggacaaagttctttaattgaaccatgcttccccgcataaaagggtactggccgtcatcatgacaacacgcacagctatcatacgtcacagtaccccttacaattcgagcaacaataaagtctagacaactgcctgtaaaccacgctactttggcatgggaatctctatggcccactagctggaaccctaatggtatatacccaatggccgactaacgactgatcccataagatacaaaggggatgccatgcgagccgctgagctcaaattacatgaacgccatagatacgctcagcttatattaagagccctgcaataagggactgaccttatctgacttatgcaacaaccctacttatattttaacaaatccaattaaacttgattgcaaagctatcatggtcctacttggatacattaagcagccctacaa

SEQ ID NO: 141681 - DNA, 1914 bp, Zea mays
  Clone ID: MRT4577_60697C.1
agtaggccctaaaaagcggggcacttcgtagccgcaagcattcttccttccttctccattccatcggtgaccatggattgaagacattgatcggcttctctggaggtgcgtgtgagcagctcggaggtcagccgccgagaagagctcataggcaatggcaaccgcaaggaaggatcctcagcaggttgataaagtcaacctgaaacccagcgagtctggcaaaggggtagtacggcgtgcaaggtctgtcccgacctctccggatcgcagatcgtccccatccccggccccagtctcagacaacgccagccgaccggcatcatcactcaacactcgcacgacctcgtcccggtccacaacaacatctagctcggcggcctcttcaagccacgggaagacgatgcgctccgcttcgtcgtccgtgggtggtgcaagtgcaagcgcaaggcagacaaacgcggcgagaaggagagcagagaagcccggtgccacatccgtgtggcctgcggccggcggcgcggttacgaacgcctcgtcgtctaaggatgtggccagcagggcagcaaaatcgccatccaccgccgcgcagaagacgaggcctgctggtgtcgagaaggcagcagcgtcttcttctgtaaagctgaagacgaagcctcagaaaacaacggcaggagctggaaaaactcaagctgcacctcccgcccgtgctcctcctggcacggtaatagcaaagaagagtacgggagccgagaactatgtccccatccagaggacgacgagcgtgccggcggcgagaccaacagagacgctcaagaacgaggaacaggaggtcgacgagctgctgatgcagttcgacgagaaggagagcataagcacctcctccattgaggagcacctgcaagaacggctccctgaccctgtcgatctgaaatccgtggatctcgacagcagcaagacgacgtcctcctcctccagtcaggaggagtgcaaggatcaagaagagaacacgggggacattctggaggagaagcgtgacgggaaggacagcgaagacctgagcagcacaggcgacaaggcttgtgtcgggctcgggagcagtgatataaacatcccgatggaagaagcggttgatgaacctgttaaaccggcggaagctgtggacgaagctgggctgaagagagatgtctgctgttcaccagctgagccaaacgaagccgttggtcagaacgagctcaatgaggctgctgtcgtcggtgaaacgacgactgaaccgaaggaggctgaggatgaagccaagataataaagcaagtcgactgcgaaactgcatcaaaagaagttgctagtactggggccgagtcaagggacgatgccgctactatggaacgcgagccgctggtagcagcagcagcagcaccacaagaagagaaggccaaagctgaggagaagacgacgcagccaactaaggccgtggaatctgccaagtggaggacgaaggatgaagggaggagcaacgaagccacagaggagggcaggggcaagtctaccactactgctgccacccaggagaggaagaacaaggtgatggccttggttgggaggtttgagactgccatgtctggctgagaagagatcagaacgaggtgatgtcaaaagactgctctggctcatgaaaatgtgtacgagtactactcaactgtgcaggcgtggagggttcgtatgtttcgtttcattaattaatgtggctgttgttgttctggaagcgagtgaagattgctgatgcatattgatggcgcttctcctgtttctctttttaatgaagtgactctcctgcatggtcctgtcacttgaccaaactctctgtaaaatgaaattatgtgatgaaaaaacaaaatcctgtttgaaaattatccaaa

SEQ ID NO: 141682 - DNA, 230 bp, Zea mays
  Clone ID: MRT4577_60698C.1
ggggaaaaaagtgggttttgggaacttttccccagcaaaccccaaaaaagggcggtgggtgcggcccccaaaaaacgggggggactattccgattttcccccctcccccagggtctctttattgggggaactaaatgggctcagcccccgcccgggggcccccggggacctctccttggccgggggaggggacccctttgcctctagaggagccaggggactttcccctt

SEQ ID NO: 141683 - DNA, 532 bp, Zea mays
  unsure (1)..(532): unsure at all n locations
  Clone ID: MRT4577_60699C.1
tgttgacgactacctccctggcgccgtacctgctgccgcctgctggccctttcgctgccgtgcctgccggcggtgaccgcgccggcggggtccgggtacggcgcggcgccgggcgtggcggcgctggcggaggcggccgtggcgtacgccacctcggagaccgtgccgcagcagtcggtcgacgagatctcgctgtcgctggccgtgctgcggcggcgcgcgccgctgcggctgctggtgttcgtgctggagacccactacgaggatgaagaacgcgatgatctgatccgcaagctggccttccatggactggtgcgcgagatcgcgcaggacttcaagatttacctccttttccccacccacgccgtgntggcgctccaggaggccgccgaggcctacctcgtaggaataaacaaggacaccaacctctgcgccatccacgctaagcgcgtcaccatcatgcccaaggacatccagctcgcccgccgcatccgtggcgagcgcgcgaacccatcatctccggggatctgat

SEQ ID NO: 141684 - DNA, 633 bp, Zea mays
  unsure (1)..(633): unsure at all n locations
  Clone ID: MRT4577_6069C.1
gnaaggaatgtagccgggtagnaggaatacacgggggcctcttgcgactgatcagagggcggctccttcgaaccaatctcctggaaccttcggctgcgcatcgccattggcgcggcgcgtggcctggccttcctccactcgtccgaaaagcaggtcatctaccgagacttcaaggcctcgaacatcctcctcgacacgaattacaacgccaagctgtccgacttcggtctcgccaagaatggcccgaccggcggcgacagccacgtcaccacccgtgtgatgggcacgtacggctacgctgcgccggagtacgtcgccacagggcacctgtacgtgaagagcgacgtgtacggcttcggcgtggtgctgctggagatgctcacgggcctgcgggcgctggacacggcccgccccgcgcagcagcacaacctggtggagtgggccaagccgtacctggcggaccggcggaagctgccgcgcctcgtggacccgcggctcgaggggcagtacccgtccaaggcggcgctgcaggcggcccagctcacgctgcgctgcctcgagggggaccccaggagccgcccctccatggcggaggtcgtgctggccttcgaggcgatggcaccagcccagggt

SEQ ID NO: 141685 - DNA, 801 bp, Zea mays
  Clone ID: MRT4577_606C.1
ggccgggacggggtcttgccaggtgtgtctagtctctagtctagctaggcactactctagctcccaagtggccaagtatactcgccagagtacgtagagtgtagttgagcgtcgtccaaggatggcgtggacctcccgccgcatggtcgcgtccgcgctcgtcttcctgctgatgctgctcgccgcctcagagatggggacgacgagggtggcggaggcgaggcactgcacgtcgcagagccaccggttcgtcggcgcctgcatgagcaagagcaactgcgagaacgtctgcaggacggagggcttcccgtggggcgagtgcaggtggcacggcatagagcgcaagtgccactgcaagcggatctgctagtaattaactagccggctggccagcgcatgcatgcacgacgaccgacctacctgctgctggtccgtttgcgtttgtttcttgtcctttgggccttgctgtggcgcgcagtcttgcgtacgtgcgtgtgcgtgtgtcttttcagttactctcaattagtcatagcagacgtgcgtgggtgcgagcgtgtgtctcgttgcattgatgaaccggcttcacgtgctgtggttttacagtttctgatgtgttttagctaatctcgaataataaataataaggccccgtcttcacgcagttgcgtactgggtgcttacgtacattgtggttgttactttcgtcacgcagttgagtggatgtattagtcaaaaaggccggaatactggttggttgattgtggaatgcaataacccttcgaaaacaaaaaaaaaaaaaaa

SEQ ID NO: 141686 - DNA, 245 bp, Zea mays
  Clone ID: MRT4577_60700C.1
tctatttttataacgaaagaaatcacccaacagaaagatttttttaaataaaaccctcccaccacacaaaaatatccgctaacacacaccctaatgccctgcaaacataacatccaaccacacttctaaatcatctaacacccttaccttataattacacactcgactatcccggttataagagctaactaatacctttgcttccactcacatactctaaaaggataccgctagacatacccatc

SEQ ID NO: 141687 - DNA, 282 bp, Zea mays
  unsure (1)..(282): unsure at all n locations
  Clone ID: MRT4577_60701C.1
cagaggatgaagaccccatcccacccagcaccacgcccancattgncacctcagtccagagcacgggctcatgtgacaccagccccgacaccgtctcgccctccctgagccccggcttcgaggacctgtcccatgtccaggctggctccccagccatcaacggcccagccagacagatgacgaggagatgacgggcgaatagccctgctgcccggtgccttgagggggtctcagggcagcagcatacaaggtggcagcgggtaacctgccttgttctgtcat

SEQ ID NO: 141688 - DNA, 184 bp, Zea mays
  Clone ID: MRT4577_60702C.1
cgtttgtgcctcagttacccgtagatgtagtgagggtaacaatacttactctcgttggtgataaggaacagctaacacaacacacagggtttttctgctcccaaaatgggattcttcagtgcactaaatcgaagaaagcactggagctcacgctggtttctccattgtttctccttaacagtgg

SEQ ID NO: 141689 - DNA, 278 bp, Zea mays
  Clone ID: MRT4577_60703C.1
ggagctcaagaacggccgccttgccatgttctccatgttcggcttcttcgtgcaggccatcgtcaccggcaagggccccatcgagaaacctactgagcgattcgcgatgcgttgtaattgctagtaaaatcatcagttttgtataggctactctgcctttttcctcagttcctctgccacggagcttggcctactcattttcaagtgtaagtgtaaactttgatgtatacacgaatgactccagacagttttgcaagttcttgcattggatatctgat

SEQ ID NO: 141690 - DNA, 233 bp, Zea mays
  Clone ID: MRT4577_60704C.1
cccacgcgtccggcgcgacgatgtcccccctgaggcgcgcactcggcgaggtgggagtggctgcggcatcggatcccgagggcacgctcgcggcgacggccccatgaggtgcgcacgacggcgaggtggcagcggcgacagatcccaggggcacgagcgcgacacgtctcactgaggtgcacgcggctgtggcggcgcgacgacagatctcgggtgcacgtgagcaacgacga

SEQ ID NO: 141691 - DNA, 128 bp, Zea mays
  Clone ID: MRT4577_60705C.1
aaatctgcaacgaggccgatgtctataacaaccacccccggcacgataactgggacgttacgagccgcgacctgtgctgctttcccgggaaaggcgtactgaacaccaacctcttatgttttgtacag

SEQ ID NO: 141692 - DNA, 423 bp, Zea mays
  Clone ID: MRT4577_60706C.1
ccattggggggaaaattagctttccaacccggagaagaaaaaaggggggaaaaacaaggaaaagaccacaaaccggcgacgcggaggcaacgtggacaaaagggcggcaagggggggggcgcaccgcaaaaaaacgggggggggggagaagcgaaaaaaaaccgggggagaaacaaagggaaaccaccgggggcaaaaacaccaaaaggccccgccggcaagaacaaaacagcagaggcccaggaaaaggccacaaccatggaacccaacaccggggaaaaaagcgggaacccccgggaaaaacaacaaaaggaccccacccccggaacacctttaacagaccccggggacgaccccgaaaatccccacccgtacccagaagggtaacaacttcgcgtaaaggggggccgataagaacccggg

SEQ ID NO: 141693 - DNA, 371 bp, Zea mays
  Clone ID: MRT4577_60707C.1
gagaaaataaggagcaacacggctacagttgcgatcgggggccactttgggacggacccttctgccaaggcacgcttcctgcagaatgttctgcgtacagctggttctgcggtttgaatcgtatgacttagcaaaggaagaaaaaagtgtgtaccattactgtccagcaatggcaatttttttttgcggatcttctggtctaatatgattaccactgaaaatgtccgtagctcatcgcctcttcttcttgactgcaaatctgtcacctggatgactgtacccaagatgtcacaagaaaacaccgaaagttttttttttggttctcttgtgtgttgtaccatgtcacttgtacaccatttcaagtaataaaa

SEQ ID NO: 141694 - DNA, 245 bp, Zea mays
  unsure (1)..(245): unsure at all n locations
  Clone ID: MRT4577_60708C.1
gcggccgccctttttttttttntttttttttttttttttttttgttttttttcggggtcttttttctatggtatcagtttttcccgtccgtgggaagcgagcaaagggcacccaccacacgaataaagtaccagctacggccgagagcaaccccaaccgaattattaacccggtctgggttacactacctcagtgactccaaataaaaccaaaaagcacgcggttaaaatctaaacaacgggccc

SEQ ID NO: 141695 - DNA, 750 bp, Zea mays
  Clone ID: MRT4577_60709C.1
cctcgaggccggccgggatcgtcctcgtcctttcctcccttcccatcccccactgctacaccatgcctccctagcactgcgccacccacacgtcctctgttccgcccacgagttcactccaaatctccgatctccaacaatccgcggctgagagtgcggagatgtggtctcccatggtcaactgcaaatacctacgctaggccgataggtagcttcgccaactccgcaccctcatctccaaataggtatgcaccccgatcatgatccgcctcccatgtaatgatgctgcacacttatgactctgcgacaatgactggcgatgcaaaagctacgattacaaatgaggaacagtacactcttggctcaaaagctggatcatcgatagctaacgatctccttgatcctatcagaggaaaaaatccatggattatgtatgctcacctgaatcattttgcatggagtgtctgggtacttaagggagtgactggcgccatcatggaggattgatgtacctgagacatgatatatatccagggtggcccctcgtaggcatcctgatcaaggatcatgaacgtcgccctactactgaggatctgtatgtacactatagactgatcgctgagaaatactgcttgacgatttgcgggactgctgctgtgaaaaaaaaagtctcatgagtctcagaatcacatgaaaggtgcagatctatcatgcaattccttgatatctgccaattatgtaaggactatg

SEQ ID NO: 141696 - DNA, 478 bp, Zea mays
  unsure (1)..(478): unsure at all n locations
  Clone ID: MRT4577_6070C.1
anaatcntttttttttttttttttttttttttgttgttttttttttgtttttgggggttttttccctttttttttttttttttttttttttttccccgaaaaaaaggccggcgggggtatttggaaattaaaaagccaaggggggggccccaacggggggggtcccgggccccccgggggaccctaaacatgggtacaagccccctttgaccaacggccccccccgggtaaaaccctcaccccccctagggggcccccccgggaccccgaggggattcaaatttccccccgccccccccgattttgtcccccctttgttcgaacaaggcagcaaaccccccaaaattcccgaaggggccacccgggaaggccttccccccgactggggccccccccactttgggggcaggcgggggccctttttggccaaaccccgaatctgggaaagcacccccggggggggggagccccccccccc

SEQ ID NO: 141697 - DNA, 1554 bp, Zea mays
  Clone ID: MRT4577_60710C.1
cggacgcgtgggcagcagctcaccgtcgtgcctcctccatcggcatccacccggccgagagcacaacgtgtaccgtctctccccagcgtgcgcgcgcgcgtggtcggaggctgccgtcgctcgcgtcggccgcccccgccggccagcgagagcgagggacaacgaccgaccgaccgaccagctcgaggtgaatgaacagccgcataccgttcctccagaaaatgcaccgctggatcatccctagctgcggcgacacccgccagccgcgcccttcctcccgccatcgagatgcgttcccgaggccggcgtcggcgtcggcgtcggcgtcggcggccccgtcccctcagaagctgaggaaggtggggtcggaggggacgctggtgctgtccgtgcccaaggacgtagaggagatccggaccatgtcggcgtacggccgcctcaagctcttcacctaccacgagctcaggaaggccaccggcaacttcaacccggggcagatcgtcggcgagggcggcttcggcgtcgtgtacagaggggtcatcgacggctccgtgcggaagggctacccgtccaccgcggtcgccgtcaaggtgctcaacccgcagggactccagggtgacagggagtggctgacggaggtgagctacctcggacagtacagccacccgaacctggtggagctcatcggctactgctggcacgaggaccaccggctgctggtgtacgagttcatggccaagggcagcctggagcaccacgtgttccgccgctcctgcagcctctcgtggacgacgcgggtggccatcgcgctcgacgtcgccaggggcctcgccttcctccacgggtccgaccgccccatcatctaccgggacttcaagagctccaacatcttgctcgacgcgaaattcaacgccaagctgtcggacttcgggctcgccaaggaagggccgatgggcggtgagacgcacgtgtccaccagggtcatgggcacctacggctacgccgcgccggagtacgtagccaccgggcacctgacggtgatgagcgacgtgtacggcttcggcgtggtgctgctggagatgctggtgggacggcgcgcgctggagccgagccgggcggggggccgcgacggcagcctggtggactgggcgcggcccatccttatccggcccaaaaagttggagcggatcctggaccggcggatgggcgaggtctgctcggagatgggcctgcagcgcgtggcccgcctcgcgtacgactgcctcagccagaaccccaaggtccggccctccatggccagggtcgtcaccacgctcgaggcagtcctcgccgccggtgccggtgccgccgacgccccgccgcggtgagaccggaggttgatgtaggtagtagggtcggcatacggattaattaggtgcgtacgggtatatgcttgggcggaggaggcatgtttaatttggtgtaatcatttgatcgaatcgattattcatggagtttaaatatattaaatttgtaaaagaatagaaaaacaattctgcagcttttctcggggtt

SEQ ID NO: 141698 - DNA, 629 bp, Zea mays
  Clone ID: MRT4577_60711C.1
agaaccctagctcacgcacgaaccccctccgccgccgtcctcgcgtcttctcctgcgcatctcggaggtgcttcctagtttccacgatgaagctgatcgcagcctaccttctcgcctatctgggcgggaactcttccccaagtgccgctgacgtcaagaacatccttgactcagttggtgctgaggctgatgaagaaaagcttgagttccttcttgctgaactcaaaggcaaggacatcacagaagtgattgcatctggaagggagaagtttgccgctgtgccttcaggtgggggtgccattgctgtgggagctccagctgctgcatctggtggtgccgcagcacctgctgctgagtcaaagaaggaggagaaggttgaagagaaggaagaatctgatgaagacatgggtttcagtctgttcgactaagcacgtcagttcctcccccctaccctctgtttaccctggtatctgtcgtgtgtggcctgccacaacagcgcctgcataatatctagagacctgaagttcgtgctattttgcttgggacaatgtatatgtttagtaccttcgtatgtgagtgtgtgactgcttccgcagccttgagaagttgattgacaaaaaaaaataaaa

SEQ ID NO: 141699 - DNA, 788 bp, Zea mays
  Clone ID: MRT4577_60712C.1
gttctagaagactctcgagttttttttttttttttttgaaacccatttgcaaattttcttaattatagacggattctcaatgacaatgataaccctccaaatgaaaatcagcacgaagtggttttacagcatcacacaagtttgtgagactgactgtagccggcagcaattcgtagagttctctcacaatacgcgagaactcacaaactcaaaccgagcatcacctgaattttgtacaagcaatctaacagaacactccttttcctggtcagaaattcctgaggctcgtcccgttgttccacccccgctccttgtccctgttctgctgccgcaccttctgcccaccaacaccgccgccgctcgcaggcactcgccgagccgctctgcgtgcactactgtcagtcccttgagcagcaggtgcagcagcaccggctttcttcgctgcctgcgccgccactgacggcctgatgactaccttcttctgcaggcttcggcgcaggaggctgctgacccttctactccggctgcccttgtcgacggagacgaccggaggagagcacggcgagggcgagcgcgacgacaggttctccgtgatcctgtcaagcggcgacactgctgctgctgctgctattgacagcagcgagttgtggcgcggaagcggtatcagggacgtccggcgcgaaatcggcttcagcggctgctggtaacctccgccgttgccgagcgagactcgcctcgctttcgtactgggcgccggcagctgcgcggcggcttcagggttgtctcgt

SEQ ID NO: 141700 - DNA, 522 bp, Zea mays
  Clone ID: MRT4577_60713C.1
ggccgcttttttttttttttttttccacagaaatggccacgccgatcaactcccttcaatgtttgtacaaagaaattgtttacacgtatttttttttttttttacaacatcacaaacagcattaatcatataataagtagtagttcttaacataagaggccaagttcttccacgagccgatccgtcagctgggctaggcaccaccaaaatgctaactaactactccaacaagttactcaaccttgtgacatttggatggaggggacgcgtcagcctcgtcgccatcgtcgtcgctcctgccgggtcgccagaccccttgccggtgttcccatcatcgtcgttgtcgttggagaacctaacaaagagtggctcctccgccaaggacatgtcgccttcctagccctccgaggacttatcggctctgtcccaagagaagagatcgtcgtcgctctcctcccaatccacaccgaggaggagcctcgggcccgacaccattcccggccggcctcgaggtacccaatg

SEQ ID NO: 141701 - DNA, 618 bp, Zea mays
  Clone ID: MRT4577_60714C.1
ggccgcttttttttttttttttttcttttttttttttttttttttttttttttttttttttttttttttttttttttttttttttttttggaaccaactattttcatttaaacggcacaaatctccaaggggggcttatgttctgaaagggcttaggggagggaagggatgatccccacagggaccacgttacacaccccccaaccccggggatgctggggtaaaacagtagaaggactccccaaaaaaaaattatttctctaaaacattaattagctggcttcacccacggaaactaggagcccatttttggcaccttttccaactggccttgcccaaaatatcgccagggttgggccttgggcaaaatgccccccctacttgctcctccaaaatttaagggcaaaactgggtataaggaaaaggcaaaacattgcctttgcccccaaaacccccacataaaagagggcaaaaccaatcctttttttgggaaactcctccttggggagaagtcccacaaaccccaaaacacttgctgcaaaaagcaggatgaaaagcaaagatgcgagccccccaagcccaatgggggccggcagccaccttcacgttaacgcttta

SEQ ID NO: 141702 - DNA, 193 bp, Zea mays
  Clone ID: MRT4577_60715C.1
ccacgtgccgtcactcgtccgtccaggccgatgactcaagtgctgccacgcgggaatggattcctatgactgtcgtcgcacgccggtgcgacgggcacgtgaacggatcactgttggacattcacctctcaggttcacaacagccggtcaccgcgtgctcactagcggtgcggtcacgctattcgctgcactc

SEQ ID NO: 141703 - DNA, 452 bp, Zea mays
  Clone ID: MRT4577_60716C.1
cccacgcgtccgtggacacatgggcggacgcttgggctgacctacatcgagaagcctggccaccattttactctgacggcgtcgtttggaagtgtggatgcttcgagctactacacgcttgcggctcctggctgactgtctacaaagtacctggatctgaacaaccaggtcattaagtcggtgaaggacttcgcggagagcgtcaagccaatcgcggcgatctgccacgggcaatagatataatccaatggcagagtgctcacggggaagaatggcatcccatacccacccgagaatctaaacgtgctgcttcggcggcgggacctgactggaggctgactggacccattgttttttcaccgtaggcaaccttgggaccggatgcaccctgcccagagccacccaaagttcgtgtccgaactaatgaaatttttcggtggctagggtttctt

SEQ ID NO: 141704 - DNA, 305 bp, Zea mays
  Clone ID: MRT4577_60717C.1
cggctcgaggagaaacctggccgtcttcatcttccccagccgtgcggtctcccattcctaccagccgagctctccctctccctcgtctttttcctctgctggcgcccgtctctctggtcggaccctccctgtttctccctcctggtgctctgctggtgcggccgtgcccctctgctcgccggcgcgcacccctgcttccatggcagtcgcgcccgctgcttgctctccctgctacctcgcggcgtcctgctggccggcgcttggactgcgcccaagcttcctttgctcgtcggcttctcctctga

SEQ ID NO: 141705 - DNA, 382 bp, Zea mays
  Clone ID: MRT4577_60718C.1
ccggaccttattcccgggcgggcgttctaacgaaccaagaaaacaacccagtaacaagcaaagcattgatccgacatccgagagacggacgcggagatactggccctggagacgcacctgatggactcgctacaccacctgctggacgagcccgacggcgacgccgacactgccgacaacaagactggcgtaagaggcagcaccacgcgcacctatgtccttgacacgcgcgccatggccggcacgccgaacgacacgaacgatctgcccggctattacgcgttcgtggtggacatgccacgcctggacacacccgacatcttgccacaggtatagcaccagctgcttctggtttctaccgttcatcggtcccaggaggagc

SEQ ID NO: 141706 - DNA, 395 bp, Zea mays
  Clone ID: MRT4577_60719C.1
ggccaacaacccaaaaagctttgcccataacaaaaaatcacccccctgggcagcaggcctggcaaagacaaaacccccggggggtattttaacaacgctgcccccaaaggggggggggggtttttttcctgggggccggtttggaacacaaaaaccaaaatccggcccccatttatcgccattagaaaccgaaacaaaggaggggggataacctttagaagggttaataaaaacaggagcaaggggggttttattggatacaccgggggggcgaccacaacgggaacaacccaggggttcctaaaagataattttttaaaatcgggggcggggggtctgggtttggttcctccccaacatcaacagcagcagggcgggggactgaatccctttta

SEQ ID NO: 141707 - DNA, 274 bp, Zea mays
  Clone ID: MRT4577_6071C.1
ccatgcaccaacaccacagccccctccacctacctcaacaacccatatgttcggaaggctctccacatcccggagtcgctgccccgctgggacatgtgcaacctcatggtgaacttacagtaccgccgtctctacgaaagcatgaactcccagtacctgacgatgcacagctcacagaaataccagatcctgctttacaatggcgatgtggacatggcctgcaacttcatgggggatgagtggtttgtggattccctcaaccagaagatggagg

SEQ ID NO: 141708 - DNA, 980 bp, Zea mays
  unsure (1)..(980): unsure at all n locations
  Clone ID: MRT4577_60720C.1
cattaaaaaccatttcccttgttcatcattatgcatatcatgctgagacagtcgttagagcatggtgtaaaaagtggacaagctcgaaaagaaccacttatacaagtcatcccacatcaaagcaaacattgttgcttctaagtgtctgggtgtgcttaccagattgaaagcaattttagaccccataaactacaaatcatgaaaatggtacagtgagcaagggatgacctacccctaaacctaaactacaaagcatgaaaatggaacattgagcaacggatgccttcagattgagggttcactctcggaactcgggccaagggatcattctcataatatcaacagcttaggcatgtaagttaaatcagcttatgtacaatcaaatgtgttagcagccaaggagaacatcacacgccatattgttgcagtggccgctgcacaaatgggtgctcgaataactgagcagcacatggccggtcatttggatttgcttggacacacttctttatgaaatcacgcgcatcttctgataatgtattaggaatttctggtggtattcccctaccaattttgagcaaagcctgcgtccattccatatcaggatacggcacttcgcctgtcagcatctccaaaactgtgcagnccaagactcccatatgtcncgctggaggttccatgtggcttagccttaagcaacctcaaggggccactcccagtagacacgttccctctgctagaattttgcctggcgtcaaaatatgagcatctcctcttgccaagtcccaaaatctgcccaatttgacccagtcccgcttgcatccaactagggatattggcaccattttatatctctnagtaacccacggggaatgagccatgttccaatatacaggataaaacaaaccatgacggaaatacttgagaattttttttttttttttttttttttttttttttttttnccggccggggcctcgagg

SEQ ID NO: 141709 - DNA, 462 bp, Zea mays
  Clone ID: MRT4577_60721C.1
caagaccattccaattccggtctcgtaacttcatgccattatataggatagtgcgcgactcgggactctgcaggtatagcgaggcgtaccctctgccaacgcacgaaagtgccactatgagcggggcgattctagacggctaccggtgcgatgattcgtagtgacagacgcggacttctctcgcaggctgaacatgtggttccacgcgctggtatccaactgtgacagtgtgctcgttccagcgccgagcttcagcgcgcactcgagagcttccgcctgctacgactggggcaacttaggatactacccaggcggcgccggtctctcctccaggatacaaacactacgacggctgcttaaccagatgaacctagatcacatacgcgagcatgcccgagccaagttcctcgataaggatgacctaaatcatgctcctcgtcgtcgatggctacgctcccactc

SEQ ID NO: 141710 - DNA, 278 bp, Zea mays
  Clone ID: MRT4577_60722C.1
tcagcagtcaccacttccaaggcattaccgagtcctactagcagtcgcactcaatgttcaagggactaaacagggggcatggctcgcacgcaatctgtcgtagcggtcttcgttgtggccccggtgctgcttctggcaccggcggcgacgaccttggaggccgccatcacctgcgggcaggtgagctccgccattgcgccctgcctcttctacacccgcggcacggggtccggacccttcgcgttctgctgtagcggcgtcaggaaccctctgagcgc

SEQ ID NO: 141711 - DNA, 374 bp, Zea mays
  unsure (1)..(374): unsure at all n locations
  Clone ID: MRT4577_60723C.1
ctcaaagacgcaggagaactacgtatcattatactaagaagaaacgtataaaggccttacaaaactcaaatggctagctcatggtggccaaaacctcttatacaagaaaggattattcataggcatagattatagcagaccaactaccactaatcctcagccacggctgaaaggaacaccaatcctttggcgtgagccatcatccataaatctatttcttcaccaaagtgagcagaagctgaaatcatatgagggggagaggccttcaaagacattcatnttcgtatcttcacaagagttcaagctcccaggatgacagggggagttgaaacctttttcttgtcaacccccttaggtctctcttcagcaagaaa

SEQ ID NO: 141712 - DNA, 461 bp, Zea mays
  Clone ID: MRT4577_60724C.1
tcctcctctgcctcaccctcccatctcactaaattttctttcttcagcaaagccacacccaccaaagagaagaacattttgaatccttttaaaactaaccattcctaacctttaaatttttacaaaaccttcaccacacatactgctagtttctaataagatactttttcacctcgatcacacattttcaaataagcttcttacaacaatttaattgcctctactcctaatagatcaccaaaaccattctttaattaaccttggtcttacaaaattatatagaaccaatgcaaccttctttaaccaactttatttaaagatgctattgataatttttctgcaataatatcttgtgtcttaatctttacatcaaattcattcatttttaaaattaatgagacttgaaacatcaataccatcaagacttcatcttacaaaagtgcaaagaaatttttatattt

SEQ ID NO: 141713 - DNA, 840 bp, Zea mays
  Clone ID: MRT4577_60725C.1
atggggcaaagcctgtccgtcctctcctcctcctcctcccagagagacgcatgcgcatgcgctgcagacggacgggtccggcggcaacgacgacagcagagaggacatgcacggcgagacgcagacgcacgcagagatggggtgggcttgcagcctgccactgccagagagacagcagctcaggccagaaggttgcagttgcacggcaccgcgcaacggaaccccacagcaccaatgctcaactacagcacacacgatactgtgcctgtgcgtggtctatatagaaccgtacacgcacacacggatgcatggctgtctccaaggacaagggagaaaacgctacagcctacagctagcctactgcatgcttcagccttcagtctcgagctagagtcttcactcttcacccttccctactggatggaaagtactggtcctgccactgccagccaagtaaacaacagtcaagttacagtaggagtctccggctcctatcctcccccctgcgctgctctggacctgcctgccgctgcttgcttggtcccctagctcgctgccggtgctttacctttttacgaacgcatgacctcctctgggggcccgcccgcccggccagccagccataatcgtcctttcctttcctccgggcccgggttcgtcgggtacatgcatcggcgggcctgcccgcctccaccatggtcctgacttgccgtcccccgtcctccccggttgcccgtcgtcgtcgtcgtcgtcagcagcatgcccccgcggggtaggcaaaaatctggggcaccaccgtcgccaccttgtccgccgtcgccacctggaatccttcctcca

SEQ ID NO: 141714 - DNA, 133 bp, Zea mays
  Clone ID: MRT4577_60726C.1
ccggccgggaagactacaaaaccctactgacgcctccgctaattgcgcacgagcccaatcatgaccgtcgttgatccgccctaccccggcgacgggccatcgcttcgttgaggaataagaccgccgtcgtcgg

SEQ ID NO: 141715 - DNA, 202 bp, Zea mays
  Clone ID: MRT4577_60727C.1
aggctggccccagcagtggtgccggtgctgctcccgttcatgatgctgatgacttcatgtacgctctgatggttcagatccatgttgctcaagctgtgtgtaggcctcctggttcaggtatatcagtagttgaaggtacgctattgccagagctctttgattctgtctgcatcaaaacagaatatgctggagcaagtagaaa

SEQ ID NO: 141716 - DNA, 492 bp, Zea mays
  Clone ID: MRT4577_60728C.1
gggccaaaccccagccattatttgaaaaaacaaaaaaaccggacacaccaaacactgccagggggggggcgggattggttttttaaaaccaaaccaaacatgccccccccaacaggtaaaaaacatcatcaaaactaaaacggggcttttaactgccccaccttggtcaggaacaaaacaccaaactggcgaaccaacaccccggtgcctggggccgggggaaaaccccccctagggggccacaccgagccccggattatgctaaaaaaaggcgaagctgctctcacccccaggagggttgggggttccccccacacccccccgggatgggtcccccccaactgcaaaaaaggtgcttccaaggaaccccttaaacttcggggggcccaaaagcttttttgaaaaaactgggggaaccccccccttaaaaaaaccttgcccggaaaggccttgacccttttgccgggtattttccttgccctctttggcggg

SEQ ID NO: 141717 - DNA, 332 bp, Zea mays
  Clone ID: MRT4577_60729C.1
ccacgcgtccgggtgggggcatgggagatctacaaccacagaacgccggagcagttaccggcacacacaacttagacgggcaggctgcgaggcatcatgcccctgtacgagaagtacggggagaacttgggacatgctgacggggtgtcgcgttgtgctctacgacacccgtacaggacctacgtggcgggcgcgacgccatcggcgttaacccgtctacatgggctggggcaggacggttccgtctggatcgcggcgaaagaacgcgctgacgaggactggtgcgctttgagatttcccgacggccacctctactccaccccggcgggggg

SEQ ID NO: 141718 - DNA, 946 bp, Zea mays
  Clone ID: MRT4577_6072C.1
cctcgaggccggccgggccgggaattcaaccaacgtacactctcagtctcccccacccacctggccggtgaacgacacatgtacgctccgccaatggctcaacaccggcagcgcagcttccagtcgtttgcaaggacgtggctgcctctcgccgttatgatcttgatgtgcttcgccgcttccacgacggcgcagcagcaaccaccgccactgccgcagccgacgacaacaggcactgtaccgctaccgagcgtgccagcgtgcctgccagcgcaggccacgctgtcgccgtgcgtgagctacctcatcggcaactcgtcgtcgccgcccacggagtgctgcgcccagatacgggccatgttccagtcgcaggcgccgtgcttgtgcgccgctttggcgtcggcggggcccgcccagcagctcgggtccgcgctcggccagctgctgcccacctcgtgcgacctgcccgccgacgcgtgctcagcaggaacgacgagcgctgccccggctggtcccgcgtcaggcacgacctctgccgcagaaccgcctgcggcggccactgagccgaacgctgtgagcgacgacccgacggcgccagccggtggcgcagggatcaagtcggttccaggcttgcttgcctcggctacagcagcaggctccagtggcatacctgctgccgctctctttgtgtccttttgttggtcgtttatttatctcctttcaactctgatatgattatatgcttctgggatttgttcattgttgcgagtcatgcatgtcgatggtgcatatacgttcagatgagttggttggtacgtattagtgtgttgttcatgttccagtaatgctctctgtacttattgggagaccacgtcagacgtgtgcgtggacatgaattttattgtgcccatttcccaaaaaaaaaaaaaaaaaaaaaaaatccgta

SEQ ID NO: 141719 - DNA, 386 bp, Zea mays
  Clone ID: MRT4577_60730C.1
gggacgaacttccgttttgtggagcatactagtaaatcttcctcacttgccatacatttcatatgacgggcagaatcagacgcaactcctgaacacattaactgactcaagtactggccataaatacgcgaactagaatataggaacagtcgtgagggaaaataccatattattcacacgggatccagcaggagttccaaataaaaagcttggaacaagatccttaacaacttacgatgatttgacgccttcaggacgatgagactcttgaaccatcaaacaggccctgaaagcttggttagcaaagcacgcagtccaccttcttacattcattatttttcaaaaatgcaggtctcatcgacctgagaatggaagacaaaactcgg

SEQ ID NO: 141720 - DNA, 395 bp, Zea mays
  unsure (1)..(395): unsure at all n locations
  Clone ID: MRT4577_60731C.1
ggccggggacatgccgctggcgtcggggcttgcgggcctgctgcggagtggttagggtaagctgggaaggacacaatcctccgcatttcctatcctttcatnntattttcttctattctttctttntncatcttctattttnatnnncctntcnttttnntattttctatcctcttcttcctttattctctcctcttttttcccctctcctctttccctttctccctttctttaccttcttttcccttcttttttcctcttttcttccttcttttcttcctttcttcccttcctcctctcttttatcttctttttcttctctctttttccttttcctccttttttctcctctcttttttcctttctttttttttctccccctctttttntttttt

SEQ ID NO: 141721 - DNA, 2300 bp, Zea mays
  unsure (1)..(2300): unsure at all n locations
  Clone ID: MRT4577_60732C.1
aacgaacaanaganagcagaacacgaccgaaacacaacaaancaccgagncgcngaggcnccccaccaccgacgaggcaggggcggaaanccggggggcggaccgccacccgcgagccgcccccttgcccaccacgcgcgaccggtatccggcgctaggagctgcggctgacagctcgggcgacaagcgggtccccgacagcgggagacaaggccccgttctcgattaacccaagccaaaggtccgttttctctctgagaccgtttacatcagttttttttcttttcttcaaaatatatgtgtgaacgaacaatagtttgcagtacacgaccgaaacacaatatttcatcgattccttccttgtcttctcacctctgacgattctgtttctgaaatctgcttcctgcaaaatggttccatggtcacggaattcgccatggtcagagtcagagggagagagagagagagagtcgtactggtcgtcacctgtcgaagattttcggtgtctcctgagccacagctgctgctgctgctggaaccatggagatggaggccgtggagtcgcacggcggcgccgggcgccggacgcccaagagggatcgcggcatctcctgggcctgcgtcttcatcctggcgagtaactgcttccagttcatcgcctacttcgccgtgtcgacgaacctggtgaactacctcaaggaccgcctgcaccagggcagcaaagccgccgcgaacggcgtcaccaactggatgggcacgagcgccatcacgccgctcgtcgccgccttcctcgccgacgccttcctcggcagatactggaccatcgcgctcttcctggtcatctccgtcctggcctacgtggtgctcacggtgagcgcggcggcggcgctggagagcgcggccttctacgcggggctgtacctgctggcgctgggcggggcgctgcagccggtgctgtcgtcgttcggcgccgaccagttcgacgaggaggagcgcgggcgccagagctccttcttcaactggttctacctctccatcaacgtcggctcgctgctcggcggcaccgtgctggtgtgggtgcagtccagcgtcagctgggggctcgggtacggcatcccggcgctcttcagcgcgctggccgtcgcggcgttcctggccggcaccgccacgtaccgccgccaccagccgccggccggcagcccgctcaccagggtcgcgcaggtcgtcgtcgccgcgtgcaggaagtgcggcgtccacgcgtccgaggacgcgtgggcggacgcgtgggtggacagcggcggcatgtccgcgatacaggggagccgccggctcgcgcacaccgatcagttcaggttcctggacaaggcagcgtcggtggagccatcggacgacaagtcgcgtccggcgagcgcgtggcgtctgtgcacggtgacgcaggtggaggagctcaagtgcgtgctccggctgctgccggtgtgggcgagcgggatcgtgttcgcggcggcgtacacgcagatgaccaccaccttcgtcctgcagggcgacacgctggacccgtacgtgggcggcttccgcgtgcccgccgccgtgctctccgtcttcgacacgctcagcgtcatgctgtgggtgccgctctacgaccgcttggtggtcccgctggcgcggcgcgccacgggccacgaccgcgggttcacgcagctggcgcgcatgggcgtgggcctcgtcgtgctcaccgccgccatgctcgccgcggggacgctggaggtggcgcggcgccgcgtcatcgcgcgttacggcatgtacgacaccaacacgggcgccggcggggacggggcgtacctgccgctgtccatcttctggcaggtgccgcagtacgtggtggtgggcgcgtcggaggtgttcacgttcatcggccagatggagttcttctacgaccaggcgcccgacgcgatgcggagcctctgctcggggctctccatgacgtccttcgcgctcgggaactacgtcagctccgcgctcgtcaccgtggtggcgcgcgccaccgcgcggggcgggcgggacggctggatccccgacgacatcaaccgggcgcacctcgacaacttcttctggctgctggccatgctctgcgccggaaacttcggcgtctacctgctcatcgcgcggtggtacacatacaagaagactgtggactagtatagtgtatgtatctataaagaccatccctgaacgatctcgtgaaatgtactgccgatctcaatcaattcaaagacacttcacttggaaaagtgggcgaatcc

SEQ ID NO: 141722 - DNA, 1002 bp, Zea mays
  Clone ID: MRT4577_60733C.1
tgggccggccgggaccaagacacttgcgtgatagattgtaccggtgaccggtctcggtctccgtgtctcactctcaagttgcagctgccagcagccagtcatttcagtggcaattcagtgttgaaataaatatccgtggataagagctgcgctgtgtgctgctgagatatcaagaacgtacggcggtggaagacaaggccccgttctcgattagcccaagccaaagcagagagagagagagagtcgtattggtcgtcacctgtcgaaggttttcggtgtctcctgagccacagctgctgctgctgctggaaccatggagatggaggccgtggagtcgcacggcggcgccgggcgccggacgcccaagagggatcgcggcatctcctgggcctgcgtcttcatcctggcgagtaactgcttccagttcatcgcctacttcgccgtgtcgacgaacctggtgaactacctcaaggaccgcctgcaccagggcagcaaagccgccgcgaacggcgtcaccaactggatgggcacgagcgccatcacgccgctcgtcgccgccttcctcgccgacgccttcctcggcagatactggaccatcgcgctcttcctggtcatctccgtcctggcctacgtggtgctcacggtgagcgcggcggcggcgctggagagcgcggccttctacgcggggctgtacctgctggcgctgggcggcgcgctgcagccggtgctgtcgtcgttcggcgccgaccagttcgacgaggaggagcgcgggcgccagagctccttcttcaactggttctacctctccatcaacgtcggctcgctggtcggcggcaccgtgctggtgtgggtgcagtccagcgtcagctgggggctcggctacggcatcccggcgctcttcagcgcgttgggccgtcgcggcgttcctggccggcaccgccacgtaccgccggcaccagccgccggccggcagccgctcacaagggtcccgcaggtcgtcgt

SEQ ID NO: 141723 - DNA, 628 bp, Zea mays
  Clone ID: MRT4577_60734C.1
gattactcgtcctttttgcttggtgcctgtgtatatcgtcgccccggccgcttgagctagcttcctctagtgctcgctctcgtcgtcgatcggttgtttgcatagcccaggcgagccgaagcaatgtcgtcggcgcccctgcagatcgcgccggtgccggagcatgtgtgctacgtgcactgcaacttctgcaacacaattctcgcgggtcaaatgactgtggattttttgtgatgagttacatgaagtcttatgatcacaatgcaggtgtcatatcttctttcaatcaaccagacaattcccgagacctacgtgctcatgcccttcatcaactcacattccatcgcatcaacaaggtgttgccacttccattagatatccagagatttatgtttgcgcgcaattagtgaaatatgtcagaactaagcaatggtgtgggcaatgtaccgtactgtggtattttggccattattgtcagttaacaattgtaggaagcttccttatatgtgctgtttcagaacaattgtcatgctactttgtcttaggggtgttacccaggttctttctgtgaactttagttggctggatacttatggttatgttgcgaatatgtgaacatcatagtttt

SEQ ID NO: 141724 - DNA, 228 bp, Zea mays
  Clone ID: MRT4577_60735C.1
gtgaggaaaccctagcgaccgaccatggcgttgctcccgcgcaccgcgcggctggccctgggttccaccccgcgggcgtactccgctgccgctgctgcgggcgccttcccgacgtccccagcgccatacgggggcgctcccccaccggcgatgtctaagactgccgagttcgtggtctttaaagtggactacctgatgaactgggcgctgtagggctcgatctggccc

SEQ ID NO: 141725 - DNA, 2073 bp, Zea mays
  Clone ID: MRT4577_60736C.1
atcgactggtgccagttgatttttaatgatctatgtgaagctgccaagaagtggcacaaccggatcaccacaaatgtctccacgactatctatggatgctccattgttgtccttttgtactacttggatcacctgcatacagccgctgccccccataataagagtggcacacctcgcattaaattttttgataagaatagcataaaagctttgaccaaagctgacaagaggaaggttcgccatggggctgaatctttcggacactgtgaattccgaagctcgacggagacatgctatgcagttggacctaagatcgatcgccaatctgagccggagtgcaggaccaatatttttgatgcaccgcgccctggccccatgcctcggccaacttttaacatcaaacttccatctatcaaagagatgatgtcaagtaagatcaacgatctcccccatcgtcatcgatctaaattcacagatattcttgctgcatatgacttggaggttgacaagtcatgcgtagccataaaagacagcatcgacaaaattattgtcaagcaatatgacatagcagacaagtttatagaattgatagacgaggtactacgtgccgagtctgaaaatttggaaaacgagacggatgagccacagcaaccggggaattcggctgattcagcaggacacacagttgatgccacccagcccacacccgatatgccatcccaagcttcgcagcttgagacccaactgggtgctactcagtttgaagaaattcacgaaagacaacagcatatccgtacagtccttgagacctttcccgacgaatcggatgtggtttcagatcaacagagaggtgcaatggcaacagaggagatggaacaaaatgacagtgggccagtttttgaccagaccccaactcctcatgttgatacactcaaaggtactacaatctctggatctgatccaccacttacagagcaagagtgtatccgttctctgtgggatttaatttgttccaaggacattgaccaaagcagggtagttattgattacggtgattacagtgcaaactgtatggatatttatgaatctttcgcggagggtaaatgtcttgaggatgtcttcatgcagtgtttcatagagtgtgttcgtgatgattctaaaaatcatcgtcgaactctgacatctaacagattaatacttgatgtcaacgttggggctctgttaaattttgaagaacaggaacgtcacagcaagaatcctcagtcgtttgatcaaaatgtcctacagaattgcttgcacaacacattgcctgctttggtgaatccggataaatgcaagtcgataatggtacctatgcttagcaggggtcattggacactctatgtgatcaatctacaccaccgggttatccacattttagattcgaatccctatggtatacaacttggtggcaccgaatggaaggactatcattatgatccaatttatttaggtggcaggaaattcccatgggctagggtgataatgagtaggctgagcaaagcgttacaacacgtttgccccaacgcagaatttcctaagtttggtaattttccattggatatgccatctaactgcccaacaatgaggacagggtcaaatgactgtggattttttgttatgagttacatgaaatcttatgatcacaatgcaggtgtcatatcttctttcaatcaaccagacaattcccgagatctacgtgctcatgcccttcatcaactcacattccatcgcatcaacaaggcgttgccacttccattagatatccagagatttatgtttgcgcgcaattagtgaactatgtcagatctaagcaatgttgtgggcaatgtaccgtactgtggtattttggccattttgttcagttaacaattgtaggaagcttccttatatgtgctgttttcagaacaattgtcatgctacttttgtgttaggggtgttacccaggttctttctgtgaactttagttggctggatacttatggttatgtcgcgaatatgtgaacatcagatgttttcacttctgtgtgcttt

SEQ ID NO: 141726 - DNA, 1161 bp, Zea mays
  Clone ID: MRT4577_60737C.1
cctcgaggccggccgggactacttctttctctctctctcaccacacacagacacaaataaaagaaatcagtagttcgatttctcccgggacctttatttacacatatctctgtatttacaaattaggttgttgatgtaggctgtacgcacctgctagtttgctactcgatcctatatatcgtccaatcctatctgacctctcgacatctggtccttgattactcgtcctttttgcttggtgcctgtgtatatcgtcgccccggccgcttgagctagcttcctctagttctcgcgctcgtcgtcgatcggttgtttgcatagcccacggcgagccgaaggaataatgtcgtcggcgcccctgcagatcgcgccggtgccggagcatgtgtgctacgtgcactgcaacttctgcaacacaattctcgcggtcagtgtcccgagtcacagcatgctgaacatcgtcacagtccgttgtgggcactgcactagcctgctgtcggtgaacttgagaggactcatccaatcacttcctgtccagaaccaccactactcccagcagcaggagaatttcaccgtccaaaatatgggttttactgaaaattaccctgagtacgcaccttcgtaccgcatgccaacgacgctgtcagcgaaaggtgatctggatcatatgctgcacgtgcgcgctccagagaagaggcagcgtgttccttcagcatataacagatttattaaggaggagatacgaaggattaaagcatgtaacccggacataagccatagggaagccttcagcactgcagcaaagaattgggcacattttccgaatattcattttggtctagggccctgtgaaagtagcaacaatcttgatgaggccaccggtgcaatgtgccatccccagaaagtccaagatctctactaagacctatatcagcactgccctttgtttcctcttagttctggactagttggtgagtgccatatatatatgcatgagtgtgatatgatcatgaggtaaggaattatgattaagatgatatatatgtacgagatgaacatgcccctaggttcatgaaagactaaataaggatcgtcatctcaccatgttatcataggtagtaactattgtttgaaataaattatcctttgtgtacagtttta

SEQ ID NO: 141727 - DNA, 346 bp, Zea mays
  Clone ID: MRT4577_60738C.1
gtgagtcgtattaaatgagtacgaacgctggaatgtcggtgctcatactggtcacctggttgggaatgctctgtcaaatccgtatctttctttcgcaacggctctaaatgggctaaccgggccactgcgttgccttgcaaagcaggaagtgcttgcatggatcatatctgtaattgaggaaactgtgagtggtgtcaccacacatgaactcaaagacgaggtcaggacgacactaaacagtggcaaggttgttcctgcgtttggtcatggagttctgcgtcagaccgacacaccgtattcatgtcaatcggagtttgcctcgaaacatttgcccatgggatcactt

SEQ ID NO: 141728 - DNA, 633 bp, Zea mays
  unsure (1)..(633): unsure at all n locations
  Clone ID: MRT4577_60739C.1
gcctgcatgtaccggtccgctaatacacggtcgacctcagcgtgcggtaaagctggggattctaggagtgctatctcacgaaaaggcaatgcttacaattcgtgaactgattacaaaccagacattgcgatagacagtagaggaaagtaagtactaaccctttaagagattgccgaatagaatgggggggggggtatacaccacctcactatccttttttgtctattaaccaaaaggatatagctccacaggacggggtgccactcaacgcctactttggggggtaatctgggccattgtcctaggtgttcacaaaggcagcttaaatttggggccgaattcgttatggagtggtaggagactggtcagcgcttgaagtactaacagataaagctggtttcttgaattgaaccacagtaaccgacatgttattacatccttgcgcaccagctgtatgtgccacacaggggttgagcaacttgtcacacacagtggattttttatactnggtcttttagggtgtgttggtacaatattagctactttctttggttggcattgtattccgaatttcatcccatgcttntagagttgttttgggtcattcttgcgggggcggggcctgtttttccc

SEQ ID NO: 141729 - DNA, 1277 bp, Zea mays
  Clone ID: MRT4577_6073C.1
ctcgagggccggcggggacatcatcaccacacgccaaatttacagctagttagctgaattcgatcgatatccaggaactaataatccaccgacccccctcatggcggcttcgtcgcgaatgggcttatccgtctacctcgccatcatggcggcggtgctcgcctcggcgctcggagcggagctcaccgcggactactatagcgagacgtgcccgcaagcgctgaccaccatcaagctcctcgtcggcgccgccatcctgagggagcccaggatgggggcgtcgctggtccgcctccacttccacgattgcttcgtcaatggctgcgacggctccatcctgctggacgacaccgacgacatggtcggcgagaagacggcgaagcctaacaacaactccgtgagaggctacgatgtcatagacaccatcaagtcggcggtgaacacgatatgcttgggcaacgtcgtctcctgcgccgatatcttggccgtggccgctcgcgattccattgtcgctctgggaggaacctcgtacgacgtgctcctggggcggcgcgacgcgacgacggcaagcatggacgacgcgaacaacgacatcccgacgccgttcatggacctgccggcgctgcaggacagcttcgagtcccacggcctgtccctgcacgacctggtggtgctctccggcggccacacgctgggctactcccgctgcctcttcttccgcggccgcctgtacaacgagaccggcacgctggacccggcgtacgccgggtcgctggacgagcgctgcccgctgacgggcgacgacgacgcgctgtcggcgctggacgacacccccaccaccgtcgacgcggactactaccagggcctcatgcagggccgcgcgctgctgcactcggaccagcagctttaccaggcaggcggcgccgctggcgatctggtggagtactacgccgagaacccgaccaagttctgggaggacttcggcgcggccatgctcaagctgggcagcctgagcccgctcaccgccgacgaaggggaggtcagggagaactgccgggtcgtcaaccaggtgtgagtgtgacttcgccgccatcgccgtcgaatgaacgaggcatcagcttcgttccgtacgcacactgtggctgctagctgcaccggcaagctatgcagcaagattctgtagcgtgtgtcttatatttgtattcgcgtgcctacttaattttgtgagaaattggtcttatatgtttggttaacatatttttgatcgaaaaaaaaaa

SEQ ID NO: 141730 - DNA, 399 bp, Zea mays
  Clone ID: MRT4577_60740C.1
ggcactggaaagaagaagaaaaaaccccctccccccctttgatacaccgcctggttctttgtacagttacagctttttgcaaggaaaggggcgggggacccccccgacagccatggcgatttggccgtttcccgcaaagggtttctgcaagctccgttcttcgtaaaaaaggctcccggcgtctcgtttcggaaccctgactcggaagcgcggggtttttctgccccgggcgtggtctcacctcactgtttatttattggccttcataacccttagttacagttagaaaaagggggagggtgcgaaaaatggtcccgcaaaaagcaatttccaaatgggtcccaaaaaaattcccttcctgtctgttttggactgccttgatggcgttcactggggggg

SEQ ID NO: 141731 - DNA, 377 bp, Zea mays
  Clone ID: MRT4577_60741C.1
cacggatagcatcttaacctgtttattcttgtcaaaacagttcccattcccatcgctcaactacccgctacaatgagtgtcacagttacacatttgcaagaaggctctggcgagagtcctctgcagggagacaagattgtcatgcactacaccggctggctgaaggacacctctaagccggataacaagggggacaaattcgactcttcggttgaccgaaactcaacttttgataccgaaatcggagttggaagagtcattggaggatgggatcacggcgttcccaccatgaaggttggtggaaaggcacggcttgagattacaagcgagtgggcatatggcgccaggggctatccaccgattatttctgccagatc

SEQ ID NO: 141732 - DNA, 143 bp, Zea mays
  unsure (1)..(143): unsure at all n locations
  Clone ID: MRT4577_60742C.1
cccggnntcaacccacgcctaccgggaaacacggaaggctgcaacaggacgcggggggcgccggccttgctcataaagtccntcgnacaagaaccgnacgaggacnaagacatgcacccgggcggaggcgctagggccacggc

SEQ ID NO: 141733 - DNA, 436 bp, Zea mays
  Clone ID: MRT4577_60743C.1
aaaaacagggaaatctggtttattttcgccagggggatacctggaatctgaaaatttgcgaatacggggcagtcgtgtcgttaaagggttacaactttaaatatgtgtcatggggatctcacttacctggatgggtcacatgagtcaatggtatggggggccaatagtgtatatcgaaaggggcgatcttttaatgggttagatccaattattcaaagaaaaaatgggggcctgtgttgccttgaaaaaaaaccaaaagggattcaggcaaagatgacttaataaatatgggttggaaataagctggagatcacttcgacaaaaagagagatctgcattgctgagctgagtcactggggctgggaactgaatgaccaactggtctttcagatccaaatatctcataggcattgccacccttggggggcttatcccc

SEQ ID NO: 141734 - DNA, 417 bp, Zea mays
  unsure (1)..(417): unsure at all n locations
  Clone ID: MRT4577_60744C.1
ggaccaaatataaaaaatatactaagacctataataacaaacaatcatcattacactaatcacgtcatatattttagtttaattctatttagaaatacaaataaatgttaatagtataatctagttaaacttgatatcgtttggctgcacttattttttggatggaggaatcactagttaattaatctaatgggcaaataaattaaacacggatatcattatatgtatcatcgggacgccgccattgatgtgatattgctcagctggaataggcgacgtagatcttaatctccgacgagtcgaagccgttgaacctggatccggcacttgtggagtaggcgcccatgtcgtcgaagacgagccagtcgccgacgctcatctctggcagctgatacccggncaccactttgtctggga

SEQ ID NO: 141735 - DNA, 501 bp, Zea mays
  Clone ID: MRT4577_60745C.1
gtcacctttttttttttttttttttttttttttttttttttttttttttttttttttttttgacagggaatcactttaaacatagtccacgcctaccagattttcaaatcaacaatgacaatcgatcactggaaaccttaactactgaaatatccaacaggcaggggaatagcccaaagcatgactcattttatgcaaaaactggcaggtggataaacttatcaagggaaaccagggccccagtactgggtgaaataaaaagcaaaccttaaagggccgaaaagggataaattaaacattttccataacccattaaacattcggccctgcaaaactggaaacattaaactaccaaaacaaggggcttgggtctacaggcagttcattagtagcgatcattaaaacgtcctcccctggtagggggatcatatgggccaagcctctccctggaatttcctccatcataaggggcacttcctccaccggcggggggaccattcc

SEQ ID NO: 141736 - DNA, 831 bp, Zea mays
  Clone ID: MRT4577_60746C.1
gccgctgccaacgtctatctgcgcccgcccgcccgcccgccaagtgagattcaaaggtaggacgacgggggggtcgagttcttgtcggtttcattcctggccgccgacttcacatgtcaacaaccccaaggagcagaagccagggtagtaggaccactaggccgtggatcttgtcagggatggactttgctggttccagacggaagcctaatctcacggggaagattgccgtggctgctgccctcacggtcatgtgcataatcgtgttgaaacagtcccctagtttcagcggtaccagcgtgttctctcgccatgaaactggggtgacccatgtgttagtaacagggggtgctgggtatattggctcacatgctactcttcgtctccttagtgacaagtaccgagttaccattgtggataacctatccagagggaacattggagctgttagagttcttcaacggctatttccagaacccggaaggcttcaatttatttatgctgatttaggcgatgccaaagctgtatccttcctctgaagtttaataacctagtgccccccttccccttacatttctgtgttgatgagatttgttttgcacttaaccgataatcaggtgaacaaaatattttcggagaacgcatttgatgctgttatgcactttgctgctgctgcttatgttggtgagagcacaatggagccactcaggtactaccacaacataacgtcaaacacattgacagttcttgaggcaatggcagcacataatgtaaatactctgatttactcagtacgtgtgcacctatggtgaaactgatacaatgccgatt

SEQ ID NO: 141737 - DNA, 252 bp, Zea mays
  Clone ID: MRT4577_60747C.1
gtcagcaaggtttcagagtttttgaaatatgccaacatagttgagtgatggcaaatcaaaagtttaaaatatcaaaatttgaaatactgagttacggcattaataaaataaaaggtcaaaactaattttaaagttgcaaaacaaaaaccttaaaatttggaaatcttgctaactacaaaacgacctattaggttgtaatactggaaaatttgggaatattattttatagttttaaaaaaagcttaaaacttt

SEQ ID NO: 141738 - DNA, 244 bp, Zea mays
  Clone ID: MRT4577_60748C.1
cactatgccccacaacccttttacctttaaaattcttaccgccattcttttgttcttaatgccgctttctaagcctaaaccgatggatttatttctagaccggatcataacgaacaatctgattctctgagttataaacgaaaaattttacacgaacacacaacgtttaagctatctaactttaggaaaaaaaattgtaatacctaacaatactacattttaaaaaaaaatattaaaatttatc

SEQ ID NO: 141739 - DNA, 706 bp, Zea mays
  Clone ID: MRT4577_60749C.1
tttttttttttttttttacatcagaatagtcaggctgtgtttagatgatcaaatcgtctatggggaatgtgtgattcgatccatcgacgaaaagagtgtgcttgtctgcttgaaattggtgatacaacctctgcactaccgttttcttgacactctggctcagaatctcaatagtcttggccttgctgtgccagttgtggctaacaaagacacctcgacactctcccttgccatcgctgtagtaaatgttaccgttggcgtggtcgcaagggatattcttaacgtcgttgggctcgttgaagaggtagcggatgtagtaggagaaggcggactgctcgtgcgcccacttcgtcttccacgtgtcgcagccttcgattgtgtttgggcagtccttccaggccttgaccatgtcctggctccgttggctcgctctagcgatgacgaagcctgtgttgagaatcaagtttccttgagggtcgtagtcgtctttgttgtcgacatcttcggccatagaaatgagagtctcgggagtgatgtcccagagattcatcagccattcgatcggaagttggagatgagtaaatacggcatcggagtcgaggataacgacgaattcgtgggtcttcagagcctcctttagaactgcaggcttgacccatgtgccatagcgatccttataattaggagcccggacgattcgataatc

SEQ ID NO: 141740 - DNA, 231 bp, Zea mays
  Clone ID: MRT4577_6074C.1
atgcaggactgttcctgcctagttcagtgggtatcactgacacatgtgagattggcaactttagagtacacacagtcatgatcctagaacagcaggacatggtctgctatacagctcagattctcgtccgaatcctctcacatggtggctttatgaagatccttggcgaggacggtgatgcgagcttcttgcttctgaaatatctacctgggatggagtgatagtaacacc

SEQ ID NO: 141741 - DNA, 2187 bp, Zea mays
  Clone ID: MRT4577_60750C.1
aaagactcatccctcagattcatccaagaggccggtccatgtgcagtcaatatagccttcagacaattggttctccaccatagaaaaaacgtagctacattgtacctcgaggccggccgggccctggctggctccgcctcctccgttccgtctcatcgctccttcctcgtcagttgttgccaccacccctccctcccatcctctccgcgtcgccccccatcccatcttggcctggacacctgggctgcctcgctccgtttccgcgctcgcggacgcgccgagtcccggccgaaccaggcgcccgccctccctcccgccgctaccagcgtcgatctgcgaccgaagagcgattcagaggcagggtgagggggggagacgagttcttgtcggtttcattcttggccgccgacttcacatgccaacaaccccaaggagcagaagccaggctaggaccactaggccttggatcttgtcagggatggactttgctgattcgagacggaagcctaatttcacggggaagattgccgtggctgctgccctcacggtcatgtgcataatcgtgttgaaacagtcccctagtttcagcggcaccagcgtgttctctcgccatgaaactggggtgacccatgtgttagtaacaggcggtgctggttatattggctcacatgctactcttcgtctccttagtgacaagtacagggttaccattgtggataacctatccagagggaacatgggagctgtcagagttcttcaacggctatttccagaacccggaaggcttcagtttatttatgctgacttaggcgatgccaaagctgtgaagaaaatattttcggagaatgcatttgacgctgttatgcactttgctgctgttgcttatgttggtgagagcacaatggagccactcaggtactaccacaacataacatcaaacacattgacagttcttgaggcaatggcagcatataatgtaaatactctgatttactcgagtacgtgtgcaacctatggtgaacctgatacgatgcctattgtagaaacaactcctcagaatcctatcaatccatacggtaaggcaaagaagatggcagaggacatcatcctagattttacaaaatcaaagaagcaatcagacatggctgtaatgatcttaagatacttcaatgtgattggatcggacccagaggggcgactaggagaagctccaaggccagagctacgcgagcatggacggatatccggtgcttgctttgatgcggctttgggaatcattccagggctaaaggttcgtggaactgattactccactgcagatggaacttgtattagggactacatcgatgtcacagaccttgtagatgcccatgtcaaagctcttggtaaagctcagccaggcaaagttggaatctacaacgtcggaacaggccaaggtagatcggtgaccgagtttgtagaagcttgcaagaaggcaaccggagcttccatcaaggtcgaatatcttgcccgtagacctggagattacgccgaggtatacagcgacccgtcgaaaatcctcagggacctcaactggacagcccaatacacggatcttggccaaagccttgcccaggcgtggaaatggcagaaggcgcacccgaacggatatgcgtcagcctgattcagagctcaaaaggttgagagactcatcactcagattcatccaaggggtccgtccatgtgcagtcaatatagccttcagacgattggttcttcaccatagaaaaaacgtagcaacagcaacagaagagtcgtgattcttttattgcagagctggaagaagacaagagtatcgcagggagaatacactacctgttccttgattagtttcatttatatgtataggtcctcttttcgttggtgtcattttagtacaatttggtttaataacacacaaggaaatcgtgttgtagatagggtagatcaaatctcgtgtatcgaccttcgtcttcgtggtggtagaatgaaaggatatataaataagttggtgtaaaaaaaaaaaaaaaaaaaaaaaaaaaaataaaaaaaaaaaaataaaaaaaacaaaaaaacatacaaaaagcatacaaacaatacggggggtccttctatagaggaaaccataaatttcaataccacgtggcacgcccaaatttaacaacgttt

SEQ ID NO: 141742 - DNA, 2054 bp, Zea mays
  Clone ID: MRT4577_60751C.1
tttgggggtctcgaggccggccggggagcacctgcctgcctccatctcctccctcttcagttgttgccaccgcccttccctcccttcctctccgcgtcgctcgccgtcccatctttggcctggacacctggcctgcccccccttcgcggacgcgccgggtcgccggccgaatccgccctcccgccgctgccaacgtcgatctgcgcccgcccgcccgcccgccaagggagattcaaaggtaggacgacgggggggtcgagttcttgtcggtttcattcctggccgccgacttcacatgtcaacaaccccaaggagcagaagccagggtagtaggaccactaggccgtggatcttgtcagggatggactttgctggttccagacggaagcctaatctcacggggaagattgccgtggctgctgccctcacggtcatgtgcataatcgtgttgaaacagtcccctagtttcagcggtaccagcgtgttctctcgccatgaaactggggtgacccatgtgttagtaacagggggtgctgggtatattggctcacatgctactcttcgtctccttagtgacaagtaccgagttaccattgtggataacctatccagagggaacatgggagctgttagagttcttcaacggctatttccagaacccggaaggcttcaatttatttatgctgatttaggcgatgccaaagctgtgaacaaaatattttcggagaacgcatttgatgctgttatgcactttgctgctgttgcttatgttggtgagagcacaatggagccactcaggtactaccacaacataacgtcaaacacattgacagttcttgaggcaatggcagcacataatgtaaatactctgatttactcgagtacgtgtgcaacctatggtgaacctgatacaatgccaattgtagaaacaactcctcagaatcctatcaatccatatggtaaggcaaagaagatggcggaggacatcatcttagattttacaaaatcaaagaagcaatcaaatatggctgtcatgatcttaagatacttcaacgtgattggatcagacccagagggacggctaggagaagctccaaggccagagctacgcgagcatggacggatatccggtgcttgctttgatgcagctttgggaatcattccagggctaaaggttcgtggaaccgattactccactgcagatggaacttgcgttagagactacatcgatgtcacagatcttgtagatgctcacgtaaaagctcttggtaaagctcagccaggcaaagttggaatctacaatgtcggaacaggccaaggtagatcagtgactgagtttgtagaagcttgcaagaaggcaacaggagcttctatcaaggtcgaatatcttgcacgtagacccggagattatgccgaggtatacagcgatccgtcgaaaatccacatggaactcaactggacagcccagtacactgatcttggccaaagcctcgcccaggcgtggaaatggcagaaagcgcacccgaacggatatggaccagcctgattcagagttcaaagattgagagagactcgtcacgcagatccaaagggtccatgtgcagtcatgtagccttcagacagttggttcttcatcaccatagaaagatagcaaagagcaacagaagagtcctgattcttttattgcagcgctcgaagaaggaaaaaatatcacagagaaccccctacctgctccttgattagtttcaaatatatatatataggtcctcgttgacattttaatataatttgatgtgtgctgaggcgctatataataacacaaacgaaattttgttgtagacagggtagatcgatctcgtgtatcaacttttgtggtggtagaatgaaaggatataaataagttgatgtaagtttttgtttccaaaaaaaaaaaaaaaaaaaaaaaaaaaaaaaaaaaaaaaaaaaaaaaaaatgtttagattaacttttcctaggagaagacaaactggtggaatctttgctacctacgactgcttaattccatacctcaaggt

SEQ ID NO: 141743 - DNA, 572 bp, Zea mays
  unsure (1)..(572): unsure at all n locations
  Clone ID: MRT4577_60752C.1
cgggttatangaattttctttttttttaaaaaaaaatgtgatctcggttcgccttccttggagatcagtgcacgcgcccagttacaagttgacaacttcggttcgttcggtgtgggagggggagctggaaagattgaaatttgatggcgcctggagttggaagcttgtggaggagtaggggatccattaaagacttcagttacagctgaacttttgggcattaactccgcaggaaactcgttcatttgtctgcggaatcaaaccatggctctggcagcggaattctgagcacctcaggttcattttttttaaactctagcacaggaaatagttcgtagcatgattacttggattcggtaaaaaagggggaaaattcctttctgggttgcaagtctattgtgattgactgaatccactgtcatcggacctatgggcacttggtcagattacagcgagaatcgtgatgagggtgtcaagacggagtgtattaagcattactcttagatgcttcactcgtggccttctatgcttttgcagcaaagatttttgcctgatgcaggcttttgtcgatt

SEQ ID NO: 141744 - DNA, 187 bp, Zea mays
  unsure (1)..(187): unsure at all n locations
  Clone ID: MRT4577_60753C.1
nccagctgcccnggttccgtaccagcccctgtggcgtctccgttgccgtttcgccctgcttctgtttcatgatgtttgggagatctcctttgtgtctgcctgtgtgtctttgtgtgttgtattgctgtgggacgacacacattatcatgtgtggtggggccaatnatatatgcatcataatagagtg

SEQ ID NO: 141745 - DNA, 1806 bp, Zea mays
  Clone ID: MRT4577_60754C.1
atggagaaaattagggaagtgatggctggactattccaatataggttcagagttagtgtagctagagtgggacaatcatatcagaagccatatgatcacctgtttgaaactgtcccatatccacaaggggcaaggataccagagttttctaagttttctgatgtatatatcgctgagtttgtttggccagcaaaggccaaatcttctgcatgttcttccttacaaccggttcaaaagaatcggcaagaagagattaaatttacctttaatgttgccaaatgcgataggatatttgacgaactactaaaaaatgacaacattaaattaactcatactattcctcctatggacaaattaaagagatgtgcttattcagatcaagggggagcagtgtctccgaaccaccgctggcgttttgactacctgcatgggtgccgacgaatccggtttctagaagtgcttcgcgcacgttcgcttgggttcctctccaacactcgtggaaatcatttggttggtggcatcattgccaaattacctcctacttggaggatatttttcatggctctcaaacacaagaaggaggcaatgattgttaaaagtataatttctactcttgatgttgaggaggtgagatccaaggatgtacctcgttctggtccaatggatagtggcacctctaatgccaacgtggttgaaggtaaatctggtgggaaaaacaaaaacaagacaaaccggaaaccaaaggccaagcagaacagtgattttaagaagaaaaacattgtagacctgacttgctttgtgtgtggtgaatctggtcacatagctagaaaatgtcgtaatagaaagggcaagaaaggtgatggtcagaaaactgtaaatgtggctattgctgatgctgggaattctggtggtggtttgttccgcctttcagtggctgatgattgtaataatgtggcaaactcagtttcatattctgaattgaatctctatcttgttaagacgaaagatgaggcacttaattgtttcgaaatctataaggcaaaggtagaaaaccaactagcaaagaaaattaaacgggttaggtctgatagaggaggggagtatctttctaacaaattcggtgaatactgtgtggaacatggaatcatccatgagacaacagctccctactcgcctcaatcaaacggggtggctgaacggaaaaaccaaactttgatagacttggttaatgccatgttggatagttctggtttacctaagtcatggtgtggagaagctattttagccacatgctttgttctaaaccgagttccatcagctaagggtgataaaacaccctatgaaggatggaaaggtgataccctaaaaacccttgaagaggcatatgcatcaccagatgcagagcactggaaggaagcagtccacaatgaaatggagtccattctaacaaatgggacttgggaaatatgtgacttgccagttgggtgtaaacctatggaattaaatggatattcaagaaaaaactcaaaccagatggtattgtcgataaatacaaggataggcttgtggccaagggatttacccaaaataaaggcagctttccttaatggtgagcttgacgaggagatctatatgaagcagtcagatggatttgtgacacatggacaggagaacatggatttgggagaggcagatgttatattaaacataaaactgattaagggtgagaatgggattattctgaaacaatctcattatgtggagaacattccaaagcttctccaacaccttttgatcctagtctaa

SEQ ID NO: 141746 - DNA, 403 bp, Zea mays
  unsure (1)..(403): unsure at all n locations
  Clone ID: MRT4577_60755C.1
gggggggggggggggtttaaaaaaaaattttttttttttttttttttttttttttttttttttgggggccccccgttaaccgcccttttttttttcaattacccgggggcaatgctgggttttttataacccttacaacatcaagtgtgggtaagcacagggttttttannacggcccccccttacccgataacaaaaaaaaattaccgcccatcacggggttagggcagccccctggcctgatgcttgcgtttcagcaaacttttcttgtgcttgtgccccttgtggcccttcttgcccttcttggactgagggccggcctccttgttgtcttttttgtgcgccgtccggtcctcacggggccttgagaatttacctttctttcttcccccctctgggttcc

SEQ ID NO: 141747 - DNA, 546 bp, Zea mays
  Clone ID: MRT4577_60756C.1
ttgggtacctcgaggccggccgggacttcctctgatcctcttcacccacccaccgtgggttcgtccagccttccggcctccccccaatttaagtgggcgtgacatatgcgccgattcaccgccccctcttacctccgcggactcgtctggctccgtcgaacgagtctctttttctggtcggcgcaggtgggccagtgctcaagatggaagaagatgtaattgattcacaggcatccctagaggaatggtaagaggctaacggggcggcgctgggcaataaatatcgcaaatgtactaacaacaatgtcaacgacgacaccggcttcttacgctgcaccggcaaggactattactacaggaacaggagggagaagatggtcgtccaactgatgtttgagaagtacgcaggaaaagagaggttaactgattgacgtattgaaacgacgccggcctgaactggaacgcctagggggtctacatactataaatgaggtaggtgtttgagacagagactttgacacttggcgaatacatattcttcactga

SEQ ID NO: 141748 - DNA, 348 bp, Zea mays
  Clone ID: MRT4577_60757C.1
gggaggcgtccgggtccggtcttgtgtcagtgcatcttcggctaccattagaagagtcggctttgccagtggcttagggtgttttggacacccaagtgggtgatgccattagggcacctggatggctgaaccactagaaccatgttaaacgcgggtataaattaatataaaacacactggattctggctactcagatggcaatgactgaagatgggaatctgctgaaccaccagaggatatatcttgatcaacaaaaggacgcgtgaccttgcttatatagacaattctgttgaaaagtctgccacatctgattacagcccttctattccattttggactagatacat

SEQ ID NO: 141749 - DNA, 649 bp, Zea mays
  Clone ID: MRT4577_60758C.1
attacttcactccaacacttcaaacactttaacactttcaactcaacaaccttcaagatgtatgcctacactgtcatcgctttcctcgccgccgccgccgctgctgccggccctggtccttccataacacctggactgttaagcaggctgccaactcctgcgccaacggccagagcgtttactgctgcaacaaggtcaccaacaagcccgctggcaactctgttggcgacggcgccggcatcgccaacggcctcagcctcttcagccagtgctctaaggtcgatgtcaacgtcatcgccattgccaacaacctcctcaacaaggagtgccaggccaacgctgcctgctgccaggacagccccggcaccgccggcgctggtctcgtcaacgccgctctcccctgcgttgctatcagcaaccttgtctaaggttgagcttcgaggagaccctccgggtattcaatgggacgtctgggggcaggagaaggcctggtatcgtggccttcgaggacatgcttgagaagtcttgacaacgcggcctgaccgcttgatacttgctggaattagagatcctgtacgattttatcttcgggtgttgcttcgcttcaccagtgtgcgccttttaatatgagatttatcttcttactacg

SEQ ID NO: 141750 - DNA, 637 bp, Zea mays
  unsure (1)..(637): unsure at all n locations
  Clone ID: MRT4577_60759C.1
tcccgnggtcgcccagcgtccgggngtacccgngcggccgtgtctgttgagtgtgtttaaattagttttacttatgaagtgcggcgaattagtggcattgaanaatagattttgtattttaagagattattcgataagttgtcaatgttgattgtgttgggtagcgaggtcgaagccttgccttagtaactggtgcgatgggggggggatcaatggttagaatgccctagtggaatataggttaattcaattgtaatctaagaattcagntgcgaaataaacactataggtctttagatttaaagattatggtctggtggtagtctttgatgtctgatgaggttccacttgctaaagcgaatgatgtgatgccatgttaattattgtgctaaacaagttaacctagagaattagtttaaaaagttaattaaacaatttctatacttattccaagtttgaatgtcgaggggtaggttttagaagaataaaatgcttatacatagtttactgttgtgtgctgttagaattaaatccgactaagttagaatggcataactatagttttaatgtgatatcgacatttagtattttcgaactagatttacaatgtcttgctataggtattaaatattttttc

SEQ ID NO: 141751 - DNA, 482 bp, Zea mays
  Clone ID: MRT4577_60760C.1
cccccccgcgagttttttttttttttttttttttttttttttttttttttttttttttttttttttttttttttttttttttttttttttaaaccgggggcagcccccccgcccttaaaattttccccggcttaaaaccccaattaaatttggtccctttttttttttcgttccttgaaaccggcctccccaaggaaggcctgccccccaaatttaaacccccccccccggaaaaaaaaaaaccttgggggcggcaccttgggggggggggttaacccggggtggcccgacccccagttacggttttggttacaaaatggaaaggccggttcctttgggaaaaccccaaaggtggggcccaacccgtttgggccgttaggggccccccgtgggggcgggggccccccccaacccaaaggggggggttccgttaaaaaggggttgccccacccgggaccccttcctttatgaccaaggccggg

SEQ ID NO: 141752 - DNA, 415 bp, Zea mays
  Clone ID: MRT4577_60761C.1
ccgaatccccaggcaggcagttttgttcggagggcaggaagaccgaagaccgagccatgcgggggctcgggactggaacgggacaggaccccaaaatattagatccttgctgcccgtccgaccgtacccgccgacgcgttgttcttgtcggccgggcctcacctagggcctcctgtgctcgagggggatcggatactccacaggctgggcgatggtgctgcgggtctttggctactgatttctcacagggagccccgggttggacttccacgacaaaatacttggctttatgaagggctacaagagcacctttaatcttgcttgaattgaccacagaggcacacctagagcatttcggcggggacctggacgcttggaaccgactactaagccttatgctggggaaatgcatatt

SEQ ID NO: 141753 - DNA, 690 bp, Zea mays
  unsure (1)..(690): unsure at all n locations
  Clone ID: MRT4577_60762C.1
gggggaaccccccccatttttcaaacaaatttggggttatattccccccaaacttacgaaaaccttacagtccccaaatagcaccgggaaaagggccaaacccgcctagcagtttgcaattttttggaacaaagccgggctaaaaaccttcccattttttttttttgcccccttgcggggcccttccaaaaaattaaacctggcaggggggggccccggggggggggggggtttcatttggcacggcctcagccccccaaaaaaaaatttttttgcccgttttggaaacagtttgcaggacggggccggggggaaaattgcccttcagggggaccttttggtccatgggggccaccccggaggactcgaccccttcctttttgccgggggcccgtttggcaggtccaaaaaagcccttaagggaaatgccaaccttgggccaaaaagggggggccattanccgaaagggggggggggcccgggcggctccgcgggggggggggaaaatctccccccgggaaggcaaggggagggccctttgccgaattccctccccccggggggtcccctgttttaagaggggcgcccccgggggggggccccccctttgccccctttgggggggggggatgcgccgcgcgcgggggtcttggggggatagaaggggggccgggggcgaggcgggggggg

SEQ ID NO: 141754 - DNA, 910 bp, Zea mays
  Clone ID: MRT4577_60763C.1
agaggttctatacaaaatagctaaataaatacatcatatcatgacaacaatcctccgtaaccatagttaactaggagacgacagcctagacctctccgaactcatcgtaacatccttcatgctcctcatcttgcagtacttgttcttgatctggtgtgattatagaaagagtgatctcccatatagtcattgctcaacaagtgtggggaaaagtgtagtgtaaggcttggcaaggagaatggttaaggctaagcattgcttttagtggtggtcaaaattttattagcaattactagtataactgtatacaaacccaattaaataattgatcacaataatgaataaaacccacatgcaatgcaatgtatgacaggttaagtttaattcaacaaattactcatgtgaaggttcgagccactcatgaccatgagcacggctgatataccaattttacactctgtagagattgcgcatttttacccataagttgtgttcccttttcacctgggttgtacagacccttaaacacttccaaggtgagttggcaatggttcactacgaggcccttacaaagttccactagctcaagaaatcccactgcggctttaggtagaggggggtataggaatccctcgtccgaaaagctatcacaaactattcgatccgagaaccttcctatacttgcagcaactcctccttgcttgccctttagggtaaggtaatctctcactagcatccctaattaatcagccaagggcatcccattgaacccttgtggtagcactattttcccgggtggtcgctccatgttccaattaacataatgatctgggacttgagatttccaggtaccaggatgatcttcagatgacacgtgacctcgctcgccaaaccccacggcggaggccat

SEQ ID NO: 141755 - DNA, 186 bp, Zea mays
  Clone ID: MRT4577_60764C.1
agtgcaaaataattatagataactgctggagtcagcctaacatacaaaattcagtgatcccagtaacaaagcttatcaagttcagatatccaagcgtgaactttctttggaaaagaaaaaaaacaaaatgtcaaaaaaagcatgtgcccgaactgtaatacaaacgtcgagcacctaagagcaccg

SEQ ID NO: 141756 - DNA, 172 bp, Zea mays
  Clone ID: MRT4577_60765C.1
atcctcatctgtcctagggacgcagctggagaccgcgcgcagttgcccctggtgtgtcctcacagagcaatcatctgctctgaccttgcctcttcctgcccttgcccctccgccgatcattgtcacaggggtcgcttgcacctagacgtgggctgccagtccctgggtccgt

SEQ ID NO: 141757 - DNA, 482 bp, Zea mays
  Clone ID: MRT4577_60766C.1
cgcgtgcgcacgctcggagcctgtagacgcggacggccttcgttttttttttttttttttttataactgtttttttgttttggttttttttttttttggtctttttttttttgttttttttttttttgggaggaaacccaaagcaactttttttttgaggaactgaaaagagccttattacaacaggcctaacggagggactttcggaggggggccttggttttttgcacaaaaccgggcaggggggaaccccacttcacggaacgggacggggaaacccaaacaactagggggaccaccggacctccttagtttaaaaagaactaaaatggggaagccgtttggaaagcccttgggggggatgcccggggggatcccctttggggcggaggggttggggaaaaacaccttgtaggggaacccggccgggccgttggggttttttgggggggggggcccggttaatggggaccacccctttt

SEQ ID NO: 141758 - DNA, 1395 bp, Zea mays
  Clone ID: MRT4577_60767C.1
tgggaccctcgaggccggccggggctttttcgcccaaaacacttcccagccctccacgcaccccgctgccgcggctcgaacttaaaccctagagccgccggcccggtcgcgctagcgacacaaatctcaaatcacccggagagaactcgctcgcgaaggctgaactcatggctcgcgtcttcgttgggaacctggatccgcgtgtcacggcgcgggagattgaggacgagttccgcacgtttggggttctgaagagtgtatgggttgctaggaaaccaccagggtttgccttcattgacttcgatgaccgcagggatgcacaagatgccattcgcgatttggatggtaagaatggttggagggttgagctgtcaaccaaagatggtggtggccgtggccgagaccgtaatggttctgatatgaagtgctatgagtgtggtgaagttggccactttgcacgtgaatgtcgcttacggattggttcgggagggctgggtagtggaaggcgtcgcagccgaagtcctagatatcgcagccggagccgaagtcgcagccggagcccaagacatcgaaggagcccaagctatggcagaaggagctacagcccacgagatcgttctcctaggaggcgaagttacagcaggtcgccaccgagatctcgtgcacggagtctcagcaggtcgccgccactgccaccaccgcctcctagaaataacagcatgtcaccacggggagcccgagaaatgagcagatcgtcaccaccacctcccaaaaataacagcagttcaccacgggaagcccgagaaatgagcagatcgccaccaccacctgccaaaaataaccgcagttcaccacgggaagcccgagaaatgagcagatcgccgccgccaccacctcccagaaataacagcaggtcaccaccgggagctcgagatgtgagcaggtcgccgccaccacctcctgatgccagaagaagctatagcagatccccagaacagcagccccagcacgagtccccatatgccaatgacgcctgagaatatttagctgctcaaagatgctggaaaatgctaaggggcccagcatgttttgcccatgcgcgtcggtacaacttataggatccagtctgagattttgctcgtgttttgggtttcccttggacacaccgctgctgataccattgtagagggaggagcataacgtttccgtttcgagtattgactttgggcacttatagctgtcaagacatgacctggttcttgttagatttatatcactagattgcttttgaattcggacgaagtgttaatcgtgggctatgttgagatatttgtctaccttttcaggacgctttcgaagaaacattttcctactaaaaaaaaaaaaaaagcggcc

SEQ ID NO: 141759 - DNA, 300 bp, Zea mays
  Clone ID: MRT4577_60768C.1
gtttaaaagcaaaatgggatgataagaatgtgagcatatagtgacggctacagttcacacacaagaacagatcaaacgaccacgggacgaacgatcaagcaatcaatgtgccatgcgtgaaccgcgtgaataaataaaacattttatgactggggtgaaccaaacacgttgcataccaacgctgacgccccgggcgaggtggctgactggaggaagtgggcaaggaaggatggccacgagcgcctcggtggcaggaacggcctctgcatgcatgccgcttgcgctcggggcagaagtacc

SEQ ID NO: 141760 - DNA, 1850 bp, Zea mays
  Clone ID: MRT4577_60769C.1
ctctcccagagtcccagctccctcactctactctggacgcgactcgaacttaaaccctagagccgcagccccggtcgctccaccgaccccaaatctcaaatcagcgggagggaactcgcacgcgaaggcaagtacgctttagatcccccattgcttctggctactaggccagcgcgcctcgattttcttctccgttttggtctaattcgtgaggaatttgggttttctcggtggagcttggttccgctccgccttggagtggatttcggtgacttctttgttcagattgtttcgctcttgcaggctgaactcatggctcgcgtctacgttgggaacctggatccgcgtgtcacggcgcgggagatcgaggacgagttccggacgtttggggttctgaggagtgtatgggttgctaggaaaccaccagggtttgccttcattgactttgatgaccgcagggatgcacaagatgccattcgtgaattggatggtaagaatggttggagggttgagctgtcaactaaagttggtggtggccgtggccgagaccgtaacggttctgatatgaagtgctatgagtgtggtgaagctggccactttgcacgtgaatgccgcttacggattggttcaggaggcttgggtagtggaaggcgtcgcagccgaagtcctagatatcgcagccgaagccgcagccgcagccgcagcccaagatatcgaaggagcccaagctatagcagaaggtaatttgctaatgacaccaattcaccacatgtattcatccagtagttttaattaagggttgggaaacacgacctagaaatcctaaaacttttgagaacgaagcaaaatttcagagataacacgttccctttaaccaagtgagtatccactatccagtatggtctcagatttgttggatagtatttaaccaaacattcgactatgcattttgactttttgagtgttgttctttatcttgcattggtactatataatacaatgcattctacaccccctcccacctgttatagctttgttagcgttggcctaatatttcaggggaacatgttgagagacttcataaaatacagatcaatgtcttcttgcctaactagcagccttttcaatgcgttattttatgttcatcctgaaaacaaatgttcggtttttccggagctacagcccgcgaggtcgttctcctaggaggcgaagttacagcaggtcgccactgggatctcctgcacggagtctcagcaggtcaccgccgctgccgccgcctcctcccagaaataacagcaggtcaccacctggagcccgagaagtgagcaggtcgccgccgccacctcctcccagaaataacagcaggtcaccaccggcagcccgagacgtgagcaggtcaccaccggcagcccgagacgtgagcaggtcgccaccaccacctcctgatgccagaagaagctatagtggatccccaggacagcagccacaacgcgacgagtccccatatgccaatgacgcctgagattctcttagctgccccaagatgctggaaaatgctaggggcccccagcatgttttgcctgtccggtcggcacaactgtaattctgtaggatcgagtctgagattttgttccagtgttttgggtttcccttgacacatcgctgctgatacaattgtggaggcaggagcacaacgtttctgttttaagtattgactaacgtttctgttttaagtattgactggatgacttgggcgcttgtagttgtcaaggcaggacctgatttgtgttaggcttgtattactagactgcattcgaatttggagaaagtgttaaaaccccccccccacc

SEQ ID NO: 141761 - DNA, 242 bp, Zea mays
  unsure (1)..(242): unsure at all n locations
  Clone ID: MRT4577_6076C.1
aaattatccaccgtagttcaatccaatgagggggggtgaaaaaaaaataaggggggaaccacaccgcaccaccncaaccaagggcggacaaggcaaatgggccagcccaactaaggcagacccagacccagaccagcccggccgcacaggaagaaaaggcacactggaaggcatagacggggaacgcccacactataagaagaaggctcagcggaacaaatgcacgaagccttgggagaaca

SEQ ID NO: 141762 - DNA, 511 bp, Zea mays
  Clone ID: MRT4577_60770C.1
cttccaaagttctagcccctctcgtgagtcctgtccaaataatggccacgcgcagcagtgtccttctgcttctgacggcgctcgccgcagccacggccgcgccgtcagcggcgaccaggaagctcatgttcctcgtccagccacagccgaacctcctcacgtaccacaacggcgccgtgctgagcggcgacatcccggtctccatcctctggtacggccgcttcacgccggcgcagaaggccgtggtctccgacttcctcctcgccctctccggcgccgcgccgccgcagggctcgccgtccgttgcccagtggtggagcagcgtcaaccagctctacctctccaaggcggcggcggcggcggccgtcagcaagaacggcgcgcacggcggcggcggcgccaagagcgcgcgggtggtgctgtccgggcaagcctccgacgagggctgctccctggggaagagcctgaagctgtcgcagcttccggcgctagcggccaaggcacgccccgg

SEQ ID NO: 141763 - DNA, 1423 bp, Zea mays
  Clone ID: MRT4577_60771C.1
tggggccctcgaggtcgtttcccgcccgaaaaagtcccagctccctcactctactctggacgcgactcgaacttaaaccctagagccgcagccccggtcgctccaccgaccccaaatctcaaatcagcgggagggaactcgcacgcgaaggctgaactcatggctcgcgtcttcgttgggaacctggatccgcgtgtcacggcgcgggagatcgaggacgagttccggactgtttggggttctgaggagtgtatgggttgctaggaaaccaccagggtttgccttcattgactttgatgaccgcagggatgcacaagatgccattcgtgaattggatggtaagaatggttggagggttgagctgtcaactaaagttggtggtggccgtggccgagaccgtaacggttctgatatgaagtgctatgagtgtggtgaagctggccactttgcacgtgaatgccgcttacggattggttcaggaggcttgggtagtggaaggcgtcgcagccgaagtcctagatatcgcagccgcagccgcagccgcagccgcagcccaagatatcgaaggagcccaagctatagcagaagcccgcgagatcgttctcctaggaggcgaagttacagcaggtcgccactgggatctcctgcacggagtctcagcaggtcaccgccgctgccgccgcctcctcccagaaataacagcaggtcaccacctggagcccgagaagtgagcaggtcgccgccgccacctcctcccagaaataacagcaggtcaccaccggcagcccgagacgtgagcaggtcaccaccggcagcccgagacgtgagcaggtcgccaccaccacctcctgatgccagaagaagctatagtggatccccaggacagcagccacaacgcgacgagtccccatatgccaatgacgcctgagattctcttagctgccccaagatgctggaaaatgctaggggcccccagcatgttttgcctgtccggtcggcacaactgtaattctgtaggatcgagtctgagattttgttccagtgttttgggtttcccttgacacatcgctgctgatacaattgtggaggcaggagcacaacgtttctgttttaagtattgactggatgactttgggcgcttgtagttgtcaaggcaggacctgatttgtgttaggcttgtattactagactgcattcgaatttggagaaagtgttcatcgtgctgtaacgtttccgtttcgagtattgactttgggcacttatagctgtcaagacatgacctggttcttgttagatttatatcactagattgcttttgaattcggacgaagtgttaatcgtgggctatgttgagatatttgtctaccttttcaggacgctttcgaagttgagataaaaaaaaaaaaaaaaagcgccctcgtgc

SEQ ID NO: 141764 - DNA, 1370 bp, Zea mays
  Clone ID: MRT4577_60772C.1
ttgggtacctcgaggccggccggcctttccgtccaaacacttcccagccctccacgcaccccgctgccgcggctcgaacataaaccctagagccgccggcccggtcgcgctagcgacacaaatctcaaatcacccggagagaactcgctcgcgaaggctgaactcatggctcgcgtcttcgttgggaacctggatccgcgtgtcacggcgcgggagattgaggacgagttccgcacgtttggggttctgaagagtgtatgggttgctaggaaaccaccagggtttgccttcattgacttcgatgaccgcagggatgcacaagatgccattcgcgatttggatggtaagaatggttggagggttgagctgtcaaccaaagatggtggtggccgtggccgagaccgtaatggttctgatatgaagtgctatgagtgtggtgaagttggccactttgcacgtgaatgtcgcttacggattggttcgggagggctgggtagtggaaggcgtcgcagccgaagtcctagatatcgcagccggagccgaagtcgcagccggagcccaagacatcgaaggagcccaagctatggcagaaggagctacagcccacgagatcgttctcctaggaggcgaagttacagcaggtcgccgccactgccaccaccgcctcctagaaataacagcatgtcaccacggggagcccgagaaatgagcagatcgtcaccaccacctcccaaaaataacagcagttcaccacgggaagcccgagaaatgagcagatcgccaccaccacctgccaaaaataaccgcagttcaccacgggaagcccgagaaatgagcagatcgccgccgccaccacctcccagaaataacagcaggtcaccaccgggagctcgagatgtgagcaggtcgccgccaccacctcctgatgccagaagaagctatagcagatccccagaacagcagccccagcacgagtccccatatgccaatgacgcctgagaatatttagctgctcaaagatgctggaaaatgctaaggggcccagcatgttttgcccatgcgcgtcggtacaacttataggatccagtctgagattttgctcgtgttttgggtttcccttggacacaccgctgctgataccattgtagagggaggagcataacgtttccgtttcgagtattgactttgggcacttatagctgtcaagacatgacctggttcttggtagatttatatcactagattgcttttgaattcggacgaagtgttaatcgtgggctatgttgagatatttgtctaccttttcaggacgctttcgaagaaacattttcctacttgcttttggtcaaaaaaaaaaaaaaaaaaaaaaa

SEQ ID NO: 141765 - DNA, 480 bp, Zea mays
  unsure (1)..(480): unsure at all n locations
  Clone ID: MRT4577_60773C.1
cggnggnnnncgcgatgggtacctcgaaggccggccgggaactcataccaaacagggagccaccaagatctggtttgcctgttcccatctcttccccagatcacaaccccaagccaccctgcatatacctcaccaaactttgttgaggggtgacggcggctacctttgcaaacatcaagtccgaggcatgccttaaaaagcgccatgacaaccttatcactcctacatacatcactgcgctacagaccttgcaaggatgaatcttctgcgaaaacatgcttgtcggctgctccctcgtccaaacatatcaacggatcaacgtgatttaaacacattgatgggctccccacgttgaccgccactactgcaccagacccaatgtgtgaatgctgaatcctcacccagttcctattactcccaactacaaaagtttgtagatccatcaggctccagctgccagagtcagccaccatgactcat

SEQ ID NO: 141766 - DNA, 368 bp, Zea mays
  Clone ID: MRT4577_60774C.1
ccaacctgagcacaccatcgagtgttcgttttggagcagccatggctacatagggggtcggctgagctagcacatgccttggcacccgaatatcggaccctgcgacactgtacgcacacctagtgaacgggttccggtttgacatgtgcggtaaggccaaaactgctatgaagaacgtggccacgacatactgctcctctgaacgatcgacgtgagtcacctgagccgtggagcccgactacctggacggatgcctgatctgataatacggattagacacgtacaggctcacgaagcctgtcgagaacatcgagttagagttggactcgctggactaaagcctgtgcacgaatgagggctcaagtata

SEQ ID NO: 141767 - DNA, 641 bp, Zea mays
  Clone ID: MRT4577_60775C.1
aaaccaagccaatatttgtccaaaccaacaaactttagccagcatttgcttcaaggtcaaacgttggtggcatcaaataattttgggcatgccagtggggcatctcttggcgagggaaatggtagcccgagttgggcttggtcatctgttcagtgcatgtttgatgtgtcaggagtttggttccactaaaaaaactcggccggggagggaaagatcgtcctcccagtattatattaagaagagaccgaaaaatggtcccgactgagaaaacccccgaaccctgatcccccatcactaatgggccgatcaactgtccactctgcgacgacccaaccggagggtggcgcgcaggatatcgatcctcgagagtgggcgaggcgcagcaaggggattttttttttaaccaagcccaaaatttgcccccgagggggattgaatctgggacctggaggtgctactcggaagccttaaccctaacgctagaggctagtttgtttccactaattcttgatttttgtgattatgaaattttaaatggcaattgcttttaaatcgaacatcagtttttggatctgaaaaaaactcggccggggaggggaaagaccgcccttccggttttatattaagaagagaccgaaaca

SEQ ID NO: 141768 - DNA, 160 bp, Zea mays
  Clone ID: MRT4577_60776C.1
gtaaggaatgggcgggccgaccgaccagagaagactccatccagcagctcatttttttatcacttgacatgccaccctagctgctgccgtgtctttctttctgaataaatacatgccactcacatggtgctcctccatcttccaagtcaccaacgcaaat

SEQ ID NO: 141769 - DNA, 460 bp, Zea mays
  Clone ID: MRT4577_60777C.1
ggacgcgtgggcggcgcgtggggttaaatcggacagttttactggattgtcgacctggagatcaacgtatactgaaacgcacgaccattccgaataaaaagacatgaacggatcattattagatcaggacagggccaagaatgagccagatccggagtttgatagtcaaatgctgcccgtcgtctacgatatgatgattggaacggctgtacgatgccaactatcctcccaatcgtgcagcatatacagccttctcaagaacaacgcaaagtaatatcaactggagcggtatttacatcatttctcaacttgagaactgcccagactgtgacgcttcagcgtatcggagaagatcagattttaactcaattgcagaaggacaaagcaggtgatacggctagcactatagtcacggcagaaaatgcttactggcacatggacgcgcctattaaatgaacat

SEQ ID NO: 141770 - DNA, 186 bp, Zea mays
  Clone ID: MRT4577_60778C.1
catgcactttcaccattcacatatttcatttacaccaatcatcttcacaaaagagcgcatgatcctataaactttgccctggaaaacactcttattattaaacctcttactcatactcatagcactatctactttcaccaataaatccaacacatcccatttctaaccttctcaacacactcaaat

SEQ ID NO: 141771 - DNA, 371 bp, Zea mays
  Clone ID: MRT4577_60779C.1
agcaagcagatcgaggtaggactgaaagagtgtttgcagtgggggatcgggtgttcctcaaattacagccctactgtcagtcttctatcactgaacgggtcaaccagaagttgtcattcaggttcttcggtccatacactatcatacggcaaattaatccagttgcttatgaactgcagttaccagccggcagttcagttcatcccatattccatgtctcgcagctgaaagccgtggtcggtccacataccccggtgagcccctctctgcctgactcagttcataatctgcagataccaaaaacagtgctcgataccagactacgacaccgcgccggcaaagtcatcacccagctgctgatcaaatggacc

SEQ ID NO: 141772 - DNA, 1491 bp, Zea mays
  Clone ID: MRT4577_6077C.1
ggggtggtttttttttttttttttttttttttttttttttttttttttttttttttttttttttttttttttggggccccatgcaaaagttataacttgcaacacgaaccctagaccaaaaagcccaaggaattcaaccccccataaacgggggagggggggcttgatttcaataatttcatctaaacaaaaacgatcacaaaaccatgtcaacccacggcaacagctcggtaaaacaaaacaaaatctcattgttctcatagttcaaagacgaatgttatgctagctcatgttgacacatcactccatggaagatccaccagcaccgaaagcaccgccgccaccgcggccaaagccaggtctgctacccctaaaagatggttggaaatctgcaggagcaccacccttatcaccaccaaagtcacctggagcgccacgtggacctcctctgtaaccatccctatcaccaaacctaggcctgtcaccttcataacgaggagggcccctggggcggtcaccaggtgggccagagccgaaggggcgagacgggggcttggaagacttcttgagggtattaggcacaacctctgatggcaggttgaggaagctgcggaggtgctcaatgccatcgttggtgaggtaccagtagtagtactgccatgagaaggtttccctcacatactccttcgacttgaagctctgcatgagcttaatcacctccaagttgggcacatcaagcttggggtgcttggccaggttgtagtccttcttggcgtacaagaccccctcatggaagaggtatttgcagatctcgcggcggttcttcttggagggggtcttgtacgccaagaaggactacaacctggccaagcaccccaagcttgatgtgcccaacttggaggtgattaagctcatgcagagcttcaagtcgaaggagtatgtgagggaaaccttctcatggcagtactactactggtacctcaccaacgatggcattgagcacctccgcagcttcctcaacctgccatcagaggttgtgcctaataccctcaagaagtcttccaagcccccgtctcgccccttcggctctggcccacctggtgaccgccccaggggccctcctcgttatgaaggtgacaggcctaggtttggtgatagggatggttacagaggaggtccacgtggcgctccaggtgactttggtggtgataagggtggtgctcctgcagatttccaaccatcttttaggggtagcagacctggctttggccgcggtggcggcggtgctttcggtgctggtggatcttccatggagtgatgtgtcaacatgagctagcataacattcgtctttgaactatgagaacaatgagattttgttttgttttaccgagctgttgccgtgggttgacatggttttgtgatcgtttttgtttagatgaaattattgaaatcaagcagcgagttatcagtcaaaaaacaccccccccccc

SEQ ID NO: 141773 - DNA, 1070 bp, Zea mays
  unsure (1)..(1070): unsure at all n locations
  Clone ID: MRT4577_60780C.1
acatacacatccctctccctctccctttgcaggtctgcctgtactaccaccacttgtgagatggagcagcgcggcatcactgtcctacatccatccctgcccctaccagtaatttaccaaacctctgctgctttccataatcaagcaccacacagtgccagtgggggtgccagtgccactttaactgatgaaacaccaccccccctcctcttcctcactttgccccccacctctctctctctcactacgcgcagtagtatctctctctccacccttgggtacgctgagcacaaacaaggggcaattggtaaggagcacaaggcctgggctctgatgggagtggagtgaggcgctgcacgggattctctgcttctgcgtggtagagcaggtacggtgagacagcagagaaatcaagtgacgggtgaaaagattgttgccatcagtcagggatgaacagcaaggagatgtgccaagaaccgtgcgacgagctgtccgagatcagcagccaggaggcgtccaactcctccggcctggtaagcctcgacctcacgctcaccgtcgccgccgncgncgncgncgagtcgagcactaccgacaacagtaacagcagcgcaacgccggccgacgcgcccgcggtcgcccgcgagccgtcgccgtgtccgcgtgcaactagccccatgccattcctcgtggccgacgaggcggagatgagcttcggctggcccgggagcttcagaccagccaccgccgtcgctcctgcgccggcggggagcgccgtcctgaactcagctggcggcgtcgccgtgcatgcccgggaggagcccgatctgacgctcaggctgtgaagtgtgtgaactgatccgtcgactagactggttaatccgtcaggctgtcaccttgtttctctttaaattgatgatcgacccatggctgatgcagatcagaccgtggcggtctcttgcttgaccagattcttcctattgtttcgtgtgcgtgcaagaatttttgtacagcagttggatgtgcaagagctcgagatatctctctttattcaatgatcttggtatgct

SEQ ID NO: 141774 - DNA, 290 bp, Zea mays
  unsure (1)..(290): unsure at all n locations
  Clone ID: MRT4577_60781C.1
acacggaaaaacacgaccgacccactgaacaaaaaaaaaatacaataaggaacccagagcaaangccagcggcaagacacaaagaccgcccccgcccgcaccagccccggcacaccaaaccaacagcaccccgccaccagcgagacggcgagcgccgcaggagcgcgcggaacggaactacgactccaaaccgaagcgggagcccatcagctccaaccgcagcacccaccacgagaacctcaagcaggacaagcccaccaaccagcgcaccaaggaccagatcacaggaa

SEQ ID NO: 141775 - DNA, 1265 bp, Zea mays
  Clone ID: MRT4577_60782C.1
agcgcggcatcactgtcctacatccatacctgcacctaccagtaatttaccaaacctctgctgctttccataatcaagcaccacacagtgccagtgggggtgccagtgccactttaactgatgaaacaccaccccccctcctcttcctcactttgcccccccctgggctctctctcactacgcgcagtagtatctctctccccacccttgggcacgctgagcaccaacaaggggcaattggtaaggcgcacaaggcctgggctctgatgggagccgactgaggcgctgcacgggacgccctcctcccggcgcggccgcggtccgcctcccgcctgtgccccctcggcgtccgggcgcacgcgtcggcggccgcccgggaaagactgttgcgagatgaacgacaaggagatgatgtgccaggagcagtgcgacgagctgtccgagaccgagatcagcagccaggaggcgtccaactcctccggcccggtcagcctcgacctctcgctctgcactaccgacaacagcaacggtaacaacagcaacagcggcggcgcgcaggccgacgccgcccgcgagccgtcccgcgtgttcacgtgcaactactgccagcgcaagttcttcagctcgcaggcgctgggcgggcaccagaacgcgcaccggcgggagcgcacgctggcccggcgcgcgctgcggctcgacgcggcgggcccctactacggctacggctacggctactacgccgacgtggcgtccctgccgctgtacggctcctgcctgtaccccatcggcatccaggcgcacgcgtcggcggcagcgctcccggagcacgaggacgcgcgcgccggcgccgacgagctgaggaggcccgcgcgggggctgctgagccccatgccgttcctcgtggccgacgacgaggagatgctcttcggctggcccggtagcttcaggccagacgccgctgcgccggcggaactcggccggcggcgtcgccgtgcacgcccgggaggagcccgatctgacgctcaggctgtgaagtgcgaactgatccgtcgactagactggttaatccgtcaggctgtttcttttctttttttaaactggtcgatcggtccatgtctggcgctggtcagatcgcggcggtctcttgcttgaccggattattcttattgtttcgtgcgtgcgtgcaagaatttttgtacagcagttggatgtgcaagagctcgagatactctctttgttcgataaaaaaaaaaaaaaaatccgta

SEQ ID NO: 141776 - DNA, 1153 bp, Zea mays
  Clone ID: MRT4577_60783C.1
gcgtatacatcctatgggcgattgggaccctcgaggccggccgggactttgccccccttctctctctctcactacgcgcagtagtatctctctccccacccttcggtacgctgagcacaaacaaggggcaattggtaaggagcacaaggcctgggctctgatgggagtggagtgaggcgctgcacgggattctctgctcctgggtggtagaggtaattctgctttcgcgctggtacggtgagacagcagagaaatcaagtgacgggtgaaaagattgttgccatcagtcagggatgaacagcaaggagatgtgccaagaaccgtgcgacgagctgtccgagatcagcagccaggaggcgtccaactcctccggcctggtaagcctcgacctcacgctcaccgtcgccgccgccgccgccgagtcgagcactaccgacaacagtaacagcggcggcgcgccggccgacgcggcggcggtcgcccgcgagccgtcgcgcgtgttcacgtgcaactactgccagcgcaagttcttcagctcgcaggcgctgggcgggcaccagaacgcgcaccggcgggagcgcacgctggcccggcgcacgctgcggctcgacgcggcgggcccctacggctactacgccgacgtggcgtccctgccgctgtacggctccggcctgtaccccatcggcatccaggcgcacgcgtcgacggcagcgcacccggagcagcagcagcggcacgaggacgccgccgagctgaggcccgcgcgggggctgctgagccccatgccattcctcgtggccgacgaggcggagatgagcttcggctggcccgggagcttcagaccagccaccgccgtcgctcctgcgccagcggggagcgccgtcctgaactcggctggcggcgtcgccgtgcatgcccgggaggagcccgatctgacgctcaggctgtgaagtgtgtgtgaactgatccgtcgactagactggttaatccgtcaggctttcattctctttaaattgatgatcggcccatggctgatgcagatcagaccgtggcggtctcttgcttgaccagattcttcctattgtttcgtgtgcgtgcaagaattttgtacagcagttggatgtgcaagagctcgagatatctctctttattc

SEQ ID NO: 141777 - DNA, 287 bp, Zea mays
  Clone ID: MRT4577_60784C.1
actacgcctacagccacgcattctagcattcttatcgaaccgtctgcttcagatgcaaggggcatcactctcaccattgggagcctacactacatctgtcacatcgagacactcaactatcccttgaagccatatgaccatagagcatgccatacgctgccagtacatcctgatcacactgatcacatccatcactgcatatacagatgtgcttactcttatataccactacctctactccgatcttgttatgtaccatttccacaagacgaagacatcacactagc

SEQ ID NO: 141778 - DNA, 260 bp, Zea mays
  Clone ID: MRT4577_60785C.1
gtctggggctcgggagaagagagcacgggaagaaggagggaggatgctgagcgtggttcgggtacacctgcgctcggagatcccgatcttgggctgcgagatctcgccgtacatgctagtgtggtggtccgacggtgcagtctccactaacgatgtccctgaaaccgcgcccgctgatggccagttactgcggtacagatggtatcgcatacagagctgatggaaagtccctatctgcagtgtgcatctaatggaacaag

SEQ ID NO: 141779 - DNA, 299 bp, Zea mays
  Clone ID: MRT4577_60786C.1
gcactcatacgctcaatcatacaatactactacttttacatttacatatactacaaaaactacggggccggggtacatttacaaatatctaaagccattctataactacttacacaacataaatcacaactacaataatgactaaccatcattacccatactctacaccctctacatccttatatatactcttaccaccatcatgtaactcacctctcttcaccactctatcatcaacttcatacaataccacttcacccactactttcccaaccttcctaccaccattcataagaaca

SEQ ID NO: 141780 - DNA, 306 bp, Zea mays
  Clone ID: MRT4577_60787C.1
agtgggacacgcacatatcacttacagttaaacacctcgcttacaacactctgcccaacatcacggtttctgacccggtgccgtggccttagtacagtcactttccggaggctcatactcactacttcggatgtccagagcacgattctgaaccattagtgaggacactaccacagcttctgctgctctaccgtagacaggcacacccattaatatttacctattttaccggactacctgtctcgtatggaggacccgacggccttttcatgtccttcgacagggcacgcgccttattacagaaat

SEQ ID NO: 141781 - DNA, 445 bp, Zea mays
  Clone ID: MRT4577_60788C.1
ttttttttttttttttttttttttttttttttttttttggttttttgtttttttttttcaaaacaatcgccttaaaccaccactggcaaaacattaaccagcaacaaacggtccttcttttatgcaggtctccaataatttcacctcccacccaaaaaagtctaccaaatgccatgaatttcccgcccccattcacaaaaatcccaaagtgtttttttccaacagggggtttttttaaatgatgctccaacccccccttcttttgaaacgttcgggtttttcccatttaaattccgggtcctggagggcagcattacaatccatgctgccccccccggaactgcaatttttctttttttccttaaaaacggggggaaacaacaccacggaggccccgaaaagcccccctttggctgtcaacaacaaaattttctttgctgccccc

SEQ ID NO: 141782 - DNA, 686 bp, Zea mays
  Clone ID: MRT4577_60789C.1
gccggccggttcgggacagtgtcttcggatccgcgctcacctctcccataatgaccacccgggaagggagaagcaacatggagtggcggctcctccaggacctgctcgtaccccgagcagcctgtacctgcggatgcaaaaaccgtccctggtcaaacgatatcgtctccctcgcatcgctgatgatgacgaccaccacgatcttccgctctctggctccgacctcatcctgcgccagatcgctctcaccgcgagccttcccgtgcagtccggcctcccgctgtatcgagtgcaacgaccgttccagcacggccaaggggtggcggagactgcacgtccgccattgctgactatcctcgtcgccatacggtacgccgtgatgtgggatatcgcctacgctactcatcacagctaactgtgaccccaacctggagagtttgcatgatcggcctcaaccaggtccgtaccatctggtccgcgcagagcctatgagacatcgataaggacaaggctgatgatgaaactaaatgaccgactggacgtgatactgtggaccgtgggcaacgagctacggaaattgctctattctgtgatcgcaccgatactgacttgcatcagagagaacatctgatgttgattgcctcgccattaatgaggcagttgctagagagatagccgagggcatc

SEQ ID NO: 141783 - DNA, 188 bp, Zea mays
  Clone ID: MRT4577_6078C.1
gtctacgttccaagttatttttaaaagtatgatttctgtgctcctcagccaacccaagtaaaatctcgctggtttttggttagttgtccgcggctctccaggctagccttagtcgggtctctttttaagttcgtcagctaaccaatctcgctggtttttggttagttgtcatctgctctcaaggctac

SEQ ID NO: 141784 - DNA, 297 bp, Zea mays
  Clone ID: MRT4577_60790C.1
atgtacatccgttccgtcgagcgcgccaggctcgaggggtcggatgagtcgaaggtctgctcggatgagaactccttcggctcgtccaaggagcggagcggcgatgacaacgataatgagggcggtgacagcggtgacggtgacggcgacgacggtgaaggtgacggcgacgacggcaagggtggtgaaggcaacgatggtggcgatggcgacggtggcgacggtggcggcaaaggtggcagtggcggcgtcggcagtggcaacgacaaggccagtggcaaagcgccactggtctga

SEQ ID NO: 141785 - DNA, 492 bp, Zea mays
  unsure (1)..(492): unsure at all n locations
  Clone ID: MRT4577_60791C.1
atcccgaggggttcaccccttttttaagggtggccccaacctctttttttttttatttttaaacaaataaaccttttttgggagccaaaaaaaacagcgaaaagggtgagtttttttaaacccaccttttttgggggtgaccccaactttttttaacacccacctcaattatttttttgtcccccaaatcaaaggcccgaggggtaaatgatggattaatttttttacccttaaacacaaaaaacaaatcaaatggggtgagcttttcctttttggcgtacacctttagaaacttgtcgaactttttgtccttttatacacccatctgttggtgcccatccttgtcccggattgatatgacaattttttccctggctttttcgacttgagggtcaaactcctcatctaaaattatctgttcaggagggtccttgggaccacactttttgntctggatttcatccagcttttgcaatatattctcagctgatt

SEQ ID NO: 141786 - DNA, 821 bp, Zea mays
  unsure (1)..(821): unsure at all n locations
  Clone ID: MRT4577_60792C.1
ccggccggggacgaacaagttatgagcggtgccgtcgcctgaatcaattcattcggtatgtctccccgttcaataccaatctacatccgtactgttcatctgccaaatccaaaattgtaaaagcttcgtcgttcgcaaattttggctgaagcacatgtgtcgtttcatggtgatgggttcaaatagattgttgtcatcacaattacttgatgaatcatcatctgatgacgacgaggatttcatactttctgccgcgcaaatcattcatactgtttcacaagttcgtacaaagccaggaggctctgttccaggccgtgcatatatttatcgagatagagaagcgggacacgcgagattgtaccaagattacctggctgacattcctacttatggcccaaacttgtttcggcggaggtttaggatgcatcgatccctgtttattcgcataatgaatgttgttgaacaacatgatgattactttaagcaaaaaagaaacgcagctcaacaacaaggtttaagttgtttgcagaaggttactgcagtatttcgtatgctaacttatggagtggcagcagatgctacagatgaatatgtacgtattggagaagtactgcgctggaaagtctaagaaggttcgttaaagttgtaattgacgtttttggtgaggagtatttaagagcacccaatgaaagcgatatacatcggttacttgcacttggcgatgaaagaagatttcctggtatgctgggttcacttgattgcatgcattggaggtggaaagaatgtccatcatctttacanggtcaattttcggccatcat

SEQ ID NO: 141787 - DNA, 397 bp, Zea mays
  Clone ID: MRT4577_60793C.1
tttttgtgggttttttttttttttttgttctgtttttttatttatttttcattgtaatctttttttggcgaaaaccacaaagggggctaatattgggcgcccaaggcttaacaacggggggaaaattttggccaaactccgccctttttataaataaaaccctggtaaaaaacggcaaaactgcccaaaaaagagggggggggtcctccttgggaaaagtaaactttgaacaatgaccgggataaacccgctgggctaaatgaaactccccccagaaaagacaaaaaacccccaatggcttttgaaacccccctgaaccccggttcttaaacccccccttaataaacccacaaaaactaacctgggcaccaaagcttactggagccccaatatgctt

SEQ ID NO: 141788 - DNA, 204 bp, Zea mays
  unsure (1)..(204): unsure at all n locations
  Clone ID: MRT4577_60794C.1
agcagtggtaacaacgcagagtacgcggggtactatatatgcaataaggtcgcagcttcttttagtgccttgattttgtgttatgttaatagtatgtcattgccttgattntgtgttatgttaatagtatgtcattgccattatcagaggtattggagtttgcatcggaataaaaaaatgtttgaagcattttttttanaanna

SEQ ID NO: 141789 - DNA, 451 bp, Zea mays
  Clone ID: MRT4577_60795C.1
agcccccaacccaaccccggaagagaggggggtacaagggaaaaaatttacaggcccagggggggccaaaagggggattcctagttggggaacactttggaccacccgggacccggggggtacaaaaaaaagggggggtttaaaaaaaagggggcaaaaaggtgaaggcccttttgtatttaaaaggggggggtcttggggggcaagaaaccctttaaaaggggcttccgggggggggggggaaacacaaagggccttaaaaggagggttaaaccgggccgggttaaggggaaaaaaaattaaaaaagggggcgcaaaaccaggatttaaaaaagaggggcccgtggaaagtggcaccgggggggaaccacccgggatattggggtcccccggggaacccggctcccccttaattaggggaaaacctaggggggggtaaaatggcgggaaa

SEQ ID NO: 141790 - DNA, 618 bp, Zea mays
  Clone ID: MRT4577_60796C.1
cggacgcgtgggtgccgccatagtaatatcctcgcccatgtcctcagcaatggccaagcggcgctggtggatgacgaccagtgcatgccgcacatacccgtgacttcatcgtgggtgctcggtgaccagagtagctgatgtgcatgcaatccttcgacgaagctgtgcattgccatcggggcactaatcgtcgcgtgcagcgctgcagcgtccaaatctaccagtaagattttccccttctgtgtccataaggcctccgcgtcccttgtgccgtttgtagcactagaatgtggcctcagggccttgcgccattcgttccagcgtgggggtggccccggccgttcgtagttgctgcccggccgtggcaggaggtagaaggcggtggctagatcgtcgatctcgatttgtgcggctgagatgagagcgcgcgtaccacttcgcgtaggctgatctcgaccgttgaggcaggatcatgtggacaggattagatcttagagatttcgatcgtggccgctgattttggatcctgtggtcaccagtagatactggttcatgggtgggatagatttaatcttggccattgatttttgatcaatcggccatggctctggatacccc

SEQ ID NO: 141791 - DNA, 271 bp, Zea mays
  Clone ID: MRT4577_60797C.1
ctctctctttctttttttttttcttgtttttgtttttccacatggaattgaacatatgctcctatcttttacttcatgttatatggacaacatcttatgacccgggtagggtggtcaattacaaacgattaaggaattcctgtaaccaaattcccccgggttgaacttgaaaggaccaacctgaagattcggaggttcgttatcactaatgccctgtccttacattacattggcttctggaagtaaggatgatttagtgcttcatcaacac

SEQ ID NO: 141792 - DNA, 271 bp, Zea mays
  Clone ID: MRT4577_60798C.1
ggccagaaagatactggttgcatgatatggaatatttactgcaactagtccacagccaagcgccctcgccatgggcttacgcagtcattctaccccattagattaccaggcattttctatgccaaggcgggagaaggagacctggcaaaaaggtgtagccgaactacatgggcaagcgcgcctaaacagggtgtcctacctccatttcgacctatttgacaacagggcacgcacacacgttggagataggacccggtgtagttcataccgt

SEQ ID NO: 141793 - DNA, 460 bp, Zea mays
  Clone ID: MRT4577_60799C.1
attttctcaaactctaaaatcaatctctcaaatctctcaaccgtgatcaagatgcagatctgcgttaagactctcaccggaaagactatcaccctcgaggtggaaagctctgacaccatcgacaacgttaaggccaagatccaggataaggaaggtattcctccggatcagcagaggcttatcttcgccggaaagcagttggaggatggccgcacgttggcggattacaatatccagaaggaatccaccctccacttggttctcaggctccgtggtggtatgcagattttcgttaaaaccctaacgggaaagacgattactcttgaggtggagagctctgacaccattgacaacgtcaaggccaagatccaagataaggggggtattcctccggaccagcagaggttgatcttcgccggaaagcaacttgaggacggcagaactttggcggattacaaca

SEQ ID NO: 141794 - DNA, 460 bp, Zea mays
  unsure (1)..(460): unsure at all n locations
  Clone ID: MRT4577_6079C.1
ggttggaacctttgggctgatttatgtgcttgtttatgtgcttgtggaaaaggggttagtggtcttgcattagctgcttagccattcgatgtaggagtctagtagtaatacggtgtagagaattgttgttgttgttcttctcctcgtgctaggtcatggtgcctagagatttttcggctcaagctcaataatagtttagatgaaacctatgctgtcttggttgccgttgttcctggctgctttcctttacgttcatggtgtgttgttctatggatttgctattgctccctatttgctagtcttctttgcgttgcacttagtgagtaacctcggtggcttcggtagtagtgatgtggcgccggagactgagagtgcgaggcggagtgcggcgggactgaagttcgagggtctggagtgctcgaggagtcgtanaagggtagtagagacggatgttgatgcg

SEQ ID NO: 141795 - DNA, 592 bp, Zea mays
  Clone ID: MRT4577_607C.1
ccggccgggggccacggccaggctgactgatgacctgaagcccggcccacggcccacggcccacagcccaactggttgcacatactgcgagagaatttctctcaaccaagcgtctgcatcttccttctctagcttgtgtcatggagtatatgcatatgcatccctgacctctttcatgcatgcatgtttaaatgactttgttcctcaagcaacctgcaagcagaattaataccattccaaatcgatcgatgagcagaatcagaattagcgagcattttgcattgctccaccaaacaaaaaaattcggccacctcaatgcactagtaggaaacggagttagtcctgattgagaacccgaactacggattcaggactaaagagcactttagaggctttttttattttttgcacaagtttctctccacccttgtgattcctgggactcaaactcatgagcattgtcttgtatatgggattagatgatgctctggaccgatctattagatctactggactttcaatttattttggtctaaagttaagtaatataattatatgcgtatggaggaaaaaaaaaaaaaaaaaagcggcc

SEQ ID NO: 141796 - DNA, 363 bp, Zea mays
  Clone ID: MRT4577_60800C.1
ccttgaataattcctttcttttcatttatttttttgggggggtttttatttttttaaggtgtcacccccacagacaaacatacttaactttggggagaaccaaaaaaggcccttttttcccataagatgaacttaaaaaaaaacccgggggggggaaaagactccaacgacccgcattccatggggggggaggcacgggccttcaggggccgggggtgaaaacaccattaaaaagcgggcaaaagggcccctgtaataaaaaaacaaaagggggcacacaaaacccggcaggggggaaaacaaaccccttgggccaggggaaaccccacgggggggaaaagggtatcttggccgggggggccc

SEQ ID NO: 141797 - DNA, 189 bp, Zea mays
  Clone ID: MRT4577_60801C.1
gcccgacgggctcgaatacagaacctatagaagcgtcgcgctatcaatcctttaaacactaacctgtctgacagatggacgagccaaaatagctaccacatattgtaacgtggatacaaggcagccatgcgtgaatagcgacttagctttttgatcctagcacgcctgctcttactataattgcaaagc

SEQ ID NO: 141798 - DNA, 827 bp, Zea mays
  Clone ID: MRT4577_60802C.1
gcacgagggtggggaagcaggcgcggaggatgcgcgtggcgcgggcgctccacaacatgctgacgtgcgcgcgcgctgacgccgtcgacgacgccgcgctccgccccctggcgcggcggcaggccggtggcggcgacggctgtccaccgccgcccacgccgacgtgccccggcatggaaggctgcggcctaggcgtgagccggaagaagacgtcgaggccgcggaggggcggcggcggcaaggacaagcagcgcaagcgagacggggagaagaagcacgacgcgcacaggccggccaccctgccgcgttgctcgcagtgcgggaaggagttcaagccgcaggagctgcactcgcacatgcagtcgtgccggggcttcaaggaacggatgaggaggagcaccagcgcggacaggaggcgcaactggaccgccgccggccgctaccccgcggagtcggagcggccgtcctcagcctccgccgtgttcctgctcacggaatcctgacgggatcgtcgactgcttgctctagcctctagcccatataaaaatatgaattaattaaacacactaatgtcgcgggatcggatgtacatcgtgcgtgatgatcaaaagcaacgttgggatcgttttgcctatagtcgggcaatcatgccggaatatgtacgtacctgcgcctgtctcgatattttgctttgcttcacctgtgaataatagatgggttgctgtgttggatcgattctgtgcatcgcgtttttttgtcttaatactagcaaatatgtctatgtgttgagacgaaaggtacattgtcgtctgttccaatatatcatg

SEQ ID NO: 141799 - DNA, 439 bp, Zea mays
  Clone ID: MRT4577_60803C.1
aaacgagagaagcgtggcagtgactcagggagctgccccattcttgttcctcctcgtaacaacagaagtggtaaccatctattccaaaatgggaatagccatgcccattcatgccttgataatggataaagcgaaacagcacgagacggaaaataatgaggagaaaagcacttataaggaagagagtcaatgcttatctccgagtctccagttcgagggcttctgcttcaacagcgacagaagcacccatgcgtgcatgaaagaaagctttcccgggggcgagtgcaagcaagtctttgccactcgcaagtgcttttgcaaataaaccatgctagttcattcggtcttgctaactgttgaatgggtgcttcatttatttgacattaaaggccttattgttacgataaacaaaaccacctttgataaaagcacggcatta

SEQ ID NO: 141800 - DNA, 694 bp, Zea mays
  Clone ID: MRT4577_60804C.1
gccggccggtcaactacactcaactctaactacccgatcatttccccgcatcctacaaccttcaccagcttcgcaagcgatctaggttcagaagaaaaggacatcaatggatacgtcccccataatggcatggaaggaggaagcgctgactgcctgacggagatcggggagccgcggcgagcagtcgacaaattggcaagccgcatcggcagccttcccggggcgcgtgcggcgccgtctgccgaacttaatgcattcttggaaactcaggcacagagacccctcgggcacgaatacctcataaaccacggtttgatagcgctggccaccatccccgacatacggctggggtgcggcggcgaccaggggaaactcagtcgggaccatctggggcatttcgggggccgggaggaaacctacgacctctgcaccgtgctacgcttccgcgaagtcctctgcttcaccataaacgtccacaaagggtccaaacccaaagccgggtacctcatcaacttcacatggtacaacccgcccgaaaggcgtggggacgagcacctggctaattcaagagctgccgaggaaggccaccaaggacgacgaggacagtctgggggcctaatgcgcggctgatgaacaaggacgccatcggtgacgattatcgcatggggcgttgcgagaacgataccaacggcag

SEQ ID NO: 141801 - DNA, 751 bp, Zea mays
  unsure (1)..(751): unsure at all n locations
  Clone ID: MRT4577_60805C.1
acctccgtcccgcacctcccctcacccccccgcaaaaaccagatctacaatctcgcactgcgcctcgctcggccttggtgcttcttgggccgagccctagctggggcgcccccgatcatctcctcctcccatctcgctctcagttttgggacttccagcatggctgatgaaactggcaatgacagtcagatgttcgaaggtaatgagattgttgaccctggtaatgaggcagtccatggtgatgaggcagtccaaggtggcgagttggtcgaagttgatgaactagctcaaggtgacgagttggctcaaggcgaggacttaacacagggtgacgaattgctccaagggaatgagatggccatcactgaggtgaccactcctccaaccacgaggcgccggagaaagaagtccctggtgtgggagcacttcactattgaagatgctgctggaggggctactcgggcttgctgcaaactttgcaagcaaacctttgcgtacagctctggttcaaaaattgctgggactagccatctcaagaggcacatcaccttgggttcctgtcctaagataaaaggccaagggcataagctagcaattacaattgggactgacaatgatggtgatggtactgtggagaggcggtctaagaggcgttacagatatactggttatgcgaatgcggcttttgatcaagaccgcagttattcatacttggcnaagatgatcattttgcatgactacccgctccaca

SEQ ID NO: 141802 - DNA, 435 bp, Zea mays
  Clone ID: MRT4577_60806C.1
aaacacgcgtccgtgggccttccgaagagttttcacaaaacataaaatatgtcttttcttttagaacttttaaaagaaattcgctggagaggactttggggaacttttcaagcagccaaaatgaatagactgggtacaatgaagtactttgtcggcgaagacgagtttcacaaccgatactttcaaaaagtaaacgatgttatgttgaaggatcgttgggtggaatatgcttctaaggaattcacccctgatccttattcgttacctcctgagtggcatgcctggctgcatcatattatagatgagccacccacaaaagtaggtttccagagaccaaagtatcaagcacagatcgtcgcaaaccgtacaggcacaacagatgcgtattttcccaagaacaatcctcttagtaagaactttaagggcttggctaca

SEQ ID NO: 141803 - DNA, 252 bp, Zea mays
  Clone ID: MRT4577_60807C.1
gaccattttcagcatctacccctgatcacttaagaaccctatcgacaacacctgggtgtggggggttgatatgactgtcctgtttttcgatctaaacaccaccttcagccatacaaacctcgagtgtcacttccacccacctacctatgtttatgtacactccattactaatgatgaacttaaggtttacctgccacctccggtgcatcttcgacctgcagtccacattaccgcgccagtacacctgacacc

SEQ ID NO: 141804 - DNA, 1013 bp, Zea mays
  Clone ID: MRT4577_60808C.1
cattgggtacctcgaggccggccgggagtcgccctcctcgcttgcccggctccccctcctctcccggctcccgccacagaaaaagacacgaggagcgcgcgtgctcgcctcggcaggcacgcatttcaatgggcaactgccaggcggcggaggcggaggcggcgacggtgctgatccagcaccccggcggcggcggcacggagcgcgcttactgggcgctctctgcagagaccgtcatggcggccaatccgggccactacgtcgcggccgtcatcaccaccgcgcagccggacgcgggagacggagcagcctcttctgctgccgcgcccgtgaagcacctcaagctgctccgccccgacgacacgctcctgctcggccgcgtctaccgcctcgtcagcttcgaagaggtgctgagggagttcgcgtcgaacaagcggcaggtgaagctgagccgcgtgacggtaagggccaaggacgaagacgaggacgtgaagccggcgtcgaagcatcgccgcgccagtggcgacgtcggagagcgcaaggaatccgagaggtcactcgccaaggtcctgcgccagacggaggagctggagccggaggcagacccgtcgtcgggccccagcgccaagcacaggcaagccgacaccgacacgccagccgacctggaggccctcctgccgcacagggcgctgctcggccaccgagccgcccggcaatggaggcccgcgctgcagagcatcgcagaaggcggagggtgagtggccgggatagctccgtgcaaagtcagtcgctatttgcgaggtagacagcgtattgtaaaaataagtttacactggcaacattgtgtatgtcgacgtgtataacattgttttgtaatgtgtctacgtagaagagtttgaaaaatagagtgatataaggcgtatgatatggattcgatggtgtgtttgtaaggtggcaggcgagtagtggcatacgccatcgcataaaatctctagtctatttcttgcgagctc

SEQ ID NO: 141805 - DNA, 357 bp, Zea mays
  unsure (1)..(357): unsure at all n locations
  Clone ID: MRT4577_60809C.1
ggggggggggggggggttttaaaaattatttttttggggttttttttttttttttaaaggaaatcagaggtggatacattttttggggccttgggccacgatcatacacaagcgcatgcgtacacacacttatacataccataaaaaacggggggggggggggggcgtncaaaaaaaaaacgcatacatacttacgcgcgcacaaaagggggggcgcttaatattattttaacacacgcacgcttagaacacggggggggaccacaatacgggggggagcaatcaagcgaaaaaagggggtttttttcgggggggggctcctagggggtcttggggggcttctttttcttatggggc

SEQ ID NO: 141806 - DNA, 282 bp, Zea mays
  Clone ID: MRT4577_6080C.1
cagagggtgttgaattcatcgcttaaaaaagctgatgtcctggctctactaggatcgtatcgtcaactggcaatgcacagtccacttccagttgagctgttcaattctatgcgtactgaaaagtggctgtacacttcactgggattccgatctccatcagatgcaattctatttgatgatgcatgggtatctttgtctccaatagcaaatttaccattcatagatgatggtgactcttgccatggtttaggaatggagatacatggctacaaagatgaactg

SEQ ID NO: 141807 - DNA, 1003 bp, Zea mays
  Clone ID: MRT4577_60810C.1
cctggactggcgccgacgggctcatacgttacgttgctggccgtgttaggcccggccgtcatcttgctgcgcgcgcatgaggtccttgcgtgttcttgcacggagccacggataaagatgaattgtgtgtcttgttcggtttgaatggccgtaggttacccggcgcctttctgaactttcttggcgcgcgcggcgcgtccgtatttggacatgaatggctgaatgccacagtttcactttcaccatcgtttccaaacagttctttccctctctgccttcctttttctcatgtcgatgtcaactgatgaacatgaatgaaccgtgcgtgggtgtgtctgcatgagcagaggtgctgtgggagttcgcgtcgaacaagcggcaggtgaagctgagccgcgtgacgggaaggaccaaggacgaggacgtgaagccggcgtcgaagcatcgccgcgccagtggcggcgtcggagagcgcaaggaatccgagaggtcactcgccaaggtacgccgcgggcccctccacgttcttccgtttgcagcctccaaccactgatctctcgccccgatcacgtcccgcgtgccgagtttgacaagccgccgccgccgccccgtgtagttacttttacgccgcgcattcactcccgttgctatcggtccaggtcctgcgccagacggaggagctggagacggaggcagacccgtcgccgggccccagcgccaagtacaggcaagccgacaccgacacgccagccgacctggaggccctcctgccgcacggggcgctgctcggccatcgagccgcccggcaatggaggcccgcgctgcagagcatcgcagaaggcggagggtgagtggccgggatagctccgtgcaaagtcagtcgctatttgcgaggtaaacagcgtattgtaaaaataagtttacactagcgatatcgtatatgcgatatcgtatatgtggacgtgtataacattgttttatactgtagatatggaagagtttg

SEQ ID NO: 141808 - DNA, 380 bp, Zea mays
  Clone ID: MRT4577_60811C.1
aattaacagaatatattattttactagacaattactactaatgcaaggcgccgtattctccatttatgcctttaacataactaaaaagttgcttgtggcttcacaacggtttgagcatttcgttgagcactttgcgtgcgacatcctagcccctcgcaccagggctgtagcttgaagcacctcacgccttggttgcagcacttgcagcatggacgttttcctgcagtctccagatactccagctcgccatcgaggatgccatggcaacgactggaccgggccaagtggcggcgctcgtgcttgtcgctggcggctgcgcggtctcctcctactcaccggtggctgtgcgcgctcgtgcttgtcgtcggcggtcgcgcgct

SEQ ID NO: 141809 - DNA, 3759 bp, Zea mays
  unsure (1)..(3759): unsure at all n locations
  Clone ID: MRT4577_60812C.1
caaacacagaggacgagtgggacggcgtcatggccgtggaagacctcacactgtcgtccacgacggcgaagctagcgaaatcggacgcagccagcaccaccttcgcggagaagaaccacggcagggcgaaaggtggcgtgtccccgaagaaggcggtcgggaggacggcgctgccacgcaacaaagggcaggctggggagcgcagcagctcggactcatccgacagcgccattttgccttgccagctggagcatcccaagagggccgcagcaaggagcacccccaagtcagccgctgtgtagtagactagtagctgcgcgcggccctttgctgagtgagatgctcaaggagcactaggttttagcagtcggtcgtccgttcttttctttgtgttatgaatgttgcatagaagcaaggaccatgttcttacacgtcttgtaggccgggatgcatggtacgtacgttgttaggtgatgtcgttagcatgtaggcttgccatgaaacctatgagaccttgggttgtgacgtgagggtttatgtcataagaagcctactttgttagagagttgaaacaaaaaaaaacaaaaaaaaagcgctcaattcggcacgagggtgctgtgcctggtgcctcagtgcctgccctgcccgttgatggtttctgtttccctcccttctgctggcccgcccatgtgcagcgtgcgtgtgcgtctctctcccttgccatctgatcgatctcggcaaaaaaactgcgagatcttggcgtgctgccggcgataagattctccccggcgcaaagcacatcaccagagcgagcaagtggttcttggtctctctctccgttgccgcctccccccgcactgcatttaaaatagatgctgggtgtctcctgcctgcccccccaacttgcgccgcagagcgccactaacgcttgtttccacgcgtccggccgcagagatcgccgggagagatggacagatcatgctcggggaacggtgtgtggcgaggaatgttgactagttgtttaatacgagatcaagaaggacaaagcaattaaacaagcagcaggctttgtgctttgtgggtgtccctcctctggttcactgccccgctctccactccagctccatacattagtttactcctcctgaggtactttgtgctcctcccccttctggccctcactgcctacgatagcagcagcaccggccgcataagtaggttgggcgctagattgcgcttcaagcancagcgctgttgctacatcggaacccatccccactatttgtttgttttcgctgtacgagcgatctcctggccggctccggcacgttgcaatattcggtcttctcttctcggcgcagcaccaacttgtttcggtgcgctgctacttcgctgctctgggccgtttgccgttgatgctgcggacaagtatgggatagtgctgctgtgctgtgcagttcttgcttcttacaactggtagtggtggtggtggtctggtctccgtgtgagcatttggtctagaagagcgtgaagctgcgcggctcttctttcttgttcaagatgaagttcatgaagcttggatcgaatccggatacctttcaggacgatgggaatgaagtcagtattgcggcatctgaattggtgagcgacatcactgttcgtatagggactacaaagttttaccttcacaagtttccgctcctctccaagtgtgctcgctttcagaagttgattccaaccactggtgatgaaaatattgagatccacatccatgatattcctggtggcgcaaaggcttttggggtctgtgccaagttttgctacggcatgattgtcacactcaatgcctacaatgtgattgcagcccgctgtgctgcagagtacttggagatgaatgagactgttgacaagggcaatctgatctacaagattgatgtcttcctcagctcaagcatattccggagctggaaagactctattattgttcttggtacaacaaaggctcatctaccttgggcagaggatcttaagctggttagccaatgcattgactctgttgcttcaaaagcctctatcgacgtttcaaaagttgaatggtcatacacatacaatcggaagaagctcccaactgagaatggtcatgattcgccgtggaatggagtcaaccagcggcaggttgttccgaaggattggtgggtagaagatctgacggatctcgactttgatacagaaaggaaagttgcagatgtccccacagatcatccctcctgcagcaagcaacatgcagttcttcaatacagacttgtggagaaggagcaactagatggcatgatgacaaagaaaataaggccttatctgatggatcttgatagtacaaatggaactttcatcaatggaaatcgcattgagcctcggcgatattatgagttatttgaaaaggacacaatcaagtttggcaatagtagccgggagtatgttttgctccacgaaaattcaacagaatgagttttgagaaaattcaacagaatgaggatcgaaacaatcagccttttatgctgtagaagaaaaatacagcaaaaacataagatttttgcatgttttaaaattttgaatactggggattcgccggcttgtaattctggtcggtgattgaatgaccaggtctagtctattagggcattattgattacagtggcaaagattgttgatgggtatctggcagaggttgcgaaggacccaaatataccggtctacaagtttttcagtctcgctgagacagtctcggccaattcaaggccagtccatgacgggctctatcgcgccattgatatgtatctgaaggagcacccaagcttgggcaagagcgacaagaagaggctctgtgccctcatggactgcaggaagttgtcgcccgatgcatgcgctcacgctgtgcagaacgagcgcctgcctctgagggttgtggtgcaggtgctgtaccacgagcagacgagggcttctgcagcagccaccgtccgagctgacagcatcggcatcggctcctacgagagctcaaggtcaggggccacaacaaacacagaagacgagtgggacggcgtcatggccgtggaagacctcagtctgtcgtccaagacgacgaagctagagaaatgtgacgcagctagcaccgtctcggagaagaaccacggcggcaacaagggtgccaacggcagggcgaaaggtggcgtgatgccgaagaaggcggtcgggaggacgacgatgtcaggcaacaaagggcaggctggggagcgcagcagctcggactcatccgacagcgccattttgccttgccagctggagcatcccaagagggccgcagcaaggagcaccaccaagtcagccgctgtgtagtagtagctgcccggccctttgctcagtgagatgctcaaggagcactaggttttagcagtcgtcgtccgttcttttctttgcgttatgaatgttgcatagaagcaaggaccatgttcttaaacgtcttgtaggccgggagcccgggatggtacgcgtacgttgttaggtgatgttgttagcatgtaggcttgccatgaaacctatgagaccttgggttgtgctgtgagggtttatgtcataagaagcctactttgttagagagttgaagcacgactgttctgcagctgtgaaaacatggtgtaaacaaaaaagacccaaaaaaacaatccaaaagggtggttgcaggctaaatgagattcttaaccgggg

SEQ ID NO: 141810 - DNA, 2152 bp, Zea mays
  Clone ID: MRT4577_60813C.1
attggtacttcgagccggcggggatcatccccacaattgaggcgattgaagcagaaaaaatcagtcgccgtagcagcgccgcctccgccgccgtggggaggtagcatctaggcccattccgccgcctccatctccggccagcaatggcttcggcggtggagcggcggagggaggagcacgcgcggagatcgcgttccccagcacggggcagggagcggaggggaacgccgccacgcaggcggagttccccagagcggaggaagggttcgcctgctagggcacggtctcctgctgcgaagtcaagtgcgtcgcatagggacagggagaggtcgcctccgagggagaaggtgaaggagcgtgtcaggtcgccagagtctcctgctaaagtcagcctgttgcacaaggggagagagaggtcgtctcccagggagaaggcgaaggaccagcgggtcaggtcgccgaaacgtaagcaggagcagtcacgatcaccctcacctgctaggcgacacttctctaggtcgccctcgccgcgctccaagaggacgaggggagcgcagggtgagcgggaggcggtgcagtttactggcagtgatcgccggaaggcaagtcacagggaggagcaggatacactgaggcacagggagcatgatgaggggagggatgcttcaagagacaggaaagtggatcgggaggcagtgcatgtaacaaatggtgatcgccgcaagccctctcatggggaagagagggactcatggggcaagcacagggaacatgatgaagggagggttgcatcgatagataggaagtcggatcgagaggataccagaggtactgcaaaagataagaaatatgttcgtgatgatgagaaggatcattctagggagaggggggctgggagggatgacaagtatggtgcttcaaaggtggcattgccggtctgggatgatgatagacatggaaggcctaatcggggtgactggaaatctgcttcttcaagggagcaaaggctggactgtggtgacagaagggattctacaagagtgaaaccaacagatcatgatgggagcaatgggggatcgggaaggtctttcaggcatggtcgttcaatgtctccagaagagcacaggcatcggggcaggcatgaatctcatccatcatcgagagtgtccagaagtgcagcacatatcgaggatattaactcgagaggaggtgaagcatcccggaatggagatcctgatgctttggcaacaatgaacgcaactgcagaagctcttgaagcaaaagaaaagcaaaagccatcgtttgaattgtctggaaagcttgctgaggagaccaacagagttgcaggtgtaaatctattatattcagaacccccagaggctcgaaagtcagagattagatggaggctctatgtatttaaagatggtgaaccactgaatgaaccactgtatgttcatcggatgacctgctacctttttggaagagaaaggaaagttgcagatgtccccacagatcatccctcctgcagcaagcaacatgcagttcttcaatacagacttgtggagaaggagcaactagatggcatgatgacaaagaaaataaggccttatctgatggatcttgatagtacaaatggaactttcatcaatggaaatcgcattgagcctcggcgatattatgagttatttgaaaaggacacaatcaagtttggcaatagtagccgggagtatgttttgctccacgaaaattcaacagaatgagttttgagaaaattcaacagaatgaggattgaaacaatcagccttttatgctgtagaagaaaaatacagcaaaaacatgaggttttgcatgttttaaaatttttagactggagattggccggcttgaacttctggtctgtgatttcttcacgtgttcaagtctataaggatattttgtgaaccaacatgtagtgctattgtaatgaaaagagctagctgcctgtagcagatagccctggggtattgtttgtattcaagcatgttttgcaccgctggcattcacatcattcggtatcggaggcagctgtttatggatcaatgccatagtaatcttaatgagttaatcatggatttactagttcgataatttaaactttatcccagatgtgtcc

SEQ ID NO: 141811 - DNA, 312 bp, Zea mays
  Clone ID: MRT4577_60814C.1
ttttgaggtttttgtaccacaagaaacatcaggccgtcgcacggttcgttcagccaaaaaaaacacacgggcactctggattcaagggcattgcatacaaggggcatcacaattcatcacaagcaacaatcctgatcctttttgccaaaagacaatctccagaaatgttttctgaacaaatttcacgggtaaaaagctgaacgggctccaaaaaattctttggccggctcctttaaaaaaggacaaacggtattcacccccaagaaggggggaaaaaaaggctgggatcataacaaggcgaaaggcttaaaa

SEQ ID NO: 141812 - DNA, 399 bp, Zea mays
  Clone ID: MRT4577_60815C.1
gggtatcttgaaacccagacattcaggcatgacattttttttttatacccctcacgtacaaattaatatacacgaccattcgtacaaaacacgtgcgggcgcgatgatctgactgacgacccaacgcatttgagtttaacgttggagggtgggccggatcggcgaccagggaactagcttaacttagcggatcatcatcccctccgccgggggggggtacatgggggggggggggggggccttttgggcgttgacgtcccaaccgagggcgggggcgaatccgcgggccttgagctccctgtactggtgggagagcgcccagggttcccaacaaaagtggacccaacattcgcagcagcaggcttgggggaggccgagctgggcccccctcctggagcg

SEQ ID NO: 141813 - DNA, 345 bp, Zea mays
  Clone ID: MRT4577_60816C.1
aatataactagggtcttattaaccaaccggagacacatccgattacaacatactggggggaccatgatttcctatgcgagggctcacaggcagctacactctcttaggccatgacctgcctgacacaacatgattaatacgttggtagcttatcacaaggacactccactgtagtctaaggaccgtcaagtgatagatccaggtcaactacctgatggcgtagatgcgatctaacacatgcatttataaatactagactcttcactacgccgcatatgaacccgacagggcaacatagaaggcactctaaacatagcatgcgatctgggcccaactcttttacag

SEQ ID NO: 141814 - DNA, 347 bp, Zea mays
  Clone ID: MRT4577_60817C.1
cacttggcgccctatggaagagatagaaaggatattgtttcgttgcttaatccaaatgtatatgttatgttcggcaaagtgtacacccgaaggcccagaagggcagttgatcgacccacagtaggggtcgatgcagataagagattaggggaggattaaatatgttcagttgcaggattgttatgcaacaaatccagtccttaaaataaggagtctgttagctaagtcttaggagataagtcgtaggatgtggagtctgccaggaggactcggactatatagtccttttggttgtaatcatgaatgtaaagcaagtattaatctaaagaagggattactcttgcctc

SEQ ID NO: 141815 - DNA, 359 bp, Zea mays
  Clone ID: MRT4577_60818C.1
gtccggattcccgggtcgacccagcgtccgggaccgtggcgaccgtggcgacctggttcagaacacacctacgggccactacacgactacacaaggctaccaaatttatccttttgcgctcttgcccttttggagcgcacaagcgtcattattccccaatgctcacttgctctaggccattattcacagtctccctcagtcttcaaggcttcgaacacccactggcaagcctacaggctacaacagcgcttgcggcagcgtttacaacaaccaattgccaattcacaacaatctggacatctaaccatacaaaccatcgacgcacagcacacaatttctaccagcctaaccaactagct

SEQ ID NO: 141816 - DNA, 243 bp, Zea mays
  Clone ID: MRT4577_60819C.1
aaaccgtatcgtctcacctgatcagtttccttcacctcatcacgcagcccggtttaacgaacaaattccaccgtaccagagtagccaagcgaatcacgagtctggatcacgcgatgacgaaggagcagtccaacccccagcaccagcttagcggaggagaagaaggttatggtggagcagcagcagacgaggaagaccccgaagcagaggaaccagaacttcgtccagaaggcagctgaccaa

SEQ ID NO: 141817 - DNA, 671 bp, Zea mays
  Clone ID: MRT4577_6081C.1
ttttttttttttttttcgaagaaccatctcaacttgtttgaataaatatactccttacaagtgacaagaaaaaataagtataaaaaaaaaagcagaaacaccaaaacattctttacggtcgacccacttcaacacttactatgctacaagaccagtacctagacgacacgactaggcgttgggggtgctaaggaaattaagaatattaaccgcgaccaggggatgtaactttgcacagatgcagagacacagggaggaaggaagtgaaaacatcagctcgatgttatccggaatccttctgcttcatcattcatgtgacaaagtctagttacagctgctcatcagctttgaactgaacgtcaccgcattttctgtcttcttgacttcaagttctaacgcttcatctatctccctgaaccagtaaaagcatcaaaaaggccacagcaattccaccatgttgcccgctgccctgaagcaaccactgccactgcaggtccacgggccacctctgtagtatgcacatcagcagcgtcctgagatctcgacacctcagcagggtccttgacaaccacatttctcctaatcagctctggtgttttcaacacaacagtagccccggcgcccttcacatctggtgctacaggcatttgctccgggaatgcggtccggta

SEQ ID NO: 141818 - DNA, 179 bp, Zea mays
  unsure (1)..(179): unsure at all n locations
  Clone ID: MRT4577_60820C.1
tctctgactctnttttcgctcttgttttaatatttcaacaaactccccntttctaggggatcgtgacatttacaggacgatgggatctctctctctcctccttctcctgatctctaagaatggtctatcacatacacacattccacccgcttctgtacaaccccctctataatgacttt

SEQ ID NO: 141819 - DNA, 636 bp, Zea mays
  Clone ID: MRT4577_60821C.1
cattgggtacctcgaggccggccgggagctgcataacgcagaagacaggtatattcgtagtcgccgatttccacgaatcatagctttcgccaatccacccccagtctacgatctctcactagcagatggccatcacccgcggtcagcaacaccgtgacgacgagctcgccatgacaaggccaactgacatgcccgaagaaaggcgctgcgagagatgactagcctcaaaaaagctaattaaggctggagcccaaatgtgcgctgacagcacctgtggcgaaagtatatgacacgacttccacactcatctgcgacactggagccgcgcacgcactgccgctgcaatgtgtttgctaagcttacctcgactgtcatctacgaggtgatgacttctacctactacaagctcttggatcctcgattattcctaagggaaaaggaggatgccgccaactacttggctcgcgtccactacacccttgtctaagagattgatgaccggagccttgacaacatgtaggagatcgtagacaattgcaatggtctccacggcttcctgcgacgtcaacgctgatgtagtgggaaccgccatctgcgtttgcatctctcctcctggagcgccagactgtggactat

SEQ ID NO: 141820 - DNA, 265 bp, Zea mays
  Clone ID: MRT4577_60823C.1
gccctaagcttggtataggtaagatacttctgccatgggggccctcagatgttgtagccttctgaaaaagtcgagttctactcttctgatgcttttgggcctagtgcataccatactcacacagaatcgagcattcttcactcctgacagtccatcacctgttgctgtgttcaacgatgatgtttacaatgaccttgatgtcattgttaaactatcttaattacttgatgttcctatcattcttggaagccagtctttgccattt

SEQ ID NO: 141821 - DNA, 473 bp, Zea mays
  Clone ID: MRT4577_60824C.1
ccagggaaaggaaaaattttttctttgggaaaaagaaagcttcaggcctttctgctttgcttaaaaaagccccaaacccaggggggggggagcgaacccccaacccacccatcaggtgggatgatgggcggtaccaggggaaccaaccccccccaatgttcaaaaccccagctccggttttctaccattggctctcccccaccaaagcccccaaggtggccccccagttaactggccctgttccaacaacggtttacactaaggcaaccttaatctcaagggtctggggctttttgggctccggggggggcagttttttaacggtcaccggaagcaccccgtccctgcacacggggggaaccttgtccacttgggggttgtccggcagcacaaacttgcccataaacttgcccatcccccgttccatgcccaggtacttggggtcctcgccctcctcccggggccgttcgccg

SEQ ID NO: 141822 - DNA, 259 bp, Zea mays
  Clone ID: MRT4577_60825C.1
gtcgtccaccgggtagcgctgctggaagccaccacgccacaccatcgaagacgccgccccaacccatagtcgcacgacgctcccatcggtcttggaggtgagatctgcgctagtcccggccgatccgaccaaggacccccggagcaggcccccatgggtaccggtgattggagcatgcccccacgggcatcggcgaaagggaccagaagcacacacgacacacggagaaaaacaccagcggagagaggggagatggccc

SEQ ID NO: 141823 - DNA, 805 bp, Zea mays
  Clone ID: MRT4577_60826C.1
atcttctccttcctttgaaacctagttcctctcgcctggatccgccaccaccctgtttattccgaccgcatcaacgcctccagttttccatggtgaggcaaccgcgctccggtggtcggggcttccatgtattctgccgccacgcaacgggcccagggccgtaaagtgcttcggtcaactcgtttgcctgcggcgcacgacggctcctcttgctccagacgccaagtccctcgaccacagggactcacgatcaaacaagaaagctatgaactggccattgatgctgaggctgactacacgacgcataaccatgtcatctacaaccgacatgaccagtgcctctgcaaaaagcacatgcatctacttgaatacattgaccggcccctatcatcggattgggtctcagatttcaaagggagagagatccatctaaagccgggacgctatattgttcgtggtgatggaaacctcctctactttgatgagttcagcacctgctgcctttatggaaataaagtgaaattatacaacgacaatctcaagaatctgcgcagtctaattaaaggtagtgaaacgcctaactgctattatgtgtgccacatgacaaagacttttgcgacccctggaaaaaggatgtattttcctggcgccgttctctcgagccaacctattcccacatatggatccaaacaatgagctgccggtaagcaatggggacggtaccgtcaacatgatagttccttttatcaaaggtgttgacaatagggccaccatcacaaggaactggactgctttctttaagcag

SEQ ID NO: 141824 - DNA, 313 bp, Zea mays
  Clone ID: MRT4577_60827C.1
ggaatacgggaaaccatacataaattcccaaattataaccccaacaaagaactggggccattgggtggtacagagcttttttatttggtgggagttttttccaaactactcacgatgaatttttccgattgggggcataacaaaatgcagggaaaattttaccagcttcatttgcaaaaaaaaaaagggtcctcaccagtgtttgaacagacgaaataatgcattatgtgacaaaaagcaagtttttggtccaaggagaggctccagcgtttacaactgaaatgcaacgcggacccgtgggcggacccctggg

SEQ ID NO: 141825 - DNA, 182 bp, Zea mays
  Clone ID: MRT4577_60828C.1
cccacgcgtccgacgggaacgagcatttgtgtcgctgccaccaagacggtaaagattctctctctctctctatatctctctctctcttttcaccaaggctggtgcctggtggtccagtatttcagttcagtctaccgtctgttgcagacacggtcgtcctggagttccagcactacgccccg

SEQ ID NO: 141826 - DNA, 1326 bp, Zea mays
  Clone ID: MRT4577_60829C.1
cccacgcgtccggcgccgacacggacggcttcgcggcgcggcggccacgggccactgcctcgtcagctcccccgtcgccagtcgacctatcgtccgcgttgactccaaggacgaggtgccgttcgcgcgtccgctgcctaggttccccgtccagcgcgtgcagccgcagcccactgccagcttggcggtggcggggcgggagactgggatgaggcacgtgccggagtggttgcccgtgttcccggatccgcacacgtatgtgagtacggaggtgtgggttgagccaccggcgaccaaggacagggttgacaaggtggagcaggtgcggcaacggaggaaggctgagaagtccctgctcagcttgcagcaaaggctggctatggcaggtgcggatgggtttcgtccagtagctgctgtggcgcaggataacgcagagaaggggaaggagatacaggcagctgggacaaagagaaacccatttcttgagccagcattgccgcctggggagaaggatgtatctgaggttgatatgcctccggaaaagaagaaactatctgtcctcgaggcatttgcgccagctatgcaatctagaaccatcagggatgttgatgctggggcaggattggatgaaaaccaaaggagcatcgttccaaaggagagggctcgggtgcatcttaagattggatttggaaagaagccatttgctgcagctctgaactcaagagccctggacctgagggaagatccttcattcctgaaagaggaagcaaaggatgacaagaagcggagagcaggcatgatattaagggcatcgatggagaacccacaagaacttcctcagctctaaagttatctatagaggaagtgcggtacccagagtggagttgcatcatggtgtaattgtggaacttcagcttcctgaatcttgaggccatgtgttccctgatacaaccttctcaggatcaccatgccctgatacaacctgcaccggactctcctgcctccacctaccgttttcctaaaacaccatgcgctgatagattctgcagcactgtaactgaagttggaagttccaccatctcactgcgttgaagttggtggttgtgctggtatttcacctttaactgtaaggactaatttgggaacccaatttttccactggattttcattttcctaaggaaaattagttcattttcccttgagaaaataggaatcccttagaaaaaaatagtttccaaactagccctaaaattaaaagtgggttgtggttcaaacggagttgatttttgtggggccatgttcctcatccccagacatggcatccc

SEQ ID NO: 141827 - DNA, 366 bp, Zea mays
  Clone ID: MRT4577_6082C.1
gcgcgctctgctgccgtcatcatggggagaaggcctgcgagatgctatcgccaaatcaagaacaagccataccccaagggcaggtactggcgtggtgttcctgaccccaagattaggatctacgatgttggcatgaaaagaaagggtgttgatgagttcccctactgtgtgcaccttgtcttttgggagaaggagaatgtcttcaggggagctctcgaggctgcccgtattgcctgcaacaagtgcatgaccaagtctgcatgaaaggattcctttcaccttcgggttccgagtcacccctttcatagtcttcgtatcaacaagaagcttttctgtgctggggctgataggctcaaactggaatga

SEQ ID NO: 141828 - DNA, 223 bp, Zea mays
  Clone ID: MRT4577_60830C.1
atttaatcgggggatgaggcatgtttaaccaattcagccttacaaaaatagggctctcgttctggaacaatcttgtatccgtcatccatcaaatcaaaaaaattcatcccctcctaaactaggcccaattggcaggaatccgccaaaaccagaaagaaggtattagcatcaggcttgggttttccataaataaactgaacaaacaatccaattccatcctgtt

SEQ ID NO: 141829 - DNA, 646 bp, Zea mays
  Clone ID: MRT4577_60831C.1
ccatggcgagcttgggagatcgcgacatgcagaagcctcactgcgtgctgcgtgcagagagcagagcacgccatgggagccaggggcgagcaccaggcgagtgcagagagcagcgcgcgcgggaagctgatcggctgtgcgcgcgcaggagttgggcgtcagctgcgcgcgactgacgagcaaagcaggagagaaacacgcctgggctaggtgactgggcgtcgagcgccagggagacggagcgcgtgcggcaagcactggcgagcagcaggggcacggccatgggagagcctcagcagggtgcggcgagctgagagggatagagggagagccgcagggaggagcgcgtggggaagaagcgcgcgccgcgatggagagctccttgacgcgcggccaggcgagcaggaagccacgtgaggaaatagagcacacgcagggagctagagcatcgccggccatgggagagagaggcagctgggcgcgcggcgagcaccagggtggaagaaaaggagcacgccgtagtgaccagccgcatcactgaatccaggaagagcgcgcacaggaaatggaggttgcagcagctccaagaagaatctagagaatgcttcaggatgacactgggcggccggaaaaatcaagggcgcgt

SEQ ID NO: 141830 - DNA, 1145 bp, Zea mays
  unsure (1)..(1145): unsure at all n locations
  Clone ID: MRT4577_60832C.1
ctgcggccgcgcagcgatgcggagcagaagtaacggaggtgctcagctccagccgcttcgctagggcactcttactcccgacaattctctacccggtctccaggcacctcagcacgcccccgtgccgccgccacgccgtccataccctagcctcaggctcagcccccgttcccgccgccgatgccgccgcgccttcgccgtcgctcgcccggctcctcgccgccgcgttgcggggcggccgcgcgggaagggagctccccgacctcgcggccgcgaccacgggcggcgccgggatagggacgctgctcatgagcaccacggcggcagcggtgaccaaggcgcgggagagcccgtacctgctggcgctggcggccaacccgaccttcgtgtcggggctgctggcgtgggccgcggctcaggccgccaaggcccttctcacctccgtcgtcgagcggcgctgggacctgcggatgctcttcagctccggcgggatgccgtcctcgcacaccgcgctctgcaccgcgctcactgcttccgtcgcgctctgccatggtgtcagcgacgcgctcttccctgtttgtctcggttttactctgatagttatgtacgatgccacgggcgtcaggcgccacgccggaatgcaggccgaggtactcaataagatcgttgaggacctgtttgnaggccatccgattagtgaaagaaactcaaggagctgttaagacatactccgtcacaggtctttgctggagcaattttgggcatcttggtggcctggtattgctgccaaggttgcattgttcccgtttgatgttgttattactgtatgaatgacccagaaacgaaactattccatcacgtggattttgcatgtagcgtaaccagtgaccgggaaagtatttggtcttgactgtttgatttccctgtatatatgtaacctgatagtatgaaacaatcaagatatccgtcctttcaaatgtcaatgccaagttgaggctcaatttatatgcattcggatgtatgatacgagctcttctatcaccgtttgtgtacttgaacaagtacacatctgtacatcaggaacttgtaattttggtgatgtgctgcttttacatatgatgaagtggactctgctttcagttaac

SEQ ID NO: 141831 - DNA, 544 bp, Zea mays
  Clone ID: MRT4577_60833C.1
tgtgggcgtgtcggcgttcggcgggcgaaaggcgcaggcggcaggcgaggggagcgcggaggggccgcagcgcgcggcgctgggtcacggggaggaggcgaggggcgcggccgtgtggcggcgccgccgccgccgtcggaggcggcgcgggagctggtggcggctgtgccgggaccacagggcgccgccaacatctctgggcgagttcctggacatggagcggtagctctcgggctctgacttgctatgcgacggcagcggagccagcgcgtccgggcgcgagacggacgagctggtcgagaaccgaagggtgcggcctcctgcgcaacccaatgtcaccgtggcggaggagatgggcacgtggaggctgcttacggcgtcagatggctcgtcgatctgccggctgccctagcgcgcctgcctgtgctgctcaccagaatatgcagcggccgagccgtctaaatgttccaaattgcaattcactcgcttcggagtggtggtgtttctatacaaaaaaaggagttgactcctttttaatcaagcc

SEQ ID NO: 141832 - DNA, 1089 bp, Zea mays
  unsure (1)..(1089): unsure at all n locations
  Clone ID: MRT4577_60834C.1
gcccgctccgctctccgttaactgccgcgttcattcagtcccattatattcaccgaccgcctcttcgttggagcagcagcagccagcagcaccacaccagcgcggagctgcaaagctcctcccggctgctttctcgtggcgcggtgcatgggagcgcggctctgagaggaaaagaagaggagaaaggcgcgcagggaggatgaagttcatgaagctgggctccaagcccgatgctttccagtccgacggcgccgacgtccgatatgtggcctctgaccttgcaacagatgttgtggtgcatgttcgtgaagtaaaattttacttacacaagtttcccctcatatccaagagcagcaggcttcaaaggttagttcttaaggccaccgaggagacgaccgatgaggtccgcatagatgaccttccagggggagcaaaatcgtttgaaatatgtgccaagttctgctacgggatggtggtcaccctcagtccacacaacgttgtagcagcaagatgcgcagcggagtatcttgaaatgaccgaggagatggagaaggggaatctgatatttaaaatcgaggtcttcatgaactctagcatacttcgcagctggaaggattctatcatcgtcctccagagaacgaaggccctgtcgccgtggtctgaggagctgaaggttgtgggcagatgcatcgatgccatcgcttccaagacatctgtggatcatgccaatgtgacctggtcatacagccataataatagcaagaagggaggaggttgtgctgaaatagtcgagtcggcaggaaaaccatcgatagctcccaaagattggtgggttgaggacttgtgtgaattagatgttgacctgtataggagagtcatggttgctatcaaatccaaggggagaatgtcacctgaactgataggagaggcacttaaggcatatgcggttagatggctgccagactcctacgatgcactggttgccgagggtcacatgaggaggaaccaatgtctggtcgagacactaatatggttgttgccttctgataagactcangctgntcttgcaggtttctcttgaaactgctg

SEQ ID NO: 141833 - DNA, 583 bp, Zea mays
  unsure (1)..(583): unsure at all n locations
  Clone ID: MRT4577_60835C.1
atttgccttatgaggtganacatgcgtcgagccctcnccccacaagaagcgcgtaggtcaggagagagatacaggcggggtaggaagacaatggaatggaaacaggaggacgtgagcctgggcgccaacaagttctcgtagcgtcagcccatcgggacggcggcgtagggagtggctgacgaccatgactacaaagagtccccgccggggccgttgctcaagcccagagagctaaagtcctggtccttctaccgcgcgcctatccccgagataactgcctgcttcatcttattctaaatcagcatgctcaccagcatgagcgtctccaagtccacctctatgtgttccaccgtcgggatccaggcatcgcctggtccgtctaaggaatgatcttcgcggtcgtctactgcaacggcggcatctcccgaggacacatcaatgcagctgtgactttctacctggtcttaggcaaaaaggtgtgcctgactaagggcctcttcgacatcaacatgcaatgcctggaggccatctgtggagctgaagtggtgaatggcttccagcagtgaatttactggtgcgacgg

SEQ ID NO: 141834 - DNA, 273 bp, Zea mays
  Clone ID: MRT4577_60836C.1
cggacgcgtgggcggacgcgtgggtgccccagggtcctctgctcatgtccacgtccatgtccgctccgactccgacccccgatcccgctgacctccttcgccgtgctgcggcaacaccactcgcagctcatccgtctcggcgtcgcctcccacgccgcccacgcgcgccgccttctctccttccttgcccgggaccccgactcccacttcccgtacgcgagccgcctcctggcgcaccacccggactcgcacccggcgctcttcaacccgctc

SEQ ID NO: 141835 - DNA, 598 bp, Zea mays
  Clone ID: MRT4577_60837C.1
gcttaaaggatagctcatccaaaaggttgatactaaaagctttgcctcaatgtacaaagtaaagttcaatatctaaggaactattttataggacttctcatgccacatgagctaagatgaagaggaaaaagtaaacacgagaatgttatccctacttcaacctgttctatattcacaaaactttggagacaaagtcacaaccagagttgcaagactaaaatatggctagagccaggggaagtagcatgggaatccctctcagttagcccttgaacaaaaagcagaacatcaagtcaaaagttgggctatcataagatcatgtcacaacttgtttgcatctcaatgtgctcctggtcaccaatggaaaaagtgtcagcgactggaaaataaactagaataacgataccgaccatggtagcaagcatcaacacaaggaaggaaacaaacacaagagcctcatgttctacttcaccaggccaaggaagaaccgataacccgagaagtatcgctcgggaaagtaatattctggtggcaaagatgagcatatatatccttcatcggagtcccttgttgataccaaagacacatctgatgtccg

SEQ ID NO: 141836 - DNA, 294 bp, Zea mays
  Clone ID: MRT4577_60838C.1
agcgcaacgtgtcaaccttgctgcactaccaaggtatctttgcatcaggaaggaggcacgtacctacccgccacatcaacctaggctcaagcattcgagtcatggtcaaggacgaccctaacgcccctgactccgtcctcgacacagcagtaccactagtacgctccacccatgcagatgcctcaaggagagtctgcccaccgtgctgaccgtgtagctcaactccccgtccgtcaacagtaatggcttcaccgtctacgacgcccgctgtgacctgaccttccgcgtgtactg

SEQ ID NO: 141837 - DNA, 949 bp, Zea mays
  Clone ID: MRT4577_60839C.1
cgggtagggccgggagctcgcagcaaccttcaaggctcaaactaccacctgttcacttgtcgccaatccatcagtgtcgggacaacccatcagagctagctagggccagctagcagcgatttatcctagctagctagcaagcttctcttcttcttgccctcgtcgatcgatcggtatggcggcggcggcaggtgaggagaggaagaagacggcgtgcgtgaccggagggaacggctacatcgcgtcgttgctcatcaagatgctgctggagaagggctacgccgtgaagacgacggtgaggcaccccgaggacaaggagagcaactcccacctggaggacctggagaagctgggcctgggccccttggaggtctaccgcgccgacctcgccgaggaaggcagctacgacgaggccgtcgccggatgcgactacgccttcctgctcgccgcgccggtcaactacacgtccaagaaccccgagaaagagctgatggagctcggcgtccaaggcactctgaacgtgatgaggtcgtgcgtcaagtccggcacggtgaagcgcgtggtcctgacctcgtcgacggccgccgtctccagcaagccgctggaagacgacgggcacgggcacgtgctggacgaggagtccttgtccgacatcgactacctcaccgccaaaaggactggcctctgggcgtacccggtgtcgaaggtgcccatggagaaggtggcggcggagttcgcggcggccgagggcgtcagcctggtgaccctgtgcccctccgtcaccgtgggcgaggcgcccgacaggcaggtctacaccaccgtccccgccatcctctccctgctctcccgcgacgaggcggagctcaaggtgctcaggggcatcgagcgggcctccggctccgtgccgctggtgcacgtcgaggacgtctgccgcgccgagatcttcgtc

SEQ ID NO: 141838 - DNA, 1706 bp, Zea mays
  Clone ID: MRT4577_6083C.1
ttgggtacctcgaggccggccggggcagaaaaaatagaatcgttctcattcttcttcctcaagtatcgtagttctctactgatgtcttcgtcttagtttcatactggtgtcttcactcagcaacttccctcagatcccatccacccctcgctattaaagcagcccaggccgccgcccgccgccgctcacccaccaatccacagcgagacccgaccccgccgtcgcgatgaggccggcgctgctcaagtccacggccgagctcctccgccgcagccgcggctacgcctcctcggccaacccggagcggaaggtggccatcctgggcgctgcgggcggcatcgggcagccgctctccctcctcatgaagctcaacccgctcgtctcctccctctccctctatgatatcgccgggacccccggcgtcgcggccgacgtctcccacatcaactcccccgccctggtgaaggggttcatgggggacgaccagctcggggaggcgctcgagggctccgacgtcgtcatcatcccagccggggtgcccaggaagcccggcatgactagggacgacctcttcaacatcaacgccggcatcgttaaggggctctgcactgccatcgccaagcactgccccaacgctcttgtcaatatgatcagcaaccctgtcaactccactgtcccgattgcggcggaggttttcaagaaggctggtacttatgatgagaagaagctgtttggtgtgactactcttgatgttgttcgtgctaaaactttttatgctggaaaagcgggtgtgccagttactgaggtgaatgttcctgttgttggaggccatgcgggtattactattctgccactcttctcgcaggccactcctgcaagcaattcgttgtcccaagaagacattgaggccctcaccaagaggacacaagatggtgggacagaggtggttgaagcaaaggcgggaaaaggctctgcaacgttgtccatggcatatgctggtgctgtttttgcagatgcatgtttgaagggtctgaatggagttccagacattgtagagtgctcttttgtgcaatcaactgtgacagagttgccattctttgcctctaaggttcggctcggcaagaatggagtggaggaagtgcttggtctgggtgagctcaacgagttcgagaagaaggggctggaaaacctcaagggcgagctcaagtcttccatcgacaagggtatcaagtttgcccacgggaactaggcaccttgcgtccttgcccggcttctaacaattgatgcccccccttgcatttttgtttgactgcctatttttcctgccccccgtatggttggggcaatgaggcgtagtggtcgataataaaacccagcggaacaaagaaaacgtgtaccagaaactgtttgcaaacaccggtgcctttttttgtgttgaaccaccattagttgagccgtgagggaatggtgaacaagctttccacttgctcatttccgagcgcttctctttgattgtatgcatggtttggactcatgactggacgtcttggcagttggcttggcacccaggaatctaatcactggagttgctgctgttatcgagattttgcagcgttgcattctgatcggaactgttgagctggacaatttgatggttctacatgcattgtatggatgcttgttcgtatgcacacattgatgccact

SEQ ID NO: 141839 - DNA, 583 bp, Zea mays
  Clone ID: MRT4577_60840C.1
tcgagcggccgcccgggcaggtacaagcttttttttttttttttttttttttttttattttttttttttttttttttttttttttttttttttttttttttttttttttttttttttttttttttttttttttttttttttttttttttttttttttttttgggggggggggggggcccccccccaaaacactggggggcgaaactagtggggcccccccccgggccaaggggggtccccccccagcccgggggggtccccgggcccccttgggcccccccccccttgggggggatttccccccccggggggtttatttttaggggcccggggcctaaccaccgggggggctaaaaagaaaagaaatgccctccctgggggatttgttttcgggaaacctttccccccaaattcctggggggatagataaattggcggggggggggggcctggggggggggccccctctccttttggggggtgccgacccgccccctttccaaagggagaagctggggggcccttttttatttttaaagccccccccccgggggggggggggttcgggggatggcgccctttt

SEQ ID NO: 141840 - DNA, 1930 bp, Zea mays
  Clone ID: MRT4577_60841C.1
cgttgcggtcgggcagctgtcccggtgtgccttcggttcggcgcacgagaacagagcaacgcccaggcacacacgacgcggcaccaggcaaccagctgccgagggaggaaccctagcggaacactgtgcaggtgacggcggcgcgctaccggtgacggcggcgcgctaccggtgacgggggatacggtggcatcgtccccctcggcccctcttccatccccggcgcggcggcgccagcagccggcctgcagggcttatattttacggtgagcacattcttttgctgatggagaccactgaacctctacaggatatcatgtgtgagtttcgtgctggtaagatgtctcatgagggaacacgagtggttccagacacgcgcaagggtcttgtccgcgttggtaggggtgaagagggattagtccattttcagtggcttgaccgtggacagaacatagttgaagatgatcaaatcatctttcctgatgaggcggtctttgagaaggtgacagaatctcctggaagggtttacatcttgaagtttaagcaagacagcagaaaattcttcttctggatgcaggaaccaaatgctgatggggactcccagacttgcatgcaagttaatgcctacataaatcgatcattagatgctgaggctgatcttcgagtacctattgaagcagaaatgtctgaagatacggctgatgatgatatctcttccagagctgggaatctagttgagagcatgaccgctgatttggctggtgaagtgacgtctgctgctggacctgtacgcttggaggatctgcagagaattctgagtgcaatacagtcatcaggtgctgcagctgaccctgatgctggagtaggactaggagacatcttgaagcctgatctggtcttgccattaattgaggacttgcccattgaacaattggcatcacatcttccggagggtggctcatggagtcctggtgatatcgttgagcttctccaaagtcctcctttgcgccaacaattagatgcattcacccacgttctgcggactgggcagatagatcttgctcaatttggagttgaccctgacaaatataagttcacggtggtgtcgttcctggaggcattggaagactcggttggaagaggtgcttctgaagctggagacaaggatgcagaggtcgagcgaggcagtggaaatgatgccatggacgagagttgatatccgtgtactaggtgtctgaattcatacgtgacaagtcttgtgttgttgttttgggtagaacgctagctcatagtattttgggcttctggcacacagaaagcaagtttctggacaagttttggacattattgctgctgtgagatgtagtgctaggcaacagatggtctggttggtggatcatggattccatggcattgagaagcttgcaaggctagattgattgtgttctgcgggggtaaatcttgcgtggcgttttgaacgtggattggtaaacagaatagcatcttttgaacgtcggttgttccatgtccacagctgatggtggtggcctcgaatgtcgtactgtacgtccatgtcgatgattccgtcgcaggagcctactactactatatccctgttctatgtaagatatgtgtactccagtacaaacagtatatggacagctcaggatttttttatattgttctacacatacatatttagatgatttttatgagaaaaaaaaaaaaaaaaaaaaaaaaaaacaaagggcggccgccgaccatcgagctcttccctctgtcccagaaaagttgatgttttagggttggccatatgaatttataagtataaaaatgatgtggggcatttaaaacaaggagaaataccgatattttggggaaaaaaaaaaaaaaaaaccaaaaaaaaaaaaaaaaaaaaaaaaaaaaaaaa

SEQ ID NO: 141841 - DNA, 245 bp, Zea mays
  Clone ID: MRT4577_60842C.1
ccttctacagcgcacgaacgtagcgctcaagaattacggcacaaacggactacaaggacaaaccgcgaacagcgcaccaacctacacgaatgacccggacgagaggagacacgcacaaagtaacgcggacaccgaaagctgtaggctaccgctaacccgtacacgcacaggtgcaacgtgtacagctacggcatgactggtgttcgagatccacggaggcggcgcaacctggagctgcagcaccc

SEQ ID NO: 141842 - DNA, 1419 bp, Zea mays
  Clone ID: MRT4577_60843C.1
cctcgaggccggccgggacacacgatgcgaaccaggcaaccagctgccgagggaggaaccctagcggaacactgtgcaggtgacggcggcgcgctaccggtgacggcggcgcgctaccggtgacgggggatacggtggcatcgtccccctcggcccctcctccatccccggcgcggcggcgccagcagccggcctgcagatcagctcaacaaagataaccttgcgcatcctcctaagaagatcaagactacccagccaggttctacagaccctcaaaaccttaatcgttagatcatcgccgttctcatgaagggcttatattttacggtgagcacattcttttgctgatggagaccactgaacctctacaggatatcatgtgtgagtttcgtgctggtaagatgtctcatgagggaacacgagtggttccagacacgcgcaagggtcttgtccgcgttggtaggggtgaagagggattagtccattttcagtggcttgaccgtggacagaacatagttgaagatgatcaaatcatctttcctgatgaggcggtctttgagaaggtgacagaatctcctggaagggtttacatcttgaagtttaagcaagacagcagaaaattcttcttctggatgcaggaacggaatgctgatggggactcccagacttgcatgcaagttaatgcctacataaatcgatcattagatgctgaggctgatcttcgagtacctattgaagcagaaatgtctgaagatacggctgatgatgatatctcttccagagctgggaatctagttgagagcatgaccgctgatttggctggtgaagtgacgtctgctgctggacctgtacgcttggaggatctgcagagaattctgagtgcaatacagtcatcaggtgctgcagctgaccctgatgctggagtaggactaggagacatcttgaagcctgatctggtcttgccattaattgaggacttgcccattgaacaattggcatcacatcttccggagggtggctcatggagtcctggtgatatcgttgagcttctccaaagtcctcctttgcgccaacaattagatgcattcacccacgttctgcggactgggcagatagatcttgctcaatttggagttgaccctgacaaatataagttcacggtggtgtcgttcctggaggcattggaagactcggttggaagaggtgcttctgaagctggagacaaggatgcagaggtcgagcgaggcagtggaaatgatgccatggacgagagttgatatccgtgtactaggtgtttgaattcatacgtgacaagtcttgtgtttccgaattttttgtattttagcccctaaaccgaagtaaatttacgtttagacctaaaaaaattttaaatacaaaaaaaaaaaaaaaaaagcggcc

SEQ ID NO: 141843 - DNA, 653 bp, Zea mays
  Clone ID: MRT4577_60844C.1
cccccggggttttttatttccttttttttttttttttttttttttttttttttttttttttttttaaacaaccatatcaccacctttttagcaaggttttttttcacaaaaaacttctcccccccaatcccaaaaaatttttaaaacccatagtctcataattaccatcaaaaaggtctcatccttagccaaaaaaaaacccttctcacccagtcctaaaaaaaaacaatttctcatccatagccaaaaggaggtccggaaaagggaaatggggggggggggaaaaaccagggttaaggaccggggggggggggggccccgggccgggtatccttggggctagtggtggaaaaagggttggctgtggtaaaatcggggaaaaaaaaaattaagggggccgggttgggggcttaaagaaacccgggggttcaaatattcaatgggaaaaaggattcgggggcccttgtatgaacaggggaaggcctgggtttttgggccatccagtttttaaaaggccttttccactcttttacgtttttgaaggaaaaacggggggaaaaaaatcccccccgttttttggaataaattcgtgaaaaaggaaagaagggtattagggttataaaaaaacggcataaaacccacattttggggga

SEQ ID NO: 141844 - DNA, 140 bp, Zea mays
  Clone ID: MRT4577_60845C.1
ttcgcatacggaacctgtttctcaaacaagttggaacgagtcaagatgatatgtgttgccttcagttggatcttacccctggttgctcgtaatacaccaatctagatagctcaattgaatatgaaacttgacggaaataa

SEQ ID NO: 141845 - DNA, 516 bp, Zea mays
  unsure (1)..(516): unsure at all n locations
  Clone ID: MRT4577_60846C.1
tgaacatacaatataccaaaagcaagggggtagataatgtttcgggtatgaactactgaaagctttctcttacttctcttcactgcaacaaatatccagcagaatattagctttagaaagagcaatcaggaaatcggtagtttgaaccgggggggtctgtacttcaaagaaaatagaaagaaacttacaagcaagccaaacccaaccagaccccaatagttgtaaggctgaacgaataaactcttccctaaaattagtaaacaagccaaaatccttttcaatctgctatagcacacctccctcaggtaagccaccaccttctggttgcatcgattcccagaaaaagggatgattcgagaccctagggaagttcaactgttctctttctcatgtaaggttccagagcatcctggacattgnaccagagaacaaagtttaacaaagttaaaatttggatattcctttaatgacagcacacaaaccttctgagattggcaccaacaagcttacagacca

SEQ ID NO: 141846 - DNA, 673 bp, Zea mays
  Clone ID: MRT4577_60847C.1
ttttttttttttttacgtctatgaactactgaaagctttctcttatttctcttcactgcaacaaatatccggcagaatattagctttagaaagagcaatcaggaaatcggtagtttgaaccggtggtgtctgtacttcaaagaaaatagaaagaaacttacaagcaagccaaacccaaccataccccaatagttgttttgctgaacgaataaactcttccctaaaattagtaaacaagccaaaatccttttcaatctgctatagcacacctccctcaggtaagccaccaccttctggttgcatcgattcccagaaaaagtgatgattcgagaccattgttgtgggcttcttttatcagatcgtccagagtgtatatacatacagagggctggtagccagctacttattcaagccatccacgtaatcttgatggtgcttaccccagtgaagttcaactgttctctttctcatgtaaggttccagagcatccttctgagattggcaccaacaagcttacagaccagtttatatggcagagtcgtgagaccataataagaaacaactttcaaaaatctttgagatagaccaccctgccaagctgccatggattcgccgatccatcttgcgtcgcgcaaggaaaggggcaggcgggcgctgttgggggagcggggca

SEQ ID NO: 141847 - DNA, 954 bp, Zea mays
  Clone ID: MRT4577_60848C.1
gcaaggcttgccgagctgcctagccattataatgcttggtccttgaattgaagtcaattgatttccgatttaataaggcacagtttgtttgagcttctgctgtcgtcttcacatattttaatttttaatgcatgtggggattactgaaattgttgtgcagacatgtgttttgagattgtgtgttatttgtgcctgattttattgcacaggcagggtggtctatctcaaagatttttgaaagttgtttcttattatggtctcacgactctgccatataaactggtctgtaagcttgttggtgccaatctcagaaggtttgtgtgctgtcattaaaggaatatccaaattttaactttgttaaactttgttctctggtacaatgtccaggatgctctggaaccttacatgagaaagagaacagttgaacttcactggggtaagcaccatcaagattacgtggatggcttgaataagtagctggctaccagccctctgtatgtatatacactctggacgatctgataaaagaagcccacaacaatggtctcgaatcatcactttttctgggaatcgatgcaaccagaaggtggtggcttacctgagggaggtgtgctatagcagattgaaaaggattttggcttgtttactaattttagggaagagtttattcgttcagccttacaactattggggtatggttgggtttggcttgcttgtaagtttctttctattttctttgaagtacagacaccaccggttcaaactaccgatttcctgattgctctttctaaagctaatattctgccggatatttgttgcagtgaagagaaataagagaaagctttcagtagttcatacacgaaacattatctacccacttgcttttggtgatattgtatgttcatacacaaagaatgatatagaaccaccaaagagttgattgtatattgatcc

SEQ ID NO: 141848 - DNA, 1827 bp, Zea mays
  Clone ID: MRT4577_60849C.1
aaaatttgcgtttctgttgggtacacagtggtgtagaaggagggccagtctcatatctgtctgctcgttccagtaattaagtcaagataaatgccaataaacaagttaagaaaaatgccatcatggaggacatagttgtccaagagttacttgatgatttctaggacactccttgggctagagctagctataaagttaagcttgatgattttgattctgattttgagtctgccctactaaaacaagaatcatgacctacatttcatttaattcctgcatgcagacccatgatgttgtattaactattccagtgtgcaattcatcatgtttcttatatctcgattctactgctttaataatatgtctagcatgtgtaatgttcctaatcatggttcagctcgaatcgattgcatacaaaatgattatgtacgtatgagggcattccatctatgcataaaacgtttctgctagcaggtagagccattaagtctgagtatctgataattggtaatttatcaggcgataaatttaaaccaactattatctaaatccttcaattgaagctctgattgggaacatattatgctaatgatttccttgctgactgtttgtcttatttcattgtcttacaatttgatgaaatgcctcacctcctgctaatgatttccttcattctatcaggcaaattctctttccaacacaccaaatacatatgaacaagacatctcgattattgggcgaacactatcgaaattcgatgaagataatctgattccatgtttcggatttggagatgcatcaacacatgatcaagacgtctttgtttctctcctgacgagaaaccttgcaatggatttgaagaagcttttggacaatgcagggaacttgtaccacattttcgtttagctcggaagctgctatgccttgttcgtccatttaattgcattgttcatatgtgtttacactaattcttaacaggatcaacaccctttgcaccaatgtgaagcaaagtggtggacaataccacgtcctgttgataattgcagatgggaagttgcaggacgccatggcagccttgccccgctcccccaacagcgcccgcctgcccctttccttgcgcgacgcgagatggatcggcgaatccatggcagcttggtggagcacggcgtcctttttgaaaatggtttggtcatacacaaacttgtggggtgaaatttcggcttcggcctccttctgcgaggtggatttggatagcgcggcgcagaaaaatggcggcttcagctctccacctctgccgcctccccaagccatggcgggtgtgaagcttcagcagaggcagttgcgcccgatgagccatgcagggtggtctatctcaaagatttttgaaagttgtttcttattatggtctcacgactctgccatataaactggatgctctggaaccttacatgagaaagagaacagttgaacttcactggggtaagcaccatcaagattacgtggatggcttgaataagtagctggctaccagccctctgtatgtatatacactctggacgatctgataaaagaagcccacaacaatggtctcgaatcatcactttttctgggaatcgatgcaaccagaaggtggtggcttacctgagggaggtgtgctatagcagattgaaaaggattttggcttgtttactaattttagggaagagtttattcgttcagccttacaactattggggtatggttgggtttggcttgcttgtaagtttctttctattttctttgaagtacagacaccaccggttcaaactaccgatttcctgattgctc

SEQ ID NO: 141849 - DNA, 619 bp, Zea mays
  Clone ID: MRT4577_6084C.1
tcccccgggcctgcaaggactttcggcacgaggcgttgattgacctccctgcgcgaaacttggcgtcgcgccgcactagcctgctggcaatgtctctcggcggacccttcgccgtcgacgggccacccaccacaccagggttctgcacattaatgaatacttaaaagttccagaacaaagcaccaagggtgcccgaaggaaaaatgctttatgtcaaaccaaactgtagaacttgccactgcctccaacaccctatggccacttggtttaaaccaagtgttatccaaggccagttaaaagctctaacctgaaaagtcaaccttgccttccacgtgccaagaatcccataaaacattgctattgtctcgtcccgcttgatttttgcttgtgccttaaatacaaaaatcaaaggcttgcggaacaacgtggaagtccacaaatcttgagtctccgtgcctcttgaaatagatttaatgatttaaaagagaaacagaagacacataatgagacacttatcctaatagaaaattattgggaacgacttcgtacaatctgggtatagtccctgtttgccaaagtgaatcttcacattcagctgcagacaggaaacaacatatac

SEQ ID NO: 141850 - DNA, 465 bp, Zea mays
  Clone ID: MRT4577_60850C.1
gttttagcgcctttcggtgcggaagcattttgctgatcctctctttgatgcatgttattgattttggttgcatcaatgctggtacatgtggacctggccaacacatagtcacatttttccctctctgagcagaacacatgggaccagcgccactgaggcacactggccaaacaaggtgatctcattctgttcagttcaattctcactcttcgctgtccttcagatatatctactgtgaaaccatgaacttgctgaatggctgatcaagcttggttagcattgaactattgaaggataaattctattacacagattgtggattggttatgttcacattgtagacaaaagaagtattggctaatgaaggcctataagaattaagaacatacctttaaagcagcatcttgaccattcaaacaagagaagttatgtacacaatggccattttatttttttgttaggttc

SEQ ID NO: 141851 - DNA, 224 bp, Zea mays
  unsure (1)..(224): unsure at all n locations
  Clone ID: MRT4577_60851C.1
cccctatgttnaatgggattgntgacaggatgagtaaggaaatgantggnttggntactagaagaatgaagatgaaggtggttgttnttnnagaaaggaagtaaagtgtgtggattggaggatatatattgggatgaattagaaaattggaggagaggtggattgaaaaaggtgagtaagatgagatagggggaatagattgtggataggaaatggttgtaata

SEQ ID NO: 141852 - DNA, 377 bp, Zea mays
  Clone ID: MRT4577_60852C.1
ggtggtggagctgggcgttacgcacattctgtgggaggtgttcgaggactacctacaggaaattagcctggatacagggccgatgcctaccggctgatcaaatacaaaccgacaccttgccccactatgtggttcagaagaaaggaaaacctgcccccaatgtgaaaacctacataatcttgcttccagtcggggtcgtgttcaggctgaaaggcgcctacatcatgcgggtgccccaccccctaaagggcacactgatgagcacacgtcctaaaaaaacaagagagggcaaagccatacgcgtcgtctacgtgtcatccattacctaaggagcagcctgggaacgaaatgcggcatgccccaacaagaaagttgga

SEQ ID NO: 141853 - DNA, 684 bp, Zea mays
  Clone ID: MRT4577_60853C.1
gccttctgttaagcgttatcattgtgacaaaagaaaaacatatggttgttttataaatgccaaagcattgatctagagaatagctcccattacataaggaatttttatttgcggaactaaaaacattaggattgctcaaacattggttgttggtctacagaggaggcaaccatgtgatgataaccgggctacgaactttatgagtagtgctcttccacactagaccaccaaactcaggcctcttcatccggaaccttgtcctgaaagtaaccgcgtaggaaagcttctggtgcttcgaagtgaagttgagtgttttgggctggacagttacggatgcgcctttgaatggcgagacagaaaccttgtagcttgaaatgtgaggaccaacattggtcactgttcttctaagtgtcatagctttaacatgtgtgttctctgggaacaaagctgatatcgccgggtagttcaagtttcccggattcttggcaagagtgtgtttgcaggttctgtttgaatgttttgtgaataccttaagctgtgatggacttaaatcttgagtgcagaggaattcaaaatactcttgaggtccaatgtcgtagaccaaaccaggatctgtagctcttaaaggatctatatgtcctgcaccgtgatcataaggcgatgaaagagctgctcctgatgcat

SEQ ID NO: 141854 - DNA, 280 bp, Zea mays
  Clone ID: MRT4577_60854C.1
aggaactgcggcagagatctcgcaatgttaaactgacatcgttcgttatggctgactaaaagagcttgtaggcgacaattagctagggttctttcggccgcgacaaggaaattatatcaataaggagtttaagacttgggggtagaagagtgtgtgggggctaggttgggatctcgtccgagaagagaacgattgggtggatagttcggtcagctgattcggttcggaggcaaatagttgtgcgagcagtttgatcaaacacccctggaccgtttgctcc

SEQ ID NO: 141855 - DNA, 1637 bp, Zea mays
  Clone ID: MRT4577_60855C.1
aagaagggtttcagtacaacttatggtggaaataatgaagcagtgctagtgggatcatattctcgacgagtggctgtgctccaatgcagcaagggcattccatcaaccattgatccatccaggcttcgcaccttaattacattcgacaccagcagagcattatctgtgtggtattcttctatttcctccaaaccaaagtaccttgcagtattagacttatcaagcttgcctattgagactattccaaattcaattggagagcttttcaaccttaggcttttatgcctcaataaaaccaaagtgaaagagctccctaaatctattacaaaacttcaaaacctacagacaatgagtcttgagaatggggagttagtgaagttcccacaagggttttcaaaactgaagaaattgcgacatcttatggtttcacggttgcaagatgtaactttcagcggtttcaaaagttgggaagctgtggagccatttaagggcttgtggactttgattgaactgcaaactctgtatgccattacagcaagtgaagtattagttgcaaaacttggaaatttatcccagctgaggcggcttataatttgtgatgtaaggagtaacttatgtgcacagttgtgtggctctttgtcaaagttgtgccagctgtcacgattaacgataagagcatgcaatgaagatgaagtgctacagctggatcatttgacatttccaaatcctcttcaaacccttagtttagatggacgactgtcagaaggaactttcacgtctccctttttcttaaatcacgggaatgggcttctttgtctaatgttgtggtacagtcagctttcagaaaatccagtaccacgtctctctaaattatcaaacttgactaggttatctcttataaaggcatacaccggccaagaattatacttccaagcaggttggttcctgaatttgaaggaactttacttgaaggatttgccccatctcaatcaaatacacatacaggagggagctttggccagccttgaacgtataacaatgaaacacctcccggagctacgggaggttccagtcggtttcagatttctcaagtccctaaaaacaatatttttttccgatatgcatcctgagtttgaaagcagctttcaaaaggaaatgtagatcatatcccgtacatatgcaggacaacaacataagtatggtttgtttgtatgtctacgtgtaccttctgtcctctcccaaaaatagggcgggttgcattggcgaaaagttcatgatgggtgttttgagcttgggcaattactgtggagaggaaatgcagcactaggatccaagctttcgagcagaaagcagcgctgaagctgaagggcatgtcatgtcattcaggtacctagtaggatccaaaccttcgagcagaaagcagcacaggcactggcaccaaagaggaaccatagccgccaggcaacatcagtcatcaggaccggttaataatgtttatgtgtgataatgttgtttcaataattatttggaaccatttcgaactccgaatacttgagagtctgtacgaagcatttggcaataaatactatttcagagtaaaaaaaaaaaaaaaaaggcggccaccgaatagtgagctc

SEQ ID NO: 141856 - DNA, 426 bp, Zea mays
  unsure (1)..(426): unsure at all n locations
  Clone ID: MRT4577_60856C.1
aaaaaaaaaatcttcnttaccccctaaaaaanaccaaataaaaagggtttttttttaaaatatttacccgttaatttccctttttcattttttttaaggaaaaaaacgggataaaaagccatttaatttggcaaattgattaaaatttttaaaaccccggccccattttggagggcttggccaaaaaaaaaaaattccatccataagccatgtaaaaatttgaaagggggctggggggcatttccagaaaaaaaaaaagggggaaaaggggctcctaaaaaatcctggaaggcctggaacgtaaccccaaacttcaaaaaagggggaaaaaccgcccataaggggcccttccgggggcctttggtaaaaacccgaaacgtaaacaacttcaagggaaggcccccccggggttgccaaaattgcccc

SEQ ID NO: 141857 - DNA, 757 bp, Zea mays
  Clone ID: MRT4577_60857C.1
aattcggcacgaggcaggacagcacacaccccacccacaactaccaaccttctccggaaggccaaatccctccgggccaagggaaacgagggagagagaccctccgcccctctcctctccctctccttccggtgaggcggtgagctatggagtcggcagcggccgcgaagacggtggagcggctggcgcagcgcctggtgccgccggcggagcccacccccactgccccccaccgcctgtcgtggctggaccggtacccgacgcagatggcgctcatcgagtcgctgcacgtcttcaagcccgacccggcgcgtgacgggctcagccccgcggagaccatcgagcgggccctcgcacgggcgctggtcgactactacccgctcgccggccgcctcgccgtgtccgacagcgccgggggcctgcacgtcgactgcagcgctgagggcgtctggttcatcgaggccgccgtacggtgccgcctggaggacgtcgactacctcgagtacccgctccagatccccaaggacgagctgctcccgcacccgctgccgaggcccagccacgaggaggagagcaagctcatcctgctcgtccaggtgacggcgttcgcgtgcggcggcttcgtggtgggcttccgcttcagccacgcggtggcggacgggctcggcgcggccaagttcatgggcgcggtgggggagctggcgcgcggggcggaccatgtcttcgtggcgcccacctgggccccggacgccatccc

SEQ ID NO: 141858 - DNA, 368 bp, Zea mays
  unsure (1)..(368): unsure at all n locations
  Clone ID: MRT4577_60858C.1
ntttatttttttttttttttttttttttttttggggtttttttttttttttttttgttttttttttaaaccaaaggcagttcccgatttgtataataccccagggggaaaattcccctgccatccctggggggggggacggtaattgacaaaccattgttttcccacccgttttttgccatagcacgcgacccacctgggatcatttaacattataaacatacttacgggggcgagcgtccaaaagccctttttttttatgtcaaccctgacagaccacaggtttgcctccccaaccccaaaaaaacctaaacccggaaaaaagaggaccctccctccatccagggggctaatggttccaaacggggg

SEQ ID NO: 141859 - DNA, 528 bp, Zea mays
  unsure (1)..(528): unsure at all n locations
  Clone ID: MRT4577_60859C.1
ggnactttgtcttggcactttcaaagcacttggcgtagtgagagatcctagactatccagcacctctaccggctcatcaacattttaacgccgcataaaaactagaaggaccttaggcgaagcccctaggctgcttctagatctatatgctgtactatatcctttacgtgctgtggatcattatctttgtgacctttcgtgagcatctatcgcctgactctatgctaaaacattgtgtcttaatttgcgaaccaactacacactactggatactatttctgcatgctgctatgctactatcttggcttgaactacaggtcgtattcctggttggacaaaatgatatcctgccaccaaccataccttgctgtttgccctgtgcatcttctcttgccaacacggacaagctctccatcctccataatgaataaccttccttaggatgcacagaacatggaagcgtctacaccagtacccaacctacattcggcaggaaacgatgaggacgacactccaaactacactgcc

SEQ ID NO: 141860 - DNA, 1651 bp, Zea mays
  Clone ID: MRT4577_6085C.1
ccggccgggagcagagcacagttatcacctcgggcgaacgggcggagacgtcgaaacgagacgcccaaaacccctcgcctttctctctctcccaccgccgtccgccaccaacaacttctcttcagatcccaatcccatccaacctttggatcctttccttcagtgctcccctcacttctcgccgccgcccactgccgctccccccaccaatccacagcgagacacgcccgagcgagtgatccccgacccagccgccgccatgaggccgtcgctgctgaagtccacggccgagctcctccgccgcagccgcggctacgcgtcctcggccaatccggagcggaaggtggccatcctgggcgcggcgggtggcatcgggcagccgctctcgctcctcatgaagctcaacccgctcgtttcctccctctccctctacgatatcgccggcacccccggcgtcgcggccgacgtctcccacatcaactcccccgccctggtgaaggggttcatgggggacgaccagctcggggaggcgctggagggctccgacatcgtcatcatccccgcaggagtgcccaggaagcccggcatgaccagggacgacctcttcaacatcaacgccggcatcgttaaggcgctgtgcactgccatcgccaagcactgccccaacgctcttgtcaatatgatcagtaaccctgtcaactctactgtcccgattgctgcggaggttttcaagaaggctggtacttatgatgagaagaagctgtttggtgtgactactcttgatgttgttcgtgctaaaacgttttatgctggaaaggctggcgtgccagttactgaggtgaatgttcctgttgtcgggggccatgcgggtattactattctgccactcttctcacaggccactccagcaagcaattcgttgtcccaagaagacattgaggccctcaccaagaggacacaagatggtgggacagaggttgttgaagcaaaggctggaaagggctctgcaacattgtccatggcatatgctggtgctgtttttgcagatgcatgcttgaagggtctgaatggagttccggacattgtagagtgctcttttgtgcaatcaaccgtgacagagttgccgttctttgcctccaaggttcggctcggcaagaatggagtggaggaagtgcttggtctgggtgagctcaacgacttcgagaagaaggggctggaaagcctcaaggtcgagctcaagtcttccattgaaaagggtatcaagttcgcccacgggaactaggcaactcgcccggcttctaacagttgatatcccttgcattttttttgtttgactgcctttttccccccgccccgttatggttgacgcaatgaggctttgtggtccataataaaacacagcggagtgtagaaaatgtgcaccaggagcagtttacaaacagcggttcttttttgtgctgaaccaccagtagttgagccgtgaaggaatggaaaaactttccacttgctcatttccgagcgccttctcattcattgtatgcatgttttggactcgtggctggacgtcttgcacacaggaatccaatcactggagtagcaagatactggtatgaaaaatccagactgctgttctaaaaaaaaaaaaaaaaaa

SEQ ID NO: 141861 - DNA, 506 bp, Zea mays
  Clone ID: MRT4577_60860C.1
acgttactgactccattcctggtatccttgtatcaaaagaatggtccacctggtccgatccaacgccacaaccctcggtccgcactgtccatgcccccacacacactgaacgcatacggtgtttatacattcatacaccaaatacaatcagccttgtagtcaacagaacttattatttgagttgaattgatcatattattatgcacaaagcattgcatcgcatacattgagacactatacggtcggggcagaccttagcgttcactactacgtcggattggggcagcacttgcgaaaccggcagggctcctagcctaggagggagctttccaaccatgagttgctcaggcgctggacggcacctatcgccgaggcgcagggctgcacccacccgctggccccggagcgggaagttcacgcttcctccgaaagttcacggctctttttttatttcttcttgggaagatggggctcttaacctgctcctttaggatgcccgagacaaa

SEQ ID NO: 141862 - DNA, 541 bp, Zea mays
  Clone ID: MRT4577_60861C.1
atagctgagttgtttttctgttttttaatagttttttttttattgaattattaaaagttttggcgcggggagtgaacccagggaaggccggaccggcaccggaaggcggaccagctcccccggggggggggggtattaaagaagggaaaaaaaatggacataggggaaaacagggggaaaggggcagccggggaaaaatccaaaaaacaaaccaacccgaaacaaaaagcgaaaagccaggggagggaaaaaagggagggaacccaaatgaagggggtaacgcacactggccgggaaaaagtgggggaacccctcacgccaggtaaattaatgaaaccgccaaaattaagggagaggccgttccgcgatggggcgccaagaaagttttttttggcaggggggagacgggcaataactgagggacccccaccggctggcccccatagaatggcaggaaccggaccacgcggggaaggccgatcaagctagaatgccggagggggggggaaaacggaaaaatataacatgaccggttttttgg

SEQ ID NO: 141863 - DNA, 107 bp, Zea mays
  Clone ID: MRT4577_60862C.1
gacccgccaacatgggccgcgttcgcaccaataccgtgaagaaggcggcccgggtcatcctagaaaagtactacacgcgcctgggcaacgacttccacacaacatac

SEQ ID NO: 141864 - DNA, 416 bp, Zea mays
  Clone ID: MRT4577_60863C.1
cgtttagttacagcagtactgattgcacttgctgttctctgtgagtttcttttttccattggtcatctgttctttttaagcatttaaatatgatgattgatcacgttgttttggaacaaaagggttaaatcaacaaaagaaattaaggcatttgtttttttgcttaagatctgaagaaagatgtagaacagaacaccatcagttgtaacttatggtgttcctgaaaacttgattgctgcaaatgaaaggtccagggacaactctttaataccatcggtattcattttgcatatgattcataacacactgctagttatttcttttgactaaggacatgtttggataccaagggctaattgttaggccgtggctgatccaaacaggccccaagacaacatggaactgtagaatgccat

SEQ ID NO: 141865 - DNA, 460 bp, Zea mays
  Clone ID: MRT4577_60864C.1
gaccactggattttctgggtgggcccgctcctgggcgctgccatcgcggccttctaccaccagtacatcctccgggcgggcgccatcaaggctctcggctccttcaggagcaacggcgatcgatcgatctagcgtggggagaggcggataggcgggcgcgcgagggaggagaataagtttgtgccggtggcccggtctcgtcggtcgcttttgttccagcatgcagctgcgtcgcgttcgtgtgcgtgcgtgggggtctccttaatttccccggcccctgtaatcatcaatcaccatgtgtgcgtataatatctgctgccaagggatcgattattccccccccccccccctctctctctctctgctcttgtagctccttctgttttatcgttattatgtagcgacaacaacgacgacgaccaccatcatcagtgagaaacctcttgcctctgtctaactc

SEQ ID NO: 141866 - DNA, 491 bp, Zea mays
  unsure (1)..(491): unsure at all n locations
  Clone ID: MRT4577_60865C.1
ctcgtgtgtctggaaaccctagccgccatatctcacgatccactcgagcagcgaagccgagggaaggtgaggagcgatggcgcgcggcgtggtgtcggcgaagggcggcgcggtcgcgggcaagaagaaggggtcggtttccttcacgatcgactgcaccaagccagtggaggacaagatcatggaggtcgcctcgctcgagaagttgggtggggagcgcatcaaggtcaccagcggcaaggctggcaaacttggtgattcccttaccatttctcgcgagaataccaaagtcattatggctcttttacggagctttttcctataggggcctgttttcctttaaaaaaaaaaaaaaaaaagggccggagggggcttcaactacaaattttttttcctttaatgaagggtaattgagcggcttgggctaatattatgtcataagntgtttgctgggtgaaattgttttatccttacaattccacacaattttt

SEQ ID NO: 141867 - DNA, 855 bp, Zea mays
  Clone ID: MRT4577_60866C.1
ccggccgggcttcgggggctaattgggaacgagtatttgaagcgactcacagggaagttccgccaggaagctacaagataccagagaactgcgtggttgaagatcctgaattgtctcagagacgagggcctccatgttagtggtggtttctcgtctgggatatccaaatctgcactacgggagcgattcaaggctttcaatgctgcgtttgaggaggcacacagggtccagtctgcgtggtatgtgccagacacacagctgagggaagagcttaggatctcgatttcggagaaactgctaccagcatatcgatccttccttggcaggttccgtcatcacatagagaacagcaggcaccctgagttgtacatcaaatactcagttgaggatcttgagataacaatggcagatttctttgagggatctccaccaccgcataataggaggagatctcatggatgaaatatatcttgaaaaaacttatcttttttgcaatgaataatacgtattctttagttctttggggacaggccaaccgacgcggttgggtcttgtgttttgtcctcctgatgctgagggttgtagttggtgatgatttcttcgactagaggtaatctgaaacaggatcaggatcttgataaaaagctgtcagaagtcccatttcttcttccactgcaagcgatctttttttttcatttgttacacttgtttatattcttgcgaatagcgtgtttataataggaatgttcttttagccatataacatagttgtaagttctaacttctgcatctgtttaacatagtgttgtatcatcgttttggtggttcacatgtatctgaaaaatgctgtttgat

SEQ ID NO: 141868 - DNA, 1179 bp, Zea mays
  Clone ID: MRT4577_60867C.1
ggtcaacatccaaattaccatccatcaatcctttccaatagttcacatttaatgtctagttacttagtgcacgataggcgataaagccagccatatttgctttcgggaggcagagcactcctacagatgaagctggctccgggagggcagagcactcctacaaatgaagccttggatcccgggaggcagagcactcctttagatggatcacaacttatgcactaagcaaatagaaattttacagcataacaaaatacttacaacatggacacatgcttatgcaagggcttctatactttaacactactttcatggttgcaaaggcgtcgtctaggcgacgcctaggcgtccaggcggccaaaaagtctaggcgtccccgtcgcctatccaagagttaacaagagaggcaagaggggagggggaagaagcctagcagagactttggggagcgggatcggcggcgcagaactcgggggagtgacgagctcgagggagcggcggtgcagaactcgggggagcggcgacgctgagactcgggggagcgccgagcttgggggagcaggagcagcgatgctgtgatgtggacgagtagcgatgctagtgggctgggccatctcttctacccattccttctttttttttctttctccctttttctttaattggtaaggcgtcgccttagtaagcgcctaggcatcccctaggcgtccaggcgggggcccaacgccttgtctcgccttaccgccttaagaactatgactactttacttctaccttgcccttgaatgtgtgtggatgggggtgggatggtatcccggccaggccggcgtcggatgcgggtcgagcgaggcgtctgacatcctggtagaagcggtacaccagatccgccgattggtgcagcacgaggtagtactgctgcacgaacgcgttgcccaccatttgcgcagacgacggcgcctcggaggcgggggcgacagtctgcggcgcgctcatggagacgctggatcgggggacggggggagacctctggttttgaggagaagcggcggcgggtgcggcgcgcggctaccgtgcggcggcgtgtggcgcgcttgaggtctggtggcgaaggagatggagccggaggcgagtgcgcaggtagggcagctggggcttatgcgtaagtccccggcccggccg

SEQ ID NO: 141869 - DNA, 199 bp, Zea mays
  Clone ID: MRT4577_60868C.1
ctgactcgtggcggacgcgtgggctgacgcgtgggcgggatccaacccgcccataagacgccacctctccgtatcttctgccatcttatcacgactcgacctccaaccccgacgccagccagccaggcacgcacgctcgcacctacctgctgctgcggcccagagagatggacggcggtcggccggagatgcggcggac

SEQ ID NO: 141870 - DNA, 226 bp, Zea mays
  Clone ID: MRT4577_60869C.1
ctccttaccagggaagcaaacccaccacctccttaccagggaggcagggccaccagggccaccacatccctaccgaggaggcagtacagcagggccaccacctccataccgacgaggcagccccaacgtacacgacatattcggctggaggcaatcatggctaccctgggggcaagcgtggctacctgagtcaaggacacaactcgcactcccagtgaacatgacc

SEQ ID NO: 141871 - DNA, 394 bp, Zea mays
  Clone ID: MRT4577_6086C.1
aaaccacgcccagtcaacctagcagccggacccaagtccaaaaaactatcctccatcatctactctcatccacgcgatgggcgtcggcgacaccacgtcggactccctcctcctccagtgagccgcaatgccagccgcagcatctagggcgtccgacgacgcctcacccgaccgccgtcgccagtccgcgccgaaagaatctatcgagcgacgcatggcggcgccgtccccggacggaaccgcagctgaatgacgacgtggagcgcgtcgtctacaacttagaagagagatacccgtgacgatccatctctccgtggtcgagcgagcgcaggcgcatctgatgtattaccaccgatccgggattgaagatcgtgaagatgagccaccgtgaaaa

SEQ ID NO: 141872 - DNA, 449 bp, Zea mays
  Clone ID: MRT4577_60870C.1
tcctccccagtcttcatgggctcgacatcaccggcagcctcagctcactgcgcttgcgggcgccttcacaaccattgcccattggacacatccttgccattaccctcaccatgacgcacacacacacaacagtctgctcactgaccacctaccggggaacctgcacctacttgacagcagctgttgctcaacccattgctctggcgaacgtactgctccacacaacaacagctgcacagtatccggctcatcactagcttgggaacctgcgctactcactacttcattacccgctcgcggggcatgccctactcctacaacacatgctgcacaaatgtaccactctgactactagctgggcaaacctgctgctattacacagtgcttccttcaccactggctggtcaaatctgctggtcctacacacgacacattacttatccttggca

SEQ ID NO: 141873 - DNA, 349 bp, Zea mays
  Clone ID: MRT4577_60871C.1
agcatgattatgctgcgagggcaggctctcagcatacatatatatatggactagcacgagcttaagctatgcagctgtatgacagaactagtaaatgtaccgacggacacgatggactctgaaaaactaaagtccgttcagtttcacaactccagcgaacaaacaaataacggaggctcatggtcatagctagcgcctgccatgcatatcgatacgcatacactacgacaggatatgtgccggcagccatcggcgcgaggctcaccccagtcccacccggcgtctaccgtttcatttggacaggccatcgttggaatggtggtaccacggccagacattgacgccgggc

SEQ ID NO: 141874 - DNA, 630 bp, Zea mays
  Clone ID: MRT4577_60872C.1
aagaatttcattgttaggatgtgtaatttatatatcaatggtaccatctctcttttttatttgttcattatgatgtacccagctttgatctgtaacacatagcaatgagtagagtttgtagacttaagaatggtttatttatgaactacctatgcatttttctgcaaattctaatttcatttgatcatgaagataagttgttttccttaatttctacttctaatgctattgttcaaatctgtttcaaaatttcatgaagcgtaaaaaatgttctattgtttgtattttatttgctgcacttttgcttccacatcataaaagataggcattaaaccatttactgcttttgtacatgaacataaaaagaaagacttgcgcaggggcagatcttaactggaatacatatacggaacccggttggcagcagaggtagtgccccggtgcgccgcgcgcaggggcacgcgacagctacaaatattcggtggaggactggcttaggaaccttggatgcaagggagtttgcaggaaatttgttgagaattcgagttgtgttaatttttgctttgcagactccaaatgtcatggtggcagggtgattggaaagaaatttgttgagggtggagatggact

SEQ ID NO: 141875 - DNA, 484 bp, Zea mays
  Clone ID: MRT4577_60873C.1
ccccgcgtccgccgagatgaccaaccgcctgggtttgctttactgtcactgctaaaggcaggaaggcagctgccaaaccaggacaaggtggtcaccccacggtgaacatcagtcaccctccctagcccacacaggcaaacaaccgggggagactatggctcagggcttagaacccaaaggcctgaacaaatgaggaagtttctacaacaaagactttctttgacagagtaaccagtcataatttctgagcattccaggagcgctgtgcagaatcacaggtatttggcaactagtgggataaaacaaaggtgccattgaggatgtttacaaccaacccctctccggagataacctcaaggtctttcccttgcacatggcctttccatgactcatccacagcagctgcctccctccaccacacaaaggaccctgcaagttctgtttggtattcttgagaataaaaactccgtgggtcgttccctgg

SEQ ID NO: 141876 - DNA, 720 bp, Zea mays
  Clone ID: MRT4577_60874C.1
ggccggccgggacacacatccacagtagcgtcacacagaacccttagctcgatagagatagagagataaatatgtcggagcatcggagcaccatcaccactaccactccggttcccccgaagcatccatctcgaaacataagttcatgatcttctggcgagtcaacaataactactgcatgatcggccattaaaggagcttcgtgccaccacagaacgagctcaacgaccataaccacaaatgatatacattcctgagatctgtaaagctctgcgaatatgaagatcccatagcgtctgcattgctcgtgaaatggggcacggattctctgctgctacaagctaaatctgacaaaggcactctggtaagccgacgactatgagaaagtcatgaaacaaataaccaaggatgtgcatggatgctgaagatctattcccggactctctgtgcttcaaagatgcgcaaaaaaacccgactctgatgcgaatacattatctgagaccagaactccagagaggggcattctcccaagaccaagaagacttcatcattgagctgcacgctgtccttggaaacaggtgatcttgaattgcagctcagatgccaaggaggactgacaatgagatcaagaatctatggaactcgccgcatcaataaaaagctcaggcagaaaggcattgatctccacaccccacaagcccttactgaacgtgatcccaa

SEQ ID NO: 141877 - DNA, 2571 bp, Zea mays
  Clone ID: MRT4577_60875C.1
aaaaaaaagccaaaatggcggggggaggtcgtcgtctcccctccctgcgatcccctccatccgcgacgccatctcggccacttcatgatcactagggtttcgctcttctacccataagccctcgtcccgatgcgctggtggaagcgctcctcctccccctcctgccccgcctcctcatcctcagcatcgacccccgcttcccccgcccgcgcctccaccccccgtctcatcggcggttggggtagcggccctagctcacgccgcgatggcagcggggccagcaacgatctggttcgtcggctcctcctttgagttcggcctccagttctggctctgcagcacatacaccgaacagtatgcatttttcagtcccataccatcagcctagtcctttgccaaagcctaacgggaaggaagcaataaatttggtttcgcattgaataacagcatgccacctatcacaacatctgggcaaagtccacataaacagcgcaagtgtatccgtccctagcgtctgacccttgtactgccagtaatagctaacaattttctgggtcgtgtaaaaataatttccatgtaaagagatcaccgcgatatgatcacagggaaatgctgctaaatgagggagctttgtgaaatctgttgtatcgtttgatttctgggaaactgattggattgcccatgtaacatatttttattagggtgtagctgtaggtgaaactaatggtcaagattgtgccgacaaataggacattagggttgtagctgtagcgtgttgttgatgctgtgtaatgatcatacttgatgtaatcattattgattttttttggggaaggtaataatgcacgtcaattggcaagtcctcgaagactgagtaatgtagatttctcatctgctgcaatctctatccaagataccaatgtatggtcagcacggtctctctggtcttctgatgcgatgggatcttcacctccttgtgattcacctgacaagtttgcaggtggtcaggagcgttctcctctctctagtccactgagaagtccagttttaaaatcaagaaacccaagtgcacctccatcaccaatgcatccaaagttgttcccggagaaccatgtttctcgccctgatggcaatggaagtgctagttttcacccattaccgctccctcctgcttctgtaagcccaaagcagacaaatgctagccaccagttagttccaaaagctgagatgccttcggtggctggtcaatggcagaaaggaaaactcttgggtagtggcacctttggatgcgtgtatgaggccaccaataggcacactggagctctttgtgccatgaaagaggtgaatataattccagatgatgctaaatcagtcgagtctctgaagcaattggaacaggaaattaagtttcttagtcaatttaagcatgaaaatattgtgcagtactatggcagtgaaactatcgaagatagattctacatatacctggagtatgttcatcctggttcaatccataagtatgttcatcaacactgtggatcgctgacagaagcagtcatccgtaacttcacacgtcatattctcaagggtcttgcttttttacatagccaaaagattatgcatagggatatcaaaggggcaaatttgttagttgatattaacggtgtagtgaaattggctgacttcggaatggcaaagcatttgagtactgcagctcctaatctttcattgaagggaacaccatactggatggctcctgaggttgttcgggctacactcgataaaagtgcaggttatgatcttgctgttgatatttggagccttggctgcacaatcattgagatgtttacaggaaagccaccttggagtggtcttgaagggccggctgcaatgtttaaggtgttgcgcacggacccaccaattccagataacctgtcccctgaagggaaggattttctgagatgctgcttcaagagaaaccctactgagcgaccaacagcaaacaagttgctcgaacacccatttatccaaactttgaaccactacagcccacatagcgttgtacattcattttcgggaattaaatctccagatactgtgcacagcagtgcaagagataaagtaccctggaaaagtgattcatatatgagagggaaacatgcaaatggtgaaacaagcagtgctcggtcgtcagagtcattggcttatcggttgatgacacccctacccaacttgggaaccaatagtttgtcacctccacctttgagttcggcctccagttctggctctgcagcacatacaccgaacagtatgcatttttcagtcccataccatcagcctagtcctttgccaaagcctaacgggaaggaagcaataaatttggtttcgcattgaataacagcatgccacctatcacaacatctgggcaaagtccacataaacagcgcaagtgtatccgtccctagcgtctgacccttgtactgccagtaatagctaacaattttctgggtcgtgtaaaaataatttccatgtaaagagatcaccgcgatatgatcacagggaaatgctgct

SEQ ID NO: 141878 - DNA, 254 bp, Zea mays
  Clone ID: MRT4577_60876C.1
cccacgcgtccgggcaaatgtttcttgcaagtcagcaatgtgattatcttgctgtgagcgctttactatcatatcaggaagataagttatcacattcctgcctatttgagaataaaggacattgtccttcattctactgaaactatctccagcattctctaacccctcactcattaacatgcatcaatattcgccattatcaattattacgtctttcttatgcttattgctcgctatcatccatatctgatgat

SEQ ID NO: 141879 - DNA, 992 bp, Zea mays
  Clone ID: MRT4577_60877C.1
gggtcgacgcacgcgtccgagatactgtgcacagcagtgcaagagataaagtacctggaaaaagtgattcatatatgagagggaaacatgcaaatgggtgagtacatctgttgccttggtctgtttttttgttgatttgtaaatctggtgacgaaaatgttcacgttatttgggactttttgagtattaaccctgctattcttcattctgatagtgaaacaagcagtgctcggtcgtcagagtcattggcttatcggttgatgacacccctacccaacttgggaaccaatagtttgtcacctccacctttgagttcggcctccagttctggctctgcagcacatacaccgaacagtatgcatttttcagtcccataccatcagcctagtcctttgccaaagcctaacgggaaggaagcaataaatttggtttcgcattgaataacagcatgccacctatcacaacatctgggcaaagtccacataaacagcgcaagtgtatccgtccctagcgtctgacccttgtactgccagtaatagctaacaattttctgggtcgtgtaaaaataatttccatgtaaagagatcaccgcgatatgatcacagggaaatgctgctaaatgagggagctttgtgaaatctgttgtatcgtttgatttctgggaaactgattggattgcccatgtaacatatttttattagggtgtagctgtaggtgaaactaatggtcaagattgtgccgacaaataggacattagggttgtagctgtagcgtgttgttgatgctgtgtaatgatcatacttgatgtaatcattattgatttttttggggaaggtaataatgcacgtcaattggcaaaaggggattgagatcgccaaaaaaaaaaaaaaaaaaaaaaaaaaaaaaaaaaaaaaaaaaaaaaaaaaaaaaaaaaaaaaaaaaaaaaaaaaaaaaaaaaaaaaaaaaaaagggactagttctaaatcgcgagg

SEQ ID NO: 141880 - DNA, 292 bp, Zea mays
  Clone ID: MRT4577_60878C.1
ggaaccaaaagtttttttttttttttttggaaggggtgatagcacattgttacatgaggggggacggcttaggggcatttaactttgccgggggggggattgaacatggggtctaaaaaggggcaaaggggggggggtttctggcgggccccggggggaacaaaattgtatttgtggaaaaaaacgtggcaaattttggggaaaattgggtttttccaattgtggcccaaccccacggaaaagggggacgggcaatttatttttgggggggggtgaagaaaaagggatttgg

SEQ ID NO: 141881 - DNA, 370 bp, Zea mays
  Clone ID: MRT4577_60879C.1
actcgtccgaaaaataaaaaaaaaaatttaaaaaaaattttaaaaaaaaaaaataaaaggaaaatatagggatatttaaaaaaaaaaacaatcaatcaaaaaaggcctccctcttttcatgttccaagtttacttactcttcctttccacactctttctctcctttactctcatctcatttcacttctctgaccctcttttttcaacctccttccttctaaaactctgtttttccccatcttaatccccttgctccccatcaccttttctccactttacctaatcactaatagccctttacccttcgctttcctaaacattttcacatcctatttgccaaatggatcactccctttaaacgacctttacc

SEQ ID NO: 141882 - DNA, 1965 bp, Zea mays
  unsure (1)..(1965): unsure at all n locations
  Clone ID: MRT4577_6087C.1
tgggaccctcgaggccggccgggaacgggcggagacgtcgagacaacacgccagcccctcaccttttttctctctcaacccgccagcgccaccagcaacttccctcagatcccatccacccctcgctattaaagcagcccaggccgccgcccgccgccgctcacccaccaatccacagcgagacccgaccccgccgtcgcgatgaggccggcgctgctcaagtccacggccgagctcctccgccgcagccgcggctacgcctcctcggccaacccggagcggaaggtggccatcctgggcgctgcgggcggcatcgggcagccgctctccctcctcatgaaggagggctccgacgtcgtcatcatctcaacccgctcgtctcctccctctccctctatgatatcgccgggacccccggcgtcgcggccgacgtctcccacatcaactcccccgccctggtgaaggggttcatgggggacgaccagctcggggaggcgctcgagggctccgacgtcgtcatcatccccgccggggtgcccaggaagcccggcatgactagggacgacctcttcaacatcaacgccggcatcgttaaggggctctgcactgccatcgccaagcactgccccaacgctcttgtcaatatgatcagcaaccctgtcaactccactgtcccgattgcggcggaggttttcaagaaggctggtacttatgatgagaagaagctgtttggtgtgactactcttgatgttgttcgtgctaaaactttttatgctggaaaagcgggtgtgccagttactgaggtgaatgttcctgttgttggaggccatgcgggtattactattctgccactcttctcgcaggccactcctgcaagcaattcgttgtcccaagaagacattgaggccctcaccaagaggacacaagatggtgggacagaggtggttgaagcaaaggcgggaaaaggctctgcaacgttgtccatggcatatgctggtgctgtttttgcagatgcatgtttgaagggtctgaatggagttccagacattgtagagtgctcttttgtgcaatcaactgtgacagagttgccattctttgcctccaaggttcggctcggcaagaatggagtggaggaagtgcttggtctgggtgagctcaacgagttcgagaagaaggggctggaaaacctcaagggcgagctcaagtcttccatcgacaagggtatcaagtttgcccacgggaactaggcaccttgcccggcttgtaacaattgatgccccttgcatttttgtttgactgcctatttttcctgccccccgtatggttggggcaatgaggcgtagtggtcgataataaaacccagcggaacaaagaaaacgtgtaccagaaactgtttgcaaacaccggtgcctttttttttgtgttgaaccaccattagttgagccgtgagggaatggtgaacaagctttccacttgctcatttccgagcgcttctctttgattgtatgcatggtttggactcatgactggacttcttgggctcttggcagttggcttggcacccaggaatctaatcactggagttgctgctgttaaaaaaaaaaaaaaaaaaaaaaaaaaaaaaaaaaaaaaaaaaaaaaaaaaaaaaaaaaaaaaaaaaaaaaaaaaaaaaaaaaaaaaaaaaaaaaaaaaaaaaaaaaaaaaaaaaaaaaaaaaaantaaaaaaaaaaaaaaaaaaaaaaaaaaaaaaaagggcccttgggccgaaaccccccttagggggaatttttgaaaatttccttaaactggggggcctttaaaaattccttttaagggcccaatttccccttataggggggggtttaaaattaaaggggccgggttttaaaaacgggggaatgggaaaaacctggggttacccaaattaaacccttttaaaaaaaatccctttttcaccggtggggg

SEQ ID NO: 141883 - DNA, 1204 bp, Zea mays
  unsure (1)..(1204): unsure at all n locations
  Clone ID: MRT4577_60880C.1
accggtctttttttttttttttcccagcgnccgcggccgcgtgggcgcggcctccctcctccgttcccctttcccgttttcctcctccgcttcccgattcaactcgcaacgccgccgccttcgctgacccatgagcgggcgcgagccgatttaggcccgccgctacagagatttcgagagaatttttgggctagcggggtgtgaacagaaacttggtgccccgctgctctgccttttgtcgtccactgtttcgcgtcaattctcgcgcgaaaagggatgggcactggagaggggtcgccgccggcgaggcggggcatcagcggtaggcgccgtcgatggccggacggtgaggacgacgacgagtatgtgctggatgaggaagaagaagaggattatgtggaggagctctccgtctcgtgcgccggcgaggagggggtggattcagacgccgtgttccaggaggcagaggaggaggacgagatggagacgccgtgcccaaagcgaccggtgaagggcagcacatcgtgcgccggcgaggaggggttggattcagacgccgtattccaggaggcagaggagcgccgaataccaggaggcagaggaggaggacgacgacgaaatcgagacgccgcgcccgaagcgacgggcaaagggcagcaacagagtacggaaaggaaaggtggatctggccgccgcacgatctcgacgccggaagtatgaggaggacgaggactacgaggaggaggttgacgaagacgacgaggtggaggaggagtaccatgatgaccttgaggaggtcgaggaggaggaagaagtggcaccacagcggccgaagagcattgtgaaatgcggtgcccgtggccggaatgtgaagctgtctctggcagcgaagcgatctcatcagcggaagcaggaggatgatgaggatatggattttgacccagagttggatgacgaggaggtcgagatagatgaggatattgattttgatcccgatgtcgatggtgacgaggaggatgagtatcaagacgaggaggaagaggaactggttcctgcccgtgccagaaaggtaactgtaaagaatccggtgaagcgaaagtccatttcaaagaggcgaacaccaaagaagaagaagaaaaataggggatctaaggtttctaggcggaagggggcttcagctaaagtgaagaaatcagcacctgtt

SEQ ID NO: 141884 - DNA, 624 bp, Zea mays
  unsure (1)..(624): unsure at all n locations
  Clone ID: MRT4577_60881C.1
gatcgagccgccgtgcctgaagcgaccggccaagggcagcacatcgagcgcgggcgaggaggggttggattcagacgccgaataccaggaggcagaggaggacgagatggagacgccgcgcccaaagcgaccggtgaagggcagcacatcgagcgccggcgaggatgggttggattcagacgccgaataccaggaggcagagaggaggaggaggacgacgaaatcgagacgccgcgcccgaagcgaccggcaaagggcagcaacagagtacggaaaggaaaggttgatctggccgccgcacgatctcgacgccggaagtatgaggaggacgaggactacgaggaggaggttgacgaagacgacgaggtggaggaggagtaccatgatgaccttgaggaggccgatgaggaggaagaagtggcaccacaacggccgaagagcattgtgaaatgcggtgcccgtggccggaatgtgaagctgtctctggcagcgaagcgatctcatcagcggaagcaggaagatgatgaggacatggattntgacccagagttggatgacgaggaggtcgagatagatgangatattgattntgatcccgatgtcgatggtgacgaggaggatgag

SEQ ID NO: 141885 - DNA, 121 bp, Zea mays
  Clone ID: MRT4577_60882C.1
ccgaaagcgaataaggaagctcctgcccctgctaaagctgatgcgtgatctaaggatttaaaggcctagtaggtagtgttgaaaggtgtccatagctacaattagtagtagatctgtacgt

SEQ ID NO: 141886 - DNA, 1508 bp, Zea mays
  unsure (1)..(1508): unsure at all n locations
  Clone ID: MRT4577_60883C.1
cgtagcttccacccggcccccatccgcggcctccctcctccgttcccctttcccgttttcctcctccgcttcccgattcaactcgcaacgccgccgccttcgctgacccatgagcgggcgcgagccgatttaggcccgccgctacagagatttcgagagaatttttgggctagcggggtgtgaacagaaacttggtgccccgctgctctgccttttgtcgtccactgtttcgcgtcaattctcgcgcgaaaagggatgggcactggagaggggtcgccgccggcgaggcggggcatcagcggtaggcgccgtcgatggccggacgaggacgacgacgagtatgtgctggaggaggaagaagaagaggattatgtggaggagctctccgcctcgagcgccggcgaggagggggtggattcagacgccgagtaccaggaggcagaggaggaggacgagatcgagaagccgcgcccaaagcgaccagcgaagggcatcacatcgagcgccggcgagaggggattggattcagacgccgaataccaggaggcagaggaggacgacgagatcgagccgccgcgcctgaagcgaccggccaagggcagcacatcgagcgcgggtgaggaggggttggattcagacgccgaataccaggaggcagaggaggacgagatggagacgccgcgcccaaagcgaccggcgaaggacagcacatcgagcgccggcgaggatgggttggattcagacgccgaataccaggaggcagaggaggaggacgacgacgaaatcgagacgccgcgcccgaagcgacgggcaaagggcagcaacagagtacggaaaggaaaggtggatctggccgccgcacgatctcgacgccggaagtatgaggaggacgaggactacgaggaggaggttgacgaagacgacgaggtggaggaggagtaccatgatgaccttgaggaggtcgaggaggaggaagaagtggcaccacagcggccgaagagcattgtgaaatgcggtgcccgtggccggaatgtgaagctgtctctggcagcgaagcgatctcatcagcggaagcaggaggatgatgaggatatggattttgacccagagttggatgacgaggaggtcgagatagatgaggatattgattttgatcccgatgtcgatggtgacgaggaggatgagtatcaagacgaggaggaagaggaactggttcctgcccgtgccagaaaggtaactgtaaagaatccggtgaagcgaaagtccatttcaaagaggcgaacgccaaaaaaaaaaaaaaaannnnnnggatctaaggtttctaggcggaagggggcttcagctaaagtgaagaaattcagcacctgttaggaggcggagaanncgtccagtgatagtggtttacgaggttgaggatcaagtggatgaattcaccgngtcgttccggcaccaccgggccaaggatcggccgcgtgaggcttacgaaggccccggagtacgccgcgggg

SEQ ID NO: 141887 - DNA, 204 bp, Zea mays
  Clone ID: MRT4577_60884C.1
tcggatgaacatggcgggctcctgctcctcctgctacatgacgacggggttcttctggcggtcggcggtgaactacatctcggtctgtaggacggcgctgaccaacgttgtgatggctggtggcggtgctgttgactctgttgtttcttatgccgctgttacactacaccctgaacgtgatttatggcggtgatcattatcatg

SEQ ID NO: 141888 - DNA, 162 bp, Zea mays
  Clone ID: MRT4577_60885C.1
accatattacgacattattatggtttgcatattgtcttgcgttttgagttgtgacaatgtgcaaaccatattacgacattattatggtttgcatattgtcgtaatatggaactcgtttatcatgttcattccatcctcccgttatgtgaaaaataagacaac

SEQ ID NO: 141889 - DNA, 201 bp, Zea mays
  Clone ID: MRT4577_60886C.1
aattacagattgtttagagaggggtgtctctataatgtgagggtgcttatttcatcttggtagtttttcttttttatgtttttttttgaggcatctgaaacaaaaattggcacttttattcccagggtgggagccacctaaaggtcaccaaactcttatacgtgtgggtcctcttgaaacacttggggctggaaactccac

SEQ ID NO: 141890 - DNA, 608 bp, Zea mays
  Clone ID: MRT4577_60887C.1
ggaataccacgctaacacctgggacgaataagagcgctctcgcggtctatttcatgccaccagccagtgttgaacgaggagatgttcttaccgtacgattctggctatgaaggcatgaatgcatgcacgagaactaggtatctttaatgataatatgaacaggagatgacatcttcaagacaaggagaaaagacacaaggatcacatagagctctagtcatggatggcgcatttcaacaactaccctaacaaactatagagaataaaaacggctataaagttatatgagaccacgtaacaagacgcattaaatgatttgccttatggcaccgaatgaggaaaaacacataggggtcatgaagacaaacctatatcctctgtatcctaatcattatggagcgtactggcgatctgatctacatgatccagatgtacgatctgcacacgtgcgagaatgttagcacagtgcaacattgatagatgcattgactgacacgtattggacatatctgctatgcttgtaggccttactaacctcaacctcactatacctaaataggacaagctcagatagatggatcatcacgttttacccgcttttccgtacg

SEQ ID NO: 141891 - DNA, 358 bp, Zea mays
  Clone ID: MRT4577_60888C.1
tgagtgcttgatctagatggcaatgagaatttggaaagctgttaccttgaagatatagggaagttatatcagttgcgatacctacggattaaggcaagtaatattacacttctggaaaggatagaagagcttcagtgtttggtaatactggatcttctgaattgccctaatctaggtgaattgcctagaagtattgttcaacttcggaacttgaaatggttaactgttcatcgagcgaacttgccagatggagttgggaacatgcaagcgctagagtttctttcacttggaagtggggactacactacttcaacgaacttattggaagaacttggcagcttgaccaaattgaaaaccc

SEQ ID NO: 141892 - DNA, 496 bp, Zea mays
  unsure (1)..(496): unsure at all n locations
  Clone ID: MRT4577_60889C.1
gcattgctgaggagaactttgttaagtagtagtaataggaatacactcttggttcatacaacaacacaaaaaggatcgttggctcatgcacaaacatgatagcgatgaggggctccaggctgaattgtgagagggggggggggtaaattcatgtacctttgaggaaatttagggtggaaatcactcctgatggggtgcgtgtgaggagtgcgctgatggaggcttgaactatgctagagcttgaggtgtgaataggaagtgggcggcccaacttttgttaacagtgaaggagccagaatgggtgtgattaaacaacgggtttcgccgaataagtgtagggaccgtaatcctggttttttctgggggnnggggacgcaaatccctaagcttatcatcggctctatcgttaataatcgtctaaagctctggcattaaagagtcagggtggtcgtcataataagattgatcggtgtagacagagattgtaggcttcaga

SEQ ID NO: 141893 - DNA, 363 bp, Zea mays
  Clone ID: MRT4577_6088C.1
cggctcgagggaaatccttaaaagtgaactccattatttgaagaagttaatggaaaactttattcaagcgtggtcaatctttaattacagacgcaaattcatgctatttagttttacttttgacaaactaaaacaaaaacatcagaaattactacgcaatatcaatcctatcattctaactaagcatatagggataaattcctaaagcaaattaaagaagacaggtggtactttaaatttagttatttccttattaaagcctttgaaaatacatcaaatattggagagaaaaaagcaacaacctttatgttataatgtcacctcatagtgccaaaaaaaaaggtggggggcagaacatcaccc

SEQ ID NO: 141894 - DNA, 265 bp, Zea mays
  Clone ID: MRT4577_60890C.1
gcaaatttctaattcaccagcaataaaaattggaggaggcttggccctcagcccttatatctctctctttttcactctcttcctcccacccccaagactgagttttggggggcaaggtggagagagctggcaactactgtgagcaagtcccctagcccctgaccagcctcctcccatgactggtgactgtttaatgagctgtgcatcccccacaaaaacatgagtgcccctctgtgtggcctctaaccctctgcacagcccttct

SEQ ID NO: 141895 - DNA, 593 bp, Zea mays
  Clone ID: MRT4577_60891C.1
ggtacccggcgccccccctcgagctccccccccccccccccccccccccccccccccccccccccccccccccccccccccccccccccccctttggcaaccccttttttttaaaccaacctcatcgaagttccataatttagggggggaacatcatcgttttattcaatggtctacttttttaatttccccactaaaaacaaactaggacaaacaacttttttttttttcccaaaaaaaaaagttggttggaccatcctttgaatattgcattggggcccggccacattgccccttgccttgcacgcccaatttcacgggaaaaaggggacctggtatttttttttccccttgcagccatggtttttggggttgcccctggaaaacaggaaggcgtttggccaattggccccccccaatttgagggtcaccccggtccttcacaaaaaaaacatggccagtttttaccccccaatcaccaaaatgtcgaaaaattcctggttgcccccccccccaatggtaaacccccccaccgtcatggaaggctcccccaaaagcgtccagaaaagtgccccccccaaatcccccttttg

SEQ ID NO: 141896 - DNA, 258 bp, Zea mays
  unsure (1)..(258): unsure at all n locations
  Clone ID: MRT4577_60892C.1
tnnttcnttttttttttttttttttttttttgggggggtggagaaaagatatttggggtttaaccactatcaaaatatgataattattttttattccaaaagtagtaatttttattattccctgctgatttccacacgggggttgaaacattaggggctgaagcagttgaatgggtggccactgggatgtttttaagaaattaaggggaccccggtttcgccggggccattccatcgggcatgacgggggggggggac

SEQ ID NO: 141897 - DNA, 519 bp, Zea mays
  unsure (1)..(519): unsure at all n locations
  Clone ID: MRT4577_60893C.1
actcgcagccagcaagcagcgcttccaccacatactttttccctccggtctcgttcggcggcgagcgagcgagcgaggtagcgcttgtccatgccgcggcctttttgttgatcgaacgaggactacttcggcctaggggggggagccatgtcggcgtcggcgtcggcgggtaagctggcggcggcgctgcaccggaggacgcgcagggtcacgtccgcgctggcgtgcgcggccctggagtgggtcctcatcgcgctgctcctcgtcaacggcctgctggcctacgccgtcgccaggttcgcggactacttcggcctcatcccgccgtgcctcctctgctcccgcgtcgaccgcctcttccatgccnatagcggtggcggcgacgctagcggcgccggcgcgcggtggctgcgggacgccctctgcgacgcccacgccgcggagatctccncgctggggtactgcctccnccacccccggctcnctgaggccggaaagatgtgcgtgggctgccgcccg

SEQ ID NO: 141898 - DNA, 166 bp, Zea mays
  Clone ID: MRT4577_60894C.1
cccacgcgtccgaaaacatatcatctggggagttttgaagtctctaaaagggatgcaggggaacaagtttagcaaccatatggagactcttatgggttctagtcctcaaaatgctcttaacgtgagtgacactgatgttggtcaacctggcagacatgatcattta

SEQ ID NO: 141899 - DNA, 273 bp, Zea mays
  unsure (1)..(273): unsure at all n locations
  Clone ID: MRT4577_60895C.1
gaacaagcagccaaggaagctttgacagctgaatcggcagctagaggtattgatgactaagaggtaatctaatacacgtaaacgtaatgaagacaccatgagctcgacgcctgctgacacacttgcagaagccacatacaacatgctgaaacggaagggacttgtttccaagatcaatgagggagctgctagcgaattatacaaggtatgcctgtttgtctatgcttgaatatagaatccacanactgtatcctgccactaaagatgaagttg

SEQ ID NO: 141900 - DNA, 1132 bp, Zea mays
  Clone ID: MRT4577_60896C.1
atctccatggcggtgccggcctccgcctccgcctccgcgtgcgtgcgcgccggcccgccgccgtcacgccgcgcgtgtaccagtaccactggcggcacggggaccgcggcgttctcgctgatctgccgcaagagactaccgccgccgacacggcagccgatccacctccagctccagggccgtgccagctccgacctccgctgccgccggcgtctcctcacggcgcgaggcgagcgcccggccccggatgaggacgaggaggaggcggcgggtgcaggcggtggttcgttcgacgcggcggtggcgctgttcaaccgcggggagtaccacgcgtgccacgacgtggtggaggagctgtggtacggcgccgaggaccccgcgcggacgctcctccacggcgtcctccagtgcgccgtcggcttccaccacctcttcaaccagaaccaccgcggcgcgatgatggagctcggcgagggcctctgcaagctccgcaagctgcagctagacagcgacggcgacagcggcggcggcggccctttctcccggttccgggacgaggtcgccgctgtgctgcagttcctctaccgcacccagaaggagctcgccgcatgcaccgatgagctgtgcttaaccatggacggctcgccgagctcgtaccagctgctcggcaacttcgccgccggccagcaactgtaccggctggaactgctggaagcggaggaggacggggcttgttccagcatactgttctctgcgcccaacggcggcggcggcggcggcatcgctgcgcaaggagcagctcctcgcccccagagagtgaagcttccaacgctgcgtgccacggagcaacatctggtagcgcttcagtgtacatacgaatatacgtagctataccctagcattcattcatgcgggtccacctgcctgcaaaataggtggagtatatttcaaaaaggaaatgctcctccatcatttgctacaaagtaaaacaaactatagctcgatccattaattagactctgatacgaaatcgaagtctgcagaaagagcttctgtgtgtaaagtatacttttaaatttttattcaataataaaatactgtagggaccctcctatactacagtgaattgatc

SEQ ID NO: 141901 - DNA, 1121 bp, Zea mays
  Clone ID: MRT4577_60897C.1
ggccgcttttttttttttttttttcgcaactcaattttactttcatagtaaaattattaagcgttatccttatgacttcgccgtttgcaggcaggtggacccgcatgaatgaatgctagggtatagctacgtatattcgtatgtacactgaagcgctaccagatgttgctccgtggcacgcagcgttggaagcttcactctctgggggcgaggagctgctccttgcgcagcgatgccgccgccgccgttgggcgcagagaacagtatgctggaacaagccccgtcctcctccgcttccagcagttccagccggtacagttgctggccggcggcgaagttgccgagcagctggtacgagctcggcgagccgtccatggttaagcacagctcatcggtgcatgcggcgagctccttctgggtgcggtagaggaactgcagcacagcggcgatctcgtcccggaaccgggagaaagggccgcccccgtcgttgtcgccgtcgccgtctagctgcagcttacggagcttgcagaggccctcgccgagctccatcatcgcgccgcggtggttctggttgaagaggtggtggaagccgacggcgcactggaggaggccgtggaggagcgtccgggcggggtcctcggcgctgtaccacagctcctccaccacgtcgtggcacgcgtggtactcgccgcggttgaacagcgccaccgccgcgccgaaggacccgtaaccaccaccagcagacgacgtctgctcctcgttcctcgtcctcgtcgtcgtcgtgggacgggcgctcgcctcgcgccgtgaggagccgtcgccggcagcggagatcggagctggcacggcggtcgtcgacgatgtttattatctgccgtggcggtcgctggtggcggcggagcaagaacgccgccgcggtcgcggcggcactacgcgcgcggtggcggggctgcggcgggccggcgcgcgcgcacgcggacgcggaggcggaggccggcaccgccatgaaggtcgtcgttgtggagatggacgcgcgcgtgccacgtacgccttgccttgggggatgtggtgcccgtgccgtgtcgagtgtggcatcccggccggcctcgaggtacccaatg

SEQ ID NO: 141902 - DNA, 311 bp, Zea mays
  Clone ID: MRT4577_60898C.1
tcgagagacttccgcatataatcgacttacttttgtcttccatgctcatactgcttgccagggccgggtcgatcaccctcaacgcacaggaggattgcacggccaacaacaccgggacgttggtggaccgcatacaggaaactccaggcagctagaacgacacttcagctccaggatctcgcccgtttctccgtcgaggagcacaacaagaaggacaatgctcttctggcgttcgagaagcttgtgaaggccaagacacaagtggttgctgtcacgatgtactatctcactattgaagtgaaggatggcta

SEQ ID NO: 141903 - DNA, 229 bp, Zea mays
  unsure (1)..(229): unsure at all n locations
  Clone ID: MRT4577_60899C.1
ggttgtgttatttacgggnccggcggtaaattcttaaactcttgatacatggaccatatgtagttcattgcttttggaggactcaagttcgagtcttaaaatacaaaaagtttccggggagataaaatatcagcagttcagcattttggccatgaggggtttgacaattgatagtcgtaatggtcgagtgggacgataaaaacacagccatggtttggttaggcatcca

SEQ ID NO: 141904 - DNA, 370 bp, Zea mays
  Clone ID: MRT4577_6089C.1
tccgttgtcgcttgttaccggacacaacataccgggtacgcttaaggtgtgccagtacccgcaataacatggcaaccgtccgactatcacgaggttcaaaaaaataaccaccacaaaagtaccaaccaacctcaaataaagtttaagcggacacaccgcaccaactgacaatcactgtacgtagtgactgtgccagtccccaacaggatctcactgaggactgacaacaaactgtttagtgaacctcctgaaaatttgtgccagggccgcctgttaccgcagtggcctgcttggtcataccaacaacgcccctcatgtatttaaacgagccgctctacataatggcgatcaactatgtgcagaacaatgt

SEQ ID NO: 141905 - DNA, 257 bp, Zea mays
  Clone ID: MRT4577_608C.1
aactgttactgccatcactgttctttttagccgtggtgaaccttgtcgtcggggtgtaacagcagctacttgcatccaacccactagctatggctaactgttgctgcattaccagtatcaacaactgtttgcaacattttatgccagcgctcagtcaactagccatggagaaccctgtctcctacctacaacagctacaattgcttttatttagcccgatctcctgtgtgcattgcactaacgtacctactataaca

SEQ ID NO: 141906 - DNA, 464 bp, Zea mays
  unsure (1)..(464): unsure at all n locations
  Clone ID: MRT4577_60900C.1
caaaaaacccggcataaaacacagaatgtttttacatgnatacccacccaaccctacatttcctgagttttcattacaccttaaaaacataatttttaatactaaaaagaaaacttttaaattgatggaaactcaaattaacttttacaaaacaaattttttaaaaaaattacttttacattaacttttccaaccattccatttccctcgttaatcacacaataaaaaatataacttcctttcttactcaaatttacaccttatttatctccttctgcattcaaaaaatccttttcagacattaaaatattactatcattcacaccaactctcaattcatcttcatcaaataccaccttactattaaaccccacattctccttaaaattaattttttaccaacactacccttaaattcccaacaataaaaactaaactcccattattaccaccaatcaacactt

SEQ ID NO: 141907 - DNA, 284 bp, Zea mays
  Clone ID: MRT4577_60901C.1
aatgctctccgcacaacatgagggctgcaacagacatgtgtgaaaaggcggccgaacacacaatggcagactcaaaagaaccagacacatgtgataaggaaggggtactgaggaaacggcctcaccgagcacgagaccaaccggacctgacaccataacaagcacttcagcaggcagcactacacaagcaacaaatccacctcggatggggtaatcagcgtcttgagcattgccaaaagcaatctaacctcactgctgatgaccggcaaacaaaccctgatgca

SEQ ID NO: 141908 - DNA, 513 bp, Zea mays
  Clone ID: MRT4577_60902C.1
aaaatagggttttattgtatttttttgttttttgtgtttatatttggaaagaaaaggttctgtttttgttcatccgaacccggggggggaccgggggaacccgggcaccggccccgggggggaaccaggtcccccaccagggagaaatgccaaaccgcgggggaaaaaaggaaaagggggggtcccgggggaaaagggtagcggcacaaaaaagcacaaaaaaaaccagccggggagaaaaaggagaaacccgggggggccaaaagggggggcaaagcaacaaaaaagggaagagccccacgggcccgaaggcaacgggaaaaccaggaacgccaacgggtttaaaaaaacaagaaacacccggggggggggggttcctcctaggggcaccggggagggaaaccttataaccaggaggacgggcaaaaaaagaagggactggacaacggggcccactaaaagcacaacaaaaaggtccaaaaggtgttgccccaacgggccaaaaaacccaac

SEQ ID NO: 141909 - DNA, 495 bp, Zea mays
  Clone ID: MRT4577_60903C.1
gccgaacctggcgtctgccctaccaaccggagctacgacactagactggccgcggggcctctattccttgcccactgccaactctaaacaatagagggggaggccactcccagctgaccaccatagacacggatggattagttaaccatcaacgtgcccaagtgcatccattccatgtgtgaatccgggagactataatgatgaggcaactgtgaactacactggaacactagactgcaagcacaaacatggaagggaattgaaggctgttcccctcgaaactaatgaatatggaatggtggggccttcaatcatacatatcgatcatgcaaacaatccactaaatggaaactatgacacgcaaacgctcataatgagtggatgggaaaaggatgagcccacagcggagagagcactactaaacaactggtgatcattggatgcaaatgccctattgcaaggacactgctgagcgtctacataatattgaagaaa

SEQ ID NO: 141910 - DNA, 340 bp, Zea mays
  Clone ID: MRT4577_60904C.1
ggcctgcaatcccaccaacatccacggccggccacccttttcctatatgccgtaccgcccgtcatcacaactgtcctgtaaaaagttcggggtggacgcccgcacctccagaatcacgtgctccctacaggacgtcaccatcaggtacatcgacgccactaatctcgccgacttctcgctctctacctattcactcctcgtataggacgcgagcgcatatagcactcccaataggctgacctacgacgagatccacagcaaaacgtacatctacgtgaaaggcacacgcactgtgaaccagttcccgaccatctactgactcctaaaatctttcccgttc

SEQ ID NO: 141911 - DNA, 171 bp, Zea mays
  Clone ID: MRT4577_60905C.1
ttttgttcctctgacaagaccagcacaaaaccagcacaatatctacccacacttttgtgctggttttgttcctctgacaagaccagcacaaaagtgtgggtagatattgtgctggttttgttccgctctcaagaccagcacaaaagtgtgggtagatactgtgctggtctt

SEQ ID NO: 141912 - DNA, 307 bp, Zea mays
  Clone ID: MRT4577_60906C.1
gttttggaacacagtatagtgcttggagacgagggcgcgctggttaatggtcgacgtcgtgcgaagacatgcacaaatgggatcgccaaagctcttacgaacaccgatggagcaagcctatggaccgtcagaggatgatcgagccagaaggacggtgcacaccacatgattcacctggtggactagccagcgaaggatggacataatatgagtctgctacgcaacgcgagaaccgactctaccaaacactatctctgtgttaagatacaggcactacagactgagatggcttgctggtgaaacttgg

SEQ ID NO: 141913 - DNA, 1722 bp, Zea mays
  Clone ID: MRT4577_60907C.1
catatcatgtcttttggaaacagcagatgttagcatcttctcttttcttccatggcataatgtagagcttgattctgtttctctaggtcttttagagagtttgaaatggttctaagtctatcattcagctcaaccaaggtaacatcattgtgttgaacatgctgctgagcttgctccaacctgcacataatggcatcaaattccctgttcttttcagataggtaggaatcttgctttgccactttgtcccttaacaaatcaagttcacaacacattgactccacgcgagtctgcatcgcttccaatccaatctgtgatacaaatttctccttttcactcaatacttcagtgaaggaatccacaattagtttcagtttttcaatcttttgcttatgtagagattcctcttcagcatgaccctttttctcctcgtacttcaacaacaaagaatcaatgtttgacattgctctagcaatagcctcattgtgaattattgagcaaacttcctgcttcataccaccctcaatctcataaccatgcaattctatgtttatttcactaatgaactcttttatgataatcctttctatttcttctctaaaggtggctgcaattctggcatcttcaacgtcaaattgaggccttacaatattcagttcatgatctgcctctctggatgcaaaatgtgatgagtgagttggaatagagcaatggtagtcttcattattacttgcaccgctttctagttgctcgatttcagaacctaatacattgttcttatcttgttgaccaggaattgcatttgacttgatacgaacagaggctcttttattctccaggaggagcacatccaactttgagatgacttcctcaattttcttccttgtttgctcaagttctttgttatttcgtaaatgaaaagggtttgatccatccttcttcaggatttcacgcttcagtttgaatatctcttccgtcctctggtacagaactgaatcatgctgccttttcatctcattcattgatttattgaaatgggctatcaaagcaaccttatccatgtgatccaagagtttcggatcaccaaaaacttcttctttagagtctccaggatgaatggtctttgctacaccatttctagaggaattttctttgtcctgctgcttgctggcattttctgaatcttcaaagttatgctgtgatcccgatagcccccattcagaattcaacagtgacttggaaatggagtcaagctgctggcggagactataaaactcatcatgtcttttatcccgtccctcagataaactcaagctgccatttactggctgctgcagcttctggttcagtgatgatatctctgcatccttgagagcaatttggctagcagcttcttgccgcacatcacttaggatccccttgatgatagcaccagtcacaattcctgaaacatgaaccctgtcgtttacttcatccaagaaagattccatgtcctcaatggcgtcttcatggcaataaggctcagtctgaactgcagcacttccattggcatcatcgggcaatacatgcaaggtctctgccatctccatctgtatgtgagtttggtgtgatcgccactttcctttcctgccaccgtcagcgccgccactgtgcgcgggtggtggggagacagcgaaagcagccgcctttcacctccagtccccctcccccgcctttctccac

SEQ ID NO: 141914 - DNA, 895 bp, Zea mays
  Clone ID: MRT4577_60908C.1
cggaccgcaacacgccagctttcttgctcttgtctctaaagcagcagcagcttcctgtctctccagccaccattccattctcgctccttggtaatgaggctggctagccagctaatgcagctccgaacctgttttgttggtggtcatttaaccatgcatgcttcgatcgatggattggtgcatgcatggattattgcatagtgtgatgcatgtggcgcatcagtgcatggttagatgaccatcagcaaacatgttcttgaggcatgcaagttctctagctacacatatcagagatcgatcaccactgcggcgccatggctacttaattgaaatggagcgtgtgtttcatatggagatcggtgcactcaccttgtagctttagcttgcatccccttcgctaacagagagatctgacgacgaaagcgatcatcaatcatatgccacatgctatatttcacaggttctatctggttaagtaaagatctggcgtgtggcagtgctcattctcatgacgatatgcagatgcagtgtatatcaatcgtatccaatcagcatgcaagtggtctaaacaatgtaacacctaaatgctattttcaccgtatataagttttctcaatagtgagcttgcaacccattacccatatttgaatctgggtatacggtatggataatggttttattcaatagaaatatgtagactgcactctcagttaatcatcaaatagtagcaatgggggccccccaaggccgcgggccgcttctaaaataagcggggtccccccgggctggcgcgaaattctacaatccagttttttcccaaaaccgtcgaccccccaggggggggccccccgcccccccttttcccctcccactgcgggcctttactccccccccc

SEQ ID NO: 141915 - DNA, 747 bp, Zea mays
  unsure (1)..(747): unsure at all n locations
  Clone ID: MRT4577_60909C.1
acttccactgcacacccccatctatctttccttacactccactccagctccagacccaagaataacaagagcgcgagatgtatactagaggaactgcccaaaggccgagagatgacgatgctacctaggaagcccgcaacaggttaaccacccagctgctatctcctgcgcactagctgatgtctgctccacgcactcatcttctccttacgcaactcacggctccggctggcgctacgacgagctgagcggggcaagaacgacacaatccacctcaacttaaagctgcctaccggtggcatgcattagggttgtgccggcggcagtccgtagccgcgaacctatacggccaagacgtccaccctggcgtcagcttccgatgcctagaaggcacctgcatcaccctgcagggcgtgtcctgtactgcagtgcgatagctgctgaggaacaccatgaccggcttcctgctccggttcaccacgaacgaacaggacactgacaactatcaactgaccgctgctgccaacgtcttagtgaatgtcgctgtggaccgtgatgcctatctgcgtgaggtgcacctgaacaccacggcagctacacgaacactgcgatgctgtcaacaatatgctccattgctatcgcgtatctgggaaagcgaaaccccagggggggattgtttgatccggccggcgatgctgatgatgtgcgcactacttacgacgacangatggntgactggatgctggt

SEQ ID NO: 141916 - DNA, 597 bp, Zea mays
  Clone ID: MRT4577_6090C.1
ggccgggaaactaccaaaaccaatcccctcccaatccaacctccaacaccgccaatatgcctgccgcgtggagagccgctggtcttacgtacgtcaactgaattcccaggcacttccgaaattatcgcctgccgtcgagcgacccgtcaacgagcaccgagaagctaacattggtcgttcccgatagctacaaccgctacctggccatcgccgcccgcgttgtccgccgcagcctgaaggacgacaagagaatcgttgccgagcgccgaggcgagatggatctccgattttccaagtgggagaacggcaagcagggcgagatgcagaaccttgccaaggccaacgctgccatcgccgccgagaacgccgcttaaggaatttgactcggatggatgattgcgtacgggatattggaagcatggcgcctgaagggggattgctcggatgggatgagatggaacttattcaccaagagccgccgatcgcatgaacctggtgccactgtatcataatgattgctacaatacatcaatcaattcaaaaactacgattgtaattgcaaaaaaaaaaaaaaaaaaaacaccgccccccgcggcc

SEQ ID NO: 141917 - DNA, 1031 bp, Zea mays
  Clone ID: MRT4577_60910C.1
gccggccgggttccggaggtaggcgcggcgcggaccgcaatacgccagctttcttgctcttgtctctaagcagcagcagcttcctgtctctccagccaccattccattctcgctccttggtaatgaggctggctagccagctaatgcagctccgaacctgttttgttggtggtcatttaaccatgcatgcttcgatcgatggattggtgcatgcatggattattgcatagtgtgatgcatgtggcgcatcagtgcatggttagatgaccatcagcaaacatgttcttgaggcatgcaagttctctagctacacatatcagagatcgatcaccactgcggcgccatggctacttaattgaaatggaggtttgcatttctccgaacccggatgtcgtgattctgcttccgttcttgatccaggatcttccggtcttgttcccaccattactttccttaggaaactggaatggtttcaaccttaatttgtttatgtgtgtgtgcacatgcagcgtgtgtttcatatggagatcggtgcactcaccttgtagctttagcttgcatccccttcgctaacagagagtaagatatcttagtcctctcgccatctctctctaaacatatacgtatcattttgtttccgacgactctcccaatgagtcgttcgattctcctgcaggatctgacgacgaaagcgatcatcaatcatatgccacatgctatatttcacaggttctatctggttaagtaaagatctggcgtgtggcagtgctcattctcatgacgatatgcagatgcagtgtatatcaatcgtatccaatcagcatgcaagtggtctaaacaatgtaacacctaaatgctattttcaccgtatataagttttctcaatagtgagcttgcaacccattacccatatttgaatctgggtatacggtatggataatggttttattcaatagaaatatgtagactgcactctcagttaatcatcttctagtagcaatggaaaaatcagatgagtcaagttttgtttt

SEQ ID NO: 141918 - DNA, 211 bp, Zea mays
  unsure (1)..(211): unsure at all n locations
  Clone ID: MRT4577_60911C.1
cggacgcgtgggattcaatcagaatgcagatctgagtaccagcaagaagaggagaaaacaaaatctattccaactagagtagggtccagccatgattgttgtgggtggcatacagtgacatgcgtctgggtttgttgttgtaagtagctcttgtgggtggggggggggggggggngggggggggtnaatnaatggaattgcctgattatgg

SEQ ID NO: 141919 - DNA, 147 bp, Zea mays
  Clone ID: MRT4577_60912C.1
cagtgcaaagcgcctctgccatgtatcgtctgcattgagccgcgccggtgttcggggcttacgcgcaaggcgatcgttagacttgtctgcgacctaatgggcgctgccttttctttgttcggtcgctttatggccacgatcgccggc

SEQ ID NO: 141920 - DNA, 324 bp, Zea mays
  unsure (1)..(324): unsure at all n locations
  Clone ID: MRT4577_60913C.1
atgctcctgtcttctgcaaggctgctcggnaccatttcgcgcatgtcgaagctctatgcttcctcttccccgacctctcaccagcggtgtctcggttgtgaaacccaattcttcaaccctcaggatcaacaggcaatncagctggcatctaccttatcaccctgtcctcaacaatatcagcctatacaacagtaccttggtgcattatgcacnaacatatggccncaactacacaactggcagcnacctgctgctacttagcacagagttcttcatcaccacangtcatgacttgtctattgacacacactcatagcagtctgt

SEQ ID NO: 141921 - DNA, 435 bp, Zea mays
  Clone ID: MRT4577_60914C.1
gtccctatctagaatgacctaaccagcgacctccatccctccgccgccgcggccacactccgtcgcccgccgctgcatccacgtcccctccggcctgcccgacacgcatgtctgcttcagctccccctcctctggcctcgccaacgcatcgcgcgtctcgggtctcccctccgcggcgccctgctctgacctcgccgaggcattgcgcgtgtcgggtctccccgccgcgacgcccttctcctgcctccatccccgacgcggtccgcaccagcgacctccgtccctccactccggcctccctccccgaatcggtccgcaccagcgacctccgtccctccgctccggccttccccgacgcggtacgcaccagcgacctctgtccctccgctctggccttccccgacgcggtccgcaccagcgaccactcttcctctg

SEQ ID NO: 141922 - DNA, 142 bp, Zea mays
  Clone ID: MRT4577_60915C.1
acgttcatcaggcctgcggacaggaaccttcaaatagcaatgaaacacttcaaccgaaagaggagacaacgggaccgagggggcatctgtaaaagatctctgccgtggatgcatgaccaacgcgtgagagcaggatcatggc

SEQ ID NO: 141923 - DNA, 300 bp, Zea mays
  unsure (1)..(300): unsure at all n locations
  Clone ID: MRT4577_60916C.1
gactggttctagatcgcgagcggggcgcctgagtctcccgccctcgccgggccagcgccacccgggtcgtcctcgtccccggccggcgggcgctcctccagccgggccgtcacgggatacgcggcagcgctggctgacgcgtgcgtccgtgcgggcacgctgcgccgcgccgcgcgccacgcgcgcgcgctcctncaccttnttctccggctagagcggcccctggaagagggcgccgtcgcggtcgaggctggcatgactggcgctgaccagcacctggactcaccgataggcagtcat

SEQ ID NO: 141924 - DNA, 173 bp, Zea mays
  Clone ID: MRT4577_60918C.1
aagtcctggagaggaactcattacatgatggataagctgccgaaatttcaatccttaatcccaattcatttggggggggggagattcgagcgtccattacaacacaagctttttcttttgcatttgcccacgcgggcacacgtaccccccggattggactctatttttttttt

SEQ ID NO: 141925 - DNA, 370 bp, Zea mays
  unsure (1)..(370): unsure at all n locations
  Clone ID: MRT4577_60919C.1
tgaattcggcacgaggcaacggtaaacgttacccttgccgaagagaagggaaaatagcagtagcgcccggatcccctctccttcctccagatcacaccactgccgcctccgcctgcaaatccatttctagactcaagctgttgctgcgagcgagctagggttggtgctcaggtctccagggttttgcctccccgctcctggtgcccatcgccttggaccttnggctgccgttttagggctggcctcgagctgcgggggccgtggggcgcggctgcggccggtgcgggggtcgcgggcgatcgggtggctgcgccggcgcgcgggccttgtngtctcgtggggtggggggggtggggcggggacgcgctgt

SEQ ID NO: 141926 - DNA, 190 bp, Zea mays
  Clone ID: MRT4577_6091C.1
accttttcctatatacccttgtactacatgatagacttactttacggaatgccctacaacggtagagaagtaaacgagggcttgtggaaaccaatgattaaccaataggttattagagcttttaagatttgtctgtggcgcgaagctaccgtgtgccggaatatgactgaacgcctttaattcagaattc

SEQ ID NO: 141927 - DNA, 676 bp, Zea mays
  Clone ID: MRT4577_60920C.1
gccggccgggctgcgatcagagagatcatttgaagaaacctatactctctacctctcgactgttcatcttctccacccctctcctctcctctcatgtacccggatcatcttccttctagatcactatagctactgcacttctttctatttccccttactgctattctccaaactcttctctaaatttgtaccagattcttatgcttagtgttcttcatgctactgaattaagttaaagtgtcctaagttgctaacaattggtatcagattcgttcgatccttgaagttttctacctcgatttgtcttcctcaacttcgccgcatcaacatgtcactcgacacgaagctcatcctcgacgctatcggcaagctgttcgacgacttcgacgctcgttgggagcgccgtcttcccaagttattgaccgcacaggaggcctctccggtcatctccgttctgaccccgactgtggctgttggggccacaatcatcgccgacaactggggcgggggcttcaacggaggcgagtactcaatcgagcagtactgcacgtcgccatccatcgtcgccgacaattggggcgggttcttcggtggcgaggacgtggctgccaacgccgagttcgccatcgatccgccagacgaccccgagagattcgtcctccccacgcctccacca

SEQ ID NO: 141928 - DNA, 704 bp, Zea mays
  Clone ID: MRT4577_60921C.1
ccgcccggcctcttctcctctgcttccctattccgactagccttgctgctcttgttggtgctctttgaggggttgctaaccacttggtatcagattcgttcgatccttggagttttactacctcgatctatcttcctcaactttgtcgcatcgacatgtcactcgacacgaagctcatcctcggcgctatcggcaagctgttcgacgacttcgacgctcgttgggagcgccgtcttcccaagttattgaccgcacaggaggcctctccggtcatctccgttctgaccccgattgtggttgttgggaccacagtcatcgccgacaactggggtgggggcttcaacggaggcgagtactcatccgagcagtactgcgcggcgccatccatcgtcgccgacaattggggcggattcttcggtgacgaggacgcggctgccaacgccgagttcgccatcgatccgccagacgaccccgagagatttgtcctccccaacgcctccaccgacgagcctagcatcgaccccgcgctggagcgcaccaactctggagcggcggacgactccatcaatgcgctcgtcacctccaccgaccccgacgcgctgctcgacaccgtccccgcggacgagcttgcgtccttcactcgccccgaggaaggccgcgctcccttcttccagaacgagatctcgggcgtcattcccgcgctc

SEQ ID NO: 141929 - DNA, 283 bp, Zea mays
  unsure (1)..(283): unsure at all n locations
  Clone ID: MRT4577_60922C.1
ttcgctccacgcgtccgcccacgcgtgccgggcggggcgtgcgggggacgcataagagtaatcgtcgggcgttaacacaggnggttgggatttcacacttggtactttccaatatggtagaatttccgcgtggagcacagnaagaaatgtgccgaaattttgtgctgtaactattttggtattccagcgaattgggggggggggggggaaaaaaaaaaaaaaaaaaaaaaaaaaaaaaaaaaggggggggaaaaaaaaaaaaaaagggggggggcgctttaaa

SEQ ID NO: 141930 - DNA, 123 bp, Zea mays
  Clone ID: MRT4577_60923C.1
atacagtgggccacacattgcaatactcaggtgtaagtgaagagccccctctaagacatatacgcgcccaaaaacctagaatggcaaacgcctgtgttggcgagggacaaacagcaagctccc

SEQ ID NO: 141931 - DNA, 868 bp, Zea mays
  Clone ID: MRT4577_60924C.1
gccgggacattccttcctttatcattgcatcttccctccgatccttccggtgggggcggccagatgcgaccaaattcctcctattccctctcctctccgcccacccttctctcgcccgcgtaactcctctctgtcgcctaccaaaagcggagcaaccgaggcaagaggaagggggtgggcgaggaaaagcgatttggcttctcttccagttccggattcatcgtaagagtggctgcattggtaatttaagaaaatctcagtcacttccagattctaagccgaaacgatctttaagaaagaaatctctggattcatctactggaaacagaagacgatggcaatcgagtctagaagcaatggagaagaatgttagcatatcagtttctcttgaggggaatatctcttctattcccaactcgatagtcaacgattctaaaacgttaatggaaaatggggtagatacatcatttatcaaccatgctgctaaagaatggactgagatgagaagacaatgggttggacatcaggcagaagttccgagaaaggcccctcaagagccagtgataagttggtccgcaacatatgatgatctcttgtcgacaagtgagcgttttccacagcgaatcccactatctgagatggttgattttttggtcgacatatggcacgaagaagggctctatggttagctgacgtctggctttctttccgccttgcatttagaatggggtcaacttcctccccacaaaagatgtaatcttttgaagaaatgaaaaaaaactacttagtcgcaaaatagttttagcatttgatttttttaaaaaaactggtatttggaaagatactacagggggttgggaatattggg

SEQ ID NO: 141932 - DNA, 119 bp, Zea mays
  Clone ID: MRT4577_60925C.1
tcgattaagtgcggctatggaagtcttcacagaatgcttaacactctaccttggcgtgcggtatcgatgatcaaatgtcatgtatacacggtggactcatctcccgatctagcacactt

SEQ ID NO: 141933 - DNA, 1328 bp, Zea mays
  Clone ID: MRT4577_60926C.1
tagttattgtttcatgatagttagataagctttttgattcatggactcatgataggctgcgagctatacttgtaagagatcggtttggttccattctcaactccactatgtcttttacatcgcaggacctcgaggccggccggccgatccttccggtgggggcggccagatgcgaccaaattcctcctattccctctcctctccgcccacccttctctcgcccgcgtaactcctctctgtcgcctaccaaaagcggagcaaccgaggcaagaggaaggggtgggcgaggaaaagcgatttggcttctcttccagttccggattcatcgtaagaaacacatgactgcagtggatatttgaagcatgaaaaggcaaaccatctcactcttcaaacagttcacttagcacacttaatgacggaggtgtttgcatgacattctctttgagctgatatatatgggagcagtggctgcattggtaatttaagaaaatctcagtcacttccagattctaagccgaaacgatctttaagaaagaaatctctggattcatctactggaaacagaagacgatggcaatcgagtctagaagcaatggagaagaatgttagcatatcagtttctcttgaggggaatatctcttctattcccaactcgatagtcaacgattctaaaacgttaatggaaaatggggtagatacatcatttatcaaccatgctgctaaagaatggactgagatgagaagacaatgggttggacatcaggcagaagttccgagaaaggcccctcaagagccagtgataagttggtccgcaacatatgatgatctcttgtcgacaagtgagcgttttccacagcgaatcccactatctgagatggttgattttttggtcgacatatggcacgaagaagggctctatggttagctgacgtctggctttctttccgccttgcatttagaatgtggtcaacttcctccccacaaaagatgtaatcttttgaagaaatgaaaaaaaaactacttagtcgcaaaattagttttagcatttgatttttttaaaaaaaactgttatttggaaagatactacagtggtttggtatatttggtgatgagctgtcagaggtttgtttatgttaaatgactcgatgacctgtcattcctgaatgggcggttgcttaagaatagaagagggagcattttctgtaaaaaaaaaattgaaaaaaaaaaaaaaaaaagtccccggattgaagtttagtctaggttttagatgccaattaagaaaagtaaatgtgagttaattataaaactaattgcataagctgtttccg

SEQ ID NO: 141934 - DNA, 444 bp, Zea mays
  Clone ID: MRT4577_60927C.1
ccaagtcagtgctgcggctgatgggaatgaaagggctcaccttgtaccacttgaagagtcacctccagaaatacaggcttggaaagcagaccaagaaagacacgggtttggacgccggcagagtggcattcgcggcgcagggcataaatttctccacaccagtacctcctcctagcattccatctacggccagtgataatacggggtgagtagagtaggtgtcaaaacccaaaatcatatcctgcatgtttttgcttcctttaacatcagtacaaaagaacatgcattcgcggtctccctgagacagcaatagttctttactaacaatctagaagctcgattctgttgcattagcaaaactaaaaagaaccatgggcatgatgtacaatagaacggaattagcagcagcatgcagtcggcatgctctgaaataagatttttttt

SEQ ID NO: 141935 - DNA, 491 bp, Zea mays
  Clone ID: MRT4577_60928C.1
ccggccgggccgggatacttgagcatcctggagataggagagatcctagtcgactcacctgcatcggttctctcctttttcccttctccacgattcattccgcctcccgtggctccagccgaatcacaacatcctgacggacggcctttcggatcttgagcgggatcgacggaatgcagatcggaaacgataggatggatgtttctggtgatgagcctgacattcccgctgacgtgaatgatgggatgcgtatcttctctggccaggaggtcacgatgtgctcatccgtggcatgatcttgatatcggtcctgatgctcctgctggtttctgtgttggtgatgacatcaccctgtggaatcgaaggtaactatgagcgtgacaaaacgactggactgactaagggtgatcgagttctatggtcatgagatggataccctcacatttgtgcgttcgctccaacgactcttttgtgaacattatgaccctatt

SEQ ID NO: 141936 - DNA, 297 bp, Zea mays
  Clone ID: MRT4577_60929C.1
atgtcactgtcgaggaccgcgtcgagcaccatcccgtccagcgacattgccatcagcccggtggccgcctggcccgccggtccggcaccggcgattccaagccctgcatcgaccgccgcgttccactggttcgaacaagtgccgtcgccgcggacaccaccgtcatcggtccaccaccgcggcgggcacaacctcgagctgcagctcatgccgccgtcctgcagcggcgcgggcggtgacgcgccaccacgtactccggcgggtccctcacagagccacgccggcgccatgggcatg

SEQ ID NO: 141937 - DNA, 522 bp, Zea mays
  Clone ID: MRT4577_6092C.1
atgtatgatgggcattccaacccggagcagttcctcatgagctacgagcaaccatatcatcatatggtggcaacactatcgtcatggcaaagtcctttgtcatggcagtcaggagtgtggcccaaacgtggaccaacaacgcaatatttctccaggaagcccccacaaactctggagaagcttctacagaagatggacgagtacatcagagccaacaatgacttctggcaaagaaaggaagaagcctacagatatgctgagatgaccaggggcttcagaggaagactccacccaaggcatgtcaggatgatccataatcccagcccaattgaagacaggggaagtcatactcaagggcatcagcacaactctcaatcatcaggaacacagcaaagctccttcatgccaccagccccaagaggcagaggaggaagaagctttggaggaagattcagctcgcaaccaagaaggatgtttttcttgttatctggagaagataaggggcatacaacaaggacatga

SEQ ID NO: 141938 - DNA, 152 bp, Zea mays
  Clone ID: MRT4577_60930C.1
cacaggggcaaaccgaatttgaaaccagaatgttctaggagccgacccacatgtgcggttatgacataacatgccctgtatcaaacacaacctcttcgaatgatcataaagagctggtaatattattacagactaaagccatggacatcaca

SEQ ID NO: 141939 - DNA, 408 bp, Zea mays
  Clone ID: MRT4577_60931C.1
aaacaaaggggggggaatagcaacaaaaacgagggaaggggaaccccaaaaatctagagaaacaaaaaacctacttggcaggtgagggggcgggcaaaacaaaattcacgtctaaaattggcggacggacaaaccaaggagtcagctacaaaaaccccttttcaaagggggggaaaaagcaacaacccccccttgaaagggggcccaccacttcaccctaatgggggggggacccccctatcgaaactatcacaacaggccatatccaagaaactgagaaaactggctcggcccaaaacttacctccgcacaagcaacaaaacgggtttaaaaaagggaaacttggaaacaaaaaccccttgaggggcaaaactttccctggcgggagaaaggaaccccctcaggcca

SEQ ID NO: 141940 - DNA, 295 bp, Zea mays
  Clone ID: MRT4577_60932C.1
attcggctcgaggtcaagcccatttttccgggccggaggctcttgacccactcgttctgctggttatgcgaggtctaatgcactaagcgaattagaccatgctagtcaagctatgggacgactgggtgctcgcgcctcagccatgataccgacctcgagaagctacagaaggtcaccaccgcccgtgccaatcataataaacaatgacgtggacgttggcatgtacacgcgggcgcaggctatgcctacggccccgacgacgccggagacacctatcatagtcgtatgttcaaag

SEQ ID NO: 141941 - DNA, 354 bp, Zea mays
  Clone ID: MRT4577_60933C.1
gagcaacctgctgagccaaaagggctggcggcactgggaccaaaagctcttcaacggcggcagcaccgacaacaccgtcaggaacttctcgtccaactcgcccgccttcagcagggcctcccccggcgccatgctgcgcaggggcagcctcagaccaacgagcacgtccatgctgcagacgtggcgggggggcaccataaggacactggccttgtccccctctccctctgcgagatcgagggcactcccaaggcgggggcttccgtacagacgtccatgccttgcctacccctcctacagaaaggccggggtcatgttcctgggcgcgccctggggggggggcgtgcgaccccg

SEQ ID NO: 141942 - DNA, 949 bp, Zea mays
  Clone ID: MRT4577_60934C.1
ggccggccgggaaaaaaaaaaaaaaaagaaaacgcgagaaaagcgcccgtcctttctcgttcccttccgtgcagttgcaagtgttgccacgccgcgccgcgacacaccacgcaggaggcagcgagcgcaataatgcgcacgcagaggagcacagcggcgtcactgctgcggcagtaatggccgcctggttccacttccaccacggcgtgcactagcgctacaccgaggccaccttttcttggttccttcaacacgcctactccggcctccggatcgggcaccacgtctgccccctgctcccggaatctttgccaagcggcgccgctactgtccggcaaggcgaccccgtctctcggccggcgttgatctggcgggcggagtggcggcgcgatgggcatctcggcgaggtggctcaagtcgttagttgggttgaggaaggtggggcggcagcagcagcagcggcgaaaggatgatgcagatgttggtcgaatgaaaaccgatgtcgccgaccagtttcattttcagattcagcactctcaagatgacaatagcattgctgcacaagaaattccagaggtttcttatggaaatgatccacctgaagatgattctaatgtaccttcatgcttcgagcctgctcgtagttcagctcatatgccattttgtcaaactgaagaagcccagaaagagatctgggctgctacaattattcagacagcatttagagctttcctggcaaggagagcccgccgagctttaaaagggttggttaggcttcaagcccttgtaagaggtcatatagtaagaaagcgagcagctacgacactccgttgtatgcaagctttggtcagggttcaggcccgtgttagagcaaggcgagttcgcatggctttggaaaccagactgatcggcaaaatacttcaccagagcacacgatcgagcacgtgtc

SEQ ID NO: 141943 - DNA, 331 bp, Zea mays
  unsure (1)..(331): unsure at all n locations
  Clone ID: MRT4577_60935C.1
ggggggggggtgttttttaaaaatttttactaacaaggggcgtgttatttttaagatgtgccacttgcacgtgattcaaacgaacaaacaacaatcacaaacagcacaccaacacatgcttttttcaaaatnattaataatgattctgtggtatagcatatgtagccaanttccagctttaggcactggtggcgcataattaaatggccctacgtggcgcctcacttacgcaggcttgcgttcgttacgttgctgtggtggtccctggtggtctttcgttgttcccttggcggggctttgttttttttcttggttgctgcggctgggtttg

SEQ ID NO: 141944 - DNA, 793 bp, Zea mays
  Clone ID: MRT4577_60936C.1
cggccggggaaacgcgagaaaagcgcccgtcctttctcgttcccttccgtgcagttgcaagtgttgccacgccgcgccgcgacacaccacgcaggaggcagcgagcgcaataatgcgcacgcagaggagcacagcggcgtcactgctgcggcagtaatggccgtctggttccaattccaccacggcgtgcactagcgctacaccgaggccaccttttcttggttccttccaacacgcctactccggcctccggatcgggcaccacgtctgccccctgctcccggaatctttgccagcggcgccgctactgtccggcaaggcgaccccgtctctcggccggcgttgatctgttttgtgccggtgctaacggaaaccggaaagtttgcgtctttatgttactgtggttgaggcgggcggagtggcggcgcgatgggcatctcggcgaggtggctcaagtcgttagttgggttgaggaaggtggggcggcagcagcagcagcagcggcgtaaggatgatgcagatgttggacgaatgaaaaccgatgtcgccgaccagtttcattttcagattcagcactctcaagatgacaatagcattgctgcacaagaaattccagaggtttcttatggaaatgatccacctgaagatgattctaatgtaccttcatgcttcgagcctgctcgtagttcagctcatatgccattttgtcaaactggtcaaactgaagaagcccccagaagagatctgggctgctacaattattcagacagcatttagagctttcctggcaagg

SEQ ID NO: 141945 - DNA, 220 bp, Zea mays
  Clone ID: MRT4577_60937C.1
gtcttcccgcctttcaagagccttgagcctagggttgaccccatctgtatcgcatcttatgaataggacatccgcttgctgaacatgatcaactctataaccagatccaaagtcctagtctatcatctccagaagcaaatcaatccctacataaaatccatgctgccactccttgtcatttacaacccaaacttcttcggcgtatatcaaatatcccatt

SEQ ID NO: 141946 - DNA, 697 bp, Zea mays
  Clone ID: MRT4577_60938C.1
gtatcgaaaaacttgttaacgatcaaaataaagatgagctccatgatatgttcatctgtggtttgttgtaatgttgttacagtaccgcttcaaatcatatacaaatcattcttttcgaatttgttgtcggtaacacgtgaaaggaagatacctaatttacatgagagctcagcatattcatttgttctccatctcattctacaacttgcacggttcctgatgcccacagctcttaataaggctagagtcaatgtttgaatgctgatacaaataagcaccactaaaactttggtctaccatggcaaataaagcgcctttgggcttttgatctatgtttgcatctggtttcagacaaacggtaacctacataaaaaaaattaaagattttgttagtatggtgactaaaactgatcttgtttatggaaatattctacattaagcacttaaaaagtgccttaggaaaatccaagacaaaatatcataatatttttcctataaagaaaaatgcatgtactcgaggaaattgttgctagtacttagacatttaattctgtggataataatggttcaactctctaagtgttactttttacgggatactagaataatcttgaattttttgttgaaataactacatatcatagtagcatacatgctttaagacatatgtacctggccctgcaacctgtaaaatttg

SEQ ID NO: 141947 - DNA, 347 bp, Zea mays
  unsure (1)..(347): unsure at all n locations
  Clone ID: MRT4577_60939C.1
cccgcgtccgatccaggtctggtatcagggaaatccatcgcttgctccncatccctgatcgtcagaggggaattttaaagaacaccgattcctacggcaactagaagccatggagcacaaggacgctggaagccaagcccgcaccggacccatgctatgcatgaataactgccgatgcttcaatcgctcagcgaccatgaacatgagctccaagtgccacaaggagatgataacgaaccaggatcacgccaagctggctgcctcctctatcgacagcctcgtgaacggcatcgactccgtcatggagccggttgttgctggcagcaacacggtagtaactgttgccc

SEQ ID NO: 141948 - DNA, 492 bp, Zea mays
  Clone ID: MRT4577_6093C.1
tgacgcgcactcgtatacttgactcttgcgtgcttgcctggacttctcacactttccgctccatcgccctggcggaccatcttatcgaggagcatattggcaccttcaatgaagctttctgccttttagacaaggacggctactgttgcattacaaccaaggagcttgaacccgtgatgcggtctctcgaccataaccccaccgaggcgcagctgcagaacatgatctccgatgtgtacagcatctgacagcagcaccatcgactagctggagtttctggtcctgttggagcgcaagatgatgcacgcgtagtcactggaggagctcagggaggcatttcgtgtgttctactgggaccaaaacggggtgatctacaagggcgacctacggctcttgatgaccaacctcagatagaagctgatcgagcaggatgcgtaacgagacgtgacgcgaggacatcgcagaccgtgaccgccacatctgctatctgac

SEQ ID NO: 141949 - DNA, 327 bp, Zea mays
  unsure (1)..(327): unsure at all n locations
  Clone ID: MRT4577_60940C.1
gcgggtcggnactcctctcgctccgggacccatactgcgcccgctgtctcccagtcttctctcagtgctgaccaccgccgccgctgcccgcgtccgacgacaccatgagggagcgcgtctcgatccacatcggccaggccggtatccctgtctgtaacgcgtcctgggagctgtactgcctggagcatggcgttgagggtgttcgtcgcctgcccggcgacaaggccatcggccgaggcgctgaagctgtctacatcttctgaactgcgtaccggtgcgctggcccacgtccgctagcgctgtcttctgccgacctggcgcccactg

SEQ ID NO: 141950 - DNA, 361 bp, Zea mays
  Clone ID: MRT4577_60941C.1
cggacactatttgggagtagatggcaaatgtcacgaaaaagatgtacaatacgcattttcattgagtggatttgttaatgttactcaatacaatgtagatgatttgaaattggctttgttcgaaaatggtccagttactgttgccattaatgccgctgtacgtactttctcgttctactcaaacggtgtatactatgacagtgattgtcacggaggtgaagacgatttggatcatcaagtgttgttagttggttatggcactttgaacaatgactcctactggctcatcaaaaacagttggtctactcattggggtaatgatggttacattttaattagtcaacgtgacaacatgtgcggt

SEQ ID NO: 141951 - DNA, 1758 bp, Zea mays
  Clone ID: MRT4577_60942C.1
gcatagccatcttcttcgtcgacaagcttgggagttaggtctcacatgcatgcttcagcacagtgttgactgcataacgaaacacattgtcgtcggatcggagatgatgagttctgtcgtctgtgatgccccacgcgtccgaaaaaatcagcgagaaccctggttttctttttttgtttagcggggggcgcaagagcaagctgcaagcagattacagggccacgaagctcgcccctgctctgctctctatcctattagtcctcgaattgggctttcctctgctgcggggttctggtctcgtctgggtttcagacgccagatttggagcagaggacaccggtccttggtttccttgccgggctgcaatgttatggcgcttgcgggggtatgtagagcctgaattctgtgatgacgggggagttcgcggcgtggggagattttttctgtgctttctcttttcttagctgagaaatctggtgctatttggtgctcgccgacgccgagccggagggcgtcatcgttgctgtgtcctctgtagctggatttgtggtcattggtagagagaagcgttcttcctcggggaatccgttggaagaagcggtctccggtgcaatcccatggcttctagggatttcctgggagggttcggccgggatggagggcaagcgcctgtgggtggcgctggcgccgccccggggcccggcggggagtcggacgagatcgagctcagcctcggcctgtccctcggcggctgcttcggcgccgagccttcgcaggaggggaggagcgccgaccctcggctccagcgctcgtcctccgtcgcgtcgatctgctccttgcctgctgccaccaccggcaccagctgcggggcgcaggacgccggccccgccgccgcgcctccgccggacctgctccgcacctcctccctgcccgcggagtacatggaggaccggctccgccgccgcgcgatgcagagccagcggcgcctcgaggccaagcgcaagcgcctcgagcgccgcaactccatgagctcgggaaggccggttccggcggccggtggccgcgacgacggcctcgagcacaccgtgcccagcggcttccagctccgccgttcggtcgccttgacgacggcggggtcgccgacgcccagccggccgcagcaagggcccgcggaccgccgtgcggcggaggcgaccggaccggacggcgcggcctgccacgacgagccgctgccgctgcgcctgcgcacgctgcggtcgctgacgatgcggacggcgagcacgggcgacctccggagcgccatggcggaggacatgcccatggtgtcgtacaaggcggagggccccggcgggcgcaagacggacgggttcctgtacaagtacaggaagggagaggaggtgcggatcgtgtgcgtctgccacggcagcttcctcacgccggccgagttcgtggagcacgccggagggggcgaggtccccaacccgctgcgccacatcgtcgtcaacccgcagcagtcggtgttcttgtagcgcccggccgcctcggcctcgcgatggagatggaggtggtggatgtaccgtcggagcttgagctttttaacgagggactgtagaagctggaaaccttctccctctctctttttttggttctgctttgtttattttctgtttcttttggtactcatgtagtcatgtggttactattattattacaattattattaacagcaacagtagtaattgattatgctatcgattc

SEQ ID NO: 141952 - DNA, 370 bp, Zea mays
  Clone ID: MRT4577_60943C.1
cctctagagtcgccgcccttttttttttttttttttttttattttttttttttttttttttttttttttttttttttggagggcaacatgtctgacgtacagggcaagtccacatgtctaccgtacagggcaaataatcttatcttcggtatgccagctcaacatggcattcacttgagagggggtgatcctccataccacctttataaaataaatacaagtattgatgaacagctattgcaagggtttgtcaccattaccatttacaacctggggaacaagcttggcgggtaacctccttgttttctggaaatgccgcatatgcagaataggctcgcacccaacttctgcaactgattttccggggggg

SEQ ID NO: 141953 - DNA, 690 bp, Zea mays
  unsure (1)..(690): unsure at all n locations
  Clone ID: MRT4577_60945C.1
aattcggcacgaggctggaccagggtgcgccctgtgtgggtggcgtgtggtacaacgccatagggcatggtgcgttgctctgggcgtcgccgatcggagtgcccaagaacagggtaccgtccgctcctctgtagagtaccttggtgtggttggggacagaggacgcggtcggcgttggagacattgccatcgtgaattccgacgctgttgttgatgagaggacataagacgaattggtgatggtgatggctgcatggagatgaggtgaatggacaaacctgtttgtgtgggtgcactggccccgatcgggcgtggtgacgacgctggtggcggcagggttggtgctgcggttgctggtggaggaaggagcgggtgcgtgatcgccggcagaggtggcgtcgacggtggttgggaaggacacgccacacgcgccatgaaggcttcaatggtcgctacggaaagtgaggttggctaaggttctggtgagcttggcgttgaggccttctagggttgtcggtgtcgcggtcacagacggggatggataccaggttgataggattagtattcctactggggatgctacngangttgtatgggtgggacgtggaggggcgagagcgagcaccgcgcaagggctccgtggctgatcagagagagcgagagattactggaggctagggttccccgtgc

SEQ ID NO: 141954 - DNA, 623 bp, Zea mays
  unsure (1)..(623): unsure at all n locations
  Clone ID: MRT4577_60946C.1
ggtaccctncgggncctggccgggccgggnaaaaaaaaaaaaaaaaaaaaaaaaaaacattgtgctgccatttcaaccaacttgctgttgacaaacccagcagcattctaccaacaacccatcattggtggtgccctcttttagatttcttatgagttatagttcaataataaagttttgtctgatgtttgtggcttcccagaaataagaaagtacatttctagattctaaaaaaaaaaaaagagaggggaaaaaaaaaaaaaaaaaaaaaaaaaaaaaaaaataaatgaacaaatttaaaaacaaaaagctcaaaaaaaaaaaaaaaatggccctttggcccctcgccccccaatttttgtccctttaaggggggggaaattgccctttgggggtaaataaggcaatacgttttccctggggaaaatggttatcggtttcaaatcccacaaaaaatacaacccggagatataaagggtaaagccggggggccctaaggaggaggctacctaaatttatttgcggggccctaactgcccgttttccaggcggaaaacctgttgtcccagtttctttaatgaatggcccaccccccggggaggggcgttttgcgattgggggct

SEQ ID NO: 141955 - DNA, 864 bp, Zea mays
  Clone ID: MRT4577_60947C.1
cattgggtacctcgaggccggccgggactcgaggccggccgggagagtcgccagtcctcccacaatctccagccgccactacgcctccctctagctccagccgccactacgccggtcgcagagtcgccagctgccgagacgcccggaggcccgcgggcgctccctcctgggctgctggcctccttcacattattggagccagaggagcgggcggcggcttgcactccatcccatcgcttggctagcgcgccggagccacagctggagcgctcgccggcgacgagtcgccgccccgcaaggagcctacgcaggcacgcaccgccacgtctaggcgccaggcggagacgttattaccacaacattaaaggagatgccttcactccagaaagcattgcctccagaacttgctgataatgtgctcaggttatatcgtgaatgcttacggagggcgaagtatattggccatcagaaacacaatacagaacttttagtcgccatggtgagacaacaattcaagaaaaacatgcatgaaactgatccagagaagatacagaaaatgaaggacgatgctgcaaggggccttatcaatcatattctatatgagtccgagaagattacaggacgcaagttttcaggttaaaaacagaagttgaaactggacttacagtgtgtcgtgctgtatgaataatagtaaaaataatttactttcttgcctttgaatgattccggttctattgtacaaggacctgcaaatgttttttccttcggattgctgagtactcgagctattgcagcaatgattttcagtaaccaaaaaaaaaaaaaaagggcggccgccaccgcggtggagagctcagcttttgt

SEQ ID NO: 141956 - DNA, 732 bp, Zea mays
  unsure (1)..(732): unsure at all n locations
  Clone ID: MRT4577_60948C.1
tgggccgggccccgcttcttagtaaactacgtgggacttcccccctgggcttgtcaggttccatttcggcaccgaacggcccgcacccaaaggggaagggctcgagcagaatgaccagcccaccccgccgagacagcctcctgggccgaaacacaaggcacaccctgccgcccgacccttccttgggccggttggccgagctttcttgcttgctaactctcctcgttcacccgtaagccccgcctactacgcttgggacttccctcccggccgactccggcttgcttgttggccgggcgagcccgcagcccgcactcgaccgtcccaactggagcaaccgggagggttccgcttggcttcggctctctcgtgggacggccgccagagaggacaccgccttttccttacccaacttggcaccgcccccttcccgggtccccattgccgtttccccttggcccaagttactctcttgaagacaagggtttgngccgactctcttcttcttactaatcttggtgacatacatgggacaccgccacttctatcattgggggtctttcnngcgttggaagaaaaaaaaaaacccccgactctttgggtaagggtgaaccaaaagaaagactatcgtgtttaaggntccgctttcttcttctacatagaagccttaatggggtnccggtnggtggttttttccctttacatctttcttgcttttttccttgaattgta

SEQ ID NO: 141957 - DNA, 864 bp, Zea mays
  Clone ID: MRT4577_60949C.1
tgggtacctcgagccggccgggacgttccgtcccgacatagagtcgccagtcctcccacaatctccagccgccactacgcctccctctagctccagccgccactacgccggtcgcagagtcgccagctgccgagacgtcggccgcgtgcggcgtgcctctcgcggtctcgcctcgcgcccggaggccggagcaccgccgcggcgccgcggcgctccctcctgggctgctggcctccttcacattattggagccagaggagcgggcggcggcttgcacgcaccgccacgtctaggcgccaggcggaggcgttattaccacaacattaaaggagatgccttcactccagaaagcattgcctccagaacttgctgataatgtgctcaggttatatcgtgaatgcttacggagggcgaagtatattggccatcagaaacacaatacagaacttttagtcgccatggtgagacaacaattcaagaaaaacatgcatgaaactgatccagagaagatacagaaaatgaaggacgatgctgcaaggggccttatcaatcatattctatatgagtccgagaagattacaggacgcaagttttcaggttaaaaacagaagttgaaactggacttacagtgtgtcgtgctgtatgaataatagtaaaaataatttactttcttgcctttgaatgattccggttctattgtacaaggacctgcaaatgttttttttccttcggattgctgagtagtcgagctattgcagcaatgattttcagtaaccaagagtaaaactgaaaaaaagcggccacaaaccctcctcctacaaacactaaaccccgtaaaaaaaaacaaaacccccccccccccct

SEQ ID NO: 141958 - DNA, 179 bp, Zea mays
  Clone ID: MRT4577_6094C.1
gagcggacatcttttttgtagaatattgtttatttggggggcgcaccaaaacggtgtatttcatatttttttgaatcaaaactccaaggcgtgaatatggaacagtaatggaagaaacctatagaatcgagctggtgttgggtggtaaaggggggaaatggactgagtgggtgaagcat

SEQ ID NO: 141959 - DNA, 1190 bp, Zea mays
  Clone ID: MRT4577_60950C.1
cattgggacctcgactcgaggccggccgggatctgcgcggcccagttactacagcgaataggcggcccatcaggtcacgttccgtcccgacgtagagtcgccagtcctcccacaatctccagccgccactacgcctccctctagctccagccgccactacgccggtcgcagagtcgccagctgcctagacgcccggaggcccgcgggcgctccctcctgggctgctggcctccttcacattattggagccagaggagcgggcggcggcttgcactccatcccatcgcttgggtgcgtcgccccgaatccaatcgcctggtcaagtctgttgctgccggaggtagacggacgccttatcgtgctcgtggccgcagctagcgcgccggagccacagctggagcgctcgccggcgacgagtcgccgccccgcaaggagcctacgcaggcacgcaccgccacgtctaggcgccaggcggagacgttattaccacaacattaaaggagatgccttcactccagaaagcattgcctccagaacttgctgataatgtgctcaggttatatcgtgaatgcttacggagggcgaagtatattggccatcagaaacacaatacagaacttttagtcgccatggtgagacaacaattcaagaaaaacatgcatgaaactgatccagagaagatacagaaaatgaaggacgatgctgcaaggggccttatcaatcatattctatatgagtccgagaagattacaggacgcaagttttcaggttaaaaacagaagttgaaactggacttacagtgtgtcgtgctgtatgaataatagtaaaaataatttactttcttgcctttgaatgattccggttctattgtacaaggacctgcaaatgttttttccttcggattgctgagtactcgagctattgcagcaatgattttcagtaaccaagagtttggctgtcttttcttttgagcaaatgtccaataaatgctgactacaaatcattttggataccggataaatgtaatcctcctcatagccaggagacaaaaataattggggccctttgaactcttccccaggggttatggatagaacccttttcgtttggggctttttaaaaaaaaaaaaaaaaaaaaaaaaaaaaaaaaaaaaaaaaaaaaaaaagggcggcaacagactagtgagctc

SEQ ID NO: 141960 - DNA, 823 bp, Zea mays
  Clone ID: MRT4577_60951C.1
ccggccgggactcaccagatctccccgccccgcggccgtggcagcgtcggcgaggaagtcagcatgagcgtgttcggcggcgacagctgggcgcgtgatgcgcagcagcggaagcggcgtctcgacgagctcttgctacccatcacggcgccctcgtctccctcgacgcctgattccttcaagaagctccccaacggcaagctcgcctgcctcgtctgcccccaccgccccgtcctcgacaccccgctcatgctctccatgcataataaaggcgcacggcacatcgctgcagaatcgaggctgagggagaaagaattatctaagaagcacgaaattaacaagagactggctctctcttcagatgcttcccattcaaattctggagatccacggaccagtgtttgtcctaccaatatcaaagaaaaaccattgattgaggagacccggagggcaattctggaagcacagtcgagcagattcaatgatttcaaaggcaagaaggaactgtccactggaaatactggatcacgagaatggagctgtaaaggacaatcttttgctggaaatcagactcaagacaagttattttctgacagacaaacagaagttcgaaagcgccaggagcaagaactttggttcactgcttcaggctggaaacgggatggccatggaagatggtacagagatgaaaatgttgaatttgactcagatgaagatgatcctaacatctgtctctcctgatcatttgagaaggccatcggaattgaactatccaatggcccatctgggagtattgaattcatcacaatgcaatatcaagttc

SEQ ID NO: 141961 - DNA, 1058 bp, Zea mays
  Clone ID: MRT4577_60952C.1
gtggggcatccaaaaaaaatccacattcacatccacatccatgtattatccgctccgctccgaatccaataaagaaaagtgggttaggatatgggagaggcagtatccgacccattttcatccctatatgtgctatatttatgttaatcctgggaacggtggatacttctagtttcagcacagaaaagcacatctcatgaatagcgtcgagagcaaatttttgtaactcacattttcatctctgtaccatcttccatggccatcccgtttccagcctgaagcagtgaaccaaagttcttgctcctggcgctttcgaacttctgtttgtctgtcagaaaataacttgtcttgagtctgatttccagcaaaagattgtcctttacagctccattctcgtgatccagtatttccagtggacagttccttgggaacatcagaagaagcaacattggagtcaaaggatgaagtaattgtcatccattccgaatcacaagataccttcttgccttggaaatcattgaatctgctcgactgtgcttccagaattgccctccgggtctcctcaatcaatggtttttctttgatattggtaggccaaacactggtccgtggattgccagaatttgaatgggaaacatctgaagagagagccagtctcttgctaatttcgtgcttcttagataattctttctccctcagcctcgattctgcagcgatgtgccgtgcacctttattatgcatggagagcatgagcggggtgtcgaggacggggcggtgggggcagatgaggcaggcgagcttgccgttgtggagcttcttgaaggaatcaggcgtcgagggagacgagggcgccgtgatgggtagcaagagctcgtcgagacgccgcttccgctgctgcgcatcacgcgcccagctgtcgccgccgaacacgctcatgccgacttcctcgccgacgctgccacggccgcggggcggggagatctggtggagtgatggtggtgtttggcccgcgtcctcaagtcatccaagtctagaccagaccgggatttcccggccgg

SEQ ID NO: 141962 - DNA, 228 bp, Zea mays
  Clone ID: MRT4577_60953C.1
agacactggtgcgggatcttatgcacgccagccatgtccctcgtatcaataagcatgggagcctatattggtgcagccgccccctgatcagttccatggtcaacgttgctcaagctgctacatgcagtacacctgtggggctgcctgagagtatgataacacccacgggactcttggcgacccgcccacaaagggtctatgataaagcacgcgcggactttctgtgaa

SEQ ID NO: 141963 - DNA, 1915 bp, Zea mays
  Clone ID: MRT4577_60954C.1
cattgggtacctcgaggccggccgggccccttcctccccttccgtctcgcaacaggcgaggcgagagaactcgtcgtcgaagcgaaatatagccagcgcaccaatcccaattcccaacccgacgcaacgcaacgcaacgcacctcatcccggttgcttgcgccaacgtaggggatcgcccggccccgccccgccccgcttcgcgcccctccttcctgcctgccgtaaccgcgccgtgcaactgtgcaaggttcagtaggttgttgagtctagataccagatgatggacctgtccacgacttcagtgctggcagctaaagcttacaaatacaaagcagaatcacttgttaaggagtaccttcttgcagattcgtatgtttcatacactgctgtacttggtgggatcctgatgtgcaagatggcttatgacataacaagcataatcagctcattgtactacaagggttatggttcacttacaaaaacccaaaagcttgagtggaacaacaggggcatgtccactatccatgcgatattcatcacagtggtgtcagtgtacctggttttcttctccaacctattctctgatgagctggatggactagtaacttatcggagttcaaatctatccaatttcactttggcgggtttctgttgggtatttcatcactgaccttgctatgatattatgggcttatccttctcttggtggaatggagtatgtccttcaccatatgctgtcgcttatttctatagtctatgctatgtattctggggaaggacagttgtacacatacatggttctcatctctgaaacaaccacacctggaatcaacctccgatggttccttgataccgctggactgaaaaaatccaaggcctatcttgtcaatggtgttacgatgtttattgcatggctggtggcacggatcattttgttcgtctacttgttttaccacatttacttccactatgatcaggtcaagcagatgcatacgtttagctgcattctgatatttgctgtgcctacaatactgctcgtcatgaacacaatgtggtttgccaagatcttgagaggccttaaaaagacgctagccaagaggcagtgaaaagaagaatggtaaaacaagctcaaggacatcgatagccaaaatccatcccctcgtacagtcactttacagttacatgcacttcccgagtaaagccgtcagtgcagctcgtagcacaagctaaagcccttgcacatgatcctgaaatacgctaaacacagctcatttttttccctggatgctctgccttgtacatacggccgtctgtattgggtgcttacaccttgagggatcgtttggtgaccaggaaaatagatgggaaagaaatccctttgttacggcctcgttcgtttcaactggtttggctttggcccgtttccggcctcattccgggtggaaatggaatttggttgtttctctaaaaactctaagagcgcttcgtctgcgcctgaaaaaaaaaaaaaaaaatttaggtagtcttatatagacctaggaaggttgaaatttgccctttctagctacaggttatgcagtttttaccgttttgacttcagaactgtgtcggatgcattctctatccgtacaattagagttgcaagcagtacttcatatccaggtgttaaattcttcatgcgcggtttcagttatttgtcaactctggtaattctcgttgtgcaggtgatttaagcggtcccaaggagataaatgaaagcatgcaatggtggtttgaatttggattcatttgatctttttgtttgatgtaggttgtgtctaacttgtctactgtctttggtttgatcggtccaacttgtattgatttggtggtgtccagtgtttaaacctggaaatgttaactttttttcaggc

SEQ ID NO: 141964 - DNA, 430 bp, Zea mays
  Clone ID: MRT4577_60955C.1
cgggagcaagccgcatccgcaccacgcagccgtactcccgtgctcgaaaccactctcgccgctccgaggcccgcacgaagcacacagcaaggaagtcgaccggcggcaaggccccccgcaagcagctgggcactaaggctgcgcgcaagtcgcccccggccaccggcggcgcgaagaagccccagcgcttccgccccgccaccgtcgcgctccgcgagatccgcaagtaccaaaagagcactgagctgatcatccccaagctcccattccagcgcctcgcccgccagatcgcgcaagacttcaagactgacccgagcctccagtcctccgccgacgcggcacaggaggaggccgcccaggcataccatggaggggcctgtgagaggacaccaacctatgcgccatccacgccaagcgagtcactatcagg

SEQ ID NO: 141965 - DNA, 329 bp, Zea mays
  Clone ID: MRT4577_60956C.1
ccgggtcgccccgcgtccgtctctcgtgtccgcttgggttgttggcttgtttggccgtgccggctgtcgcgtctgcggtggcctgctggtgcgtgctgggtttgtttgcgctctgtgctctcttgcgcttgctttcgtgttcttctgcggggtgctttgccgtgtctttctttgcccgtggcttgtgtcttggtcctctgtgggcgggggggcgttgtgtggcctgcttgtctgcccgggttgtgtggtggggcgcctcgctggcctgggccgtggtccttttgggtgttctgttttgggtgttctcgttgcttggtttgtcttctctg

SEQ ID NO: 141966 - DNA, 773 bp, Zea mays
  unsure (1)..(773): unsure at all n locations
  Clone ID: MRT4577_60957C.1
ccggccgggaaacctatatatataatactatttttcgtagcctccaagaacaatgctaaaaggctccgaataaggacttttagcaggaaaggccgttccactcatcgtgtaaactttcctcatcttttcatcgtcccgcatccggggcgattgctttacgcgaggtgaaattcccccaattccgtcgctggcgcgcgtagcacctgtttatcgcgcctattttcgccatttgcattggtatatggcaggagcctgcggcaagagaggcctgctcggtgccggaggaggcggcggcagcgtcgacgccaggttgtgggagatgccgtccccaacgtctggtggtccggatctacaggcgtaatctcgccgcgacaaccagagggtgcaaaccaggactccgacggcggtgtgtacgtgcgaggtgcgtccctgggtcaaggagcagcctagcctccgatgttaggacgtgctggagttgattcgaatccacttggagctgcttgtcagttggatggccgaatagattggatgggcctgtaagaacatcttttctgttatgctatcaaaggcaacaaatagatgctaatagcagatgctgaatgtttgttgcacctcccttcctctgcccgtgtggtgctgtagaccctcacttttctgttttcttgtccactagctctaggttactgcatgtagctttgcttcttgctgcttctacatcgtttatagagtattaataacttgctgctttttaaaaaaaaaaaaaaaaaanaaaa

SEQ ID NO: 141967 - DNA, 454 bp, Zea mays
  Clone ID: MRT4577_60958C.1
ggggggaaaggggttttcaacctggaagggggaaactttggtttaaggaaccaaaagggcccaaccccccttttgggggggggcaggaggcccacccaggaaaaaaaaaaacaaagttccaataaaagggaaaaattggccccccaaaaaaaaggggggcaaaaaaacatggttttttggccaaaccagaacccaggaaacaggggacaaaaatcctaaaatttttttaaaaacccaagccagggaaaaaaaaggggctcctcccgggggggaagggattactttgcggggggcccaaaattttttaaaacctgaaacccacgggggttcctccggccaaaagcctttaaaaacttccttccctgggagccaaaaaatggctgggggggggtggccgggcctccaggagcctggccaaagggcccaaccgcctaacgggctttttgggggcccc

SEQ ID NO: 141968 - DNA, 290 bp, Zea mays
  Clone ID: MRT4577_60959C.1
aggcaggaccagccattcagctggagtgtagtcacatattccacttacagtgatgtctgcgagtattacgataatcgatgagcttgggctcaaggataacatttggagttatatcttgtcccatttgcaggagcactattgatcacatagtactacgagagctacttgatccgataacaggactctatgaggatgtcagacgagaagccttaatgagattgggatatgaaggtctgcataagagtgaagctatcacaactcctggtgtgaggtcttataatgacccagct

SEQ ID NO: 141969 - DNA, 375 bp, Zea mays
  unsure (1)..(375): unsure at all n locations
  Clone ID: MRT4577_6095C.1
cctcgaggccggccgggnnanaannnnnnnnnnaaaaaaaaaaaaaaaaaaaaaaaaaaacaagttggcagggacagttacacgacagcagatcagaggaggcacacggcactaaggtacctggcagtctgggtctggcaggtaacgctaagcgatcatagctaccggctgtgctggcgtacaggtacgtaagaaccatgggcgaaagaaagtgggccacttctgctgggcccttcaaccttcctctttctttcgcctttcgccgaacgcatggcggcttgcgaggtggcggcgggatccttgcctctatctcacaggcggcggtgggcggtggaaggatcttggtggtgggtggtgggtgaaagcggtgggggg

SEQ ID NO: 141970 - DNA, 383 bp, Zea mays
  Clone ID: MRT4577_60960C.1
cttgaacctgattttgctgctgccccgtttggtggtggttgtccataaagttctaacgatggtgctgcaaaaaaaaaaaaaaaaaaaaaaaaaaaaaaaaaaaaaaaaaaaaaaaaaaaaaaaaaaaaaaaaaaaaaaaaaaaaaaaaaaaaaaaaaaaaaaaaaaaaaaaaaaaaaaaaaggggcggccccccattataaactttttaaacccgaaaataaatttcgaaccggtccctgaaggctaaccaattttccttataatgaggcgaataaaagtttggggaaaaaatggcaataacttttccctgtgaaaaatttttttccgttaaaaattccacaaaaaaaacaacccgaaaaaataaaatttaaaccctgggggg

SEQ ID NO: 141971 - DNA, 411 bp, Zea mays
  Clone ID: MRT4577_60961C.1
ccacaacgtcaaaccaacaaaactgcattccatatcaaactgatttaggttctaaacaatcacacgtgcaactatctttcctataaaaaaatgaatggggtgcaacaatcctagaataagcccatcgctagcagatgtaaaactgacttttctcaaaaagaaaataagaaactgtatggaatgcccaaaatcagtagagattctacacgtacaattgctcaagtgttgtgttgccaggtcatgagcaaagaaacttataggatcagctgcagctggtgtcacttgcaaatctgtgtcgttgcttgtgccgaaagcagcagaaaaggtggatctgcagctttgcaaagccaggagtaggtggattggtggctaggtttaggctaagcctcacttgacaacaggtttagtcga

SEQ ID NO: 141972 - DNA, 474 bp, Zea mays
  Clone ID: MRT4577_60962C.1
aatggtagagaatattattacaaaattttaggaattggaatgactcaatttggagctaaaatgaattagttatgaattaattaagtttctggatttattttaacactaaaaatcattttctaaatcattttctatgattttcctgttcactggactgggcctcaattataagaaaagtcagggggctcggggtaagtcgtcccagactcagtcaacagtgacatatggacggcgggttctatttctgtaaaacccaggggctctttaataaatttcctgaccgaaagggtatcacgcgatctgagccgcccgatctaacatgagcgccccagattagaactgggtatccctgaaccggtatgcaatccccgcggttggatctaaaatcaagggcagggatttaaagaagtcgagatccccccagagccacacgatcgagatcaaacggcccataactattctgggtgaatcggt

SEQ ID NO: 141973 - DNA, 1032 bp, Zea mays
  Clone ID: MRT4577_60963C.1
ccgggaagtctagtcctctccctccccttaacatagcgccgccactcgcgcccaccacgccgccgcaccgccgctggtgaacggatccgtccatcccgtacaccgcccaactcggcgtcgctgttccagtacccgccgccgcgggccgcgtcgggcgtcgccgtgcgcaagaagtgcctgcagatgggtgccggcgccgggcgcatcggcggctgggtggagtccatgcgcgcgtcctagcccacccatgccaaggcggccaccgcgctcgccgcgggcgtcgaagaggagcggtacaccgcgtggatggtgaagcacccatcggcgctggccatgtttgaccagctggtggcggcgtccaaggggaagcagatcgtcgtgttcctcgactacgacggcacgctgtcccccatcgtcaacgaccccgacgccgcctacatgttcgacacggtggctggatccgacggcaaagacgagccgcgtgtagctagggttttggcctcgccgcgcacgcctcctgaagcttctagacgttcgaggaggaggaggggaggctcccgccgccgccgccgcagccatggcgtccaccaaggtgcagcgtatcatgacccagcccatctggttggcgaatccttggtgggcgtgcgcggcggcagaacctcatcttccgtttcctccagagcaaagcgcgcatccagatctggctcttcgagcagaaggacctccggattgagggtcgcatcatcggattcgatgagtacatgaacttggtcctcgaagatgctgaggaaatcaacgtcaagaaaaacactaggaagacactgggccggatactcctcaaaggtgacaacataactttgatgatgaacagtggcaagtgaaagttcttatggcaggaacgatgtttggtgctcgcgttgagtatttctggcacgttgtactccatccattcagacttacatgtacctgctgttaatgacctgagtaaaattatgctagatgctggccacttgtgtgtgccatattggcatc

SEQ ID NO: 141974 - DNA, 1196 bp, Zea mays
  Clone ID: MRT4577_60964C.1
cccacgcgtccgcgaaattctaggtttctgcatattacttatgcttagactcgtgttcatattttttcttggagtagtggttgactgataagggccatatggatatttgaatccaggagctcgctattcatacatcattactatgagcctcgttgagagagcttgaactctaggattcatacaaagtttgtaatttacagggtaaaacgaagtgttccagacatgtttttggtctaaaaatggggacaagatagctcactctttaaggccttagtctagctcctgcgcaagctccacattcttggaacggttccaaagataccctatacgctatatatttgcagttatattgcatactgttcggtaggacaactcatacctctatgattttgctctcattaaaccatgcctgttgtactatgttttgtgaaacttagatcatagttctttcgctccctctcgcagacgcgcctaggtctagctagggtctgggccccgccgcgcgcgcattcacaagcttctagacgttccgaggaggaggggaggtacccgccgccgcagccatggcgtcgaccaaggtccagcgtatcatgacccagcccatcaacctcatcttccggttcctacagagcaaagcgcgcatccagatctggctcttcgagcagaaggacctccggattgagggtcgcattatcggattcgatgagtacatgaacttggtcctcgaagacgctgaggaaatcaacgtcaagaaaaacactaggaaatcactgggccggatactcctcaaaggtgacaatataactttgatgatgaacagtggcaagtgaagattcttatggcaggaacgatgtttggtgctcgcttcgattatctgtgacacaatgtactccatccatccgtccagacttaaatgatgtatcatgtcattgtggtttagtgagagttgtataactacctgaggaaactcacgtgttactatatgctaagatgctgtgacggtgagctattcagtgctcacttgtgttccaaagattagcccgacttgtgtgtgccatgctgacatcttttctggtttcatactcagctttacgtaaagctttgctcagctcacgcttgccttttggaagctgggattgaaaaaaaaaaaaaaaaaagaaaaaaaaaacccccaaaacaaaaccccggccgtttag

SEQ ID NO: 141975 - DNA, 1266 bp, Zea mays
  Clone ID: MRT4577_60965C.1
ctctcggctgcccaccaccgcagacaagtctagtcctctccctccccttaacatagcgccgccactcgcgcccaccacgccgccgcaccgccgctggtgaacggatccgtccatcccgtacaccgcccaactcggcgtcgctgttccagtacccgccgccgcgggccgcgtcgggcgtcgccgtgcgcaagaagtgcctgcagatgggtgccggcgccgggcgcatcggcggctgggtggagtccatgcgcgcgtcctcgcccacccatgccaaggcggccaccgcgctcgccgcgggcgtcgaagaggagcggtacaccgcgtggatggtgaagcacccatcggcgctggccatgtttgaccagctggtggcggcgtccaaggggaagcagatcgtcgtgttcctcgactacgacggcacgctgtcccccatcgtcaacgaccccgacgccgcctacatgtccgacacggtggctggatccgacggcaaaggcaagcatcccctgcccgctgccattccaaccatccgagcatcctgctcagctcagggcgaaacaaggcaaccctcctccctcactgccccctcgcagacgagacgcgtggtagctagggttttggcctcgccgcgcacgcctcctgaagcttctagacgttcgaggaggaggaggggaggctcccgccgccgccgccgcagccatggcgtccaccaaggtgcagcgtatcatgacccagcccatcaacctcatcttccgtttcctccagagcaaagcgcgcatccagatctggctcttcgagcagaaggacctccggattgagggtcgcatcatctttgttacacttgcagggattcgatgagtacatgaacttggtcctcgaagatgctgaggaaatcaacgtcaagaaaaacactaggaagacactgggccggatactcctcaaaggtgacaacataactttgatgatgaacagtggcaagtgaaagttcttatggcaggaacgatgtttggtgctcgcgttgagtgtttctggcacgttgtactccatccattcagacttacatgtacctgctgttaatgacctgagtaaaattatgctagatgctggccacttgtgtgtgccatattggcatcttttctgtttccatgttcagcttgacctgaagttttgctctgccctctactctccgcgctaacttggcgggatcaaatcaacatgagatgtgctgaattatcaaaaaaacaaaaaaaaaaaaaaaaaaggccccta

SEQ ID NO: 141976 - DNA, 757 bp, Zea mays
  unsure (1)..(757): unsure at all n locations
  Clone ID: MRT4577_60966C.1
gatacgacaccctcctcctccggttctcctcgcaccttctcccacctctgctctgctctgctctgctctcccaggccaggccctgcagctgcaagcaccgaggacagacagagtcgctcgcttcgccaccactagctgttgcttgcctgccacccaaggatttccttccatcgagatcaagtagcgtagcggcttgcctgaccaagaggcagagctctcgatgacgaagcagggcatggtggtgccggtgcctgaagcggccgtggcggtaccgcccaactcggcgccgctgttccagtacccgccgccgcgggccgcgccgggcgtcgccgtgcgcaagaagtgcctgcagatgggcgccggcgccgggcgcatcggcggctgggtggagtccatgcgcgcgtcctcgcccacccacgccaaggcggccgccgcgctcgccgcgggcgtcgaagaggagcggtacgccgcgtggatggtgcgtccgcgtccgccccctgcattatcgctgtccgtgccgatatcgtcgcgcgtcccccctgatgatggatccgaatccgatcgtgcaggtgaaacacccgtcggcgctggccatgttcgaccagctggtagcggcgtccaaggggaagcagatcgtcgtgttcctcgactacgacggcacgctgtcccccatcgtcgacgaccccgacgccgcctacatgtccgacacgatgcggcgggcggtgcggaacgtcncccagcacttcccgacggcgat

SEQ ID NO: 141977 - DNA, 335 bp, Zea mays
  Clone ID: MRT4577_60967C.1
tgtcaaacagcacgctaagtctacatcttgctgcacggactgctactgataggagagttgactggattcagactctggtatgccacagcatgaggtcatgtttgatgaatcgggaacgcagcatatcttggagaactctgcttcaactgcctgctcggcgatctggacgtatagaggttcacgcatgtgctggcctccctatacccttgcaagcatgtgataaaaacttgggctggatatagctgcatgattttgatttggctaggtaagcgaaatctgtgctggactgcggaccgatagcctatgatagtactggcgcacgtagttcattactt

SEQ ID NO: 141978 - DNA, 638 bp, Zea mays
  unsure (1)..(638): unsure at all n locations
  Clone ID: MRT4577_60968C.1
ttcccggtcgacccagcttttcgacttacatgatggnaatttgattatccataataaattggtaattccatagcatcacacatctttcaaatatgtgcatgcaactctaaaatttttcgtcaaaacagcatcttgttgactttgggaattgggaaagtggccggtgaccatgngaaaatgcanngaagttgaagtaaattttgacgacgacnnagggctatcaaaaaatcatacagcagtcacatcaaaagattaaagagaaaaatccaagagcattcaaaatttaggcgctagtttaaacagtgaaccattgttatcaatcagatgactccatatcgaaaccatgtaatggtctgctcaatctcatgttgcacacttgagcctcttgcttaatttttttcccgaacaacataggagaactgtgtcatttcagtgagagataaaatacaaagggaggggcaaagtcatcccctcccaaacacccctcactcacactcacacaccaggcttttaggctaacagacacaccactttacagatagtaacaaccaggagtagtctaagacgctngaaggaaaagcctcttgcttgattgaatccagcattcagggcagatggttacagaagtgaggttatcg

SEQ ID NO: 141979 - DNA, 643 bp, Zea mays
  Clone ID: MRT4577_60969C.1
ggaacacaagtgagcactgaatagctcaccgtcacagcatcttagcatatagtaacacgtgagtttcctcaggtagttatacaactctcactaaaccacaatgacatgatacatcatttaagtctggacggatggatggagtacattgtgtcacagataatcgaagcgagcaccaaacatcgttcctgccataagaatcttcacttgccactgttcatcatcaaagttatattgtcacctttgaggagtatccggccaagtgatttcctagtgtttttcttgacgttgatttcctcagcgtcttcgaggaccaagttcatgtactcatcgaatccttttgtcactatctccaaacacaatttcttgtgcttcttgagttagttgcaaggaatgaaacatgtcttcctccccggtcatgtgatttatacatccactgtcaagcacccaacttgacccaccagaggagtagacgataatgcgaccctcaatccggaggtccttctgctcgaagagccagatctggatgcgcgcttttgctctgtaggaaccggaagatgaggttgatgggctgggtcatgatacgctggaccttagtcgacgccatggctgcggcggcgggtacctcccctcctcctcggaacgg

SEQ ID NO: 141980 - DNA, 1329 bp, Zea mays
  unsure (1)..(1329): unsure at all n locations
  Clone ID: MRT4577_6096C.1
tagtttctacaacatgagtttgtgaacataagcaaaccgcatgctgaacgtttaattggggagatgggacctgatttcagtcaaaaaatggcagttaagagccttacttctcagcaattagttcgaatacatcaattatgtaggcaggctaagttcgatgatcccagcggcaattgtcttagtcctgcgggtgaatataatttacgcctgggtatcataaaagagttgcaccctgatatggttgcgacacatgcaagcagccctcaggtttttgaaggtcacccatttattgttgaagctgggataagcattggtggaaaagatgttaaacaaggtctaaatatttttaggtttgcaaacagaataccacttctctttgaacaaggtgctgatgtcatcacaagaactgctgcaaaaaggatctcttggagcagctacaaaatcaatcaacagcaagataagattggtgtctttgtgagcattgtaagtacaaagatacctttcaaaggaaccggaaaggagtacattggggatgacataactgaaatatcatctgctgttaagtcagccctgaagcagtgctgtcttcaactgaagtctaagattgtgaagaaacttcaggctcgtgagcggcaggacaggaaaaggaacctgaacagatatattcctgatgttgcaagagcggttatggaaactctagtagaaattgcagatcaatctcccccaaaacggccacgttatgataaggaagatgaggaactccttgagaaggtaaattctcaggaggtaacggagatgacatttagagactgcttgactcagcatgttgaacaggtcgactatgaaatggcgctggactacgtcatgcagagtggagtaagcgaggagccccgagaagcaatatatttgaactcacttgaaggatcttataagtttgtgacttacagagtccagtcttcgtgttcagatttgttcattgagaagtgaaacttacagttgtacacgtccatcgataccaagttcccatagtacctgggatggaaactgtccatgaattatattgatgttgtacctgaattttatgcttaggctgttgtgactgagctgntcatgtagcatnagcattagtacattacaagttgctaagtagcttgnnnnnnnnattcctctgtatgttgcttttagggagaaaataatatttattacatgtaattcaaactgcattgggtccaaaagttcagtactcatgagtcagaacttgagacattagctatataattctgaaggagaaaatataaaagttgatgcggctgcttgccacatgctgtc

SEQ ID NO: 141981 - DNA, 321 bp, Zea mays
  Clone ID: MRT4577_60970C.1
ccccctttctcttttttttttttttttttttttttttctttttttttttttttttgcaaaagaaacattacccaagctgacttgaagccagggcaagccgatgatggacaactatgggaatctgttttttagtgtaaagcaggcgcctttggtggctggaacgggtgaccacccaaaaacctttcggaccagaggcataaccacccgctaggggcgccaacgaggagcgttatcctttatgccacaccacgggaaaagtcaatccagttcgcgtgggcagggaaagtgagaaattttagaacatgggctgacggccctttt

SEQ ID NO: 141982 - DNA, 1170 bp, Zea mays
  Clone ID: MRT4577_60971C.1
ccggaagcgaattcaaaattctaagacataggtttcattatgcggggcgtagcgaaagcattcaaccttctaggactaagcctaaggcctatggtccctcaaaaaagagagatcaatcgttccttactttactgcaagaaagaacacattgaaagctacaagcccttacaccagggatgaagtagctgcttcgataggaccagggacactaccagactgagttgagtctgacactagggaacttggattcatagtacgtgctctacgcgatacacagacagatagaatagccggagtacggtaggaatggactgctgccaagcgagtggatttatgaacgagccattcatttcatttaagtagaaccgccccttctacgccgcctacttacttaataatcaattgctcgagcacttatttatctttatttcaagtaatttactgtctgcttcgactgccctcaattcattgattcgtattgctttcactactcctactgatgacttcgtgactttcctccttctaggtgcttcaactcgcagacgcgtctaggtctagctagggtctggtctcgctgccccgccgcgcgcgcattcacaggcttctagacgttccgaggaggaggggaggtacccgccgccgcagccatggcgtcgaccaaggtccagcgtattatgacccagcccatcaacctcatcttccggttcctacagagcaaagcgcgcatccagatctggctattcgagcagaaggacctccggattgagggtcgcattatcggattcgatgagtacatgaacttggtcctcgaagacgctgaggaaatcaacgtcaagaaaaacactaggaaatcactgggccggatactcctcaaaggtgacaatataactttgatgatgaacagtggcaagtgaagattcttatggcaggaacgatgtttggtgctcgcttcgattatctgtgacacaatgtactccatccatccgtccagacttaaatgatgtatcatgtcattgtggtttagtgagagttgtataactacctgaggaaactcacgtgttactatatgctaagatgctgtgacggtgagctattcagtgctcacttgtgttccaaaaaaaaaaaaaaaaagacaaaaaaaaaaaaaactcgagactattctcctcgtgc

SEQ ID NO: 141983 - DNA, 1511 bp, Zea mays
  Clone ID: MRT4577_60972C.1
ccggccgggaaaggaagcatcccctgcccgccgccattccaaccatccgagcatcctgctcagctcagggcgaaacaaaaccctcctccctaactgccccctcgcagacgagacgcgtgtagctagggttttggcctcgccgcgcacgcctcctgaagcttctagacgttcgaggaggaggagaggctcccgccgccgccgcagccatggcgtccaccaaggtgcagcgtatcatgacccagcccatcaacctcatcttccgtttcctccagagcaaagcgcgcatccagatctggctcttcgagcagaaggacctccggattgagggtcgcatcatcggattcgatgagtacatgaacttggtcctcgaagatgctgaggaaatcaacgtcaagaaaaacactaggaagacactgggccggatactcctcaaaggtatccgagtcctgctgctcccggccgggccgagcatcctgctccctcgagccggaagggagggccggccgggagggcgaaacaaaaccctcctccctcactgccccctcgcagacgagacgcgtggtagctagggttttggcctcgccgcgcacgcctcctgaagcttctagacgttcgaggaggaggaggggaggctcccgccgccgccgccgcagccatggcgtccaccaaggtgcagcgtatcatgacccagcccatcaacctcatcttccgtttcctccagagcaaagcgcgcatccagatctggctcttcgagcagaaggacctccggattgagggtcgcatcatcggattcgatgagtacatgaacttggtcctcgaagatgctgaggaaatcaacgtcaagaaaaacactaggaagacactgggccggatactcctcaaaggtgacaacataactttgatgatgaacagtggcaagtgaaagttcttatggcaggaacgatgtttggtgctcgcgttgagtatttctggcacgttgtactccatccattcagacttacatgtacctgctgttaatgacctgagtaaaattatgctagatgctggccacttgtgtgtgccatattggcatcttttctgtttccatgttcagcttgacctgaagttttgctctgccctctactctccgcgctaacttggcgggatcaaatcaacatgagatgtgctgaattatcaatgccgcttggttcaaggcgagcgaccctgtgaaaaacactaggaaataactaggccggatactcctcaaaggtgacaatataactttgatgatgaacagtggcaagtgaagattcttatggcaggaacgatgtttggtgctcgcttcgattatctgtgacacaatgtactccatccatccgtccagacttaaatgatgtatcatgtcattgtggtttagtgagagttgtataactacctgaggaaactcacgtgttactatatgctaagatgctgtgacggtgagctattcagtgctcacttgtgttccaaaggttaaaaaaaaaaaaaaaaaa

SEQ ID NO: 141984 - DNA, 2250 bp, Zea mays
  unsure (1)..(2250): unsure at all n locations
  Clone ID: MRT4577_60973C.1
tcgagccggcaaccacaacatcnntcacgtgctcaggcgtcgtctacaacgccgcccgcactacccccagcgcatagcacactactcgcagaaacaccgatggcccctgccattgcccagcagcagccgcaggtgcagccgatcggtgtcggtggtcgaaaggtggtggacgaggtttccggttggattctcgaggccggctacgcgcggcaccccgcctcccaaccaaacagcccccgcggttgagtccgtcggggccgggggccccgcgggggccggattacaaccgaccaacgcgctttgcaacgcctccgctgcaatcagcccccgcggcgagcttgccctgcccctgagtgctagttctcgccgttacgtaaggcttcttggccttgcgtcctccgtctttcgttgctgatacatcgaggtattaaagaagctgcctggttccgggcagcagaggtcgccgccgcctgcagcaatggccgacttctcctggctcacggtgcttggcttcctattcctcaccttcaactcaggcatggcgatttatcggtccaacggtgacgccggctccgtcgctttcgtcgtggtatcttatctcgacctggtggccctgttcgcctgcttgcgctactacgagcagttggatcagcagcactcccaaaagcgcgcgagggtcaaggctggggtttggagcctcacgaccctccttactatcatgttcagttacaaggtggctgagattatgcccctgccagtcaaacttgttgtctggtcgatggcagccgctaccacctgtggcggcttctacgctttcttcgtccacagcgagaagcctgtcatgccagcggcggcgccacggcccgccgcggccaaggatgcagcctccaactaggttcgtttgccaccacaaggcgcatactgccggccttggttcggcaccgcgcgttagatcccagggccaactaggttgttctctaattcctaatttcttggccttttctcttccactctccgccattttagctgtcgcctcggttgttttagcttgccggcgtggacagactggcagatctggagctcggcgcgaccagatccggtgctgctgtgcccgatggcagaggagatctctctggtttactctgctaagagtcaaagaggagctgatgacgacaactaagcttgggttaccgataattgagcctgttctctgcacgagaagaaatttccggcctcacctagtactaataagtatgctggatagtcccccagcacgggagttaattgtatcaagagaagtggagaccaagggcagagtagaactacagaggatatctttgtatatggaggctacatgtgaacaagaaaggagaggaggaagactgtagatctgaagaacctaaggagaaacaatcagagtacttgctggaacacatatatcttccatgataaaagttagatttcttgtttggtgctcatgcatgggttccatatgttcttcccgtcttattagaacatatctattggactaccatgcataaaaagccgtcgtttcataaactattgggactatacggcaccaatgaagctattgatgctggccggcaagctgacagcgaggtgaaagcttttcaaaacgatattccgagtggaagagaaaagaaaataaaagaaatagcaggttattttagaaaaaaaatagttggcccatatgtaacgcgcggtagctttaagattattatctccagcagcttattcatatattatacatatattcaaatttcactctgtgaatagtagtctagaatacagtagtgttttgagtaaactatggataaactgctggacaaggtctaagacaagtgctgcgtggtggcaacaaacgacacttagtcttgtttggtggcaatgacattggaggggctaaagttttttcgctcctaaacaagctcctaagaatcttacgtgttatgttgcattatggaatatctatgtatctgcaaactctctgtagtatgtatgtacctcggatgtgctctatgtggctttgtaattttgaacggaggaagtaataataagataaatggatggcgtaacaagatactttgctttgtgcaaaaaaaaaaaaaaaaaaggcccctagggcaannnnnnnnnnnnnnnnnnnnnntccnnnnnnnnnnnnnnnnnnnnnnnnnnnnnnnnnnnnnnnnnnnnnnnnnnnnnnnnnnnnnnnnnnnnnnnnnnnnn

SEQ ID NO: 141985 - DNA, 218 bp, Zea mays
  Clone ID: MRT4577_60974C.1
cgaatatcttaatgtcgtaataaaggggttattcgtccaccgtacacgtgggcggtggttgcgggttacggctgtggaggaggtggcgtaagcggtcgccagatatgttagagcctacgtgcctgtggatatggctgcggcggaggcagggaccgactgcgaggagaagaagccgagcgcgttacggagctcgattctgcttgacacgggcggtgagg

SEQ ID NO: 141986 - DNA, 1848 bp, Zea mays
  Clone ID: MRT4577_60975C.1
ctcgaggccggccgggatgccctcagccccggccctaccttttccttccgcttccctcccacccaccccacaccgcaagcggccgggaccaaacactaggatctagtggtccaaacaaccaaacagccgctatatagcggactaggggctcgttggagagaaaacttattacaaccgaccaacgcgctttgtaacgcctccgctgcaatcagcccccgcggcgagcttgccctgcccctgagtgctagttctcgccgttacgtaaggcttcttggccttgcgtcctccgtctttcgttgctgatacatcgaggtattaaagaagctgcctggttccgggcagcagaggtcgccgccgcctgcagcaatggccgacttctcctggctcacggtgcttggcttcctattcctcaccttcaactcaggcatggcgatttatcggtccaacggtgacgccggctccgtcgctttcgtcgtggtatcttatctcgacctggtggccctgttcgcctgcttgcgctactacgagcagttggatcagcagcactcccaaaagcgcgcgagggtcaaggctggggtttggagcctcacgaccctccttactatcatgttcagttacaaggtggctgagattatgcccctgccagtcaaacttgttgtctggtcgatggcagccgctaccacctgtggcggcttctacgctttcttcgtccacagcgagaagcctgtcatgccagcggtggcgccacggcccgccgcggccaaggatgcagcctccaactaggttcgtttgccaccacaaggcgcatactgccggccttggttcggcaccgcgcgttagatcccatatgtaacgcgcggtagctttaagattattatgtccagcagcttattcatatattatacatatattcaaatttcactctgtgaatagtagtctaaaatacagtagtgttttgagtaaactatggataaactgctggacaaggtctaagataagtgctgcgtggtggcaacaaacgacacttagtcttgtttggtggcaatgatattggaggggctaaagttttttcgctcctaaacaagctcctaaacaagctcctaagaatcttacgtgttatgttgcattatggaatatctatgtatctgcaaactctctgtagtctgtatgtacctcggatgtgctctatgtggctttgtaattctgaacggaggaagtaataataagataaatggatggcgtaacaagataagttgctttgtgcaatttgtgtttccatactccggtgcattattgtgcccctgtacaggacaaaaccgtcgggcgacatgcatccatctcctgtccgcgctcaggcgtcgtctacaacgccgcccgcactacccccatcgcgtagcacactactcgcagaaacaccgatggcccctgccattgcccagcagcagccgcaggtgcaactgatcggtgtcggtggtcgaaaggtggtggacgaggtttccggctggctgcgcgtgctggacgacggcagcgtggaccgcacgtggaccggcccgctcgaggccctcccgctgatggagccggtggcgccgtacgcgcagccacgagacgggcacacgctgcacgacctgcccggcgagcccaacctgcgcgtgtacctccccgaaagtggaggcgggcggcgcgcgcctgcccgtcgtcctgcacctccacggcggcggcttctgcatctcgcacccgtgctgcctcattgaccatctgttatacgcgcgctctttgcgcccctgacgaatcgtaatgttgtcaagagacagatggtattttaaagacagttcaataagcgacacatat

SEQ ID NO: 141987 - DNA, 210 bp, Zea mays
  Clone ID: MRT4577_60976C.1
cgagcggccgcccgggcaggtacattggggtgggaacatcttctgatcaaacataggtggaacatatgggcctgtcttttgtttgagaggatggaggatctaggttaggacatctagccttagcttgtttggttgatgagaagagagaccaatttatatttgtgccagaggcattttggggcttgagatggagatcgaaaaaatgggtta

SEQ ID NO: 141988 - DNA, 892 bp, Zea mays
  unsure (1)..(892): unsure at all n locations
  Clone ID: MRT4577_60977C.1
accaaacagccgctatatagcggactaggggctcgttgacctcgagcaactgattacaaccgaccaacgcgctttgcaacgcctccgctgcaatcagcccccgcggcgagcttgccctgcccctgattgctagttctcgccgttacgtaaggcttcttggccttgcgtcctccgtctttcgttgctgatacatcgaggcatggcgatttatcggtccaacggtgacgccggctccgtcgctttcgtcgtggtatcttatctcgacctggtggccctgttcgcctgcttgcgctactacgagcagttggatcagcagcactcccaaaagcgcgcgagggtcaaggctggggtttggagcctcacgaccctccttactatcatgttcagttacaaggtggctgagattatgcccctgccagtcaaacttgttgtctggtcgatggcagccgctaccacctgtggcggcttctacgctttcttcgtccacagcgagaagcctgtcatgccagcggtggcgccacggcccgccgcggccaaggatgcagcctccaactaggttcgtttgccaccacaaggcgcatactgccggccttggttcggcaccgcgcgttagatcccagggccaactaggttgttctctaattcctaatttcttggccttttctcttccactctccgccattttagctgtcngcctcggttgttttagcttgccggcgtggacagactgcannatcctggaggtcggtgcgaccagatccggtgctgctgtgcccgatgggcagagagatctctctggttactctgctaagagcnaaagaggagctggtgacgacacctaagcttgggttaccgataattgagcctggtctctgcacgaagaagaaatttc

SEQ ID NO: 141989 - DNA, 639 bp, Zea mays
  unsure (1)..(639): unsure at all n locations
  Clone ID: MRT4577_60978C.1
ctcctcctcgccaggaaaagagctgctgccaagacaccaccctcagctgcggcggctaccagaagcaaagctccagaagcttctctggcctcggcaacggcctccacgccgcgggtgtagttcgcgatctagatctcagaaccagtagtgatcgggaagataaaaaggacaggtcggagatgagtgtggtggggtttgatcttggcaatgagagctgcattgtgggggtggcgcggcagcgcggaatcgacgtggtcctcaatgaagagtccaagcgggagaccccagctattgtctgctttggcgacaagcagcgtttcatcggcactgcaggtgccgccaactccaccatgaaccccaagaactccatctcccagatcaagcgcttactgggacgcaagtttgctgatcctgagctgcagaatgatattaaggccttcccattcggtgtctcggagggccctgatgggttcccgcttgttcacgtacggtatctgngggaggagcgctcgttcacccccacacagctgcttgccatggtgctgtccattttgaaggccatcgctgaggggtacctcaactcggctgttattgactgcttgattggcatcccaagcctattttactgacctgccgcgg

SEQ ID NO: 141990 - DNA, 2111 bp, Zea mays
  Clone ID: MRT4577_60979C.1
ctcgaggcggccgggaaaaaaattacaaaattacaaccgaccaacgcgctttgcaacgcctccgctgcaatcagcccccgcggcgagattgccctgcccctgagtgctagttctcgccgttacgtaaggtaagctcctctccatcttatttttttcttctcttccccattcatatcggcagatgagcgacgggttctgatccctttcgaaaaacaggcttcttggccttgcgtcctccgtctttcgttgctgatacatcgaggtattaaagaagctgcctggttccgggcagcagaggtcgccgccgcctgcagcaatggccgacttctcctggctcacggtgcttggcttcctattcctcaccttcaactcaggcatggcgatttatcggtccaacggtgacgccggctccgtcgctttcgtcgtggtatcttatctcgacctggtggccctgttcgcctgcttgcgctactacgagcagttggatcagcagcactcccaaaagcgcgcgagggtcaaggctggggtttggagcctcacgaccctccttactattatgtctcagttacaagggggcctgagattatgcccctgccagacaaacttgttgtctggtcgatggcagccgctaccacctgtggcggcttctacgctgtgtttgaacacagcgagaagcctgagatgccagcggtggcgccacggcccgccgcggccaaggatgcagcctccaactaggttcgtttgccaccacaaggcgcatactgccggccttggttcggcaccgcgcgttagatcccagggcccaactaggttgttctctaattcctaatttcttggccttttctcttccactctccgccattttagctgtcgcctcggttgttttagcttgccggcgtggacagactggcagatctggagctcggcgcgaccagatccggtgctgctgtgcccgatggcagaggagatctctctggtttactctgctaagagtcaaagaggagctgatgacgacaactaagcttgggttaccgataattgagcctgttctctgcacgagaagaaatttccggcctcacctagtactaataagggcatgtttgggtaatttcggattggagtggattaggctggtatgaggtgtattgaagtgtaatatgaactaatttttctctcaatccctttaaaacactacaatccactccaatccctccttacccaaacaaagcctaagtatgctggatagtcccccagcacgggagttaattgtatcaagagaagtggagaccaagggcagagtagaactacagaggatatctttgtatatggaggctacatgtgaacaagaaaggagaggaggaagactgtagatctgaagaacctaaggagaaacaatcagagtacttgctggaacacatatatcttccatgataaaagttagatttcttgtttggtgctcatgcatgggttccatatgttcttcccgtcttattagaacatatctattggactaccatgcataaaaagccgtcgtttcataaactattgggactatacggcaccaatgaagctattgatgctggccggcaagctgacagcgaggtgaaagcttttcaaaacgatattccgagtggaagagaaaagaaaataaaagaaatagcaggttattttagaaaaaaatagttggcccatatgtaacgcgcggtagctttaagattattatgtccagcagcttattcatatattatacatatattcaaatttcactctgtgaatagtagtctaaaatacagtagtgttttgagtaaactatggataaactgctggacaaggtctaagataagtgctgcgtggtggcaacaaacgacacttagtcttgtttggtggcaatgatattggaggggctaaagtttttttcgctcctaaacaagctcctaagaatcttacgtgttatgttgcattatggaatatctatgtatctgcaaactctctgtagtctgtatgtacctcggatgtgctctatgtggctttgtaattctgaacggaggaagtaataataagataaatggatggcgtaataagataagttgctttgtgcaatttgtgtttcc

SEQ ID NO: 141991 - DNA, 339 bp, Zea mays
  Clone ID: MRT4577_6097C.1
agagtggccccgaacaaaagatgagctttgggcacgccccttgagagatagtaccgagaccggtgggtaaccaacaccacatcaggggctacctgggcaaccatgaaaggctgccaaggcctatacaggcttggataataataacgctatagacgatgctcctgcctgtaaaagctgcccaacttgaggaggaggaggtagactgacaagacgacagagggaacaggaccagctgggggcctagccaaggatgccacaagctgtggatcattcacccttgcgctggcggaaggcattactgggcctaccactctacccgggctagctccatgattgaca

SEQ ID NO: 141992 - DNA, 439 bp, Zea mays
  Clone ID: MRT4577_60980C.1
gttgcaataagatgttgaattctatcgtttttatttcctacaccagaaagataaaagctaggttccaaaaactacgacagaagaaggataaaaactttgatacatttggtttcaatgaaaacttcaatcgggacaatgagtggactgactcttttcctgtaggcccctgaagttggggcgttgagtgtgaccctacaatagggacctccgtgggattaaagccattggagcctaagagcttttgtgccgaacttccgagaaaagccccaatgtggattcaaaaaaaaatttggtggctgcaataaaaatatggtagatgtgaaaagaaagatgaaaattgtcccgttgataatgcgaaaaatcatagatggtgaagataaacctggtgctatcaatgatagtaagaaaggggaggcactcaatatctcagaagagtttg

SEQ ID NO: 141993 - DNA, 664 bp, Zea mays
  Clone ID: MRT4577_60981C.1
gggtaccctcgggttctgccgggaaaaaaaaaaagttttaggtgttgcgtaccttgcggcgttcctaaaccctgagttccacgaacccttcatgccatcacaaccatcgccagtggggtgaaattgggagagagggagaagaggtcgccgccgcaccgattccttggatcaccgtcgtctggactaccagaaaggtgcgattggctagcgcggtggtgcgtagattgtctgtgagccaacctcttggcgcggggtcatcgggactccactaaattcgtcgccggaatatcctacgctactaccccgggcgggcggatgtggacaacccacctggacacccatatggctgatgagtcggctactgaggatccaggggttcagcaggtggagactgctgagcaggagctcgttaaaggtcgctcacttttgtcccgttgcgcccggcgccacatgctctcacatcacatgtggctgcctgcaaaagaacgctgcttctgctcgtccgtcgactagcgcacggttacttggaagttggaacgcgcgcgaccaggaccgtgagcgcctagtcccctcccacaggtacgggatcggacgcatgacgccatcacacgcaccacagtgcaaccgctagctgtcgtcaggcatggcgatgaggaggctcatt

SEQ ID NO: 141994 - DNA, 660 bp, Zea mays
  Clone ID: MRT4577_60982C.1
atcattcccaaggatctccttgtccttcgtcttggctccacaacaccacaactgatactagtaagtaagaaaataatggctccggtgaaggtgtacgggttgcccatgaacggaagtgtggcacgcgttctggtatgcctagaggaagtgggagccgagtatgaggtcgtggctgtcgacctacacaccggtgagcacaagagactgccgcatcttgctcgtaatcccttcggccaggtccctgcgttccaggatggagacctgatccttttcgaatcacgggcaatctcaaagtatatactccgaaaagaatcatcagatttactgagggaaaacaacctctctgagtctgcaatggttgatgtgtggcttgacgtcgaatcccagaaatttgacagcgtcatgctgccaatcatctttcaagggcttgtcatcccggtttacatgggtgggactagcgatcttaaagttcttgaagaaaacctagaaaaactgaaggaaatcatggaagtctatgaggaacgcttgtccaagtccaagtacttggcaggagatttcatcagcttagcggacattagccatttcccaatggttcacctattgcatgaaactccatatgcatcggtgctcgatgcatatccacatgtgaaagcatggatt

SEQ ID NO: 141995 - DNA, 542 bp, Zea mays
  unsure (1)..(542): unsure at all n locations
  Clone ID: MRT4577_60983C.1
gacgaggcggcgcactagggcgaggntnnttgactctacttcaatcctcttttctcaacctcnaaatccctagtactatgatacacatctaccttctcncaacctgatgtgggatgaattttgacctgtgggttgaataagtgaagtggatgagtcatatggtggaggagacagtgtgtaggagcagcctgtttatgtggccgtagtggatctcgcatgttccgaagagttcctggaactcatcaagagtgcacttcttacagccctagaagcctgtttgtgagcttggtattcctcctgaaaacatcactgcaaaccaattgttatttggcacattgggggagtacgctggatttgatcccacagagcccacttgacgcaacgggggtaaagcaatagctgtgcagctgataaaataggaccatggcttccagacaattgttacaattggtgatggcgcaactgatctggaggcttggcatcctgtcggatcacactgtgtgccctctgagcttgtggtgggaggcgggtcattctgttcg

SEQ ID NO: 141996 - DNA, 205 bp, Zea mays
  Clone ID: MRT4577_60984C.1
acggcaagagcggagagtgactgttcacgatgacaatagggaacttaagctgctagtactggcttgggcatcagctgaagttacatgagcggaaaccgtgagttggagagacactttacgggtggtgctaatgcatcctgaaccagtataactgtctacatgtagctcaaactacagtattggacttgctaaagattggagctcc

SEQ ID NO: 141997 - DNA, 271 bp, Zea mays
  Clone ID: MRT4577_60985C.1
gaagtttaaggaagtgggagaggcctttaccatcctctctgatcctaagaaaaagactcgttatgacagtggacaggatctggatgaggagggcatgaatatgggcgattttgatgcaaacaacatcttcaaggcattctttggtggtcctgggggcttcagctttgaagcatctggcccaggaaatttctactttcagtttggctaatgaaggtcaactacttagaccccagaaaatgcagacttggtttacccatgagtgtggacagtt

SEQ ID NO: 141998 - DNA, 542 bp, Zea mays
  Clone ID: MRT4577_60986C.1
actcctgcagtagccgcacttgatggagcttggtcatgttcttcttcatgcgaccgccgccagtgaacgtgcacgagataactgcctgcttgtggcgacgattctctgatggaagtctttcacatgctcaccatgcaccggcacctacgcagctgcctctgccgactcccgctatcatacagcactcctcttgtacgaggatcgagaagcaccccttggctgtttcactccatacacacttcattgtcctggaaaaggttggtctagcccaagagccaccctactcccttctcctgaaacgtcatcgtcaactgcttcataagagtagggaagagcgttgctgtcctggagcctatggcaggtggtgccactacatggacgaaaatgaggcgttattccctggttgatctaggtcggagagggctgctgcgactgatacttggtgctgtgcctctcccagtcagtatgctctgcgcggcgcctctggttcatctttaccaacagaagaaccagacgccgactgctaagactgctgctgccac

SEQ ID NO: 141999 - DNA, 249 bp, Zea mays
  unsure (1)..(249): unsure at all n locations
  Clone ID: MRT4577_60987C.1
ggcactagaaacaacttggactaaaacaggagctgacactggccatgacaacaacgaaaaaacacaatatacttactatccaatccaaacaaaagggggggccgagggggttccctccttttngaaancanccaancccccccaaaacagagggagaggcgaccaaaaaccccccggaaacaagnngnacaacaaaccacggccgacaagaaacaccacncggggggaggaaacacgacccccccaggg

SEQ ID NO: 142000 - DNA, 546 bp, Zea mays
  Clone ID: MRT4577_60988C.1
gcgcccttctctcgagttttttttttttttttttttttttttttttttttttttttttttttttttttttttttttttttttttttttttttttttttttttttttttggggaaaaagcaaaccccctcccacaatttttttgggtcccaaaaaaaaaccataaaacctttccccgggcgggaaaaaaaattttttttggtaccatggccttttgggccccgggcaaacccttgttggaaaccccaagggctggccccgggggggggggcccccaaaacccaaggtttaaggtttgggcccccggggccccgcccggtttcgttttttttcaccgggggttttttgtcccgaaaaaggaaatccggcaagggctggggaaacctggttaggccccaaagaaaaccttccaggtttggaaacccctggggaggggggaaaaacaaaggccccagcggcggcgggttggattcgaatccttttccccccccgggggggttttgggcagggacccctaaccaaggggcccccttctttttttttcttta

SEQ ID NO: 142001 - DNA, 921 bp, Zea mays
  Clone ID: MRT4577_60989C.1
acacagacacatccaacgagcccgaccgccagagctcgccgccgtcctccgcagacaatccaccatggcgatggtgctggggatggtgctggggaagatcccggtggagacgcccaagcacgaggtcctccacaccggcgccggctacgagatccgcaagtacccgcccagcatcgccgcggagttgacctacgatcccaaggagatgagaggagaccctgatggcgggttcaccgtcctcgccaactacatcggggtcctcggaaagccgcagaacaccaagcccgagaagatcgccatgacggctcccgtcatcaccaccgagcccatcgcgatgaccgcgccggtgattacggacgaccagcaggcgccgggcaaggtgacaatgcagttcctgctgccgtccaagtacaccagggtggaggaggcgccgcggccgacggacgagcgggtggtgatccgcgaggtgccggagaggaagttcggcgtggcgaggttcagcggggtggccacggacaggacggtgagggagaaggcgaagggacttaaggccgccctggagaaggacgggtacaccatcaaggtcccgttcgtgctggcgcggtacaacccgtcgttcacgctcccgccgctgcgcaccaacgaggtcatgttccccgtcgagtgatccggcaaggcgccggccaccgcccagctaccggccgcggttcttctgtgaaatgacggcttgaggttcaggaggaactgtgtttgtattttgtatctgtatttctcttgaagttgttgtagaatatgctttatgcaacgagttatggataaattttactactcttcgatcaatgaagaactaaaccctggtgtggatccgtatttcagacagtttttagttataaggtataaagcaatttacatttatattat

SEQ ID NO: 142002 - DNA, 496 bp, Zea mays
  Clone ID: MRT4577_6098C.1
ttgggtacctcgaggccggccggggatcttttttccacagaacgagattgctttctcccctattttcgccttttacttctctcccctatcttacaggtgcttgctccgctataccttcaggacgacacgctcgagggaatgcctccggaagccatgcgatccatacaagcatcgaccgtctaaagggaggaagtccagtttatggactagcaactgcgatgcccgctgatggaacaacgactctggcctcaacgattgacagagaggatgaagcctccttgacgatcatcatcgaaactgaaagtttgataaactcgacacatagatgatctgtgaacctggaacgcatggacatcgatgcagtgacgactgttacctagaggcaactcatgatgcctgacaacttacttgtggtgaatgtctacgcgctcctgaagttcagacacgtgctatagaccattgctcatacagatgggtgagatatggcaagatctga

SEQ ID NO: 142003 - DNA, 266 bp, Zea mays
  Clone ID: MRT4577_60990C.1
tggctgctgtgctcaacaggaccaacatgcgcaattgtgggaccgcacgggctggtggaggtgccgctgctggcttaggctgcttacgcgacgatcacctaattccaggtcgggtcggagtttgccccctgtatgacgctcgccacgtactgggccatatctctccagctctagccctgccgctgcgagcttagcctcaacagctgctgatggcccaccgcagtaccgccaggcggttctgccgcgtgactacatcatcctatggc

SEQ ID NO: 142004 - DNA, 440 bp, Zea mays
  Clone ID: MRT4577_60991C.1
gaacagctgaaaaggcttcaattgagttgactgtattgcaaacagcgatgatgctgcctattggttgctcaaagaattctcagcaaactcactgcaagagaaatttcaaaagcttatgctcaatgacatgaaagagctctcaagaattcaagctaaagttggtctacagatgccactgatgtctccgcttgattctgatgaagaaaagtattctgtggcttctgattctgtttcttcagctgatcatgagaaggttcaacatggtggaaactcatctgactcagagaatattgattgtgatcataccactgaagattttgaatccagtgatactctctcaacgaacagttcatccctgcctccccagcctcaaccacctgtgcctcctcatatggtctcctgatatcgatttatccgaactggagagcttgttctccact

SEQ ID NO: 142005 - DNA, 1051 bp, Zea mays
  Clone ID: MRT4577_60992C.1
ctcacagacagtcacagacacatccaacgagcccgaccgccagagctcgccgccgtcctccgcagacaatccaccatggcgatggtgctggggatggtgctggggaagatcccggtggagacgcccaagcacgaggtcctccacaccggcgccggctatgagatccgcaagtacccgcccagcatcgccgcggagttgacctacgatcccaaggagatgaaaggagaccctgatggcgggttcaccgtcctcgccaactacatcggggtcctcggaaagccgcagaacaccaagcccgagaagatcgccatgacggctcccgtcatcaccaccggcagcggcagcggcggcgacggcgagaagatcgccatgacggcccccgtcatcaccaccggcagcggcagcggcggcgacggcgagaagatcgccatgacggcccccgtcatcaccaccggcggcggcgagcccgagcccgtcgcgatgaccgcgccggtgatcacggacgaccagcaggcgccgggcaaggtgacaatgcagttcctgctgccgtccaagtacaccagggtggaggaggcgccgcggccgacggacgagcgggtggtgatccgcgaggtgccggagaggaagttcggcgtggcgaggttcagcggggtggccacggacaggacggtgagggagaaggcgaagggacttaaggccgccctggagaaggacgggtacaccatcaagggcccgttcgtgctggcgcggtacaacccgccgttcacgctcccgccgctgcgcaccaacgaggtcatgttccccgtcgagtgatccggcaaggcgccggccaccgcccagctaccggccgcggttcttctgtgaagtgacggcttgaggttcaggaggaactgtgtttgtattttgtatctgtatttctcttgaagttgttgtagaatatgctttatgcaacgagttatggataaattttactactcttcgatcaatgaagaactaaaccctggtgtggatccgtatttctaaaaaaaaaaaaaaaaaaaaaaaagcggcc

SEQ ID NO: 142006 - DNA, 1074 bp, Zea mays
  Clone ID: MRT4577_60993C.1
cattgggtacctcgaggccggccgggcaggcaaagcgccactactcacagacagtcacagacacatccaacgagcccgaccgccagagctcgccgccgtcctccgcagacaatccaccatggcgatggtgctgaggatggtgctggggaagatcccggtggagacgcccaagcacgaggtcctccacaccggcgccggctacgagatccgcaagtacccgcccagcatcgccgcggagttgacctacgatcccaaggagatgagaggagaccctgatggcgggttcaccgtcctcgccaactacatcggggtcctcggaaagccgcagaacaccaagcccgagaagatcgccatgacggctcccgtcatcaccaccggcagcggcagcggcggcgacggcgagaagatcgccatgacggcccccgtcatcaccaccggcggcggcgagcccgagcccatcgcgatgaccgcgccggtgattacggacgaccagcaggcgccgggcaaggtgacaatgcagttcctgctgccgtccaagtacaccagggtggaggaggcgccgcggccgacggacgagcgggtggtgatccgcgaggtgccagagaggaagttcggcgtggcgaggttcagcggggtggccacggacaggacggtgagggagaaggcgaagggacttaaggccgccctggagaaggacgggtacaccatcaagggcccgttcgtgctggcgcggtacaacccgtcgttcacgctcccgccgctgcgcaccaacgaggtcatgttccccgtcgagtgatccggcaaggcgccggccaccgcccagctaccggccgcggttcttctgtgaaatgacggcttgaggttcaggaggaactgtgtttgtattttgtatctgtatttctcttgaagttgttgtaaaatatgctttatgcaaggagttatggataaattttactactcttcgatcaatgaagaactaaaccctggtgcggatccgtatttcagacagtttttagttataaggtataaagcaatttacatttatattataaaaaaaaaaaaaaaaaagcggcc

SEQ ID NO: 142007 - DNA, 1038 bp, Zea mays
  Clone ID: MRT4577_60994C.1
ccggccgggctccttcccttcgcgcctaggggcggaaggccgccgtgcccgttcttcccagctgcagcaaccggccagtgcgcgcggttgcgttgcatttgcatctccaagcacctctcaggaaggacggacaacgagatcaagaactactggaacacgcgcttcaagcgccggcagcgcgcgggcctgccgccctacccgccggacgtcgagcggcagatcaagctgctgcgcgcgcagaacgtcaacccgttcgcagacgcagacgccgacgccgctcctctacgacgtcggaaacccgttcgcgttgctctccagcataccgtcactgtcgcagacggcctcgcactcgcactcgccactgatcaaccagaactacccgcttctgaaccagatgcaggtgttccaccacctcggcggcagtcagcagccgtcgttccccacgcgtccaggacggcagcgcggcggctttcggcgacatcgtctcctctcgcctgccgccactgccaaccgccagaacgcaggcggagctacattcgaaccaattcgacacctccagcagcggcgggctgctggatcagtcgatgctgatcggcgacgaacacctgctgcggcccaacccgagtatggtcaaggtctcctccatgcccgcgctctcctaccgtgagccggatgggtccaggatgctgccagcccatggcgccgggagcgacggcgacgtctcctcgctggggcactgccctccgggacaggacctccaccgtggacgaacacgaacgtgcgtacacgcggcacaaacacgatgatcatcgtctcaccatgtggttgcatgcatcgggaaaccaatgcgttttcagcggccgtgaagccggcgaagaggaggacggcgagcgaggtggggttctccgacatgttcgccgtcgcaccgccgggggattggttcggcggcgggtcgacggcgccatcgccggggccgtcatcggccgtcaccgacgaagagtttaacctggagatgcagcagttcatgtcaatgctacc

SEQ ID NO: 142008 - DNA, 1721 bp, Zea mays
  Clone ID: MRT4577_60995C.1
cctcgaggccggccgggccgggctcgacgccgcgcgccacgacgcagcacgcccaagaaaccccgtgtcctcacaaaaaccctgcctgccggagatggccagcggcgaccttctcctccgcgcccacgccggcgccccggtcctagcgagggccttctcctgccgcctcctagtcccggcgaggcgccgcagcggactaatctcacctctggccgcttccaaggtcggcatcgccgacgtcgttgggcgggtcaggtcgggcggcgccgaccagaagaggcgacgcagggatgcgaaggagggatttgggttctccggggtggccacgaggagagaacttatcgacgacgagaaggtggagcaggacgaggaagatgaagctctcaagttgggagtggagaagaatggtggcgagacgggaggtgtggatggctcgtacctcagtgagacacggtttgatcaatgtgctatttcccctttatcgatgaaagccgtcaaagatgctggatatgaaaggatgactgaggtgcaggaggcaactctgcccataattcttcaaggcaaggatgttcttgcaaaggcaaagacaggaactgggaaaacagttgcctttttgcttccagcgattgaggttctctccactctacctcatcagcggggtcagttacggccacctataaatttgctggtgatgtgccctactagggagcttgcaaaccaagtggctgttgaggccaggaagcttctcaggtatcatcgcacgttgggtgtgcaggttgtaattggtggcacaagattaactcaagagcaacgaagcatgcaagctaacccatgtcagattcttgttgctacaccaggaaggcttaaggatcatcttgagaacacacctgggttttctaccaggctcaagggtgtgaaggttcttgttcttgatgaagctgaccgcctgttggatatgggatttagaagagatattgagaaaataattgcttcaattcctagagaacggcaaacactgttattttctgctactgttccagaagaggtccgccaaatttctcatgtggcaatgaagaaagattataggttcattaacactgttaaagagggtgatgaggagacacatgcacaggtgagccagatgtacatggttgcaccactagacttgcatttttctatcctatatgatgtattgaagaaacatgtcgcagaagatgcagactacaaagttattatattctgtactactgcaatggtcaccaaacttgtggctgaagttctctcccagctgaaactgaatataagagagattcattccagaaagtcgcagtctgcaagaactaaggtctcagacgaattcaggaaatcaaaaggtttgatactggtcagttcagacgtatctgcccggggcgttgactatcctgatgtcactcttgtaatacaggttggagttcctgcagatagagagcagtacatacatagactaggccggaccggacggaaaggcaaggaagggcaaggactcctactattggcaccttgggaaaaatattttcttggtgctgttaaggatttgtcaatagcagagtctgctgtaccaccagttgattcaagtgttgagacagaaaaatgcggtcagaaaagtagagatgaagagcaaagaatgtgcctatcaagcatggttagggtactacaactcgaacaagaccattggtcgagat

SEQ ID NO: 142009 - DNA, 1900 bp, Zea mays
  Clone ID: MRT4577_60996C.1
cccacgcgcccgccggcccggccccggccttcccttcgcgcctaggggcggaaggccgccgtgcccgttcttcccagctgcagcaaccggccagtgcgcgcggttgcgttgcatttgcatggctgcgcgctgcgctctgggagcttgcactagcgggtcggcggcctaggcgcggggcatctttcgagtgcgtgcgtgtctgttcaagctctgatcgtctctccggcccattcgccggaggaaactgaccgccgccttctcgctctcgctctctaccctattcccggggctgagaggggaggagagaaggccacgtccacaccataaagcaggacgtacagacacgtgtacgagggggatcacggtcgggtgaggtgactaagctggcggacggaacgacgacgatggcgaggagcggcggcgggatggaaggcagcggcgggctgaagaaggggccgtggacgcaggcggaggacaagctgctgagggaccacgtgcggcggcacggcgagggcaactggaacgccgtgcgccgggagacgaggctgcagcgctgcggcaagagctgccgtctccggtgggccaaccacctccgccccaacctccgcaagtgccccttctcccccgaggaggagcgtcagatccttctcctccacggcctcatcggcaacaagtgggcgcgcatctccaagcacctctcagggaggacggacaacgagatcaagaactactggaacacgcgcttcaagcgccggcagcgcgcgggcctgccgccctacccgccggacgtcgagcggcagatcaagctgctgcgcgcgcagaacgtcaacccgttcgcagacgcagacgccgacgccgcccacgccaacgccagcgccggccttccggcgccgccgctcctctacgacgtcggaaacccgttcgcgttgctctccagcataccgtcactgtcgcagacggcctcgcactcgcactcgccactgatcaaccagaactacccgcttctgaaccagatgcaggtgttccaccacctcggcggcagtcagcagccgtcgttccaccaggacggcagcgcggcggctttcggtgacatcgtctcctctcgcctgccgccactgccaaccgccagaacgcaggcggagctacattcgaaccaattcgacacctccatcagcggcgggctggtggatcagtcgatgctgatcggcgacgaacacctgctgcggcctaacccgagtatggtcaaggtctcctccatgcccgcgctctcctaccgtgagccggatgggtccaggatgctgccagcccatggcgccgggagcgacggcgacgtctcctcgctggggcaatgccctccgggacaggacctccaccgtggtgcgacatgggacttcaccttcgcggccgtgaagccggcgaagaggaggacggcgagcgaggtggggttctccgacatgttcgccgtcgcaccgccgggggattggttcggcggcgggtcgacggcgccatcgccggggccgtcatcggccgtcaccgacgaagagtttaacctggagatgcagcagttcatgtcaatgctaccactgtctgacgagcacggctggaacgcataatgcggccgggtaaaatggaaatcgaaaactgtgtagagcgtgtgtctccttgcttctgcgacgagaatggtgtgcgcattgtttttgtaatgtgcccactcttggatctttatctgttctagacgtcgattgagtttcaaacattgataatgctagggcaccatcggcgtgggataaacaccaaatagtccaagaattcactgcaacaactgctgtgcaccttcgtaaagccaaacatgttcagttttgatatatatatatatttaaagcgacgaacacgaacttgc

SEQ ID NO: 142010 - DNA, 191 bp, Zea mays
  Clone ID: MRT4577_60997C.1
gccagaaacagccacttcccacatggcagcctccaggcggcctctcgtctccgcgaaagccctggcaggcgagacggacacgggcgaccccggtatcagcttgccgcccagattccgtgtgccgatccgcccgcaagagctccgctacacccagaagctgatgaccggcaacaagagccagactcacggag

SEQ ID NO: 142011 - DNA, 978 bp, Zea mays
  unsure (1)..(978): unsure at all n locations
  Clone ID: MRT4577_60998C.1
tgaaaacgcattggtttttttatgcatgcaaccacatggtgagacgatgatgatcgtgtttgtgccgcgtgtacgcacgttcgtgttcgtcctattcgaaggtgaagtcccatgtcgcaccacggtggaggtcctgtcccggagggcagtgccccagcgaggagacgtcgccgtcgctcccggcgccatgggctggcagcatcctggacccatccggctcacggtaggagagcgcgggcatggaggagaccttgaccatactcgggttgggccgcagcaggtgttcgtcgccgatcagcatcgactgatccagcagcccgccgctgctggaggtgtcgaattggttcgaatgtagctccgcctgcgttctggcggttggcagtggcggcaggcgagaggagacgatgtcgccgaaagccgccgcgctgccgtcctggtggaacgacggctgctgactgccgccgaggtggtggaacacctgcatctggttcagaagcgggtagttctggttgatcagtggcgagtgcgagtgcgaggccgtctgcgacagtgacggtatgctggagagcaacgcgaacgggtttccgacgtcgtagaggagcggcggcgccggaaggccggcgctggcgttggcgttggcgttggcgttggcgtgggcggcgtcggcgtctgcgtctgcgaacgggttgacgttctgcgcgcgcagcagcttgatctgccgctcgacgtccggcgggtagggcggcaggcccgcgcgctgccggcgcttgaagcgcgtgttccagtagttcttgatctcgttgtccgtcctccctgagaggtgcttggagatgcgcgcccacttgttgccgatgaggccgtggaggagaaggatctgacgctcctcctcgggggagaaggcgnacttgcggaggttggggcggaggtggttagcccaccggagacggcagctcttgccgcacggacgcgtggccgcac

SEQ ID NO: 142012 - DNA, 116 bp, Zea mays
  Clone ID: MRT4577_60999C.1
gacgatgacctcgaccgcgcccggctgctcgcgctcgagggtctgcgcgcaggccgactcgagcgcatgtgcgacgaagcgctcgcgctggcggttcagcacgacgatgctcaggc

SEQ ID NO: 142013 - DNA, 915 bp, Zea mays
  Clone ID: MRT4577_6099C.1
acaaaaccctcgctcactgacgacgaggtgtccaacctctgctccgaattcctcaccgcaggcaccgacacgacgtccaccgcgctgcagtggatcatggccgagctggtgaagaacccggacgcgcaggagaagctctacagcgagatcagggcaacgtgcggcgacgaccaagcggaggtcggcgaggaggacacgcacaggatgccgtacctcaaggccgtcgtgctcgagggactgcgccggcacccccctgcgcacttcgtgctgtcgcacaaggcggcggaggacacggaggtgggcgggtacctgatccccaagggcgcgacggtgaacttcacggtggcggagatgggctgggacgagcgggagtgggacaggcccatggagttcgtgccggagcgattcctgtcaggcggcgacggcgagggcgtcgacgtgactggcagcagggagatcaagatgatgccctttggcgccgggcggcggatttgcgccgggctcggcatcgccatgcttcacttggagtacttcgtcgccaacttggtcagggaattcgaatggaaagaggtggccggcgacgaggtggatttgtctgagacgcgcgagttcaccaccgtcatgaagaaaccgctccgcgcgcagatggtgcgcagaacaacttgtgtatgaatgccgattaatggcccatcaccgcgtctgtagaaggccaaaaaaccatccttctcgctcttggctcttctctcatcaagggtcaccaaaccgcttgataaaattcggctaaccggtaattggcgttggccggtaatttgaaaacttttaatgtcaatttttgtactatggattatttgaagacttgctattgaaaccaaatttcaaaatgtaaaaaaaaaaaaaaaaaaggcccctagggcc

SEQ ID NO: 142014 - DNA, 192 bp, Zea mays
  Clone ID: MRT4577_609C.1
gtgaccactggcgttccgtcgcgtgagtgcaccatgatacgggcaccagcagtgatactggtgtctgactctgataagtcttcagccggctctctggcatgatcgtggccctgaggtgacgttgatcctctgcgccggagtccatgacgacagactatccgatctcctgcttgggctcattgtgagaacaat

SEQ ID NO: 142015 - DNA, 496 bp, Zea mays
  unsure (1)..(496): unsure at all n locations
  Clone ID: MRT4577_60C.1
ttttggaggtaccaaatgttgttgaatcgagaaaaaagttgactctacatcccgaatggtggttccaccatagtctctaaccaaattaggatggctgaagttcaacaatgccataactcaagtaagaatttctgactcttcaattacacattgtttgatgtaagtttgctctcatgaactctgttctataccccttttttagcttgttactttctgtgagctcaaatatcttagggaatgcatactattgttgcattataaagaaagtccactgtttcacattctttgccaatttaattgatggcttttagaaagcattcgtcatacctaacctagagatggatgtttcatcttcatttctagtttggttgatcaagtatcgcagtactgtagtagtatagtatggaggggagtttatctaattnccattggcttgcaagtttaaacagcacgtttgaagttgactgtgcactgagacctgtattgtagtctcaca

SEQ ID NO: 142016 - DNA, 1002 bp, Zea mays
  Clone ID: MRT4577_61000C.1
caaattagtactgtagctctttccatctcggctgttcttcatcagaccaaaacacgatatctggggtaccatccacatcaaagacaaccctgtatgcatgcaggtcatgatagagtgccctccctttgctactgcagtagtccaacgcttgtgccacataaagcgcagccctcatcctcattgcccaactcaatggatttgtctcccagtggaagagatgctttgccaaggtctcgtgcggcatgaactctgcgacgaggagacgctcgccgctctcgcagcagcaaccgatcagattggccagcctgccactacgcagctgcccaacagccctcgcctcctccaggaactggcgtgagtccggccaggcggagcggccgaagcgcttaatggcgacggtgcggccggagctgaagagcgtgccacggtagaccacgttgggtgccttctccccgtgctccgacacgatgcgatcgggggcgaagccgtcggtggccacccggaggtcgtcgaagctgtactcggcgaacaccggcacgccgctgccatcatctccggcggcgccattctcgagcattggcgatttgaagtggggaggccaccagcagacggagagcttggagcagcgagcacccatggccgcgctcgcctagatctcgcaggcagacgcagcaggcgacggttccgtccgctcctcctccaccgcctctcgctcgcctgccactggtagtggtagggctcgaatggagtaagactaaaatacttgcgaggttcgggccggggtggggagtggggcttggactggtactgatactggtactgggactgggactggggaaggaggaagaaaggacccgggtggagcactctgcactcggcactcgggcgtccgggttgtggatccgaggaaggtggtgtggtggactggtggacttttccgctcttccttccctgcttttgggcacccctgctgtctgcagcctgttggtcctcctattgcca

SEQ ID NO: 142017 - DNA, 2907 bp, Zea mays
  unsure (1)..(2907): unsure at all n locations
  Clone ID: MRT4577_61001C.1
cccagccagtccgcaaagctcttgcgttgcagggcaaaaaagggggtctgtacatgaatttgttgaaataaatagaaaccctcactttacaaactcggatcaacagaatgctagttgcccattcctgtattcataaatatattggaggtgtaacaacagccagcctaggcctagtttggatactctagtaacgagtgggattggagtggattgagatgtattgagagagtatttgatctattagggatttacaccctctccaatcccttcaaaacactctaatcccaaagtatccaaactagcccctaggagttttttcgacttgtgaaactaggggaaataccgatacaagttagggaataccaaaaacagcccctactggtgacgaagcattggagggaggcgatctaggtacaagcaggacagggtatcacaaattcagggctatacagttctagctctactattcattgcagcttccaaggcagtgccattcttcagtgcttcttggctttcagcctcccttcccaggttgtgaagtgccaaggcctgcaggtagtgtcccatcggccagtccgatgcaataacctcggctctcttcgcatcctcaaggccttcctgtgggttgccagccaccacatatgcgaagcatctccgccccagcatggttggagccacccctgcacctgagtcgatgaaccttgagtaacactcaattgcggtcgagtaatccttagacctaaaggcgttgcccgcgtgcctcttaacaacaaagctctcagatacatcatcattccatgactggagagatagctcagcattagcagtgtcatcctcatcatatccatcatgcagtaatatttcgtgcacctcattcaggtctgctctggcaaaagctttcccaatagcggataaagaaattcgatctgagtttttattatcatgttggatccccagcaaagtgtgtgaaggagtagaaacatctttctggagacattcgagaccggataccaccgttttcaaatttggccggtcacgtgcttcatattgcaagcagcgggatgctaatcgcatcaagtcagttccatcggagctggatacatgaccttccaagcaagaatccatcagcactagaaagttcttccctcttataaggtcgagtgcatgacttggtggaatgtgctttcccactcaggagatcaagcaagacagtgccaaaactgtaaaccacactctccaggacttactctgcctgtcttaagatactcaggaggcgtgaaggccaaattagtactgtagctctttccatcacggctgttcttcatcagaccaaaacatgatagtcttgggttaccttccgcatcgaagacgaccctgtatgcatgcaggtcatgatagagtgccctccctttgctactgcagtattccaacgcctgtgccacataaaatgcagccctcgtcctcattgcccaactcaacggatttgtctcccagtggaaaagatgctttgccaaggtctcgtgcggcatgaactcggcgacgaggagacgctcgccgctctcgtagcagcaaccgatcagattggccagccggcgactgcgcagctgcccaacagccctcgcctcctccaggaactgtcgtgagtccggccaggcggagcggccgaagcgcttgatggcgacggtgcggccggagctgaagagcgtgccgcggtagaccacgttgggcgccttctcgccgtgctccgacacgatgcggtcggtggcgaagccgtcggtggccacccggagctcggcgaggctgtactcggcgaacaccggcacgccgctgccgtcatcttcggcggcgccgttctcgagcatcggcgatttgaagcggggaggccaccagcagacggagagcttggagcagcgagcacccatggccgcgctcgctcgctcgcctagatctcgtagggcagcccgcagcaggcgacggttccgtccaccacctctcgctcgcttgccactggttggactcggttagactaaaatagttgcgaggtgtgatgaggaggggcggtcggtgttgtgggactgggagggaggaagaaaggacccgggtggggcgtccgggttgtggatccgaggaggggaaggtggcgatgggcttttccgctcttccttcccccgctgtgcaacctgtttcccgggggcacgggcgggctcgaggtctcgatcggcatgaactcggcgccgaggacacgctccccgctctcgtagcagcaaccgatcagattgcccagccggcgantgcgcagctgcccaacagccctcgcctcctccaggaactgtcgtgagtccgcccaggcggagcgtccgaagcgcttgatggcgacggtgcgcccggatgctgaagagcgtcccgcggtagcccccgttgggcgccttctccccgtgctccgacacgatgcggtcggtggcgaagccgtcggtgcccccccggagctcggcgaggctgtactcggcgaaccccggcaccccgctcccgtcatcttgggcggccccgttctcgagcatcggcgatttgaagcggggagtcctccagcagacggagagcttggagcagcgagcacccatggccgcgctcgctcgctcgcttgcctagatctcgtaggcagcccgcagcaggcgacggttccgtccctcacctccagccnccgtccatgggcacggcggatgcgcagggacggaaggcgagagcggtgatggcaatgaagcaggtcaagactccgatctgcttggaagccatgccggaagccaggttagacgacgagcgcgctagctagagagctgtttcgatatgtgtccaatgatnactagctgggctagagatgcaggtcccggcccgccgctcgagcgccgcaca

SEQ ID NO: 142018 - DNA, 1198 bp, Zea mays
  Clone ID: MRT4577_61002C.1
taggggccttttttttttttttttttgaaggttgcctggcctcaaatatcttaagttgcagagttcaaaagtttgtatatacatgggtttgttgaaataaatcgaaatcctgtcactttacaaactcgcatcaacagaatgctatagcagactagttgcccattcctgtattcatggatatattggaggtgtaataacagctgacctaggagttcttcgacttgtaaaaccacgggaaataacgatacaagttagggaataccaaaaacaaccctactggtggcaaagcattggattggaggtaggcacccgaaatgcaggcgatctaggtacaagcaggaagggcatggtatcacaaattcagggctatacagttctagctctactattccttgcagcttccaaggcagtgccattcttcagtgcttcttggctttcagcctccctacccagcttatgaagtgccagggcctgcaggtagtgtcccatcggccagtccgatgcaataatctcggctctctttgcatcctcgaggccttcctgtgggttgccggccaccacatgtgcgaagcatctccgtcccagcatggttggagccaccactgcacctgagtcgaggaaccttgagtaacactcgattgcagtcgtgtattccttagacctaaaggcattgtctgcacgcctcttaacaacaaagctctcagatatatcaccattccatgactggagagatagctcagcattagcctcgtcgtcctcattatatccatcatgcagcaatatttcatgcacttcattcaggtctgctctggcaaaagctttcccaatagcagataaggaaacttgacctgagttgttcttatcatgttgaatcccaagcaaagtgtgcgaaggagtataagcatctttctggagacttgtgagaccagataccacagttttcagatttggacggtcacgtgcttcatattgcaggcaacgggatgctaatcgcatcaagtctgttccgtccgagttggatacatgaccttctaagcaagaatccatcagcactagaaagttctttcctcttataaggtcgagtgcatgacttggtggaatgtgctttccactcaggagatcaagcaagacagtgccaaaactgtaaaccacactctcaggacttactctgcctgtcttaagatattcaggaggcgta

SEQ ID NO: 142019 - DNA, 2052 bp, Zea mays
  Clone ID: MRT4577_61003C.1
aagttggcctgacctcaaatatcttaagttgcagggttcaaaagtgtgtatgtacatgaatttgttgaaataaatagaaactctcactttacaaactcacatcaacagaatgctagttgcccattcctgtattcataaatatattggaggtgtaacaacagccagcctaggagttttttcgacttgtgaaactaggggaaataccgatacaagttagggaataccaaaaacagcccctactggtgacgaagcattggagggaggcgatctaggtacaagcaggacagggtatcacaaattcagggctatacagttctagctctactattcattgcagcttccaaggcagtgccattcttcagtgcttcttggctttcagcctcccttcccaggttgtgaagtgccaaggcctgcaggtagtgtcccatcggccagtccgatgcaataacctcggctctctttgcatcctcaaggccttcctgtgggttgccagccaccacatatgcgaagcatctccgccccagcatggttggagccacccctgcacctgagtcgatgaaccttgagtaacactcaattgcggtcgagtaatccttagacctaaaggcgttgtctgcatgcctcttaacaacaaagctctcagatacatcatcattccatgactggagagatagctcagcattagcagtgtcatcctcatcatatccatcatgcagtaatatttcgtgcacctcattcaggtctgctctggcaaaagctttcccaatagcggataaagaaattcgacctgagtttttattatcatgttggatccccagcaaagtgtgtgaaggagtagaaacatctttctggagacattccagaccggataccaccgttttcaaatttggccggtcacgtgcttcatattgcaagcagcgggatgctaatcgcatcaagtcagttccatcggagctggatacatgaccttccaagcaagaatccatcagcactagaaagttcttccctcttataaggtcgagtgcatgacttggtggaatgtgctttccactcaggagatcaagcaagacagtgccaaaactgtaaaccacactctcaggacttactctgcctgtcttaagatactcaggaggcgtgaaggccaaattagtactgtagctctttccatcacggctgttcttcatcagaccaaaacacgatagtcttgggttaccatccgcatcgaagacaaccctgtatgcatgcaggtcatgatagagtgccctccctttgctactgcagtagtccaacgcttgtgccacataaagcgcagccctcatcctcattgcccaactcaatggatttgtctcccagtggaagagatgctttgccaaggtctcgtgcggcatgaactctgcgacgaggagacgctcgccgctctcgcagcagcaaccgatcagattggccagcctgccactacgcagctgcccaacagccctcgcctcctccaggaactggcgtgagtccggccaggcggagcggccgaagcgcttaatggcgacggtgcggccggagctgaagagcgtgccacggtagaccacgttgggcgccttctcgccgtgctccgacacgatgcggtcggtggcgaagccgtcggtggccacccggagctcggcgaggctgtactcggcgaacaccggcacgccgctgccgtcatcttcggcggcgccattctcgagcatcggcgatttgaagcggggaggccaccagcagacggagagcttggagcagcgagcacccatggccgcgctcgctcgctcgcctagatctcgtagggcagcccgcagcaggcgacggttccgtccaccacctctcgctcgcttgccactggttggactcggttagactaaaatagttgcgaggtgtgatgaggaggggcggtcggtgttgggagtgggactgggagggaggaagaaaggacccgggtggggcgtccgggttgtggatccgaggaggaaggtggcgatgggcttttccgctcttccttcccccgctgtgcaacctgtgtgctgc

SEQ ID NO: 142020 - DNA, 2408 bp, Zea mays
  Clone ID: MRT4577_61004C.1
cccagcgtccggccttatgaaaattgtttgtctggaacactttcctgacagagccagtacgttcaaggtgccacaatactctctggacagtagcacttgtccatgggcacttcaagcaggtcaagctatcaatttttggcagagagataaatgttgttctcagctctagaagatcccgacacttcgccgggacacggtatttgaaaagaggtgtgaatgatccatggaaaagttgctaatgatgttgaaacagagcagatagtctttgaagaagaggctggttcctggaagggaagaatgagtgccgtagtacagatgcgaggatcaatccctctcttttggtcacaagaggcatctcgacttagtcctaagcctgatatttttgtgcagagatatgatcccacatatgaagcaacaaaattacattttgatgatctcgcccggcgatatggacatcctatcataatacttaatttgataaagactgttgaaaaaaggccacgtgaaatgatgctcaggcgtgaatattgtagagctgttgaatatcttaatcaaaatgtcccagaggagaagaagttgagattcatccactgggattttcataaatttgctaaaagcaaatctgcaaatgtactgggtgttttaggaaaagttgcgggtgaagcactggacctcactgggttttactacagcggaaagccaaaagtccagaaaaaaaggttaattcagcttagtcgaactagcactgcaagggatggctcccttgatataagggccagttctggagatctttcaaggctcagggatggctcccttgatataagggccagttctggagatctttcaaggctctctagtaatgctgaggcacttagttctacaggctttcaagatatgagaaatcaggctaacaaacaagagtttcttggtgatactccctgttaccaaactggagtgctccgtacaaattgcatagattgcctggatcgcacaaatgttgctcagtatgcatatggccttgctgctttggggaggcaacttcatgcaatgggactgacagatgttttaaaaatccaccctgatagcagcattgcttctgctttgatggaaatgtaccagagcatgggtgatgcacttgctcatcagtatggaggatctgcggcacataacacggttttccctgagaggcaagggaaatggaaggctactactcagtctcgggagttcctgaaatcaattaaacggtattacagtaatgcctacactgatggtgagaagcaggatgctataaatctatttctggggtattttcaaccacaagaaggaaaaccagctctttgggagctggatactgattactatcttcatgtgacgacagctggggatgatcttatgtctgatagctaccacttgagttctgcacctggaaataatgtgttcgtggggtctggtgctgcattgaaccctgggaccatattgagccctgtcccagcatgcaaagaggatttctcacggaagaagcttacttcattcgacaaacttatagaaagaacatgtagtgctcgagggaatgtaaggcttcattgtgacgctgatctaaagccaagtggaggtgttggaacttctggaatggcaccagatgcagctgagatacagcttaaaagccccaactggttgtttggtcaaaggaagcatacggagacaatttcaaccgcaagagttgccccggttgaaaacgtgaacgaggggaacagagacgagtcaaatgtgtccctttgtggggaactaatttggctatcctcctcagttgaatcatgcgaggaggacattttcagaaggtaccttgcattcacgacagcggatgtagagaatggctggtatggcggaacactgctatatgaccgagatgaaaacagcggggcttacaggcactattctgagctctgccagggagctgtcatggatccctttgagcatgaccctgagaaagagcggcactacgcggaggcccttagcgtggatctcggcgatgcacgggtggaggccgaaatgcaggccgcgctggatgactaccaggtcatagggtcggacctgagcatcatcccttcgtgcggagcactcgcagaggacccgagccagctgacgaggtggatcattggagatgagaggctgcttgtgggtgctgctgcgcagtagaccggtggggttctgtcgtctactctctactcttctgtggaaggttgtacggagcaaccgattgccattcaccgacccagcctttgtgttctatagatactatacttccctgaaacaattactccaacacgtgcatgcaatttattgttgtgcagcaggtggtaatgctgctgggattagctttggcaataatagttgattgttgctcgtgc

SEQ ID NO: 142021 - DNA, 3143 bp, Zea mays
  Clone ID: MRT4577_61005C.1
aattcagctcggaactcggctggatccactttcgcgtggcgcgcgcggtcgactggaggtcccagctagccttcgagagagggagccggggccgggcggggcggcacctcgcgagatggcggcggaagcggaagacccgtcgctggcggcgaccctggagaagttccgcctctacgagacgcgcgcgaggttctacgtgatcgggagctcgcgggagaagcgctggttccgggtgctcaagatcgaccgctccgagccctccgagctcaacgtaagcgaggaccccgtctggtactcgctgcaggaggtcaagagcctcctccagcggatcgacgagggcaaccgatccaccgggggcctcgccttcgtcaccaaggcatacggcatcgcaggttgcatcaagttcctggagtcatactacctgattttagtcaccaaacgccgtcaaatcggttgcatttgcgggcatgctatatattgtatagatgagagccagatgatcaccatcccacactcatcagtgcaaacagatgttgcgacctctaagaatgagctgaggtacaagaagcttttggctagtagttgatctcaccaaggatttcttctatagctacacatatccaattatgcagagcctgcaacagagtgttacttctgcagggatgaaagaaatgccttatgaaaatttgtttgtctggaacacttttctgacagagccagtacgttcaaggtgccacaatactctctggacagtagctcttgtccatgggcacttcaagcaggtcaagctatcaatttctggcagagagataagtgttgttctcagctctagaagatcccgacacttcgccgggacacggtatttgaaaagaggtgtgaatgaccatggaaaagttgctaatgatgttgaaacagagcagatagtctttgaagaagaggctggttcctggaagggaagaatgagtgccgtagtacagatgcgaggatcaatccctctcttttggtcacaagaggcatctcgacttagtcctaagcctgatatttttgtgcagagatatgatcccacatatgaagcaacaaaattacgttttgaaaacagcggggctcacaggcactattctgagctctgccagggagctgtcatggatccctatgagcatgaccctgagaaagagcggcactacgcggaggcccttagcgtggatctcggcgatgcacgggtggaagccgagatgcaggcggcgctcgatgactgggattttcataaatttgctaaaagcaaatctgcaaatgtactgggtgttttaggaaaagttgcgggtgaagcactggacctcactgggttttactacagcggaaagccaaaagtccagaaaaaaaggttaattcagcttagtcgaactagcactgcaagggatggctcccttgatataagggccagttctggagatctttcaaggctcagggatggctcccttgatataagggccagttctggagatctttcaaggctctctagtaatgctgaggcacttagttctacaggctttcaagatatgagaaatcaggctaacaaacaagagtttcttggtgatactccctgttaccaaactggagtgctccgtacaaattgcatagattgcctggatcgcacaaatgttgctcagtatgcatatggccttgctgctttggggaggcaacttcatgcaatgggactgacagatgttttaaaaatccaccctgatagcagcattgcttctgctttgatggaaatgtaccagagcatgggtgatgcacttgctcatcagtatggaggatctgcggcacataacacggttttccctgagaggcaagggaaatggaaggctactactcagtctcgggagttcctgaaatcaattaaacggtattacagtaatgcctacactgatggtgagaagcaggatgctataaatctatttctggggtattttcaaccacaagaaggaaaaccagctctttgggagctggatactgattactatcttcatgtgacgacagctggggatgatcttatgtctgatagctaccacttgagttctgcacctggaaataatgtgttcgtggggtctggagctgcattgaaccctgggaccatattgagccctgtcccagcatgcaaagaggatttctcacggaagaagcttacttcgttcgacaaacttatagaaagaacatgtagttctataaggaatgtaaggcttcattgtgacgctgatctaaagccaagtggaggtgttggaacttctggaatggcaccagatgcagctgagatacagcttaaaagccccaactggttgtttggtcaaaggaagcatacggagacaatttcaaccgcaagagttgccccggttgaaaacgtgaacgaggggaacagagacgagtcaaatgtgtctctttgtggggaactaatttggctatcctcctcagttgaatcatgcgaggaggacattttcagaaggtaccttgcattcacgacagcggatgtagagaatggctggtatggcggaacactactatatgaccgagatgaaaacagcggggcttacaggcactattctgagctctgccagggagctgtcatggatccctttgagcatgaccctgagaaagagcggcactacgcggaggcccttagcgtggatctcggcgatgcacgggtggaggccgaaatgcaggccgcgctggatgactaccaggtcatagggtcggacctgagcatcatcccttcgtgcggagcactcgcagaggacccgagccagctgacgaggtggatcattggagatgagaggctgcttgtgggtgctgctgcgcagtagaccggtggggttctgtcttctactcttctgtggaaggttgtacagagcaacagattgccattcaccgacccagcctttgtgttttatagatacttccctgaaacaattactccatgtatttagcagcaggtgttttatagacacttccctgaaacaattactccaacacgtgcatgcaatttattgttgtgcagcaggtggtattgctgctgggattagctttggcaataatagttgattgttgtgcagcaaaaaaaaaaaaaaaaaaaaaaaaaaaaaaaaaaa

SEQ ID NO: 142022 - DNA, 299 bp, Zea mays
  Clone ID: MRT4577_61006C.1
accggagctcctttccacgatcagttgaatggatggtcgaccaccttctccgtcacgctcggcgggcaagaatcgtccgttgcctttgaataaggctctagatgcaattggcggtgggtcgtagtccgcccgtggagctactcgataggttccacaccggcgtctcgtcgtcgggagtcaatcctcgctactcctcattctgcatcacaggcgacgcaccagctttctttggggaacatggagactacaggtgaattccttctccaatgttggatctactacactcaaatgtgaagaca

SEQ ID NO: 142023 - DNA, 616 bp, Zea mays
  Clone ID: MRT4577_61007C.1
atactattttgtactgggcctgctacgtaccatctctctctgatccgccggctgcgcttgtcctcctccggagaagctccggcctgcacccctaccaaggagaacttctctcgaataagaagtcgacaatgcggaggcgaacacctaccgcgacctaccatggcaccgagctccaacaacgacttcatcgtcatcgagaagcgtgcctgggaggtggaggagactactaccaccaacaatgacaggcgtgaacgacccggacgacaatatctcggacagaccacatatgacatgccaaagagctaggacatcttggaccatctctcctcccgactgctatgttccacatgacccacgtactggggatcagctgctacgaatacctcgagcatggacttgagagtcaccacacctacaacgtgatgactgacgtcgacctaacactcgcctctgtggacaatctcgtggtccacatcaccgagaacttcatgagcctgacagaacttggggtgaccgcacactgtgcaacgggggaggagcagatctgcgaaaatcaggacgatgcgccctagtacctcccttgatggtgatcaccccaccctagtggatcgccact

SEQ ID NO: 142024 - DNA, 489 bp, Zea mays
  Clone ID: MRT4577_61008C.1
atgggggtatatatgacctatctggttcattcatcatcaggacaaaacatcgtctacttggagtagtagtggaaacaaaaataacaagaaaaaagggcctcttagaaaacaaccatgccggcccgcaagaaacattggaatcgaacgggacctcgggtaaccaccccccatggcttgctgctgcccgctatacacaacggggggggcaccggtttgccccgatcagttagacatagtacaaccagggagggaaaccgccggcgacctcactcgtcggaaaacggcgggccaccataagggaccccgcacatcttgagccctctcggcatgtcgatctcctcaaaccaccccaaaaggccttggccctggcccccctccacgttcttgcccgcagccaccaacaaggggggggcctaccggaattccccgtagtacgtgcaagccctgtcctcctctatggagaaagggggccccagcggacccctgggt

SEQ ID NO: 142025 - DNA, 1148 bp, Zea mays
  unsure (1)..(1148): unsure at all n locations
  Clone ID: MRT4577_6100C.1
ggattggctcctcccagtcccatccaccaattctcttccccccgaccggccgtgaatcgaattgaattgaatcccaatcccggctagctctcgcgacctgttgatggttcaagaaagcccatggaaaccatgcagcctcccgcctgtgcagctgtgctctggtggcggagaattccgccggttccgggtgagggaattcagcaggccggccagccatcccgatgcgaattcgtgtgtggaggnaggctgggttgtgtggctcagatcgcttccacgtgttgttggcgttgaattctggtaggggacggtctcgtggccttttgtctttcggtgcgggtttcttgtgctagcttggatgtgaattttcgctgaagcaaatctctctctctctctccatctctccacacacagccccttcgctgccgaggtccctcgccggacggggggtgaaggacgaaggggaagaaagagttgcagttgcagcgacgactccaactccaacgaggggatccacgcctggactgcaagtataaggaggggtttgcagagccacagcgccttgtccaatccaagtccgcaattcagcggcaggcagctagctgttgtcctgttcgaaattcaaaacccggccagatccgtgcttgcgctgctcgccggggctgctttgtccactcaggccatcgatctccagttccatgtaggcggccatgcagcgggattgatgcatgcgtcgtccattggcgccctcggctagctgcggctgcgctggaaagagatctggtggccggggaggaggagaaggcgaggacgaggacgagggacagaaaagcagcaaaaggctcttgtggttggcatgcctacaaccaacgtcccaaccaggggcctgaaaaaataatccccgggcataaagccatgtgacaggcgacagcgatgccatctgatccgttccgttccccccagcaaaccgtggtgaaaatcacgcgcccccccgctctgccatctacccctgcacgagtacgatggtacggcggctgcacctgcaccctgcactgcaggccttctgcaacgcgggaggcgggaggggatttcgcgcgactcccgagggtgaggcaacaatatatgaatatatggggtgtgtttgatttggc

SEQ ID NO: 142026 - DNA, 283 bp, Zea mays
  Clone ID: MRT4577_61010C.1
cccagaaagggaatttaacacaaacttcaaagacccggcctttttccagcaaaaaaatccagaggggatgggcgaatttatcaatcccctaagttttataacaccaaaacggttcgggccccccaaaattggcctggggcttataaaaaaaagggcagtcctggactaaaaagctacaggtttattacaaaaccccactttttggcttttttgggggcccacaaagctggagctggggatgaaacaggggggggtatttctgggggacccggggcaaaccttt

SEQ ID NO: 142027 - DNA, 3300 bp, Zea mays
  Clone ID: MRT4577_61011C.1
actatagtcagcgctctaaacaattgttacttcatcgctcttgtctacctttttaattgttgcacacttctaaagtattgtcaggtcatatcaccatatttgactgaactgtttccccacttttgcctgaatttggtcctatgcaactgacccgccgcatgaaaatatcttgagaggcagagatgcgttcggcttgagtccacgacatctagaccctgacttcgttaggatcgtcgccttcttcctctcccttgctggctcggccctagtcttgacaatgtgctaaagaaaatgcagtttttataataagttggtgttggtttactcaactagtcaggtagcttgatactttgcagacgacattaagcagcgattgaagaaataaaaggcccatttttaatctaagaatataatgttcagcacatacacaagtttttacatgctgacagccttgaaagtgcatcccatagatgagaccaagagtttcgaaatacatcttaaggaggaagaaacacatgcccaaggaggaaatcctgagatcgacagcgattccaaatcttcaatttgagctttggctttgaagaaagcagtagatagatgtagaactaaaaaatcttctcgagtttgagattacttttgaggctactcatcattgaccagttaccagcataccccaccatggttgttcatataagaagaaaagaagaaatctggggtcgacaagatgctgaacacgcaatttctctatacctgaggaatggtctttttatgtgtgatataaaagcttatcggaatatggcagagggttcgtgaattctatctactagtttcgaggctgcagtcgttataggtcctagctacatagaaagtgctatgcaatttggtgtaatggctctgtcatttaatcgcaggtcattgatttccaatttaaatgacataggaagtaaagctaaagcttactaaagaagtttctcatcaggagtttagatctatcagattatttacggccgcaatgtatcttcaatattctggtgctgaaactaacgtaagtcatgaaatcaagagaaacaacagtaggtaacacaatgctgagacagtgatttccccaaactagagccaaaggaatgacagaaccagcgcttgtcccctgacattgaactccaactataatatgcactggacctgctgtcagaggcttgacttttgcagaggcaagatctcactaaacctgaacatgcagaagacatgtcggtgttcgaatttcatgcattaccatcaaagcaaaggacaacaatgttgtaccatttaacagattcagtacttctgcatctaaagaaaaaccgagtgtagaacttatgtgtttcttgtctaatggaatttagatagtttcaaaacagattgatgcatcaaaaggtaacttgaataatttaatgggtgttggggttccagagggagaaggtacgttcgaaaccgtagatacagcttaagtcatttgcatgttatttttcttgtttccaggttacatgtaattctaggttactgcttctaaaatatgtctattattatcatttcttgaaaccaaaaatgattgtctgtcccaccaagctaaaaagccctgcgtttaacgttgacgcacagagatcatcgtgttttccatttgtaataagcagtcatactttgcagtaactacatcagaatcataaacatgaaggaatagcttttaaagaattttttaatcttaagcttcaaggacaagagcaccagtcatgaatttcactcagaagtgtattaaaaattaagtatacaattgcttatacttaaatgtattgtccggcattaactacaccataagtaaactgggacaggaaacatgattcctcaaactgctagaggataattagtaatatattgtctcaaatgatttctcctactgaatatctatcttggggtagggcggttctggtggtttagaaaatagagagtggtcaacctaaaaccggatcatagaaaagggagtgatcaaaacaaatggtgaccgggagacacattgatgtatattgatcacctgggactaaggattgtttgacacacccaaacatgaacataacacgacaagttttggtacagccaacaactaagtgtcgcagatatgcgtatgttgcgttggatatgtgggcacacaagattggaccgagtgagaaacgatgacatacgcgatcggctaagagtagcgccaattgaagaaaagcttattcaacaccgattgagatggtttggatatgtccaccggagaccactagaggcaccggtgcatatagacaccataagatggacaataatgtgagagaggtagaggtcgaccaaacttgacatgggaggagccaatcaaaagggacttgaaagaatggaatataccaatgaagttgtgtttgaatagaagtgcttggaaagaagctacccacgtgcccgaaccgtgattaggcatttttccttatagtgctctaaaaagcttttcccctccactttctcactctctcttttgtaacatcttgttgtgtttcaactctagcctacctcaacttgcttgggactaaaagactatgttgatgatgttgatgttgtgtttcctatcctaaatgacataactcaagagcccccgagccaaaccaaggcagacctatgacctatgtctgtagaaactggagtttggtgatagatttgggtaaaatcaattcactgaaaatacataaagaggctgaaatgtgggattgtattcttttttatgatagaaagaacagggattttggtgatagagatgaagcgaacagctagaatacaaatcagacaatatgaggcgaaatgaagaaccaccaccgattaccgccacgctttcccacgcagaatcgatgtaccgtttcactcaaatcgcactaatcgacgaaatgaagacgacgaggagggaacagcgacccccaaatccccattactgcgactcagcagcgagaaccccaaccgggcgcaccgatcctgcaactccccctaaattccacgagcatccacccactacccacgcagggtaggctgtaccaggaagtgccgctaccgccgaatgcataggagtaccacgcggatttaagcagggctgggggccgaatcggaggggtataccttcgcggacggccaatcgtcggctcgaatcggcgctgcgaacgccctaccgcgatcggagagatagggccccggccttcttcacgcgagcacgcaaccgccctcgagagaggaggaatttgctcctggtgc

SEQ ID NO: 142028 - DNA, 495 bp, Zea mays
  Clone ID: MRT4577_61012C.1
acgcggccttaacggccggccgggcaggaacaaagctttttaaaaaaaactaaaacaaacaaaaattcacatttgcattaaaaaacaagtggccaaacataagatcagaaagaataaaatgttttatcctccccgggccgcccttatggggagattcgccggaaatccccccccctgggggccgttcgaacccacttcggggggccccaagcgcccctaaggggggccccaactgagcaagtgccggtcaagctacatggctaaacagaaaaacccggttgatacacaacattaatacaaaagtattgccactagaatgaatcaatttggagctaaatacagaagagcatgaatttcctaattttgagacattattttgccttaaaaagaattgggagcccccctttacccgatttataaaatacttggactgcggccactatatatcagaaacccataatgttctgctcaccagacaccacgactcataacaca

SEQ ID NO: 142029 - DNA, 553 bp, Zea mays
  Clone ID: MRT4577_61013C.1
ccggccggaaaatcatgcaaaaaaagccacttttttatttctatttctcttcccacaaagatatttacacgatacaaacactcgtccaaaatggtcactactagagcaagttctcgcggtgcaagcgtcggtcctgaattcgcaccggaattccataccgaactacctaccatcccgtcaacaccatctacacgcaagagaagcgccaaagctgcttcttcttcttcgacgacaaccgcttcagccaagaaacgtcgtctatccgtccaagaacctaaaaaatggcatcacgctccctctacagccactgttctctggctcgccatttctctaccgctcgtggcgtgggacagcggctatgtcttgggccgacctcatacaatgcccggaggggcttaccagtggccgctgtacatgccgtatgccctctacggacaggttgatcatgtttacgggctcaaggcatgggagtccaagaatgggttcacgggcgcgcagacggcgctgaatattgtcgagatactcatgtacttggtgtacttggggacgatct

SEQ ID NO: 142030 - DNA, 421 bp, Zea mays
  Clone ID: MRT4577_61014C.1
gaccaaatccgcttctcgagagcgagcatttatttcatacaactctagaaaaggaatccttgtacaaagggcacggcactccaggtctgaacatgctgagaatttatctctaggaaatgcagaaccctgacaatcaccaaagggaagccagtccattggggttcaaaaaccctcgtaagaggcatcaccagttggatctaccagccacgctattaacactaaggccaaacgggaaaaagttactgcaacgatccaacgacgacaaattggacgagacggagaccaaatttcagttcttcttgggcggcacgaatttgaaacctttcttcacctgcatatgtgaggacaccaatatacctgcatgatgctccatttaccggttctactcagatgttctcctcaatacagcttcagctggggc

SEQ ID NO: 142031 - DNA, 477 bp, Zea mays
  Clone ID: MRT4577_61015C.1
ctccggtacaatctcgtacgtctgctgctctctactactcagccgccgcaattctgggggcaggtacttcgagcgcgcgctccacctgcggcgacgcgatgcggacctatgtgctagcaagaacaggatgcggaggttcaagaggtcgcgccggaaaatgaggcactacatctaggcacgcgcatcctgcgtcctgggtagggagaggttctcctggaccatggatgagcacctgttgtcatgcacgcccccattggtggagggggttcggtgtgcacgactgtcctgtgccccgccctttgtggttaggtctggcttgctgagggatggtctttctgttggaagggaaactaaagcgtatgaggccttcaggttatggactatgccagatactagacggcctctactgcctctagctgctatttaacttatggatccctcgagctgctatgagtcgactgcaggcttaattctacc

SEQ ID NO: 142032 - DNA, 546 bp, Zea mays
  unsure (1)..(546): unsure at all n locations
  Clone ID: MRT4577_61016C.1
ggggggtttttttttttttttttttttttttttgggggtttttttttttttttttttttttttttttttttttttttttttttttttttttttttggggaacagaactaaaatttaaaaatcccactcttatttaaaaaaaaaaaaaaagggggggggggagaggaaaaaatggctagaaaacgggaaaaaaaaagggactttattccatggaaaaaccaagtcgaaaaggggggcaattgggtttggggtacgggaaaaggctacactggttttaacttgaaggaaaatcgaaaaaaatttttaaggggataaaaaacccttgggaagggggaaaggggaaccggggccttaaatttgaggggtgggaaatgattttaaaggggtaattaaaacgggggatggaaaaaataganggaaaagtgggttgaggaaaaaaacttaaaagttggagggaggggctagaatttggggggggaaaaagccgagagggggaaaaaaaaaaaaggaacttggaaaagaaaaatatagcccgggggtggggggc

SEQ ID NO: 142033 - DNA, 318 bp, Zea mays
  Clone ID: MRT4577_61017C.1
gttcgttttcccaccgtgtccgaatcgtctattattccccaggagacaccgctaatacggcggcgctgagatgctctatgatggagacctggtatagggagacgagatgctggtgcatcgttcacctacaacgagctcgagaactcaggagtgtgggaggccgactgagagtggtgcacccgacgtcctggtgatgcagaccttggtggcaagccatccgccgaggatggcgatgatgaaagcgtcgatgacacaggcgagaaggtgagtgatactgcttgcacagtccgacgacagtagccacctccttgagacaac

SEQ ID NO: 142034 - DNA, 301 bp, Zea mays
  Clone ID: MRT4577_61018C.1
gttaccaatcaaacgggagtggtgggtaaacaaaactgagtatctctgaccatctataaaatggcggggttacttatacttttaaacaaaaatacagatggaggaaacctttaccttcctttttgatcattacacagtttgaaacgacttatcgttccctgaatcaatatcagaatcagccattctatcgacctagtcaggaacaaccttgcccttccctcgctgctcgccattggcttgcccctggcaatcaatggactggctcacataaccatcatactgctatgtctatccctgcatt

SEQ ID NO: 142035 - DNA, 561 bp, Zea mays
  Clone ID: MRT4577_61019C.1
attttcatctcttttttctttccccgactacgcctgttctctgttgcagtcgccatgcgacaaaacgactgcgacatgatatcgcctcatcaagaacaactcttagcccacgtcatgttactgccgagtcgtctctgactccaagatgacgatctaccatcctggaatgcatataaagcaagttgatgagctcccctaccgtgtgctccttgactcttggaataacaataatcgtctcacagtgaggctcttgacgatgcccgtatatgcctgcaacaagtacataacctaatctgcagtaaacgatgccttccaccttcgaaatccggcttcactcccttccatgaacttcgcatcaacaactatgctttcacgcgctcggactgatactctccagactggaatgatgggtgactttggcattcctcatctgatatgagataatcagcaaattgctcaggaccttgtttctgatcgatgtaaggacaaccatgatgcacatgctccagatgctctacgacacgccaacatataagttcctggtcgccgaaacattattca

SEQ ID NO: 142036 - DNA, 263 bp, Zea mays
  Clone ID: MRT4577_6101C.1
accatttccttgccgccgtaataaaggcgcgcaagcttgagctcgccgggctcggcaagtgcgacgcgccggcgcacgactacctgctgtgtaagttcatgcgcaagggctactattctgacgagcagctgcaacacgtgtcgctaaaattgatcctggtcgggcgcgacacctactccgaggagctgtactgattattctggctcgtgtccacacacacagacatggatcaccagatcgtactctagctgtgcaccgcgctc

SEQ ID NO: 142037 - DNA, 494 bp, Zea mays
  unsure (1)..(494): unsure at all n locations
  Clone ID: MRT4577_61020C.1
gctgtgctcgcccactcactcactcacccaggcgctcgccgcctcccaccaccgcctcctgcccgtcgcccccgcccccgccgccacccgtaccccgtcgcgggggcacatgcgcttcagagccaagagagataagacagaaaagaggggaaaagaagntgagaaaacaatatgagaacaagaagngcaatgatgaggacaaggtgtgggagggggantaatttcctnaaaagaaaggtagagatgggaggacaaggctattgactctggaaatatgggacactgctgnncaggaaaggtttaagagtctcggagttgcattctaccggngagcagattgttgtancctagtctaatgatgttattctatgaagggatntgacaaactgaacaaatggttagaagagtttctaattcaggctagcccatcagaacctgataatttcccctttggttttattggggaaacaaagttgaatggaaaaaggagggaa

SEQ ID NO: 142038 - DNA, 104 bp, Zea mays
  Clone ID: MRT4577_61021C.1
ctccgccacctcccttactgtctggtatgatgttatcagacatgatcaaccttgtgggcattacttcataacacccatatctatctttacttaacagcaatcac

SEQ ID NO: 142039 - DNA, 959 bp, Zea mays
  Clone ID: MRT4577_61022C.1
cctgccgggatgtcatcccacgcgtacttccaacttccaagcaggagcaaacgctagccatctccacctcaagttagctctctagctatactaagctatagcagcggtgctgatcatcgctcgctaccacaccatcaccaccgaccaacccatcagctagctagctatagcatgtcgggcgtgtgggtgttcaagaacggcgtggtgcgcctggtggagaacggcgcggcggtgggcggcgaggcggcggtgcggcggcggaaggcgctggtgcacacgccgagcgggcaggtggtgcggtcgtacgcggagctggaggcggagctgcgcgcgctgggctgggagcgctactacgaggacccggcgctgtaccagttccacaagcgcggctccctcgacctcatctccctccccgccgacttcgccaggttctcctccgtccacatgtacgacatcgtcatcaagaaccgcgactccttcagggtcgtcgacgtctgatcgatgtcggtcgtcatcgatctgcgtgctgcccgtgtacatacgcgtgcagtgcatgcatgcatggtcgactcctactccgatccttaactatatacatatatatacatgcatcttaatttgttactttgtgagttgttcatcagtacgtgcatatcagctagctagctagtgtttgacaacagtcgtcgttacgttgtattgtgtcagtgaagttgctagctctagctagctacttgctgtgtgtgagtgtgtgcagctgatctgaatcagtagcgtgtgcagcatgcatatcctagcagtgtgtgcgtccaggtgtgtacacgtacgtctcggagtgacgatcgatgtgtgccctagttgctcaagatccatcacgcatgtgcgtgtgcgtgactgtacatttatttatcgtttgtgccagtgaccaccattattgatgtgcgtgcattaatttctcc

SEQ ID NO: 142040 - DNA, 311 bp, Zea mays
  Clone ID: MRT4577_61023C.1
ctccttatttaattacttttctcacttgggcaaatgatatttttttttttacatactccttaatcccctaaactttataccatcctccaacaaatttcttcccccagcaacccttaacacccacgggttcccacaaaaacaatgcccccgaacacagggaacaccccccttcccctatatagagcaaacataaaaaatgcgcactataatgcccaacacaactactgaccaaaaatcgatgtccactcaaccaccccccaaaaaaacccccccccattaaaatgcatccacccggggggccccaacaaatt

SEQ ID NO: 142041 - DNA, 258 bp, Zea mays
  Clone ID: MRT4577_61024C.1
catgcaccagggcggggagcgagcagaacacaagaggaccacagcgcaacgtgggcaagaacaaggccgacacgacgaggcagacgacgacccgcgagaggcccctgagcgtaaagaccacaaggcgctgactgcgtggacgcgtgcacccatgcagctgaaggactaccaactgagggagaagggggcgcactgagagagcgagcgcatcccggagcgagtgagagcacgcgcgcgggggctccaacaagggcttct

SEQ ID NO: 142042 - DNA, 308 bp, Zea mays
  Clone ID: MRT4577_61025C.1
tcgagcggccgcccgggcaggtcaagcttttttttttttttttttttttttttttttttttttttttttggtttttttttttttttttttttttttttttttttttttttttttttttttttaaaaagttccaaacaccccttttccccaaaaaataatcccttccatttaaaagggtcattcagggcattggccaccccgccccccaagggggggggggaaaccccggtacccaacgcccgtaaaagagggaaccaactttagggggctaggcagggggccccttacattattaccacaggaccccg

SEQ ID NO: 142043 - DNA, 334 bp, Zea mays
  Clone ID: MRT4577_61026C.1
ggatgatgtatgtggccaaccagaaataagaagttacatttccagaggctaaaaaaaaaagtttttgggaaaaaaaaaaaaaaggacagccgatcaaaaaagaacacaacaaaaaaggcccgggcctgccgctctataggacccacgctcgcgtccgctagcttccatcgacttacctttgttttacagccacctaactgcaatacaccggcgtaccccacctcaatcgtgatggcacaaccccgccttccccagctgacttccctcgatcacacccccacctgtcgcccttcccaacaatcggacaggccctatcgcatttccctcacgccct

SEQ ID NO: 142044 - DNA, 483 bp, Zea mays
  Clone ID: MRT4577_61027C.1
gttcctcaaacagcataatggcaacccgcgttccaatggtgtagtaaaaactttgtgctcataccaaaatgaactatgaaaattagctgggaaaatacctttataaatctgtatattagctgatgtctgtacatggaacagagaaatttgaagtacaatacatgattactggcgcaaactacatcatcaacaaagtattttagtcccaagcatgttgggtatgctagaattgaaacccaaccgaaacgacaaagcaagtttcaggcacatgtatatctattttacatgcactcttattcaaagctaaatctttggatacattccatcctttcaagtctcctactgaatattcccatgtcaacttcggccttcacgtctctcttttcattgctatcgtgccaagatattcagataaacattacatcaaaaccaataataagttcaggcaatatataaaagcttgctcctcggcaaaccaccaat

SEQ ID NO: 142045 - DNA, 1278 bp, Zea mays
  Clone ID: MRT4577_61028C.1
gttagtttgttgttttctttttgtagttctttacaacaaagccttatgcctgtgatccatcaaatctacccaaatatcccccaagcaaggaatacgatgctaagcttcgagatgaagaagctaggaggcaaagagcagctgctaaaggacaggaagctgaagctggacggaggaagcaacttcctgcacccgatggtaatagtggattgcagcaccgccgagttcaggtgaattccaaaaacagcacttacaagttcactccaaaggaggatgtttctggatttccaattgatccgtcagcaagagctgcagataatggttacccacagcgtgttcctttgatgcaagctggccgttcttcgtccactctgggcagatcaagtggaatggatccaaaagcccaacgatttcacacctcccaaattgttactattactacagaaatgtccaaccaatctactgcatctgggcagagaggcaatgctccgaagatgtctaaccttggggaaagtgcccggaggcaatatttgagagagcaccggtccagttcaagatacagtcagctcaccgctgctgacccttctgacagacctgagtggaatcatcagttccaagaaagaccatcatcttcccatcggaaggatgatgctgcggtaaacaaagagactacagtggtgaatggcacaaagaagaacagaatccactattcgggaccactgatgcctcacggagcgaatatggatgagattcttagagagcacgagcgacagatccaacaggcggtacgaagagcccgccttgacaaggggaagggaaagcacaacggcgagagagaccagtcagaggcactgctgtacaccaccgggaatgtcagggctgatcgctgaaaagttcagtttggtgtggacccccgatttgagcaaccatcagaagcgtagaaaatagcattgagtcccttctatttttccacaccaagtggagaggtttttgctttgccagaaactccaactcctgatgcggtttggtgcccaggagatacagctgccaaaaagaaaacctgttcctgtagagatttaccacccagagtttagcattaggctgtctaaaatatttttttctcaagatttgttgctggttatccatagccatcaattgtatatctcaagtcaagagtactctccctgaaagttgatccacatacctgttttgacatatgacaagatgaatacagatcgaaatacaggccactgtctgctaccaaacccaaaccccccagcc

SEQ ID NO: 142046 - DNA, 390 bp, Zea mays
  unsure (1)..(390): unsure at all n locations
  Clone ID: MRT4577_61029C.1
ttctcgaagcctgctcctcacttcctccttagctttttttctggtggggcgccttgtctttgtctgtgtgncctccttggccatccacgtgacccctaaatcttgtgaacagatntgacggacnaatacatgntgctcccccgccttcccctacctgntntattgctgctgtgttctactcatgccgttgactggtgcgcctccaacttctcctgcccccttgctccgcgacatgccttccctgccggaggagccatctggctttgtagctctaaacctcccttctcttgatgcagcgcatgctctgccccttgggccttctgctcgacgccctgctgatctcctntaaggccacgctcttctttttttttttttccagctccctgtcct

SEQ ID NO: 142047 - DNA, 271 bp, Zea mays
  Clone ID: MRT4577_6102C.1
gcatccaaccagcgcaaaacaccttcacgacatcgagccgggaggtacgatttatacatcctatgcggagcttctcaagtagtagggtatgtagggcatggatggactctgagcattgtgtttacttgctgggacagcgcggtcaacggcggggtaaggaagaagaaagatgtgaataatgagacgaagctcgatatggtctataagaaggacgacaacttcggggagtggaactcagaggttgctagaacaggtaccacagtatatgagt

SEQ ID NO: 142048 - DNA, 464 bp, Zea mays
  unsure (1)..(464): unsure at all n locations
  Clone ID: MRT4577_61030C.1
gggggggaggcgggnaacatacaaccgctgggggggtccccccctgaatgttctgcgctttggtgttgagccctccgggtgcggggcccctctcccaaatttttttccgcgcgggaaaaacggggctgggaattttctggaataaaacccccctccctctcctggccggtaagggtcttgggtttgtctttttaaagaccccctttccgggccctccggggcggggggctggtctttttccccctccggggggcccttggcgggggttttttggctcttatccggctgcttggccccctttgctggggcttccgcccccccttttttggcgccctcctttccacccaccttggggctgccgtcctttgggccctcttttgccgccggggctgggggggggggcttcctcttttgtggggggggggcctgctttagcttcccccgggtttggcgcctccgggggg

SEQ ID NO: 142049 - DNA, 479 bp, Zea mays
  Clone ID: MRT4577_61031C.1
ccgccgccgccggggttggccgggtaggaggcgcagctccaggggcaggcgcagatcccacggcttcgcgcgccgcgccgctacgacctgcgcctgcgcaccagactcataacctacacattctaaggcactgatgtcggaaccacaagtgtctccgtgccaacccgcttgctcgtactaaactctgatgacctatcaatcaacagcgcctgcatccgttaccaacatttggcgcctaaagaggtggtgtatttcgaggacgacgagatactggtgctcagatactccaaggaccaggtgctcggagagggcgtgctcaatatgaagttcaacggcacgctcaacgaccagatgagagggtcctaccacagcaagtaccaggataagggaaagatgaagaatatggcactgacacacttcgagtctgtggatgctacagcggtgcttctcgatgctgagatgaacctgcattcaaggtg

SEQ ID NO: 142050 - DNA, 243 bp, Zea mays
  Clone ID: MRT4577_61032C.1
aggcggcgccgtgaggagataaacaccggcagccaggatttttgtaagccaaagcggcgcagaggataacgccggcgagctggagggaggagaactattgccgacgtgcggcagaggaagacgctgagcgcagaaaaatccagggagtagagcggcggctgcaaaattccaaccgagagagagcggatgagatcggctgagatctttttcagattttttccacttttctgtttattttattaa

SEQ ID NO: 142051 - DNA, 1116 bp, Zea mays
  Clone ID: MRT4577_61033C.1
ccggccgggattcccgcccgtcatctgcgtgcgtctggccgtctctatcgcctccgctctcctctctgctgtccgcgcccatgccgtctgcccgcgtcgcgcccatgcgtgaacccacctccggccactcgcgagcagagcccccgctcccgatgactgcgccggatccgctcctccccagatccgctcctctctgctgtccgcgcccacgccgtccggcgccggatccgctcctcccctggagtaactccaacagcggaccctaatagtcctgctgttctgcgtccgtgtaccaaggtgccagccaccagggcaacgagagcaccgacaccgagcagcacgcgagctctgcgagcgccaagcagcagcagtagcaccgcagggcgcagggcgtaggcggcatagcaggggcgcggattacggccgacacttcgtcgtcaagctctcgccatttgcaactccttgctccgccgacctcgacgcaaactgcaacttctcgctcgcgcctgtccaggatctgctctcgccatggacagggaagccaagaaagaagcgttcaggaagtatcttgaatccagtggcgtgctcgataccctcacgaaagttacatcttcatcttcccatgcagctcttgtggcgctgtacgaggagaacgataagccttcatctgcagtcgaatttgttcagcagaagttgggtggcccgtcaatctctgactatgaaaagctcaaggcagagaagctggacttgcaattgaagtatgataagcttttagaaacccacaaggaaacatgcagacagctggaggaacttaagaatatgaagtacggtgcaccctggaactgaaataacgtgtgttgacactgtaaatgtatcatgaagcatgtactttttacacctctctgaagcattgctaagctctttgtacaatggaaacatctctcatgtatctgattttagccatctggatcccttttggattatgaagacacccaactcactgtaggtcccaggtatcaggtatcaccaatgcaggataaaggatgtgacaactatcatagttgaaccatgagcaattgtttaaccagtaatccagtatcgacaaagagtgtggtc

SEQ ID NO: 142052 - DNA, 542 bp, Zea mays
  Clone ID: MRT4577_61034C.1
caaagcggcagtgcgtagagaggatcgtcgaacagaacagcatgaagatggtcatcgttctcgtcgttcgccgcgctcagggagcatcatagccagccgcccagaagctcatgaagaagaacagtagctaggttgacctaagggagagtgtcaccaaccctgtgctcttcgatcatgacaaatatgacatgctggggtctgaggggccctatacaagcagatcaccccatccgtcctgctagagacgatgaggattaatggatcatgagcacgagtggctaatgaaggatatgatgcaaaggggatccataaagctgatctatcactattcacaccaactgatatacaccagggcagccgacacatgacggctacttcagatcgtgccggccggcctctaaacggcttagtgctgcgattatatgctggaaatagcaataataccttatacacacttatttgtgggctatcagtagaaatatctttaaattaccggactgttaactcccacactgtcaaccaattatacctatccagaaata

SEQ ID NO: 142053 - DNA, 814 bp, Zea mays
  Clone ID: MRT4577_61035C.1
ctgtccttgtgcgcttgtgcccgcctgactccagccacctctagctcaagcttccccctcaagctcgggctgctgctcggctaggaccaaactactttgtagcagagctaactaactcctccgtctggctctcggctggtctcgtctcccctataaattaagcccccccgccccctttctgcttcccatcgatcgccacacttgagagcttgccgtccagcgttcatcggatagctcccctgagctcgatcggatcgtgcacagcccgaacagccgctccaccctcccgctcagctcgctcttcggcggtgctgctctcgatcgtcttctccgtcaccggcggccgcttagcctccgcgatcccggccggtggtcttcttcgccgcattatctctctctctctctctctctctctctaacacaaggacgatgtcgagccggaggtcccgcgcgtcgacggtctcggaggaggagatcaacgagcttatctcgaggctgcagacgctgctccccagcgcgcgccgccgtggcggcagccaggtatgaatatacgatacaacgcatgcgcattcaaaccaagatgtgcatgatctagctagctagctaggtagttttacttctctgatctcacagtattgagtagtgacactgacaccatcacaccgacacgacacacatgcataaattaaagagtgctatacactgcggtgccagtgccaccgtaccgcttattgcaagtatgcataaagagtgctattggcagctggtagctcactcgctccaagccaagagatcgtcgtggatcgtctgatga

SEQ ID NO: 142054 - DNA, 884 bp, Zea mays
  unsure (1)..(884): unsure at all n locations
  Clone ID: MRT4577_61036C.1
gccggccggttcgcaaaatcgatcgccacacttgagagcttgccgtccagcgttcatcggatagctcccctgagctcgatcggatcgtgcacagcccgaacagccgctccaccctcccgctcagctcgctcttcggcggtgctgctctcgatcgtcttctccgtcaccggcggccgcttagcctccgcgatcccggccggtggtcttcttcgccgcattatctctctctctctctctctctctctctaacacaaggacgatgtcgagccggaggtcccgcgcgtcgacggtctcggaggaggagatcaacgagcttatctcgaggctgcagacgctgctccccagcgcgcgccgccgtggcggcagccaggcgtcgacgacgaagctgctcaaggagacctgcagctacatcaagagcctgcaccgggaggtggacgatctgagcgaccgcctgtcggacctcatggccagcatggaccacaacagccccggcgccgagatcatccgcagcctcctccgctagcccaagtccgtccgtccggccggccggccacgcgcgccgcatatatgcagcatctgcgcgcgcgctgtctctctccatccatggacgacggccggcctctcgccatcgccagatctcagcgcattgccgagtgtgtgtgtgtacccatgcatatagcagctgaatatacccaaggacgacaggctaaggctggtttattaattggtagggcattattaagtactactccgtactattaactagggctgcctagcctaagtacggtttctctctctcttcactnctggntgnttgtttcctgctatactcctagtagcttagctccttttcccattgtgcaaaaaaaaaaaaaaaaggccct

SEQ ID NO: 142055 - DNA, 1261 bp, Zea mays
  Clone ID: MRT4577_61037C.1
gttgagagcttgccgtccagcgttcatcggatagctcctgagctcgatctcgggtcgcgcacagctgctctccccttcctcccgctcagctcgctcttcggtgctgctctcgatcgtcgtctcgctccatcaccggcggtcgcttagcctccgcgatcccggccggtggtcttcttcgccgcattatctctctctctctctctctaacacaaggacgatgtcgagccggaggtcccgcgcgtcgacggtctcggaggaggagatcaacgagcttatctcgaggctgcagacgctgctccccagcgcgcgccgccgtggcggcagccaggtatgaatatacgatacaacgcatgcgcattcaaaccaagatgtgcatgatctagctagctagctaggtagttttacttctctgatctcacagtattgagtagtgacactgacaccatcacaccgacacgacacacatgcataaattaaagagtgctatacactgcggtgccagtgccaccgtaccgcttattgcaagtatgcataaagagtgctattggcagctggtagctcactcgctccaagccaagagatcgtcgtggatcgtctgatgatgtaaacaaaacaacggtggtgtgcgtacgatgtgatatgcaggcgtcgacgacgaagctgctcaaggagacctgcagctacatcaagagcctgcaccgggaggtggacgatctgagcgaccgcctgtcggacctcatggccagcatggaccacaacagccccggcgccgagatcatccgcagcctcctccgctagcccaagtccgtccgtccggccatggcgtgacggccggcctctcgccatcgccagatctcagcgcattgccgagtgtgtgtgtgtgtaccacatatagcagctgaatatacccaaggacgacgtacgccgacgacaggctaaggctggtttattaattggtagggcattattaagtactactccgtattaactagggctgcctagcttaagtatggtttctctctcttccactcttggctgtttgtttccttgctatactctcctagtagcttagctccttttccatttgtttgtacttggctgcttcgtcccatgttcgtcgtcgtcgtcgtggtggtggtgtaaacctatgtgtgtggtctggatcgagttgtttcctccttgacagacaaccgaccaaccccgatcgatctgtcaacttgtactacgtacgtactggtaatatatcaatatctatatatat

SEQ ID NO: 142056 - DNA, 358 bp, Zea mays
  Clone ID: MRT4577_61038C.1
acgcgtacggccacaccaccgacgggtcgttctaggatcaccaccatttgtttatttcaaacttctactaaaagttgaggaatgggtaacaaatccctaacattccaacattcctttatatatatatatatatatttcttagccctgttttgctcataccatgtggagaagcagaccattccaaccatactatgtaaccactatttattgatgacagaagactaaaagtcaccctggactttagcgcactaggcaacctgttttgtctaacgctccttagccgtgatataaacatccacctggaccaacccgtttcttgcaccttgtcaacctacggaagctctttacctaagctggt

SEQ ID NO: 142057 - DNA, 317 bp, Zea mays
  Clone ID: MRT4577_61039C.1
attcggctcgaggcatctgcggctggttttgttgccacggtgatgccactcttgggcgtgaggggctcaattcggaccgctggaaggactacaataccgtcgacggaacctggttagggtgctacacgtgctgataatggcaagaccctgatagagggctccaagtcgaacactatcgcgctggaccctactgttcttggattgcactctacgggtactgctaggcatgcaaaggcagtcaccacttctgcagtaccctactatcagattcctgggcgcagccgtgtcatgagttcacacgtggctctaggtcaggc

SEQ ID NO: 142058 - DNA, 178 bp, Zea mays
  Clone ID: MRT4577_6103C.1
gaacgcgcgccctttctcgttgtctgactccttgtttacattggaaaagagtcttcgtttcatacgtaacgtcgctatagctggaggtcgggaaaaaaagtaattcttcctcaaagggcagtaaaccccattaaaaggtcactgcgaatccttcttttggggtgttgagttgggggac

SEQ ID NO: 142059 - DNA, 448 bp, Zea mays
  Clone ID: MRT4577_61040C.1
acccacgcgtccgggaagctgcagaaaatatttctgtgaggttgaattgtaggtgtcgtgaactatgaaaaatattctagtgattttttaatatagttttacgatagcattttttctttactgcaacatgcttgggattaataggctttgtagttactgctgctgtagattgaggatagctactagctagtttttttttctctgaacattttggagattatatttagatgatgatgaggataactagtctgattttaactggatcataaaggtttggcgatttacattttatctatttgtcttggtttttctttcaaaaaaagcccttaccaatcacaagcaaccaagacgctgttcaacttaaactttgcttacctgcactatatttacatttctgtgaaatagtggtccattgtatttaactgataattgggaaatgtttttattt

SEQ ID NO: 142060 - DNA, 1021 bp, Zea mays
  Clone ID: MRT4577_61041C.1
cattggggtgctcctcgagggccgggccgggatccacccgcaccgcacgcaccctcctcgtccgcccggaccccgccgacccggctcttctcccctaatcctccttccccgatccagtctcgcggtcgcggccacgctgagggacagcgagaagagacagacacagatcgcgcgcggagatgccgtcggactcgtcgtcgtgggcgcgcgccctggtgcagatctcgccctacaccttctccgcaatcggtatcgccgtctccatcggcgtctccgtcctcggcgcggcatggggtatcttcatcacggggagcagcctcatcggggccgccatcaaggcgcccaggatcacttctaagaacctcatcagtgtcatcttctgtgaggctgtcgcaatttatggcgtaattgtggcaatcatcctccagacaaagcttgaaagtgtgccaacatctcaaatgtatgatccggagtctcttcgagctggctatgcaatctttgcatctggccttatcgttggctttgctaatcttgtttgcggggtatgcgtggggataattggaagcagctgcgcactgtctgatgctcagaactcatcactcttcgtaaagattttggtgattgagatcttcggcagcgctctgggactgttcggtgtcattgtgggcatcattatgtcatctcaagcgacatggccagcaaaagcttgattttcaccatttgtagctctgtaaattattcagatggagtgtatcgaaatgtgcatgtggtctaactgcattttcatgtcccttttatgtggcgtcttttttggcagaacacgaaatgcggcgcgcgtaccgccaccgattgtagagttgctattcttactgccggagtactccatgtgtgttggatatcttgttggcatattaaataaatgcttggactaaaaaaaaaaaaaaaaaaaaaaaaaaaaaaaaaaagtaaaaaaaaaaaaaaaaaaaaaaaaaaaaaagtactctgcgttgttaccactgct

SEQ ID NO: 142061 - DNA, 937 bp, Zea mays
  Clone ID: MRT4577_61042C.1
cctccttccccgatccagtctcgcggtcgcggccacgctgagggagagcgagaagagacagacacagatcgcgcgctgagatgtcgtcggactcgtcgtcgtgggcgcgcgccctggtgcagatctcgccatataccttctccgcaatcggtatcgccgtctccatcggcgtctccgtcctcggcgcggcatggggtatcttcatcacggggagcagcctcatcggggccgccatcaaggcgcccaggatcacttctaagaacctcatcagtgtcatcttctgtgaggctgtcgcaattcctccagacaaagcttgaaagtgtgccaacatctcaaatgtatgatccggagtctcttcgagctggctatgcaatctttgcatctggccttatcgttggctttgctaatcttgtttgcggggtatgcgtggggataattggaagcagctgcgcactgtctgatgctcagaactcatcactcttcgtaaagattttggtgattgagatcttcggcagcgctctgggactgttcggtgtcattgtgggcatcattatgtcatctcaagcgacatggccagcaaaagcttgattttcaccattagtagctctgtaaattattcggatggaatgtatcgaaatgtgcatgtgtccaactgcattttcctgttccttttctgggggcgacttttttggcagaacgcgaaatgcggcgcgcgtagcgccccccccaccgattgtagtgctatttcctactgccgactccaggtatcttgttgctaaatgcttggggagtactccatgtgtgttggatatcttgttggcatattaaataaatgcttgggcaaaataaaaaaaaaaaaaaaaaaaaaaaaaaaaaaaaaaaaagtaaaaaaaaaaaaaaaaaaaaaaaaaaacccctatctgggttgttccactgc

SEQ ID NO: 142062 - DNA, 1015 bp, Zea mays
  Clone ID: MRT4577_61043C.1
attgggaccctcgaggccggccgggacctgtcgtcgggctcccatcgaactcgaaccctctctacgccgactcgtctcttctcccctaatcctccttccccgatccagtcccgcagcaacgccgagggagagcgaggagagacagatacagatcgcgcgctgagatgtcgtcggactcctcgtcgtgggcgcgcgccctggtgcagatctcgccctacaccttctccgccatcggcatcgctgtctccatcggcgtctcggtcctcggcgcggcatggggtatcttcatcacggggagcagcctcatcggggctgccatcaaggcgcccaggatcacatctaagaacctcatcagtgtcatcttctgtgaggctgttgcaatttatggtgtaattgtggcaatcatcctccagacaaagcttgaaagtgtgccaacatcccaaatgtacgatccggagtctcttcgagctggctatgcgatctttgcatctggtcttatcgttggcttcgctaatcttgtttgcggggtatgtgtggggataatcggaagcagctgtgcactgtctgatgctcagaactcatcactctttgtaaagattttggtgattgagatcttcggcagcgctctgggactgttcggagtcattgtgggcatcattatgtcatctcaggcgacatggccagcaaaagcttgatccttaccgttagtgctctgtatattattcggatggaatgtatcggaatatgcatgcggtccaacggactttccctgttcttttttcttttgcatcttttcggcaaaacacgaaatgttgcaagcgttgcgctaccgattgtagagttgctattccaaatgccggagcgttccaatgtgttacgatatcttgtaggtgctattgcttttgtaagacatttggcaattggcgtattaaataaatgcttgaactgaataagattagaattaattttttgtcacccttcgtttatgccaaaaaaaaaaaaaaaaaggccccta

SEQ ID NO: 142063 - DNA, 1203 bp, Zea mays
  unsure (1)..(1203): unsure at all n locations
  Clone ID: MRT4577_61044C.1
gcttcagaaagaacctcggccagaggagagagagagagagagagagagggcatcatagtatttccatagtgtccatttagctggtgttctcttgcgcgccgatccgcctgctcatccatttgtttgtctcctactacacctcccatccccaccagtgatttctggtttgcattgcattggcctgtgagctcatcgctttgcttttttttgtgtgctttcctcgcttcccccctttctcagatgtatcggaccgtgaagagcactgacaagcctgcggcgtcatcaggggcgaacgacggcggctccggcgacgaggacttcgccggcggtggccaggctggctccggcggcgagaacatgtgcgcgaggccgttcggggagcaccggtccacctccgagggggcggcgagctcggtgggtggcggcggcggcggcgggagcgacatggaccagtcttcggcaggcaacggcagcaccaggtggagcaactcgtcaagggacccatggctgtcgtcgaattcatgcaacatggacgctcatcgcttggcagcgttgtcttctccgattgagaacggggagccttgccggtcgagcagctcgcaggtgtcgaaccaggagctgatgagcagcccgagcctggagttcacgcttgggaggccggactggcagggcacggatcatgactagcagtagcaagagctaagctaccagctgctagccatgcgtcgaccgtacgtggagttctagctagctagaaggctaacttcttcattgaggccgggtggttatagtagcagcactactacttgatatcaggcggtgcgtgcatgcctgatgatccccaagcaactcgtagacgacgacgacgacgacaggttttttcgcctgcgaagtcgaacagatcaaatcaacaagtacagcagcagcagcatccgcgcgcgtctccatcgatgggtgtggagatcatggtgagtacgtacgtgccgacggacggagcaccggcctggaagaagggattttaaagacttactggggcactctctctatttcttctttgtcaganagagggagggagagttgagtgggctgcctttgggtgagtggtttgttagattggccatgccatgttcctgatttccttttctttcttgcttctctctctttttgtttccttgtgccatgtcgagcgggcgcgagantgtg

SEQ ID NO: 142064 - DNA, 306 bp, Zea mays
  unsure (1)..(306): unsure at all n locations
  Clone ID: MRT4577_61045C.1
caanttcaattttttttttttttttgggaaaggaaaggtttcattaattcccaagttaatttgtttcttaaccccggggaacacttgtggacccccggggtttatttacataaccaactgggtttttggggttgaaacagtgtgtccggaaataaaaatttgtccccccacggtttttggtcaggttaaaaaggggcgggttcctttaaaaaccaggggggccatggggttcccatttggccggggttcttggaaaaaaagggcctttccaccagttgggggtcccttttttgacccaacgggggg

SEQ ID NO: 142065 - DNA, 854 bp, Zea mays
  Clone ID: MRT4577_61046C.1
cattgggtacctcgaggccggccgggacacagtccttcacctttaccgaagaactaacccaaccctactacaatggacaagatcaagcaagttttctcgcacgactccaccaagaaggaggagcaccaccacaacgccgccgctggcaccaccactgcgccgccgacccgctcgtccgcgggtgaccgcgagcaggttgtcgccccgaccgagtcgcgcgccgccacggccgagaccaccgctcccgtctccaacaccgccccgacttcggacaccggccttactggcgctcgccgcgacgagaccgcctcgggcgtttcgggcctgaagacccacgagcacgagcacggcgcccacggcgcgcacctgaaggaggttgctaagccccctgcgcaccagcaccagcacccgcgtgaggacggtatccttgacgtcgagcaggcaaagaacgcgaagcacgaccaccagcaccttgccccggtcactcacgagcgccaccacgttcacgaggttgaggaggtcgagcgccagcgcgaggtcgaccgcaacatccaccacgtccagcaccacgtccagccggtcctcgacgagcagcacggcgccgagaccgtccagcagaaggttgtcccccagaccgaggtccgcgagaaccacgttgccaccgacgaggacaaggcccagttcgcttcgctcgcgaccgctcgcgacgagttcgctgagggcccgcgggaaaagaccatcatcgacaagggcgagaaggttgtcgagcacgaccaccaccacgtccaccacgtcgtccagccggtcattgagcgtgacgtccacgagcacaaccgcatcaagaccaccatccc

SEQ ID NO: 142066 - DNA, 898 bp, Zea mays
  unsure (1)..(898): unsure at all n locations
  Clone ID: MRT4577_61047C.1
tttttttttttttttttttttttttttttttttttttttttttttttttttttttttttggaaacaatcaattgaaggggatctgaaacttgcattccaccgaaagcactagggcacacgaaggacaacccaaaccatcaaatggaaccaatcaattgaatgggatctgaaacttgcattccaccgagagcactagtgcacacgaaggacaacccaaaccatcatgctattctagcttagcactctagggcttttggtacacctaattatctctttccccaagttaataatggtacttgccgttggataattccacgcttgaacacgactgtactgtcttgctcaactgcttcacttcaccggttgcagttggttcctggcccctacaacaaggaaaccttcaactttccaaaaccattttgccaagggacctttttttttaaaaaaaaaatggtaccaacggacaaaaagaccaatatcattagctacctgtttgatttcatgtttctttggactgatgctagcatcatactctggtagctagattagtactgcgggcatgaggcaggtcatgcgcttcgctacttgtgaagttagtgacggctaaaactgccatgacaatacaaattaatcctgctatgcatatgtatgggctgaccttgcttgtacttactgcatgcacggacataatcttcaacagtaaacttgtgacattagtgacccatataggggggctgcagcgcattacctgtcccttcttaaaaaaaaggacaccactgcatgttaggttgcacaggaaattgttcaactcaaacgtagtactatactgacctttaaaagtaggaaaccagctggtggctgtccctgccaacaagtatattaaaatagaagtannctg

SEQ ID NO: 142067 - DNA, 571 bp, Zea mays
  Clone ID: MRT4577_61048C.1
aacacatgtatttcacggatgtctggattgaagtaccatgcgcataccacatttccgcataaatatacttggccttggatcgtttaggatggcatccgatgaacaatatgattaggagtttcttctcattctcattggaaaacattatcgacagaaaaaatcagatgcttggtctccccaaagcgtcatttttaaaggtatatcacttgtatttgttatgaagatgtctctggtaaggcttgagctgttgaaaccaactagatgtagcggatcaatttgtgtcaagacgccaatgacatcttggaaaggcagatgttggatccttgactactttcacttgagtgtaaagagtaaattgtatcatgaagttaccatcaacaggtttgaaatatgttttggaagatgctctctcatactcacacatttattatgtttacctcgttgctgaagttttttaggcccagaggaactattcaacgtgtttgaagaaaagattactctatgtattaatcaattgttcgcacgctgcatttcatgcgctttgtccacaggaactgatctaaagaaattc

SEQ ID NO: 142068 - DNA, 529 bp, Zea mays
  Clone ID: MRT4577_61049C.1
gctgctctagaagctaagtggagatgttgtatgaaccacacctcgccagctcgctccagacacgatctcgttgtcgttccgtgcgtcgtcaagaaattccaagcgtcgggtgaagacgaagctagccgcgtggtgttcaccaagtgcacgacaaaaagctcgaacatcctgcgcgactcaagttcgattcgtcaaaattatttagtcgaggagaagatcttcatcaattgattatcgaagaaaagaaggcccctggatgacgtcaaccggataccgtcatcgtgcttccgactatcgcgtcaaagtagtcagggtacattaattaatcgtgtaatgcggaagacgagccaagtcgaccccaagcgcgggctaatccgcaggatgaagctgatgaactaatctgaagatggatagacgaaacaagtattagaacaaggatgatcgtcaacggacgtcgtctacaacactaactagtgttcttcaggcaagccccgtgcatgcacccccttcttgtgtttttaatattttt

SEQ ID NO: 142069 - DNA, 1046 bp, Zea mays
  Clone ID: MRT4577_6104C.1
attgggacctcgagccggcgggacgcccgtcgtgtacgaccctaatctaatccttatttccctcctcccgcatcgctagccgccctcatccccacacgctcgccaaaccctagctatcaacatcctaccgctccctcctggagctcgcccagcagcgcgacatccttgtctatgacttcgtctccaacggcacgctcagtgccgccgtaccgctgctccccaggcggacccacctcgcgatggtcgcccagatcgcggcggcgctctagaacctccactttggcatgaacccgccgtcgtgcaccgcgacatcacctcgtccaacatcttcgtggaggccgacatacgggcatgcctcggtgacttcggcctctccctcctcctcgcaccgtcggacatgtgcgcaacggagggcactcgtgacctcgtgtgctgcacctcgcctggctggggcccgtggacgttggcaaggagcggcgggacatggcgctggcggtctgggtggcgcccaagatccaggtcggtgagcacagggtggtcgtcgacccaccggtgctgcccaagatccagtgtggttgtgtagtggcgatatcacaagctcttcatggataggtgacgatggatcgggttacaggtgctcttggcattaagaaattggtcattgtaaacagcaccttcgagaagaggagcaatatagcttggtcagtgtgaccggattatggttgtcttctagtgtttcagcacttatgacgtggaacttctatagcttggtagtgtttcacggttatggtgttactgtgtagtgttgagggacttattacttagaaggttaggtgatgtgttgaaatttccctcaactcatggaccaatatagtaggaaaagaacttagccccattagggtgtattttagtttttatgatctacacaaaccaattttatgttagtttagacataatgtttcattcttcatagatgattaggcctatattttggcatagtgcgcaataaacaagtctctatgataatcgtgatttacacatttttc

SEQ ID NO: 142070 - DNA, 217 bp, Zea mays
  Clone ID: MRT4577_61050C.1
acttcggaggaaaatttcaggctgaaggtttagcgggtgccgcctctaaagagagcaatcactacacttatggctgggattttgcgcttagtagttcaatggcacccaggcagactacagaccgtgacaaaaggtgtggagtctcttatttgtacagattggattcgtcacaaattcaccagatcaagacttccagacaaagtgtttcaggcctcac

SEQ ID NO: 142071 - DNA, 229 bp, Zea mays
  unsure (1)..(229): unsure at all n locations
  Clone ID: MRT4577_61051C.1
aaaaaacaaaaanaaaaaccactaggcgacggcgtatagactccatagggcgattgggttcacacagaggcgggaagatattttcctacacatgcctgcgtcgccgttgctcatgacactggtccggctacataatctgtaagataagggtaagggggaaggagacggaggcaggcatgggagccgcttcctgcctcgccgtcgcgacggcaatcaagctcctggacct

SEQ ID NO: 142072 - DNA, 254 bp, Zea mays
  unsure (1)..(254): unsure at all n locations
  Clone ID: MRT4577_61052C.1
ggnngggnnnnnnnnnnnnnnnnnnnnnnnnnnnngaagaaaaaaaaaacaaagaggaaaccagagaaagggaaggcaaccaaanaggnacaggagcanggancggaaagggnggccgagagganancnaanaaccnncacaaancacgggggggaaaacggggccacnggaaacccgcaaccgggnanaggagacancncncgccagggcaccaaggagnaaaaggganaagnagcaananaancaagacgcg

SEQ ID NO: 142073 - DNA, 366 bp, Zea mays
  unsure (1)..(366): unsure at all n locations
  Clone ID: MRT4577_61053C.1
ccccaaacctagcgttcacattcagttcctcccacaccccnctccccgggcaagagcctctcaaactttgtttagaccctnccctcccccccctnctccaccctccccaccctccatattctatcccacaagcttggccaccatctctcccaactcttctgcatgctcaagaccatcttgtcccagctcatgaagcacaagcacatcaagaccaccgtcgccaacccgacaaaggttccccggtactcgaatcagacggtccagctaaagccggaggccactcagcatccaccaagacttcctgctccctttcttcgccatgacgatctcgttcataagctattcactgtgctgtcctttcgctac

SEQ ID NO: 142074 - DNA, 191 bp, Zea mays
  Clone ID: MRT4577_61054C.1
atccctgccattagtagcaagcaagcaagaaagcagtggtagtaggtgccacccacagggtttttacggatggcggctgggatctaccgaagagatcgtcgtcacgctcaatggatgccctggtggggaggtactggggtctggagggactgcggagcggcacgtgcggcggatcgccggcggcggcgcac

SEQ ID NO: 142075 - DNA, 495 bp, Zea mays
  Clone ID: MRT4577_61055C.1
ccatcgattacaggtgttagatctcacagttcatcccctggatgctaacacgatgcctgacaaccaccacaaaaagcgggctcgttttagacaacacagacacctctaccccaagagcccgacttgaccgaaattgccacacattattctggctgcccttgagaaggccacctaggcggcaaaaccaatcctggagcgggcctggctctaagagcgccttccaacgacggtggctgagtaccagtattgctcgctgtcttttcagggggccttccaatgtatgatggattacgggctcaggggagattttgatcacgccgtggctttatttgtacatgaaacctttgttgcgcttggttacgaccatcctaatccacctcagaataaacaaatggattatgccgtgcattttggccaaaacgaccatgccttggaaccttgggcaaataattgtcaagagactttggcatgttatagtttataaaaatgatgacc

SEQ ID NO: 142076 - DNA, 348 bp, Zea mays
  Clone ID: MRT4577_61056C.1
tacgatccactgcactctcttcttcatttgtttcaacaacagctgccattctgttagcttcctgaggagtgcgcagggcatttactttcattcaaccaaccgtcacgtttgaactctcctgcttattgacagtagtttcatcttctacgacctaagccagatggctgcagtgagctcagctacctcctcgatacatccacaggtggtgccgttctaccagtacgctgtgcctaacgttagcaccctcattacaactgcaacattcgctgcacattcaacctacttgttttgtcatacccagcatggttctaccaacaacccatcattggaggtgccctctttacagat

SEQ ID NO: 142077 - DNA, 482 bp, Zea mays
  Clone ID: MRT4577_61057C.1
cccacctgtcgctggtccccgcgaagctggcgcaactctctcgctgtgcatcaacctatccacacgagcaggatccttttttctcattagattctttctcgttttcctttgccctccaaaattcgcaggatctcgtgcgtttttcttcttctttaggctttaccttactcattcgttcaagcgccaaagatccaacctggtcccttcgagactgctgcagtcaagaacgcaccatgctacccacccagccacccaccgcacacacactttttcctcccctcgttcttccttttccccctggcatgctcatccttgtcatgtcgtcattgtcgttggtgctgccgcagcagaggatgaatggttcgggtattgacttctgtccattaatgtaaagccttcaatgaacattcatttcgattataaatggaaaggagaaaaaaaacacaagttctggcaaaaaaaaaaaaaaaaaaaaaaaaaaa

SEQ ID NO: 142078 - DNA, 405 bp, Zea mays
  Clone ID: MRT4577_61058C.1
aacggaggccccaaggcgagagcttattcacatacttacccgaggtgctacctgtagctactagctagcacacaactggtagcttaacaagtacaacacagcaaagagggatgctgttaaccactgcacagcttacacacagactgcaatcgcctaatagctgttcgcttgtccggcaacgagactagcaggaacatgtgaacaaccgtatcctacgcctaaaggccactttacttactcacagggaagcaaacatcttgatacggtcaccgaactgggaaacaagggggaacaggaggcccatccacgtgctggggtaagcaggcgatccagcacacaactggaggaagccattcacaaaaaaaagacggtcgcgcaaagacttatctcgggcacccgtacttg

SEQ ID NO: 142079 - DNA, 137 bp, Zea mays
  Clone ID: MRT4577_61059C.1
tttattatatcaacccgacggccaacatcaaggtgggaatcaatgtgttcgggggggacttaaggcatgtgctcaatgaggatctgcattgtgactacttattgctcgattttgtgaacgactattttatatgtttt

SEQ ID NO: 142080 - DNA, 813 bp, Zea mays
  unsure (1)..(813): unsure at all n locations
  Clone ID: MRT4577_6105C.1
gttccaagtctcctgagcccaagcctgctgctggcactcccaccactgaagaagttgctgctcccgctgctgccgagaccactactgagcctgccgcagttcctgagcctactgctgagcctaccgagactgctgaggaacccgctgttgctgccgctgacgccacaggacctgccgaagagccagttgtgagcgagactcctgcctcaccaaccgataaggctaagaagtctgtcttgggtatcttcaacaaattcaagcaggcaaagcccgacaataaggctgccgacaccactgctaccagcaccgagcctgctgctgagaccgctgctgagaccgctgccgctcctgagactaccgaagagactcctgctgtcgccgagactaccgctgctgccgagcctgagcccgtcgctgctgaagagtccgctgctgttgaaacaactgaagagaagaagactccttcccgtccttcatctcctcttggtcgctcattgactaagctttacggaagagtcagctccaagttccccaagggaaagaaggaaaccaaggagactgttgccaaggaagagactgccccagctgctactgaagaaactactggctgctgttgagcccactcctgcaactgaagaggctgctgcccccactaccactgaagaagagactcctgctgctgctcccgttgagtccgctccagttgtcaccgcctctgcctaaagcatgacgaggaggaggagcatttattttttctcttataatcccaatangttttattacagattacgtatacttataacgattatctat

SEQ ID NO: 142081 - DNA, 283 bp, Zea mays
  unsure (1)..(283): unsure at all n locations
  Clone ID: MRT4577_61060C.1
tcccgccnncggcgtgtatcagaccccccgccctccccggcgccgcgcacagaactcactggnncncgncctcgccgagcagcagagggccgcctccagccagctcgccggctatggctgccgctggagatccaccacctcctatttatgctgagggtgctgcaaggacaagaggagaaatatctccacatttccagacatatgcaagggacgacgatgcaaaacttgagaccacacgtgcaaggctgtcaaatatcctcaaaaggcatgaagatctgaaaga

SEQ ID NO: 142082 - DNA, 628 bp, Zea mays
  Clone ID: MRT4577_61061C.1
gaggtctcggccgggaaaaaaaaaaaaaaaaaaaaaaaaaaaaaaaaaaaaaaaaaaaaaaaaaaaaaaaaaaaaaaaaaaaaaaaaaaaaaaaaaaaaaaaaaaaaaaaaaccggtttgggcctttttttttggaaccggttaaggaccctataatttggtcccgtcctggggccggttttaaaaaaacggttttttttggcccgaggttttttcccccagggccgtaaaaggggttatacttttgtggaaccgggggcttcccaggggaaaaaaaaaaaaaaaaaagggggccctgggccccaagttttggtccctttaaggggggttaattggccccctgggggaaacaagggcaaaggtggttcccgggggaaaatggtttcccgttaaaattcccccaaaaattccggccggaagcaataaggggaaaacccggggggccctaagggggggcctacctaacttaattggggtggccctaatggcccgtttccaagggggaaaaccggggggcccggttgttttattaaatcgcccaccccccgggggggggggtttgggttttggggcctttttccgtttcctggttaattgattcctgggcctgggcgtttgggtggggggg

SEQ ID NO: 142083 - DNA, 197 bp, Zea mays
  Clone ID: MRT4577_61062C.1
aaaaacccaaaactttattaggaggcaaatattatgggccataccacacaagaaaagggggggcgccttacggctttattacatatataaatagagggggggggatagaggaaattccccaaatatcataaatcaatagtagggcggaagggcagcggaaaccccacaggggttggggcggaagctgggcagttggt

SEQ ID NO: 142084 - DNA, 114 bp, Zea mays
  Clone ID: MRT4577_61063C.1
gttctagatcccgagccgccccccactagggagggggtccaccccgggattaaattccgacccgtaccttcaagcctaccaacttttcctataatgaggcctattaaaacttgg

SEQ ID NO: 142085 - DNA, 345 bp, Zea mays
  Clone ID: MRT4577_61064C.1
ttgtttacgcttggctggacgcgtgcaccgacgtacacactagcgcctgggatgacagtgaggggctcgccatacgctgagagggaaattccatagggattcattgccacttaccgatcaggcaccacttgccgggtgatacacctagtgatggaggggagagacttattgagatacttcttacacgagagaaagagagagaggtgggagctgacgaccacgctacgagagagggcggtcgtggcatacatgaggggctgcaacataggctagatgcgtctgaagcagcacttgttaccgagtggcttctgaagatagagccagacattcgtgtatgcatctatc

SEQ ID NO: 142086 - DNA, 284 bp, Zea mays
  Clone ID: MRT4577_61065C.1
tggggtgtaagcctatcttcttgtcaatccagtcctgctaattagtaaaaatccataggatcttacgaggcgagtgaacggttgcttaccatcatatttaggctacttacccttggtatgataattgatggaaatttttttagatccaagccgaattgtgttggatgatatggaaggtgaagcactcaacctccgccgggagcggtatgctatgatctgacttccaggcatttgaaattgtgcgtgctcaattcgcggtccagtatattgaccgagcatttgat

SEQ ID NO: 142087 - DNA, 181 bp, Zea mays
  Clone ID: MRT4577_61066C.1
ctcatgtctccgcttttctcttcgtctatcggctcgtcaagttatccagcagtctagctatgtgccgtgctctacgtcgttctccatggcgaccttcaaggacagcttggacaacttcaggttgacgttcatgatgacgtccttcatcgagttgttcaccgatgtactctacatcgtagga

SEQ ID NO: 142088 - DNA, 316 bp, Zea mays
  Clone ID: MRT4577_61067C.1
ataatttaccccccacacaaagcatcacccattacagtcacacaaacattccaaacccttcttaggtctcctctatcactctatattcccgcccttcattcgttttgcggctaaatcaaaatcacatgaaaacggcccccaggcccttaaaaatagtcttcttctttttgatatgccctctccaatttgtccagctccaccaaaatggggttcctcctcgtatttgtggcaaccccccaaaacgggccccaaaactctaaccggtttttctttccaaaacctttattataaaaccacccacacctttgcctccatc

SEQ ID NO: 142089 - DNA, 508 bp, Zea mays
  Clone ID: MRT4577_61068C.1
atgacgaagcaacaccctcgggagaccttggtggccttgtccttgatgacagtgacctcgtcgacggcggctacctcgcggaacaaggcgagcaggtcggcctcggccatgtgcttgggcacctggcccacgaagagcttgacggtcctctcctcgccgccctccttggctcctccgcctcctgcctccgccgcggccgcagacgccgccgcggccttgcccccgtcctccgccattggacgctctgcctcccgccgctagtgtttccgccggccggaccggaggattgctcgccgccgccgccgccgccgccgccgctacgggggggttgggtcgcctcgtcacgagctgtgggcggttgcgctgccaattgtttttttgggtttaggttgtggtggaagaggcgatggagttgaaggcgtcggaagcggagcagtttaactaataataattgcctagtggatatgcatgcctgcagttggaccgacagcaacggaattcgagctcg

SEQ ID NO: 142090 - DNA, 234 bp, Zea mays
  unsure (1)..(234): unsure at all n locations
  Clone ID: MRT4577_61069C.1
cannttcaaacatttcaccctgctgctgcagtcgccggcggcgaggaggagctgagagatggcggacgccggcggcgtgagggagcgggaggaggaagaggacgacgacttcgtctgcctggatccgtccttcttcatgaatcgcaactacgagatgaagaccttcacctacggctcccaggagctccaactcctctgcctcagctccgcctgcactgattatgatcttactgg

SEQ ID NO: 142091 - DNA, 362 bp, Zea mays
  Clone ID: MRT4577_6106C.1
actcctcgcccctcatcgtacatagcgtcagttcccctgcagctcatctcacatatcgtgagcacaactggccagtgagataataggcgtgggaccctgtcccaccggaagatcagctggccctagtagtagaactggcgacgctcacaattcctccttcttgtatgatctgtgacattaacatcccaactgtgttcgatgccttcgctgaggccacatgttgggaactctggtgcggcagcaggaccaaaggattacgttaacgtttgcatccagcacagtaatgaacacaatattcttactaccgtcaccggacagaacaaggagaacagattttttttttttcccccccccccccccag

SEQ ID NO: 142092 - DNA, 1684 bp, Zea mays
  Clone ID: MRT4577_61070C.1
gtttgattatcaaaaaaaaggaatatgtttgatctaatattaagaaaacagagcaaagagtgctgcagccaccggggccagtgccaatacagaaacggaatgcccgtgtagccacctatgtgtccagaaaaagttatttgcaccatcaaccacagaagcagcaaagagtgctgcagcattagggcatatacaacctcatttaatatgaagtctcttgaggggtctttagggggttagataaaaaaaatacaaaagacgggctcttcacgaatattgtttatattgtctcttaactgcatttatagtctagaggcttgtatcacagagtcttttaagtgtctcctatacttagaaaaccgaaccagagtctcaaagttgtacatgccaggttgtacatgcccttagagtgaacaagtgactgcaggtccttctaagggccgtcattcctggccttccttaaccagagccacctcatgttcagcgagacagcgaccaacccaaagcttctaaattatggattccaagaccgccttggttgagtgacctgcagactctttcccaaccaacaagacaatgccctccttgtacgtttattcgacctttctagaggaacctcttctaattttatcaatgactttaaaaactcattcagagcagcgcaaatacggagaggctactttgaacccgttacctgactcagtgagacaactcttaccagtgcaccagacctgcccttctgcagtatcactttattgatgatgaattttggatagctctacatgtgctggtttcttatcatttgatttccatacttcttttttttattttggggttaaggtatatgtgaagcagttgaaggtgatttcctggatgctcatagtttgcagctgctcaacccttacatgccaaacttaagtgcatcatggttgttccaacgagcgatgtcagtaaggccacatgtcaatgtttcaccaacctttatcaatgagcttctctttgctaattttcagtcaatgcagaaactaggggattcggtacttcggccatttctacaggatgtaatacagtttggacctcttgtgaaaactttggggctagtaatgatcactagaccacaaattttaccttccatatttaagcaggttggactgggagtcatccttgagtggtcaggccattttatgatgcttggttactacacattcctttctacctatattgatccgatcctgaggtcttgggtggaatccttgcccccacgggacaaatatcagtggaaacggtacctggaagcttggagatatggagccggtttagattaccgccaaggggaataaactgtttcactaaaaacacatgaaagtttcctcagaaacaaaattatgtatagatacatgaatatagcactgtcaggggaaagatgaatagagtacatatatgatctctgattgatttagttttccttttccagagcacaagattgaacatcaagtttagaatgtgtattatctagtttcacttgtaatttgcccactttactgaactgatggagtgaatatgtatagtactctagaatttcaaataatgctgaatggagctgagatgctcaatatttgttgatcaatgtatcaattatgtgaaataaaagtaaaaaaaaaaaaaaaaaaaaaaaaaaaaaaagaga

SEQ ID NO: 142093 - DNA, 603 bp, Zea mays
  unsure (1)..(603): unsure at all n locations
  Clone ID: MRT4577_61071C.1
ggacgcgtgggcaaagcttctaaattatggattcctttattgccttggttgagtgacctgcagactctgtggaggcaacaagacaatgccctccttgtacctttattcgacctttctagaggaacctcttctaattttatcaatgactttaaaaactcattcagagcagcgcaaatacggagaggctactttgaacccgttacctgactcagtgagacaactcttaccagtgcaccagacctgcccttctgcagtatcactttattgatgatgaattttggatagctctacatgtgctggtttcttatcatttgatttcacatacttcttttttttattttggggttaaggtatatgtgaagcagttgaaggtgatttcctggatgctcatagtttgcagctgctcaacccttacatggttagtgtatgccatagccatttcgatacaatttgaagtggaagcttattcggttttggtattgcagccaaacttaagtgcatcatgggtgttccaacgagcgatgtcagtaaggccacatgtgaatgtttcaccaacctgtatcaatgagcttctctttgctaatttcagncaatgcagaaact

SEQ ID NO: 142094 - DNA, 234 bp, Zea mays
  unsure (1)..(234): unsure at all n locations
  Clone ID: MRT4577_61072C.1
agaccctgagtacgtccgattccggtcaccacggtccggctctgtcgctaccctcccgacagatcgtagagacgcgcggatcgacccagcgacgcgngaccctctcgcgcgcgcatgcgacgcgacgcgtatcactcgagactcgagaagagagcggtacgctatgtcgcaaagtctctgactgtggtgtggctgatgaatggtgtgctgcatgtataacttgtcgtgtcgaca

SEQ ID NO: 142095 - DNA, 428 bp, Zea mays
  Clone ID: MRT4577_61073C.1
ttttttttttttttttttttttttttttttggcttcattaaaataattgggttaaagaaaccaagtccaggtccaggcaaggcaacagattacgcacgcttactaccgccaccaccagcatcagacacccgccatcttccgtttgctgcccgccacttgcttctaagcaatctcaacagtatggggaacattagcactagcaatccgcgcgaccgccatggccagcagcagcagcagctggtggacttgctttccttggaggagctccggagccatggccgggattttcctgcagccactttacaattggggagggttcatcctctccttttcgttttatttgccggctgcctttggataggccaaaataaaactttccaccgccatttaaggcgggatagggaaaaataaacttttccgccgccaat

SEQ ID NO: 142096 - DNA, 353 bp, Zea mays
  Clone ID: MRT4577_61074C.1
acggggggaaaaaaaagggaagcaagtaattaacatgcttgggtttggggggaaaaaagctgggtaggagttagatcccccgtttatttaatgggacaggatgggcctttaaaagaaaaatgacattgatcatggatcagggggagacctggatgacaccacgggctcggattttttggaaaaccttgtagggggaaaaaccagccttggaaaaaatggggggccagtcgtttttcccggcctgcctgccctgggggttaaccataatgggcatgtccataaaaaggtgggccttgaacatgaccggccccatttacgggcccaggattttttaaaagatgaccaccttccct

SEQ ID NO: 142097 - DNA, 561 bp, Zea mays
  Clone ID: MRT4577_61075C.1
cgcctccacgccaccgcttgtgacgccgccagggccctagtggccgccgcttgtgctgcagccatgtctctagtgatccctgaaaagttccagcatattttgcgagtactcaacaccaacatcgatgggcggcggaaaatagcctttgccatcactgccattaagggtgtgggccgaagatatgctcatgtggtgttgaggaaagcagacattgacctcaccaagagggcgggagaactcactgaggatgaggtggaacgtgtgatcaccattatgcagaatccacgccagtacaagatcccagactggttcttgaacagacagaaggatgtaaaggatggaaaatacagccaggtcctagccaatggtctggacaacaagctccgtgaagacctggagcgactgaagaagattcgggcccatagagggctgcgtcacttctggggccttcgtgtccgaggccagcacaccaagaccactggccgccgtggccgcaccgtgggtgtgtccaagaagaaataagtctgtaggccttgtctgttaataaatagtttatatacc

SEQ ID NO: 142098 - DNA, 295 bp, Zea mays
  Clone ID: MRT4577_61076C.1
ttcgtgccgcgcgctttgcttatggactcttagcctgttaccatggacggcgttcgtaccggaccgtacggccagatcttcctccctgacaactttgttttaggacaaggctggctgcgttgaacaacttggccaagggccactacacagagggcgcagagctcattgactgcgtgcttgacggttggagaaatgaggcttacaactgtgactgccttcaaggctgccaaagtggggcattcccttggaggagggacttggatctggaatgggcacgcttctgatttcaaagatt

SEQ ID NO: 142099 - DNA, 3236 bp, Zea mays
  Clone ID: MRT4577_61077C.1
gtttgaggaaggtataaaccgaggcaagccttcctccgaaaatgcagagaggctgcttcaaagccacgacctattgacttagtgcgacacctctcgtgattgcactaaatctacgcttcaacttatggacttactatactaatatttaagtgtggaatgtaactataatatgctttgcattgtactatttttttgtgtcttttcagggtgatgcttatcacaaaatctgttagctgtgctggattatcaaatgtggaacttccaaagttactgataagaagatcgcattttcttatgtcactcaccatttaccattctatgattgtatatgcttcataacatgctgatagaagcttgttgaagtgcaaatgttagccctcgtccatcgaccaaaaaaaaagtccatgaccgcggttttctcttctgcctttcctgccgccggccgggtctactcgtcccatcttgtagctgcagcggcaccccctcaaaatcgtccaaccaatcccaccagctgctcatctcgaatccagcccgaaacctcgcgccacgcgtgccgtgggcccagttcgtgcgcgttcagctgctgccccgcgcccagggatcgggaaggcaagctctttggtggttcctaagggcgaatctcgtggcgattcgctcagatttggatttagggtttaggaggcggtgctggtgatcggtttgtgccaccgggagagatgtcggcggctgtggcgtgcgcggagagggcgaccaacgacatgctgatcggcccggattgggcggtcaacatcgagctctgcgacatcatcaacatggatcccggacaagcaaaggatacactcaaactcctaaagaaacgtcttgcaagcaagaattcgaaagtgcaaattctaacactttatgtgctagagactctaagcaaaaattgtggggatattgttcatcaacagattgttgagcgcgacatattgagtgaaatggttaagatagtaaagaaaaagccagacttgagtgtccgagagaagatattgagtttgattgacacatggcaagtggcttttggaggtccatctggaaaatatcgacagtatcatgcggcttaccaagaactcagggctgctggtgttgattttccgcctcgtgaggaaaattcagtcccgttgtttacaccacctcaaactcaaccgttaagacatccacatctatatacacctccaggtcaaagctatgaagatgctgctatacaagcttctcttcagtctgcccctcctgcacctgccctcagtctgagtgagattcaaagcgctcgagggattgtggatgtgttagacgaaatgttaaatgctctggaccaccggcatcctgagggtgtaagggaggaggtcattgttgaccttgttggccagtgccgatcctatcaatctcgtgtcatggatcttgttaacagtactggcgacgagagccttttatttcaggctctaggactaaatgatgagttacagcgtgttgttcagcgtcatgatgacatagcaaaggggatccctcctggtactggagcacctttacctgcttctggaaatgtcaaccaagggactgccccacctaggcccactgcggtttcattttctccacttctaaatgtacatgaggacgatgaaccagaagacgagttctctgtgctttcccgcaggtctgcgagggatggtgcagtagcacagaacaatgtgccctctgctccaagaaatgagaggccatacccaagcccacttcttcctccaccaccagcatctaagaggcctgtttataccgaggcaagcagtgttgactatcttagtggtgactcctacaagtcagagaaggtttcagatgatttcatcaacccaactgctccagctaacatatccacatcatcccattcaaaggcagaagcacatccacctccgagttatggtggcaggccagacagagtatctgacgacttcataaacccaactgcacctagcttctcggcgccttctcgtcctacaaatgaggagccagcccgcccatccgtgaagcggcaagagagcctacctgacgacgacttcataaacccaactgctcttcctggtttctcgtcgtcttcagctactaaggagtctggcgaggaccttccaaaggctccatgggaagcacaagctgccgcgggttccctaccgccgcctccggcgaggtacggccagagacagcagtacttcgagcagaacgtgtattctggcgggagcaacgaaggcggctacaatggactgacgacacagaccgaaggtctctcgctgaacccgcggagcagcgagaacgagaggagcgcggcacggccggcagcgtcccgccctgccaaacctgaggactcgctcttcaaggacctggtcgacttcgcaaagaccaagccttcgtccccgtcgaaaccggccaacagccgcaggacccgctagaacgactcgtgcgatgcatggatggacattgggtcgttcggatattcatttcacaggttagcggcttttagatggtaccatgaaataaggccgtctggagactggttttcattgcatatttgcattgcatgggaaattgttttggttgcgtttagagtggcagatgtcagaaacgttgcttgctcataatcctgggtgtgtgatgtctagttagctgctcctaaatttctgtgtcgttggcttccgattctcattttctttttctttcacttagctgtgtatatatatgttacccgattcgacagcaaatattcatagttgagtttgtgacttgaggaatgaggtgttcctattttcggtattggataaattaggtgcctatttttcaaaaaaaaaaaaaaaaaaaaaaaaaaaaaaaaaaaaaaaaaaaaaaaaaaaaaaaaaaaaaataaaaaaaacaaaataaaaaaaaacaaaaataaaaaaaaaaaaaaatataaaataaaaaaaaaatagggggggccttttttaaaagaccaattttaacgtcccggctgggaaaaccctatcttttttttatttgaaccccaaaataaaatatccgcccctcgttttaaaacggagtagcgaggaaaacccctgggttcccccatttaaacagttttgaaaaaatcccctttttacgggatgggctattaagcaaaaaaccccccccgattgccctttccaaaattttgcaaacttaaaagtacaattggcaccccc

SEQ ID NO: 142100 - DNA, 678 bp, Zea mays
  Clone ID: MRT4577_61078C.1
atggcggtggcgttgcgcttcctaggggtcgcgagggagtctctctctggacgcgcccgtcgccgcctccaagctcgggagggagcggcgcccggcacccgcgagcacgaacccggggccacaatgcttgaggcggaggaggggcctggcggttcgctgccagacggggtccaccgcagcgcccttcctcaagacggaggaggcccccgcagctgcggcgggggcaaggaatgcccaagcggggttcaccttcatcatgaagttcggcggctcgtcgctcacgccggagagaaggcggtgagctgcggcggaggaggggcgtccgaaatccctgagctcactgtcatcagggagctgcatcttaggggtagcataggaggtgttgtggcgacattatctaggaagcggtctgtggatgtgaggcgaatcaacccgaaggtgcctaaggaggaggttgtcaccatctctggtcgactcgtccagatcctctccgaccatgggcccctcaccatcggcaacacctggaacaacaccaaggtacccaatcaaccagtcaggcagagtggcaaaagccggggagcgatgcaggcgtcggagaagcaacaacggaggagatgtcaagtgccaacaatgcttcagcatgtccaattcgcttgtggcataggaatcccatcctag

SEQ ID NO: 142101 - DNA, 507 bp, Zea mays
  unsure (1)..(507): unsure at all n locations
  Clone ID: MRT4577_61079C.1
ctacctaagcttggatcctttagaacgggcggccttttttttttttttttaaagaccgaacccaaagggcacccaatttgggccttcggttggcaaattacaccagaaaagcccaacgggccacaatttggcttcaccttaattattccaaccccacatgggccaaaccccaggcggccttaaaccaaagacccccccttatacctagaccgggattagaccagcccccttccacttggtccagtccagttggcttccaacttttccttattaggttattacttgccttatttttttttgcccttcttacccggccgggaaaaatgaatccaacttgcgggaaccggccgggaaccgaccttttacttacaacctgcctaattattaataatgngattatgacctgaacggccttgcccttggcttaggcggcggcgaaggcaacccccccaacaacggtggcctgacacggcctaanaaaagggcggccccccgtaaaccggcccg

SEQ ID NO: 142102 - DNA, 546 bp, Zea mays
  Clone ID: MRT4577_6107C.1
attagacaaatgttttaaattggtctttgcaatatacataattcactttgaaaaatgtgtaaatcacgattatcatagagacttgtttattgcacactatgccaaaatataggcctaatcatctatgaagaatgaaacattatgtctaaactaacataaaatgcttttgtgtagtgcataaaaatgatcttttcctctaatggggtgaagttcttttcctactatattggtccatgagttgaggttcttttcgtctcatgttctaacctacagaaaagggaaaacacattaaagaacttgagtaggaataaccaaacaagtaaaaaaccatatggattacttgcattacataatctaaaatacacctgctaagtacttagtccctccagtgtccgcagtacaaccataagtgttgaaacactaacaagtcacagaagttcgaagtcataagtgctgaaacactagaagacaaccataatccgttaacactgaccaagctatattgctcctcttctcgaaggtgctgtttacaatgaccaatttctt

SEQ ID NO: 142103 - DNA, 264 bp, Zea mays
  Clone ID: MRT4577_61080C.1
gtccactcttcctcttacgccccaataccttattgtaaaacctacgcgatttcccttccaggaggatctttgcaatctcctacactacaacaaataacccatgaccatccacgattactgaattgcctcctgctttccagagtgcaatataatgcacattggctgcactgtatgctgttaacactgacactgttactcataacactttcaacacacaaacctcttcaggcctttatgcattaacatatatcgccactactatta

SEQ ID NO: 142104 - DNA, 163 bp, Zea mays
  Clone ID: MRT4577_61081C.1
agggggcccaaacacagaagggatccgtgatcaagagctcggttgacaatgaaaagatacgagcaacaagaagaaggagaactgggaaaaggatcctcatccatgaccgacttgaggattgaccaattggctcgctgatggttctgatttcatcagtcgaaac

SEQ ID NO: 142105 - DNA, 533 bp, Zea mays
  Clone ID: MRT4577_61082C.1
ggcaaaaaggcggggatacacgggaacaagctaaacgggactaagaaaaaaaaaaagcaaaacaaacaaaaaaggacaaaaaaaagatagggtagatacaacaaggagcagcacctacaaaagcacgctggaacaagggattttattaaaacaccacaaaaattggtaaaagccacttccccaattgaaaactgctggggggaaggggggagggtcaagctttggtttgggcccgggcttaaggtctggctgggggtttgggtcgggcttaaggtctgggtttggggggggccctgggtttgggtcgggtttaggctctgggtttggaacaagcttaagctctggctttgggtggggctccgggtctgggttcgggtttgggtcaaggtaaggctctggctttgggtctgggtctgggcttgggtcgggtttaagcccaagctttggctctgggtttgggtcgggcttaagctctggctttggctttgggtttgggtctggcttaagctctggctttggggggggctctggct

SEQ ID NO: 142106 - DNA, 447 bp, Zea mays
  unsure (1)..(447): unsure at all n locations
  Clone ID: MRT4577_61083C.1
aaggagattctcctcgccccttccactagactactggagtacccgacggcccgaggcggcgagctcgtcggcgactgaccgccgccggagcagccgccgcctcccgctggttcctgtaccacagcctcgcaggagcgcctccgttcgctacgccacccgccactgtgctgtcggaaggcagctcggactactcgcgccgnctcggcttctccgcgctcgccgccccttcgncggcgtgatcaaggatggagctacatcgtgaacctgctgaagctattctgaatgccataaaatttgatctcatgacgagtacggatatggaaaaattgagcagcatgagcataatcgaagtgagtgatgtcactagtccgaagctaggattaccaaatggttccctgcaatgtgagacttgtggatcacaacgtggacgcgactgtgatgggcatt

SEQ ID NO: 142107 - DNA, 423 bp, Zea mays
  Clone ID: MRT4577_61084C.1
gtaagggacacgaaaacgacgaggtttttgtactgagggaaaataaacagaatgatcactattttttgcaagatctactttttttttatgtgccagtctaaaacatgacacacacgtagctaggacatttttggtacaaaaacaactgtttaactgtttatggacacgtacgctgtcatacaaagagcgagctaccttcactatggcctcatcgatcattttatcttggtgcagaaaattgtttttgttttttggcaccccgacggagacgcttttcttgcaaaaaataaatttttgaaaatgggcattctgacgccggcgccgagccggcccgttatgatcttgcagcagttaaaggtggtctgtcggtccgccgtcgaccacactcaactgttgatttagcgcaccccgctgaaagacgcc

SEQ ID NO: 142108 - DNA, 484 bp, Zea mays
  Clone ID: MRT4577_61085C.1
cccacgcgtccgcatttttctcttctgctcagcgccccggcatccaatcccccctcccgttggccgtgctctctccggtatcccaccatggatatgccaaatgacacttgcccttcaccaaaactccacacaagactgaggctgtgggaatttgcggactgttatgtttttgaaccagttggtcttaatgatcttttactgtcagtcaaccggatcaatggatcaatgaatctagtggaggaattgccacagcatggcccctctataaatccaaaagttcaaatagtgtttggtgtaataggagtgctaaaacttgcagttgggacatatattctggtgatcactgaccgtgattgtgctggatcctacttgggacatgcagttttcaaagtgagaggtctgagagctctgccgtgtaataattccctttctgcttctgctgaacagaaaaaagtgggcatagaattttcagaactcttggatg

SEQ ID NO: 142109 - DNA, 155 bp, Zea mays
  Clone ID: MRT4577_61086C.1
attcccgctgcgacccactcatccgaatctagatccttagcacacactgtctactactcaatcttacatacccttacgtgcgacaatttaactattacataccttcaactaaattcaactaactcaccgtctacattacacaatctatactcaca

SEQ ID NO: 142110 - DNA, 308 bp, Zea mays
  Clone ID: MRT4577_61087C.1
cccagacctgcgaccgcgcctgctcgtaaactccagcgcgaccctcggagccgtcgggtgggccacccacgctggcggcgtggataaatgccgtaagcttggccagtattactctcaacgcctgtggatgctcaggacgatggtgtcgcagctgctgatgcacgtgcgcattgagatcacctctgccaaggtcaaagacgttcgcctgaaggctgatcatatggtgcaggtagggatggaggatactcatcatgcaacaagacaagctgttcccttcgatcgatgggatgatgaccttcataaactat

SEQ ID NO: 142111 - DNA, 280 bp, Zea mays
  Clone ID: MRT4577_61088C.1
cccggtcgcccccgtccggtagttctccttttctttcgagttccctacagccaactatcttgacctcgcttacaggacattgatgcgataaatggtaataataaaaacttcaaggcagcgaacatttatcaaacttttcccaaataaaggatctcgggcaccacagagaaatggagcttggggggggaaccattgttaaaccgagatttgaagtccttaaggaaatgcaaactttcaaaaagcgttcttttctaacaggggttggtttggaagcactgat

SEQ ID NO: 142112 - DNA, 448 bp, Zea mays
  unsure (1)..(448): unsure at all n locations
  Clone ID: MRT4577_61089C.1
aaactataaggggatcacatcaggtttttctttttattaaacaggtaggatattcccacgggctccgaacataaactaggagaacatagaagacaggaaccacacaaggttgaggccaaaaaggttgaacaacgggggagggggggcagatggggctttggttgacaaaggaccaatggagaggatttttggggccttggcaaattgaaaaatcttaggcctagtacaggggggcttttttggggggggggatgaagcagttggactttggggaggagaaggatgtnagaaaaaaaacttttttctgggggccgggattaagggaggaactattggagtggggaaangaaacagaattgattttggggggaaaggggggggaagggnnagnangggacgagtatgggaaattaaaaangggagtttagggtgggtaagggtggagggg

SEQ ID NO: 142113 - DNA, 142 bp, Zea mays
  Clone ID: MRT4577_6108C.1
aaggatcagctacgcacgtccggggcgaagggagctatctaggccgccaccctccactccacggacggccagcgtgtagccaatgatattcacccttgaggcacttgaacgccctccacgcaagccagagagcttcggagag

SEQ ID NO: 142114 - DNA, 431 bp, Zea mays
  unsure (1)..(431): unsure at all n locations
  Clone ID: MRT4577_61090C.1
naaaaaaaaaaaaaaaaaaaagaaagaacgataaaaaaaaaaaacaaaaaaaaagaaaaaaaaaaaaaaaaaaaaaaaaaaaaaaaaaaaaaggaaaaaaaaaaaaaaaaaaaaggggggcggggttttaaaaggaatccaagctttgggtaacgccctggttgcaacccaactatttttttttatggggcaccttaaaattaaatgtcagtgggccgtgatttaaaaacaggcccgccacgggaaaacccttgggcaacaaccaaatctaaatctgattgtgcaaaaaataacccttttctgcaagggggcgtaaaaacgcaaaaaggcccggagggttacgcccttcccaaccgttgcacttcctaaagggctaagggccccccctttgtatgggtccattaacttgcgggggcagtgggggttacccc

SEQ ID NO: 142115 - DNA, 458 bp, Zea mays
  Clone ID: MRT4577_61091C.1
gctataagcgagcctgagtaccataatttttcatttcgtcaccagaacaaagaaaacggttaatagcacgaacacgaccgtacttcacttggaggaacaaagagttggctgtgccctggaaacaaaaaaattgcttcagggacactaatgctcaactcgactacacacacctatttttttgttaattcgagagggcggacctttgggggatcgtttaagaaagggtgcattgccctttctaacatctttaaacaatggatggtccaggtcctggtttgatgctatccggttgcacgtgttggatcatgtccattattgaataagatcgtacttatgatcgtggaggtctgggctaggagcagacaagttaccatgtttcctgtgggggctcttgtcccaatggggcagatagagtaagtcttgacgcacaataactattcgggcggccaatgaccttg

SEQ ID NO: 142116 - DNA, 175 bp, Zea mays
  Clone ID: MRT4577_61092C.1
cggaagctaggatcctcaacattggacgccgccagatatctctttttcaacaaaaataccttccaaaaccattaaagcagggacctacggacaaacctggcgccgcggaatccccaattccacacggtatccaaagaaccgggccacatagggaccaacatcacccaattgaagc

SEQ ID NO: 142117 - DNA, 371 bp, Zea mays
  unsure (1)..(371): unsure at all n locations
  Clone ID: MRT4577_61093C.1
ctgctatctacttgcaggctctaacagctactaccatttaaccaacttggggggagcccttatgcctttttactgcaacaacagcatctaccattccatctgcaagctgtggcaaacattgctgctttcttgagacaacaacattttgttgccatttttacccacaaggttgtgggaaacattaatgccttctcttgcaacagcgaacatttgcaaccatnctacccacagaatgtggcaaacatttgttgccttcttacaacaactacaaatagtgccatttatccaacatgcttttacgaattctaccaccttatttgaaccgtccaccattggtggggtcaatatctataattatttatggatgtata

SEQ ID NO: 142118 - DNA, 343 bp, Zea mays
  Clone ID: MRT4577_61094C.1
gaaaaacaaccccccggcattcaaataatggcagcccatcggcaaaggcgggcggggaaaccccaaaaaccaaagatggctaaaaaatcacggaaccggtttaaacaaagctttaacccggaaaattccgaggcaacacaaaaacgagggccggggagcctccaaaccaattgggagagagccgcaaaaacggattccaagggggacccaacaaaaccccgggaacctgggcggggcccacgctaggggggattcccaccacccggggggccgccacaaggggacccgagccgggcacaagccggggcgaacaaggggccagagccggtcccggcgcaaaatg

SEQ ID NO: 142119 - DNA, 328 bp, Zea mays
  Clone ID: MRT4577_61095C.1
tggcttggaacctttgggctgatttatgtgcttgcctatgtacatgcatttgtgtcacacggggaaattacagtcttcggctgtcataaggcatcaataactcgctcttgcttgccacgatcgtttacttattgatatatcggattgaatgacctagacatatacgaaactccctctcttcgtatggccgacggagttgcactgcacgtcactgctagatattagcgagtcattaaaactacggggaaggagatcgtctagcggattattctctgactcgtgattgtccccggttgaatcggctgtgtcgacgagcgtatacgtgctc

SEQ ID NO: 142120 - DNA, 256 bp, Zea mays
  Clone ID: MRT4577_61096C.1
aaaaccaaaactttattatgatgcatatatatgctggtcataccacatatgatttaagttgtggtgatttcttggctagtgactatatttcttcgtgacgtgacggatagtggccctttctgaattctgtggtaggatatgaagcgcaaagacggaccagatggttaagggttgtattctttaattatttctctatgttttattacttactttacgagtttctgatcttttgcgttctattggattggatttgttc

SEQ ID NO: 142121 - DNA, 470 bp, Zea mays
  Clone ID: MRT4577_61097C.1
agcagtggtaacaacgcagagtacttttttttttttttttttttttttttttttggttttttttttttttttttttttttcatcacaaatcacacacggactagacaatttcggatttaaaggtcgaattcagagggctaaacaaaacaagggcaggaccaccggcggggtcatcaaaacaagaggcctgctatggctggggggagcgctacaggggggcggggcgccaccaggcacaaagctccaaaacccaggcaggggttaaaaaccgggggttctcttccccccccttgaaaagggcgaggggggaaacgccagaaaccttcacgaccttgaaacggaccccggaaaaaaggcccacaggagggcccttacgaccgaatccagcaataggcaccccccccgaactttgcgtagaaaccaccgcttaagggcgaaaccgggaaaaatccatccccccggcggccggt

SEQ ID NO: 142122 - DNA, 492 bp, Zea mays
  Clone ID: MRT4577_61098C.1
tggcttggaacctttgggctgatttatgtgcttgtggatgtgcgggtggatgtgcgggtggatgtgcggggtggttctttatttacatattccgggtgggtgttgtgttgctgagggttacttagagtctgttacggtggttgcttggcttaatagggtttatgtttattagtatcgttgtcttgaggtgctgcgtttgatgattcttgcggttgcggtggtggtgagggttggtgatgttttatgttattgcctgtaggtcttggcgtaggctctgaaagggtactattagacgtggtggctagtggtgcctttattgtgctgtttggcgttagggtgctgtttcttctagtgccgcgatagtgattctaatacttggtagtattgtattcgtagtgaggcggttggtggtatttgtggtggtcgcgtggctgcgcgtcgtcgtccctttcgcgctacggcggaggctgcggcggtctgtatggcgtgtgt

SEQ ID NO: 142123 - DNA, 282 bp, Zea mays
  Clone ID: MRT4577_61099C.1
ggttaaaaggatgcacgccacatattgtacattgcgtgaagccagtacacaagacagaaacagatgatacctacgcaaaccaaatttggacaaacagtcgaaactgacggaaaaaacagatataacatctgtgatgtataagacaagctagttccaatgcatgaacatgactaagcacgtaaatcatggacctcctgaagtgcttgctgcagattattgaccgcgctgtcatagtgaacgaagcgccataaaccaaaacttatgggtatcaacagaaaccac

SEQ ID NO: 142124 - DNA, 687 bp, Zea mays
  Clone ID: MRT4577_6109C.1
ttgggtacctcgaggccggccgggctcttctcaccccaacttgacatcatgagcaacgtatacttcgacgtcaccaagaacggcgctcccctcggacgcatcgtcttcaagctctacgacgacgttgtccccaagactgctcgcaacttccgtgagctctgcactggacaaaacggcttcggatacgccggatccggcttccaccgtgtcatccccgagttcatgctccaaggaggtgacttcaccaagcacaacggtaccggtggaaagtccatctacggcgagaagttcgctgacgagaacttcaagttgaagcacaccaagcccggacttctctcgatggccaacgccggacccaacaccaacggatcccaattcttcatcaccaccatcgtcacctcgtggctcgatggcaagcacgtcgtcttcggagaggttgtcgagggtctcgacatcgtcaagaagatcgagggtgagggatcccaaaccggccgcactcgttccaagatcgagatcgccgcttccggaaccgtctaaacgcctcttccaaaacctggggagcgtttttgactgagcaacatggagcgtcgggaagaaaggaaactgagggtcggaagtgcggtgcattctgtcgtgcccattttcatttttgtttttcttggttcttcgaagcggtccctgttgcac

SEQ ID NO: 142125 - DNA, 1195 bp, Zea mays
  Clone ID: MRT4577_610C.1
gaacttgaacaccagaggtcattcaggcgttggtgacgaatacatttcaagaataatttcaggtatccatccatgcaaatttgtttgtgtctatattgttgtggcgttttgatgacactttactcgttgatgggtctgttgcggttgcagagatggaggaagatgaccaagttttcgacctagcgctagaagcaagattgcatgctgcggaaacgatcaagcagagccggcaagaactgatcgtggttgcgtcattggtggaacgcataccaaatcttgcggggctgacgagaacgtgcgaggtcttcagagcagccggtctggttgttgccgacaagagcgttcttcaggataagcagttccggctgatcagtgtgaccgctgagaaatggctgcctgtgacggaggtccccgtggacagcgtgaaggcttacttggagaggaagcggggcgatggttactcggtgattgggctggagcagacggccaacagcatgcctctggaccggttcgggttcccggaccggacggttctggtgctggggcgggagaaggaaggcatccccgtcgacatcatccacattctggacgcgtgcgtggagatcccgcagctgggcgtggtgaggtcgctcaatgtccatgtcagcggcgccatagccgtctgggagtacacgcgtcaacaacgcaatcagcgttagcttgttgcttgtttttgctccattgaccattgacgacgaagactactactactacctgggagggagagtagaaatcaacatgcagcactcacaggaaggagagaaagacctgggctgggctgggctgggccgacagtaatgaacgctagcccaccttcctttcccaccaccaagacgtacaagtcagactatattacttcatttatttgtgctaatatcgtaacgttttattgtgtaagcaatttggtacttgaagcctgcctgcatttggatttggagcggcatcagaagttttttaaagtatttattcgtagaggggtcgatcgagctcgcccttttattgctgcaaatatataatacacattattactgctgcaaacataagattacgttacattacattaaatgaaaagctatattacctccaaaaaaaaaaaacaaagaggagggaagaggtttacctcttgccgataaaaaaccagacgaaccctttacag

SEQ ID NO: 142126 - DNA, 362 bp, Zea mays
  unsure (1)..(362): unsure at all n locations
  Clone ID: MRT4577_61100C.1
aaggggataaaggagagtccgagaagcgcngaaacgagaagactggcacacccgggttttcgcataatcccaggcacggcttactcactatatggaatcttccgttactctggtcttaaattctacttctacgagaagatgaagagccacgttcctgaagagcacagaaaaggtatgatagcaaaactcggttgccaatcagttatatgactcgctagggcatacaataacataccccctagatcttgttaggcgacaaatgcaggttcaagccctttagtcatacagactagtggataggggaacattacgaaagcctggtaatgatacccaaacatcaaggctggcgacaactcttctca

SEQ ID NO: 142127 - DNA, 840 bp, Zea mays
  Clone ID: MRT4577_61101C.1
atttttccaatcccgctattaaactcgttcccctcccaagaacccgcagagcgcaggcaggcatcttcttcccccttcctcctcccctctcctccgtcgccgccgctggctttccttcccgcgagcgaggatcgtccctgatccgaacggggcccgccccccgcctcctccgtgcctggaggtgaaccaagcaaatattttcctgacggcaagtttgttacagactggcctttccttggctgaatcggcacacactactaacatggaaacatacaccacggatgatgcgcttacaaccatgggatttggaaaattgcaaggacttgttcttgtttatgcaggcatgggttgggttgcagaagccatggaggtcatgctactgtcgtttgttggaccattgattcgggaggaatggaaaatctctgcccaagatgagagtttactctcaagtgtagtgtttttgggcatgttaattggagcatgtggctggggatatgtgtctgacaaatatgggcgaaggactggtttactgttttcaactctgtttactactggaatgggtttcctaagtgctttgtctccgaactatttatgtttgatggctcttcgctttctcgttggcgtaggactgggtggcagccatgtgtattcatcttggtttttggaatttgttcctgcacaaaatcgtggcttttggatgattattttttcctttttctggactattggcacagtcttggaggctcacttgcatggattgtcgtatcacatttgacttggaggtgggtgctagcattgactgccatcccttgctttctcttgctccctttctttggatca

SEQ ID NO: 142128 - DNA, 229 bp, Zea mays
  Clone ID: MRT4577_61102C.1
cggaattactctggtggacccacccactccgtgcggtagacttgatctccaacctcttccttccttgcttaggagtgatagggaggaaagagagcgaggaagaagacggcgagctaaggccaagcctgagtccccacaccatgacgctcgggctactcaagtggcctcaaccggatggcgctgtcttgtaggccccacgtttgtctaaccatgacgcggaggaattcat

SEQ ID NO: 142129 - DNA, 720 bp, Zea mays
  unsure (1)..(720): unsure at all n locations
  Clone ID: MRT4577_61103C.1
atctctcattcatacttacttgtaccaatgcgggagaaagtaaaaagggctctaaagactccgtttttggcgattaatgccaaagggggagagagtattagcccaaagcacaaggaccgcaccaccacgccaatttccaaattttttgaaacaaagttgttttcaattggtatctttgaaattagtattcctataagaaattctatctcaattgatatctatatcttaaagaggagtttttcaaattttggtatctaagatatttgatcttctttcaatttgtaaaacccctcttgaacctaagagggagttttgtttagtcaaaggaaaagcatttgaaacagggggaatttttttttcaaatcttgaaaatgcttctcgaaatcttattcatatacctttgactatttgcaaaaagactttgaaaaagaatttccaaaaacatttgcaaaaacaaaacaagtggtgcaagcgtggtccaaaattttaaagaaagcaattcatgcatatattatgaaagtataaattggtttaattccaagcaacctttgcacttaccttatgcaaactagttcaattctgcacttatatatttgctttgggttgtgttggcaatcaatcaccaaaaaggggggagattgaaagggaaatagggtcaaaccttttcctaaatgattntggtggttgaattgcccacacaaatattgaactaactagttt

SEQ ID NO: 142130 - DNA, 389 bp, Zea mays
  Clone ID: MRT4577_61104C.1
tttcttcttttttttttaaaaaaaaataatcaaatgggtttctcagtgtttttagctgtaaacagagcgcctgtgaacatctgaattggcatggagcactaacaatctcaagctcagctttgccttcaaatgcaggaatcacaaactggagcctgagagggtatactatcccccatgaacatagcactagcatgggagtttgtactaaacgtgagcgaatcaagccgatcactcaggtagtttatgcctataggttgtcacttatccctcttgcctaaaaggaaacaacccactcttggcactggactccccttgttaaaaagactggccctgatatgaggaccagtggatgctctagcctgatacacaacctgagcatttctattatc

SEQ ID NO: 142131 - DNA, 340 bp, Zea mays
  Clone ID: MRT4577_61105C.1
atccggaatgagcccgctcggccaaatggaccggacctgagcgctctcgttcgctcggacgcgagcagtgcatgcttgagccaccgccgccgcgaggagctccgcccgtccgccgtcatccgtcaaatcagggagcttcacagcgatggatctgaacagaagtgggaaatggcagaaaagacccggcagctaggtattgtgcacgtcattgtgtccgtccgtcgtcggatctggtcgcactggagacgtagtgtctgatcaggcagcacagcagccacccgtcgatagatactagttgacgatagggttgtacggcaggggcagctgcgtgttggacgac

SEQ ID NO: 142132 - DNA, 285 bp, Zea mays
  Clone ID: MRT4577_61106C.1
cttcattaaaaaaaaaggggggcccactacgggggattattatcgggacacctgggggggggcccccttactttttggcaaaattttatgaaatagagcactgttggaggggtttttgctgtgttgagccctttttttttatttgaggcacttttttgggggatggtttgagatgctcttgggactaatttggggatcggggatcccttggggaagaaagcctattccttttcaaaattggattggaagggattcctcccccgtggatccccttgggacacctaa

SEQ ID NO: 142133 - DNA, 470 bp, Zea mays
  Clone ID: MRT4577_61107C.1
gtcaaagccttggttggtaccaagcacggccagggcaacgaccaagcaaggggaaaccaaaccaggacccggacgggtgggccgacccgggagagcgggaccggcacccggaggcggaccagcaccccccagagggggacccaaaagagcagggagtaaccaaagaaaaaggcgggcccaggggaaaagcgggatccggccaaaatgccacacaaaatacacaaccgaaaccaaaaaaagaaaaagcaggaaaacaaaaggagggagcaaaggcaaaagaaggggggagcaaacaaaaaccgaattccaaacaaaaaaccgggcgaaccaggggaataaaagaaacggacaacgcgcaggaaaaggccattaaagaatgggacacaagggggggacaggcccccaccaaagggacccccaacacgggggaggccttaaccagcgggaccggaaacagctgcagggagcga

SEQ ID NO: 142134 - DNA, 1719 bp, Zea mays
  Clone ID: MRT4577_61108C.1
agctgatatagagaatgagcccgcttgcctggctgtccctgccctcaccgtaccaattctccgagcggctctcggagtggctctattccattatacagctgatatccggaatgagcccgctcggctaaatggaccggacctgagcgctctcgttctctctcacgcgagcagtgcatccttgagccaccgccgccgtgaggagctccgcccgtccgccgtcatccgtcaaatcaggtgaatctgccaccacctcttctccttccaggccccctcttctcttcccccaccggcccctttcctcctccactatttgtgcttctgccaccgccaccttcctccacgccgtcagcagatctgctctgtcttctcctcccttcaccagatctgctgggtgcagggagcttcacagtgatggatctgaagagaagtgggaaatggcagaaaagacccggcagctaggtattgtgcacgtctctgtgtccgtccgtcgccggatctggtcgtagtggagacgtagtgtctgatcaggcagcaacagcagcgacgcgtcgatagatactagttgacgatagggttgttgtggcaggggcagctgcgtgttggacgacaacgcggtgcccatgccgttggcaagcgtcgcggccgtggcggcaccgcccaaggcgttggcggccaccacagacacggttggccttgtaggaaaacactaataaattcttgtttattagtgttgtcttatctcttggtttaataccatccaaagaagtactgtcctgtcaggaaaacactaataattcttgtttggacgaatcttcactccacttggatggtcaccatgctcagttgtgataacaagacaaatccaagctggttaccaacgcccgattgcacaaaagccattttattcgaatatatccaaatgcaatctgtaaaaagattactgcgaatcagtttaatcccagcaagaatctgggaattttctgttgttgctttgtgctcgcacgagcagcagagctagcactggcattcatggcactgttgtgaatgtgaattctacgcacgagcaacaagaatcatgttttgtttcttaattttaattcttcaattgttgtctcatgttctgcttggcggatatgcaacaagaaaccggtaactgtgctactttccataacaatggcagtgagcatccttccgattttgtaaactattttacttgtatggccatttggtacaggcgtcggactcccaggaggatgaccggtggcaagaggttcggcggcgggcgggtgccgacggggaccccgtccctcgcgtggtcgtccgtcgtcatcgtcgcctccctcctcgctggcgcctccatcgtccacaacatctacaagcctgacatgaccattccacctgtggagggtgccgccggcggcggcggccaagaaagctgagctacgaatggctggacactgcatgcaagagaggaggctgggcatgggagtagtgagggaccggccatcagcaccttttttttttttgttctagaacaaaaacgatattatgttgttcttttctgttttgctaccaaaagatgtgaggctgcatagtatttgcttcgttaggcgctactggtcacgcgtaaccaccgtatatgtacgttgattttgttttttctaatgcctaataatcactgcactaaaaatgaaaaaaaaaaaaaaaaaacccgcggcc

SEQ ID NO: 142135 - DNA, 290 bp, Zea mays
  unsure (1)..(290): unsure at all n locations
  Clone ID: MRT4577_61109C.1
ctctactaccacatggacctgctcaccaagcacggccacttcaaatgcacaggtaactcagctanactgacgggatgatgctagctgctgtcacctcgtccatctcgatctcttatcgcatatgcatgtcgtctanatttanagccctgtttaatttggtgccacttttcactagctagtanattgngggtttttcccgttagctccacgagcagcgtcgttaatcacaaagctanaacctgtttgatanagaaaacgttggatagctttttttatntcatgaatggcta

SEQ ID NO: 142136 - DNA, 232 bp, Zea mays
  Clone ID: MRT4577_6110C.1
aaaaccttttctcctccatcgccggctatcttgtccttcgccgacaacggatttctccgctatccaggctgccctctccgacaggtcctactgcaccctcgcctccctctgcgacgaacgttctcctccaggccagagttccaggggcttcaccagcccacgacatgcgccctactactgtccacgcctgctggcccgacctctacatggaatcgacctggaacagccgcag

SEQ ID NO: 142137 - DNA, 595 bp, Zea mays
  Clone ID: MRT4577_61110C.1
cattgggacctcgagccggcgggacccattcgacaaatggcacctgcagcaactggaggcaagaagcaaaagaagaagtggtctaagggcaaggtcaaggacaaggcccagcacgccgtcgttctcgacaagaccaccaacgacaagctccagaaggatgtccagtcctaccgcctcatcaccgttgccacccttgtcgatcgtctgaagatcaacggctcgctcgcacgcaaggcgcttgccgacctcgaggccaacggtcagatcaagaaggttgtcggtcactccaagctcagcatctacacccgagcgattggcgacgccgagtaaatccgcgtttacggactagtcaatgaatccaaacgcgagactcgggacacctctttcagtttttcaacggcattcctctttccatttccgatcggcgtcttcatgaaatgaacgggtcactatattgggatgcaggcttcatagcgggacatgaaaatgagaggagcggactcaggtacagcacctgtagtgcatgggatgtgccggttacgtactgaatgaaaaagatatccgaaacacgaaaaaaaaaaaaaaaaaagcggcc

SEQ ID NO: 142138 - DNA, 212 bp, Zea mays
  Clone ID: MRT4577_61111C.1
ttcctagcgtggacgagccttcggcccaagccgatgtccccgcagtacgggcctagcagagacgcctgacggatgatcgtccactcagacgggaatcacaggtaccgggggctatttgtcactaaccaactggctagcgcgacactctgtcggctaaaggctggaaaccgtaaagtatgtgggcggacccccggggctagcctggaataaca

SEQ ID NO: 142139 - DNA, 1318 bp, Zea mays
  unsure (1)..(1318): unsure at all n locations
  Clone ID: MRT4577_61112C.1
cccacgcgtccgattacgcgtccggaggactacccctatcgtgaagcagatgggacatgtaacaagaacaagctgaaaaagcgagttgtgactattgatggttacactgatgtaccttccaacaaagaagatttgttacttcaggctgttgcccagcaacctgttagtgtaggaatatgtggtagcgctagagcatttcagttatactaccagggtatctttgatggtccatgtccgacatctcttgatcatgctgtgttaatcgttggctatggttctgaaggtggcaaggattactggattgtgaaaaactcttggggtgaaagttggggaatgaagggctatatgcatatgcatcgaaacactggtgattccaagggtgtctgcggtataaacatgatggcatcatttcctaccaaaacaagcccgaatcctcctccttcaccaggcccaggtcctaccaaatgcagtctgctcacatactgtcctgagggatccacctgttgttgctcatggcgtgtcttgggcttttgcctttcctggagctgttgcgaactggacaatgcagtttgctgcaaggataaccggtactgctgccctcatgactatcctgtttgtgatacaggtcgcgggcagtgtctcaaggccagcggcaacttgtcttctatagaaggaatcaggaggaaacagtctttctctaaagctccctcgtggactggctggctggaattgatggacctatgagcgtaaatcagacatggatagtagcttcaagcaagttgtgcgatccgtaggtcggtcagtggccttgttccggtgccctgccacattcctgtacgcccactgcccgctgcgttgcaccgagatgcccttattttctctttattattgaaccctatggtgtaaagtttcacgattgtacatgtatgtcacacttgtattggcctatgcattagacgtccccattagtttacctatatagccttataggcgcgtcctgtcggagtaaagtttgaatacgagaatgaggatggtgctgcatatagccttataggggcgtcctgcacccatttggcgcggatgagccttttgagggctaggccgcatatatattaactaggtgagtgcccgtacgttcaacagaatatataagaccacaataacttatatacatatgtacattatactgttatgaaaaaaatgtttcgtaatctaaaaaaaaaaagaaaaaaaaaaaaaaaaaaaaaaaannnnnaaannaannnannnnnnnnnnntttaaaaaaaaaaaaaaaaaggcccctagggccgcggccgc

SEQ ID NO: 142140 - DNA, 2365 bp, Zea mays
  unsure (1)..(2365): unsure at all n locations
  Clone ID: MRT4577_61113C.1
cattgggtacctcgaggccggccgggatcaccacctggaccatctgctcgctgcccccgacctcgagtgagtcgtccgtcgctttccttgtggctcgggcatcgcctccatccaataggccgccccgcctgccttgctctcccagcgcgctcgtgtagtcgtcgccatcttcgcttctcttctccacatttctgcgctatcccggcgtacggctgcgatccatacacgcccaatccaaaccctacctaaaactccgcctcgtgcctccgggctcacactcgtaggcacggagtgccgttccgtggtgggtggaatcaccaaaaatgccctccgtccaccaccacctcctcctcctgacgctcgccgccttggccgtggcggcagccaccgctagcgccggcggggacccgccggcaatcgaggcgcagttcgacgcctggtgcgcggagcacgggaaggcctacgccacgcccgaggagcgcgccgcgcggctggccgtgttcgcggacaacgccgccttcgtcgccgcgcacaacgcccgtgcaggcgccaacgccgctggcggcggcggcggcggcgccgcgcccccgtcctacacgctcgcgctcaacgccttcgcggacctcacgcacgaggagttccgcgccgcgcgcctcggccgcatcgcgccgggggcggcgctccggagccgcgccgcgcccgtgtactggggcctcggcggcggtgccgcggtgcctgatgcgctggactggaggaagagcggggccgtcaccaaggtcaaggaccaaggcagctgcggagcttgttggagtttttccgcaacaggtgctatggaaggaataaacaaaataaagacaggctctctggtcagtctttctgaacaggaactaattgactgtgacagatcttataatagtggctgtggtggtggcctcatggattatgcttataagtttgtgataaaaaatggtggatttgacacagaggaggactacccctatcgtgcagcagatgggacatgtaacaagaacaagctgaaaaagcgagttgtgactattgatggttacactgatgtaccttccaacaaagaagatttgttacttcaggctgttgcccagcaacctgttagtgtaggaatatgtggtagggctagagcatttcagttatactaccagggtatctttgatggtccatgtccgacatctctagatcaagcagtggtaacaacgcagagtacgcgggctgtgttaattgttggctatggttctgaaggtggcaaggattactggattgtgaaaaactcttggggtgaaagttggggaatgaagggctatatgcatatgcatcgaaacactggtgattccaagggtgtctgcggtataaacatgatggcatcatttcctaccaaaacaagcccgaatcctcctccttcaccaggcccaggtcctaccaaatgcagtctgctcacatactgtcctgagggatccacctgttgttgctcatggcgtgtcttgggcttttgcctttcctggagctgttgcgaactggacaatgcagtttgctgcaaggataaccggtactgctgccctcatgactatcctgtttgtgatacaggtcgcgggcagtgtctcaaggccagcggcaacttctctgctatagaaggaatcaggaggaaacagtctttctctaaagctccctcgtggactggctggctggagttgatggaccaatgagcgtataatcagacatggatagtagcttcatgcaagttgtgcgatccgtaggtcggtcattggccttgttccagtgccctgccacattcctgtacgcctactgcccgctgcgttgcaccgagatgcccttattttctctttattattgaaccctatggtgtaaagtttcacgattgtacatgtatgtcacacttgtattggcctatgcattagacgtctccattagtttacctatatgatcatctaaaatattgttttgcagtttttatactgtagagtgaagtttgaatataaaaatgaggatggtgctggatatagccttataggcgcgccctgcagattatttgccgcggttgagcttttgagggccaggccgcatatatattaatagaggactttgtgtaaaaaaaaaaaaaaaaagcggacagaangatgcatctagcgcaggtcaatgtggtagtatcatacgctgttttggtacgacnancaactaggaattcgttttcgtgttacacgttaaacatacttatattgttatcataaacaggcnaattaaggcgttaggcatagggngggcctaaacnttttgggttttttacaatgaaaaatttaattttaatgaacttgggaaa

SEQ ID NO: 142141 - DNA, 252 bp, Zea mays
  Clone ID: MRT4577_61114C.1
cctgcacgtaccgtccgtattcccgtgtcgccgcccttttttttttttttttttattttttttagagcacgttttttcaaaatattataaggcaaagacaacacaggacattcttttttcgctacgggtcacatatccacaagtttataaacaataataagtacagccttctaacatctacaatcttttcataaacgcttgaatctcccttgcttcacctttataaactctaatgtaccttcatcttacttt

SEQ ID NO: 142142 - DNA, 167 bp, Zea mays
  Clone ID: MRT4577_61115C.1
aatattattatagtgacattcaaatgggatgggtacacataacaagggggggggcgcatacacttaatctattccctctatatgaattttacacacacattacatctacatcacactatactatatcttcagacacctattaccatataataaattactcacatcca

SEQ ID NO: 142143 - DNA, 341 bp, Zea mays
  unsure (1)..(341): unsure at all n locations
  Clone ID: MRT4577_61116C.1
ggtttgtggttttttaattttttttttttttttttttttttttttttttttttttttttttcaaaaaaagtacaatttttataaaataaataccatacagtacagtttaccacaacataaaaaccttatttttgaaattttccaccccttttgttgttggccaaacaattttttaaccccntttaaatccataataatcaaacttannttanttnntttttnaaaaattaacacctcccccttntctttcttaatttctttnaacatcttccattcnnaaaaaccataaaaaaaannttattnnaactcnttacttaaaaaaacctccaccccnnaaattc

SEQ ID NO: 142144 - DNA, 362 bp, Zea mays
  Clone ID: MRT4577_61117C.1
cgcacggatgatccacacctggatcctgagctggtacttcggggggtactccaggacgttccgcagcatggccaacagtctggccaagctgttcgccgtgctggtctgatttataccgtgatgtataccggttggtcgagtggctggggatgtgacttcggatatgagcgtgctgatgtcctgtctgtactcgtagtgaatttggaagtgattatgatagaaattatgttcaaaatgatgtgcagattgttgttcagatagctgttatatgaaatgtaatatgagatagaatatctaactgtaattcatgcatcattgcatcactaatctattcactacactctttatttaacgctcttcat

SEQ ID NO: 142145 - DNA, 541 bp, Zea mays
  Clone ID: MRT4577_61118C.1
ccactttggatgggctattgggccagatgagagagatgcggtgtttttggctcttaaatgttgggatgaatgctcaagtccacatatttggcatcgtgcttgatcagttagtaggactacttgatttcgctgccagcttggacgcttgatggccagtgggcagacggggggttaaagcacctgcgttgaacggtcaatcttgtgctcaccacatgcttgtgctgggtgatggctttgtgacttgagatatggaatagtgttacaaatctgttgcatcttgctgaagaggtcccatccgatgatgaagatatgccttggtcagtcatgggagtgcgtttgatgttacctgtgctccttgacatgttcgtgccctcagccgtccactagcggcgcacttgttacaggtgccgctcactggatctccatctgacagatcgggaagaacctctggaaaggagcggcccagcaaggaaattagtaagatgtgaaagcacccggactgaaaagatatattgacaactgattgattaagtgtttgatt

SEQ ID NO: 142146 - DNA, 410 bp, Zea mays
  Clone ID: MRT4577_61119C.1
agcctcgaataagtcttgctcttttttttatctcaccatggcccatgggcaagcaacaagcagtgtacaataagacctattgattaactcacttcctcccatcctggatactacaatttttttgccaattgccatgtgtagtatattattattattgactgacctagtactctagtagctggctaattcagcaaacaacaaggaaaaacaaaagaggcaagaggagagagagatcgaggcggtttgtaaagagcaagaacgacgccgaaaccaaatggcagaagaaataatatactagctcgaatgttgcaaattaaagctcgacgttatatagcgcgagacgtgcagaagctagcaaatagacatggttttcaaaagttggttctactgtactcgggacgtgctggtcg

SEQ ID NO: 142147 - DNA, 402 bp, Zea mays
  unsure (1)..(402): unsure at all n locations
  Clone ID: MRT4577_6111C.1
accttgcggtcagaggtggggcggccggacagcggcgtgcggacaccaaccggagcacagataaaggggggtgcgaggctatggtggcgcagttgcggggcgcgcatctccaccacctctgatccggacacgtatcagcaccccacccacctcttggtctcctggtggtcctcctcatcttcttcctcattggatggcggtgggggcgacgagagcgcggccatcaaagacaaagaggtttcccacccaccctggtgggccctccaccttgggataggtcgacactcctccctccaggggatacaggtccaaaaggccttcttcctaanaattggtgggtacacatcacatctgatcccgccggggcgaggcattaggatatctggcctctctttggtacac

SEQ ID NO: 142148 - DNA, 581 bp, Zea mays
  Clone ID: MRT4577_61120C.1
gccaatctgctgttgcgtgttgcaccgatcaacgtcggttcccagcgcttgctcgtcaagcgtgtcctgctgctgttctctgctcctgcttgccgcgagagctcctctcgctcatctacccaagtcctctcggcgccgagatgtccgacagcaacgacttcgtcgagctgctatgggagaacggccaggcggtggtgcacgggaggaggaagcagcatccccaggccgccttcccgcccttcacctgcggcgcggccagcagcagtagagctcaagaaaaccagccgggtactaccgacccggtctcgctgttcaagacgggaggcctcttcgccgacttctcgtccggcctagacgccgcccgtggcaacggtgaccttgacgacaccgtgccctggatccactgccccatcgtcgaggaagacagcgccgtacccgcacctgcccttgcggagggctacagcccagatttcttctcggagctccatgcagcggcgttagcagtggcggcggcagagacgaacctcagccctctgccaccaccggtccagcacaacagaaacacccctgttgctcaccac

SEQ ID NO: 142149 - DNA, 169 bp, Zea mays
  unsure (1)..(169): unsure at all n locations
  Clone ID: MRT4577_61121C.1
tcgcgcangtaaccacagagcgtcctttttgaaggtatatggttggagagaatcatgttcccagctctcggttccggattttgaccacggcttggaggctgtaaacaccactanaactgtgataactacccagggagggagaagctcgtggataggagcacatagattt

SEQ ID NO: 142150 - DNA, 477 bp, Zea mays
  Clone ID: MRT4577_61122C.1
tcattccaataggctccctaggcgagatattttgcaatgcgctccaccaccgatgcgaggtctagcgacgagcgatattcgtgcgcacgcggcgcaacttcagggcgtcctgccggtacgccacaagaaggcccaccgttgccttgcatcataaaatgcactccctctgcggaggaaaagatgatgaaaagcccctcgcttcagaggtgcctgcctcatctcctcacggccgccacgagctcggctggcgacatcggccagtccggaggcatcacttgccagaagccatcgtgaacggctcctctgaagcgcactacttcaacagagacctgactgactagtatgacaacgactcgttataggctcgacgaagaagccttaggtattcgcgaaggatgacgactacgagctgatccatgatgaacgccgctagttcgacgtcgctgagactgacatcccagaagaatattacattgt

SEQ ID NO: 142151 - DNA, 204 bp, Zea mays
  unsure (1)..(204): unsure at all n locations
  Clone ID: MRT4577_61123C.1
cccacacgtnctcttactcctcccctgactttgtttcttacgcctacatactcattcatgcacctttccattccctgactcaaacccaccacccttataaatacaccctcctctttccaacaaacctcctcttccttcctccacctatgcatacgagctccctacccacacacctattacgaagaacacaccctctatgacttg

SEQ ID NO: 142152 - DNA, 446 bp, Zea mays
  Clone ID: MRT4577_61124C.1
ttttttttttttttttttttttttttttttttttttttttttttttttttttttttttttttttttggttgcttcttcttttggtttttactgcttttttcttttttcttttttgtcgggcccaaatttgcttctgcggcacgcccctggggggggggggcgttcataaaccgggcgttaacggaccgcacgggttggcaccttaaaaaaagaccaacaatataaacgggggaattgtggggtaactaaaccccccaccacaaaccgcaccctggaaaggggaaccccccccccccttaccaaataggccttttcccaaggggcaggacccaaacaacagggggcaaaaactaacccttgttatttttggaaacgcgaacaaatattctgcggggggaacaccccattttttccaggggtccaaaaacttttggcgggcccatggc

SEQ ID NO: 142153 - DNA, 376 bp, Zea mays
  unsure (1)..(376): unsure at all n locations
  Clone ID: MRT4577_61125C.1
cacgcgcacgtacagctctaatacgacagagtagacgncctttttttttttttttaactcttttttttttcgaagatgatggagcatcaccaaaccagggggggcgcccaaacagaccaaccagggggcaagccctcctaaaagcccaggcaaagcccaatacaaagactcacacgaaacacactgccctaccaaggcacaaaagcgctcacacgcacacgcagggcccaaaacacaaccccccaagaaagggggggaaacagacgcgggacgacaaaagaatgacgccccatagcgagacacctgaaaacagtcccccaaattgggaaaacaccctacagggggggcaagacacacaaggccctaaaagaaacaa

SEQ ID NO: 142154 - DNA, 1999 bp, Zea mays
  unsure (1)..(1999): unsure at all n locations
  Clone ID: MRT4577_61126C.1
cccgttcactgaagatgaagtctggaaaacagtcctatctcttcctttaaacaaggcgcccggcccggatggttttactgggaaattctataagtcgtgctggcagatcataaaaggggaaattatggctgctgctacagctgtttggaacagaaaatgggtgaatttagatctgctaaactcagcctacatccttcttttgcccaagaaggacgatgcctgccaggtcaaagattttcggcctataagcttggtccactcctttgctaagctcatcactaagcttctagcaaatagattggctagtcaccttgacaatatgacagccattatgctccaccagaaaaattgtgcaaggatccttcttaaattggatatcaccaaagcgtttgattctgtctcatggtcgtttctcctcgaagttatgaagcatttgggctttgggcaaatttggtgtgatattatcagcactcttcttgcatctgcttcttctcaagttctacttaatggtgcgccagggcagaaaattctccatagaaggggtcttcggcagggagatcctctctccccaatgcttttcatcctggttatggatgttttgtgctatttaactaaaaaggcagctgctgtgggattgttggagccgttatcaggaaattcataccactctcgtatatctctttatgctgatgatgtggtaatcttccttcacccggtgacatctgatgttgtgaccaccatggatatccttaggatttttggagaggcttctgggcttaaaacaaatatggcaaagagcagcgtcttccccatccgaagaagtttcttgtggagaggaaggaagaatgctttgggaggtcattgtatggtagcctggagcaaggttactagaccaaaaaagcttggggggttgggcatctcggacctgcaaaaaatgaattgggctcttaggctgcgctggctctggctgcaaaaaactgatcctgaccggccttgggcttcctttaatataaaagctcacccttcagtgaaggcctttttctcggcagcggtttcctcggtggtgggcaacggtaaaaacactttgttttggactgataaatggattgatggtcagagtctttgtcagttggcccctcacctggtcaagacggtctcttctagggctaaaaagaggagtgtacacaatgctctcacaacaaggggatgggtgcaggacattcgaggtgctatcacccttaatgttctagctgatttcttcaaagtgtgggatctcaccgctcactgggagttacaacaggatcatgaggataagcacatatggcttctctctagctcaggtctttattccaccaaatcggcatacactggtttcttttttggatcaacaacctttaacccctgggagaggatttggaaggcttgggcgcctggaaaatgcaagttcttcatgtggcttgtggctcatggtcgctgctggacagctgaccgtctggcaagaaaggggctgcctcaccctcatctctgtccgttgtgtgatcaggaggagaccctaaaccatctgctagtttcctgcgtcttctcacgtgatgtttggtttcagattctgaaatttgtccgtttgcagcacctggctcctaaccttgcgacctcttcctttgaggtttggtgggaaggagttgtctcggtcccaggtgatccaacgtttagggggctgtcaaagggcctcaattctttgatcattcttggggcttgggccatttggaatcaccgcaaccgttgtgtcttcaatggggagcagccttgttctaccatggtcatcaagtgggtcagggaggagtctcacaactggtgtagggctggagccaatggattagatagcatcctttccgctccagcgcactaatcggcgtccttccttcttggtcatgagggcagttggtcataatttcattgtacttctagctatccttgagtgtgtgtgngtgtgtgagttagt

SEQ ID NO: 142155 - DNA, 1187 bp, Zea mays
  Clone ID: MRT4577_61127C.1
tcttagctacttgacttgcgtttttgaaggatttgtgaggcagtgcatggatgtgcagtagcatttcctcagcttgagttattggaaattgacagctgtaaaaatctagcagctctaccagaagcatcgatgctgggagaagcatattgtggtggagatcatacagtggcgcgctctgcatttccagaactgaatattctcgtattgcaaggtttgcgtagctttgagagatgggaggctgctgccctttaaactgaagaaagacatgcaatattccctcgggttaagaatggtcctgagcaggcaacatgaggaatgagccagccagttgcttttgccccatctagagtctctagagatatcggggtgtgaaagtctggtagaggaggtattcaactcctcccctgctatgctcttaagagtatggatgtgataggatgtcacgggttgttgtcatctctagaatctctaaggatacaacactgtcacgggttgtcaatcttccctcgtccctcagggtaatagatactacggttcatgtcagggcagctggatgcactcaatacctgtcatcactggaaatcctccgtctgtctcgttgcaaaaacctgtcgtgcttgcccagtgcgcgggcaggaggacgacaggaatactcatctcttcgtgagcttacaattacggtagcagggagacagagccgaacatcaaagcagaaagaaaaatgatccttattaattggttgtacaatacaatatggtacggtgccttattggttcatgatcctatgccttatataatcctagtcttcttcattccttaattggagcctcttttgtcacccttctctgaaacgcaaaacatgcagttatgtgatttggaatacctgctgccgacgacagttgcctccaattcctgcagcttctggcacctagagatgtctagctttccccagcttttcaaggttggtaactatttgcagtttctgtttcgggcgacccattgctttaggttttggagacatttttcggagggttcaagaccaggaaacggatcgacgccgcgtctatgcaaatttttttttcttcttattttcattggagttttatgaacaggattgcgttttgaggttaaaaaaaaaaaaaaaaaaaaaaaaaaaaaaaaaaaaaaaaactagttctagatcgcga

SEQ ID NO: 142156 - DNA, 555 bp, Zea mays
  Clone ID: MRT4577_61128C.1
gccccccctcgagtttttttttttttttttttttttttttttttttttttttttttttttttttttttttttttttttttttttcccagggggggccccttctagtttaaaaaagctttcgattcgattttccctctctccgtaaaaaatggaaaagggttcccattccaaaaaaccaaaggggaaaaaaaccccaacccttttggacccttaaaaaaaaggtgggagaggcccaaaaacatctttcgggggtccttttccttttagggggggggggaccccccccccccgacccaatggggaccaaaccccctaggggttggaggccaaccccctctttaccgggtttaaaaccccctggggctctccccccctttacggaaaaaaaaaaggcgggaaaaaacccacctgggggggcaccaaaaaaaattgggggggggggggcaacaatggggggcccccttttttaagaaggtttgggccaaaggggggttttttctcaaaaaaagcatataattcggcggtttttttttccttttaacaatcttggggggg

SEQ ID NO: 142157 - DNA, 353 bp, Zea mays
  Clone ID: MRT4577_61129C.1
attgtttccacaccctggaagggtgtctcctacgatcccgctgcgtcagctcgcaattcgtcccctccgtccgccactgccgatatcggacgtaccccatgcacagacaggagccatatggtgctgcagattaccaccgtggcgctggagacatcatcgtcacctcacaagatgtcccaaaacgaattcgtcgagttctctggcaacactctctagtcctcctgggacaacccaagcgcatacactgatcgagtagacacgtttgttcctgacgacaatccgtgcgcctacatgccggtggagtagtctagctgaattttagaacaacattgccaccatcaccagcttgacct

SEQ ID NO: 142158 - DNA, 278 bp, Zea mays
  Clone ID: MRT4577_6112C.1
cacccttcccactcttctccctcccatctctctcgctccatcctgggtcctggcgtaacgccgccgccgcagggaacagcaacgccgtcgctccctttacctcttcagcctgctcgccttcctaggaagtggacgccacatgcgccgcctggctcctcctctctccttccccttcccctttactgcgtcgaatctttgctccattgaagctgactgtttcatcctccattaatggcgcggcagcccttcttctcccctcccggcgccctctctgctcc

SEQ ID NO: 142159 - DNA, 460 bp, Zea mays
  Clone ID: MRT4577_61130C.1
ctccgcgcgctgcgccgctgcctccgccaacggacgacacgacgacacacgctggagatgccgcgtactgccgctcgtgaatactgagctcgcagatggcctcaggagagctcccccgcagaggaatatgtgtacatggacaacctcggtgagcaggcggagaggcacgaggagatggttctcctcatggataaggtagccactactgttgactctgaggagctcactgaggaggagcgaaacctcttgtctggtgcatacaggaacgtcattggagccagccgcgcctcatggcccataatctccttcatcgagcagaaagaggagggccgatgcaatgaggaccgagtaacactctttgaagatgttcgtggcaagattgagagttagctgacccagatctgtgatggcatccttaagctgcttgagacccatcttgagccgtcttccactgcccccg

SEQ ID NO: 142160 - DNA, 182 bp, Zea mays
  Clone ID: MRT4577_61131C.1
gcggggaacaacgcagagacgcggccaatgcaataaagtcctgttttttttctcttctttttttttggccaagagcaaaggaccctgctcctgacaaagccttttgcatcataagctgtttgatttataccatttgtgccgtgttcggggactgttgccggtgttttggatgttggcttgtc

SEQ ID NO: 142161 - DNA, 454 bp, Zea mays
  unsure (1)..(454): unsure at all n locations
  Clone ID: MRT4577_61132C.1
cgggnccggaatcccggggcggacccacccgtccgttggagaccaatgagaccaggcttgtaacaatcagccgcgccactaaggaaatccgcctggaccagggccttaaaatgctaaggatattaagggatcatgtaagcaggacttcaatcctggacaacttggccttttacaagggccgccagaagtggatgcaggataggaggtcgaaccagcaccagttccaaaggcaggtttgggccactaggacccccgtttttgtaaccggggggcgaccgaaggaccctgttaaggggaagcccaatccgcccgaaccagagggggtaacggcaaaggtgaaggcggtaaaggttcccgcaaagaacggcttaactgctccggtggtttccaatgcagaaaagggggcccaaccggaaccagaaaaacccgtcttttccaacggagtcgccaggac

SEQ ID NO: 142162 - DNA, 220 bp, Zea mays
  unsure (1)..(220): unsure at all n locations
  Clone ID: MRT4577_61133C.1
cgtctcggcacatccacttcgctcggctcctacagtncagaggacatagagggagggagcatagctgagcactcgagccagagggcatgtcagcttgcttatggagggcgccggtnaggtacggggagacgaatctctnctcgcgagcccttcgtgccctcgcgnngcgttggctccgcgcaaggcccattctgtggcccccgtggtcgaagtccaaggg

SEQ ID NO: 142163 - DNA, 150 bp, Zea mays
  Clone ID: MRT4577_61134C.1
gaccgccaagcaaaaaggcgaaggtataccgcgtgacccccctggtgtgcagccttgtgaagcatctgtgctccccaaacatggggtgtgcacattgttatcagctaagatcattggcggtggatgtcacaagtccttggcgcatgaatc

SEQ ID NO: 142164 - DNA, 744 bp, Zea mays
  Clone ID: MRT4577_61135C.1
cattgggtacctcgaggccggccgggtatgtggtcatcctcaccatcatccctcgctagttgatccagccggcagaatctgtcgcgctgtttctcctctcccacgctttagtctacgtgctgcctgccgaagtcgactcccacatctccttgctgccttcgcactcgaagctcatgacccctaccctgatgttgcaggatgcaacatccattaacgatatctcaccccaggcgcgtgagctacccttgactcatcatgaattgtacgattagattgatgttgatcctccaagacgcctgcttctgcatggtcctccgggtactgccacacatcatgcttgccaaagcacactgacttcataccaccgttgcttttatccgagtctgtgaatcagagctagtacagatacactcgcatcaggaacgtacataggtacgtagtgatgtgtaaccccctgcctaaagagaatgcatccagcaatcattttcattgaagatccgtgatgctatagacactgctcgttttgatgctcagactgatgctgcaccgaaaagatctacccgtacttatggacctacttcttcacatgcatgtagttgacctgacatagatagggaagggtataatgttgactaatcctccagacactctagatcctggtctgttgcgtactggaacacatgcacagtgaatggagttcgctttgacataccgacgctattagtaggcttgttttccaagtct

SEQ ID NO: 142165 - DNA, 444 bp, Zea mays
  Clone ID: MRT4577_61136C.1
ttttatttttttttttttttttttttttttggttgtttttttttttttttttttttttttttttttttttgtttttctttgcaaaacggaaaacgattttttcccgggacaaactccggggagggccgggccctaaaacgggacaaaacatttttggcccccccccccggttttccctcccgggtggggcccaaaacaattttatttcccccggagctggcctgccctgccctgcactgcacgagaaactgcttgggggcttttaactgggccccctgcttttccccccaaaggaaacccccacaagaacccgggttccctcccaaggcccaacccctgtatgtcccggcaaccgaggggtttcctggggtcccgtcccggcccggcgggttagttccccaagggggcgggggccttgtcccccaacaacccgggggccttggc

SEQ ID NO: 142166 - DNA, 856 bp, Zea mays
  Clone ID: MRT4577_61137C.1
tatgcagttgccctcacttgggacagaccatgttcaaagatggtgaaactgtaagctaaattcattgcacttgcagatgtggcgaagtaattttcaaatgaagctacatttcaaggcccagcatttatcatggctttgtgaagtggctggccatgttttttttaaaatttaattaatattccttcttgcagtgcacagtcagtgagatggtatttatctaatatatcgtcttcctccacacccattctccctttgacaattgaagaaaactgcagccactggaggtccaagattatagagcgcagaaaagtctctcgtgttgaaattttgtctccatcctggtgcataaacggtttgctggacagactggcggaagagtacaaagacaaagcgatgtattccagcagatggctttgggttttcatagctgacaatttcatttctatagctagcatttgctgattccgggatgtctgtcaccaaccaacgaagatattctctatttgttgggttacttggacttggggagtctggatccaccatcaccagagtgtaaaggttcctcatgtcgcgcccaccaatttcaacccttggttcacttgctacttgtgatggcttgaggtcagatccattggtcagttccttgttgttgtacagaaccttaagtgaggctgttttaataaatgggtccagaatgtcacctactacatgtcctactactagtgggtcccttgacatggttagtcaagaatgctattttgaggcccgctctctagagaacaaagaagctgatttggcctcaaatgtgaagttgggtcccggccggcctcgaggatcccaatcgccctatggagtg

SEQ ID NO: 142167 - DNA, 433 bp, Zea mays
  Clone ID: MRT4577_61138C.1
aagaaaccccagcccggcacataaaacctttcctgtccataccgttccggttccccggaaaaaaaaaggagggaggcgggcttaacggaaaaaaatggctgcgggcgcctgagggggcccaaacaagaaggctgcaaactattcccggggggccacatcacggggcgccggccaaaaacttattgaaaaccgtaacacaaaaggagccgggatctatgggacatttccgggcgcggagagagcacccggccaaacttaataaaaagctcgggatgggacgcccttaagaagtcggggcaagaaagggggcttcccccgccacctttttaaaggccgacttactgaatgacataattagggaccggggtggacggattttccgacgcctgggcttgcccctgcccctgcccttgatatgggggcgggcctggtg

SEQ ID NO: 142168 - DNA, 565 bp, Zea mays
  unsure (1)..(565): unsure at all n locations
  Clone ID: MRT4577_61139C.1
cccacgcgtccgttcagtcactctgcgccgccgcttcgttcgtgtggaggggagaagagaggaaatggcggcgaccgagggcgtgctcctggggatgggcaacccccttctcgacatctccggcgtcgtcgatgacgccttgctgacaaagtatgacattcagctgaacaatggtattctcgttgaggagttgagaagaaatattgacccaaccatggntaggaagatcaatgcttggatattagccggaggagccacccaaaaatgtattagggttgcccaatggatgctgtaaacttctggtgcaacaagttacattggatgcattggaaaggacaaggttggagacagaatgtaagaaaaaccctcaaggtgttagatacactagatgtgttcctacgaggataagaatctgtgcacatggcacatgtaccatatgccttgtgggcggcgaaaggaaagtggattgtgaataacacgccgggaaactgttacaaatttgatcatctaaagagaccaaatatctgggcccttgttgaaaaggcaaaaatcatctacattggtg

SEQ ID NO: 142169 - DNA, 675 bp, Zea mays
  Clone ID: MRT4577_6113C.1
agaggccaccgcgcaagcgcaaagagagagagagaggagggaggcctggagccctggagggagcgcatgagctgacagaagagagcacagaggcacttcgagttggcacgcggtgctctgctttcccccgcctcctccctgttctatactctcgcaggcccaggccaagcccctcccccgccctcagacgcaccgcggcaagaaatcctccactccatcccggtttccccggagagattatgtgggattaggtagatgagggcggcgctgttcggtgccgagcggaacggggctgcggacctcgtcggagacgggaagacgctgttctggccggaggggaaggcgaaggtgctgttggagccgaggtccgtgctggactgcacgcggagcctcagccccaacaactcaacatcgacgttgtcgtcgtccgtgggtggcggcgccggcgctgcggactcgaccggcatggcggtggcttcggacagcagcgccgccgccgaagccaccaaatggggagcccccggcgagcacggcggcggcgggaaggaggactgggctggcggctgtgagctgccaccgattcccaccggcctcgacatggggggtgaagatcttcgagaagactctgaccgtcaagactatcaccctcgaggcagagtgttcctacaccatctt

SEQ ID NO: 142170 - DNA, 212 bp, Zea mays
  Clone ID: MRT4577_61140C.1
tggtagcccattctcccaccacacttagttaggggtagattcggaggcatggggcggaatcaaaatccatggtgttgtacgccaatctcgacgcgctccggacgtcagcggacgacgtgcggatcgtcacgtgggacggccagaccataggcgcacacttctacgttctttcctcggcgtccccactactgtagaggtatgatccacaaggc

SEQ ID NO: 142171 - DNA, 277 bp, Zea mays
  Clone ID: MRT4577_61141C.1
cttccctacccgcagtaccacaccactccgtttcagctgaggacggtacagcggcacagagcgacgacgacgacacaggcgccactttggcatcccagctctccgccgccgtgccccggttccacggcctccggggctacgccgcgcccaggtccgcggtggcggcgctgccgtccgtgagggtgggaaggaagaggtcgttgtcgcagggtatcttctgctactacatcgtgtcagagcacaaactgatcatgatgacgacgacgacgctgatgct

SEQ ID NO: 142172 - DNA, 668 bp, Zea mays
  unsure (1)..(668): unsure at all n locations
  Clone ID: MRT4577_61142C.1
agtttttttcctgcccacaagctctaacctgtgttcctcatgtgagcatattgtttctgtgctcaagccgaggatgactcccttcccaaccctgagtgcgctgtcccagagcttgcttgtcgtgttcctgtgccagtggtgaccgcagccacctatgttcacctcatcgtggccaagacactcgaagcaattacacacaaaggtcgcgcctccgtggatcggcgttgaagacaatcctaccgtagacccttcaactggcactttctctagccgattcctcgcaagcactgaagactagagcacctagaataagtggtgtttaaaggaggagtctactccagtggctgctaatcaagtggaggagccatctaactgggtatgatagtaggatctggaacctcttcactgcaataaggtaatcaggagctttctaggtgtccctgtggctggaagatgcttccagtcttgaaggaggattagttaggtttatgtgtgaactttggaagggttctaccttcctgctatggtaataagttatgcactttgagtataacatgacttgtaattattataactctttttatgttgtaaaacttgagttttggaaatataaagtatgtttgtnggatcacaatcaatcatatattactaaaccagattgtttccat

SEQ ID NO: 142173 - DNA, 868 bp, Zea mays
  Clone ID: MRT4577_61143C.1
ttttttttttttttttgatacaacacatggcccattttttgtttatttttgcccctggtactagtagcgaattatactcaatgagtagccaagaggatcatcagcctcagcaggcaggccaaccaatttgagttggagccagccacaaggccacagtatccaactgccccaatcagcaagcagattactattcaaccaatcgacatgcacctgtattgagctatactactctgatactgcggccgctttttttttttttttttttcacagcagctgagctgagctcatttcctttctttgccattgattccagtactaaaatcgccggtggatcggaggccaaaacaagcacaccggccttgttacaaaatttccatttcatccagaagggagaagaaaaaacaaagagggggaagagaaatctgacaggcaatgaagaagaagagggggggcagggagcaaaagcagatcaaaatctgtccaggctcgcttgctcattcgctatccgtcgaagcccgtccggctccagacggcgtcgcgcacccgcgacatgtcccggcccttgagcgtccggccggcgccctccaccaccgacgcccgcgcctggcgccgcgcaaggtacacgtgcggaggcacccacccggcgtccccctcccccttgtcgtcgtcgtcgtcccccatctccatctcgaacagcagcgtcggctccgcgtccggcacggagaagcgggccggccacgcggccacctcgacgggcgccgacgccgccacctgccgcccggacccggacccgtccccgaacgcccggctcaggccgccctgcacgccgcgccgcggaccgcgatagccagcgctcctgccctccgcc

SEQ ID NO: 142174 - DNA, 1443 bp, Zea mays
  unsure (1)..(1443): unsure at all n locations
  Clone ID: MRT4577_61144C.1
nnnnnnnnnnnnnnnnnaaaaaaaaaaaaaaaaaaaaaaaaaaagaaaatgcttgccagatgtaactgcccacgtccgcgtgtgccttcaaacatgctcgtctggcaacacaaagtgccaagcttgttgcatgtcgtcagggcgcagacctcacggcacggtgccacgtacgcgagagcacctgcaccacctggccgcctccctccaactccaagccgcgccgcattaacacaccgatcgcgaaactgcttcctagcttcgttcgttccggagcgccagagagagaaagaaaaggaaaagaagcgcctttgcccaccgcgcgatcaatcaatccggggtccggcggcctgccatggtgaagctggcgacggccagggaggcgcggctgtacgggccggcgctggcggcaaggcggtgggagtacatcaacgcgggaacatacgtgttcgcggcgctgctcctggtcctggcggcggcgctgtccatgtccgtgtccgcggccaggccggggctcgccgtaggcgccgtggcgctggcggccgtggcggccgtcaacgcacacgacctcgccgcgcacctggctggcgtcgactgccgcgtgggactggcgaggtacgatgcccagctcgggctcgtggagttcctcgtgccggccgtgcacgcagccgggtgcgcgctcgccgccgccggcctggcgctgctggcctccccccactcccactcccagtcccagcagcggcacgcggcgaccatgctgctcgtcgcggcgctgctgtgggtgctgggctccgtgctcaactcctgccaggtgtacgagcgcgccgacggccgcgcgcagctgctgcagtcgggcgtgcaggtgcctcagctgctggggagccttctgttcctggtcgccgcggcgctgaaccgcccccgcagcggcggcgagccggcgtggctgtgcctggtcgggagcgtgctgtggctggcggcagcgctgctcaacgtgctgaaggtgttcgccatgcaccagagcgacgcgctgcggctggagaagctccgcggcggcgcgcaggagtggctcagccgcgaccgcgagggccgcgtgccgctcaactgggaggaggccgccaggagacgggcgctgcccaccgagctccggtgatcatcgcccgcgccaggcgccacccatcatttcccgtgccgtaaaatgaggggaaaagggtagataaataaattgtttcagcgccacccttttgggccgttgcttgggctcaatggaggcccgaagccccggattgtagggcccattagctgctggagcttatcgcattccatttcctatgtccgagtcccttgcggctcctttggaaggaaaaggaatgagagaattaagagatggattgaagagggttggaaggattaaatttctttctattcaaatttgactagaatgggttt

SEQ ID NO: 142175 - DNA, 168 bp, Zea mays
  unsure (1)..(168): unsure at all n locations
  Clone ID: MRT4577_61145C.1
cccaagcccgacaaaagacgggcacgcacaancccncaccccacaccgnccagcccacaaacccanagacgaccagaggccacaacccacaaaccgggaagaaccaaagaaaaaccccaacacaaagcgcacccgaagacaacaaaggnagcgccagagaacaccaaa

SEQ ID NO: 142176 - DNA, 140 bp, Zea mays
  Clone ID: MRT4577_61146C.1
cccacgcgtccgctgatgaaaagaatggtgcttctgaatctttccacaaacagtgtgctggtgcccggtaatggctgttggattaatgtaggtttgattcaattaatatttaataatagtcaatgctaatagtctacttt

SEQ ID NO: 142177 - DNA, 361 bp, Zea mays
  Clone ID: MRT4577_61147C.1
gaataacacagtttttttgcaacaaagggcctaagcgctccagggaggaattaacactaaaatataccctgtcggccttacacttttgttgttcggaatgaaccacaaagcaaggaagggtagctacggacacaaaaaaaaaaaaattgctctcgctcaccttcaagtttcgagcgcaaaggattatctcaaaattccggctccaacggttcttgattcaccgctaattacactcttaaaaacagagactgagtgtggatgatcaagaaagccttaagggggctaggagaacttccccatgcgcccaggaaaaaattttattgggccagggcagctaagaaaaattgagagcggttctgtt

SEQ ID NO: 142178 - DNA, 589 bp, Zea mays
  Clone ID: MRT4577_61148C.1
gggtacacgcggccctctctctcgagtttttttttttttttttttttttttttttttttttttaatattggacaattttaagggggaacaggttacaggtatcaataatccctatccgttgcaccgaattttgtgtcgtaatgcggagggtggtattaaccatgtagtagtatctaacccatatattaacatctaacgtccatcctaattaattacccgcaaatcaacgttacaccacaccggcaccgatgccgtttctcgggacaggggagagctcacactcttcgtcatgatcatcttgttcgtctgccatctctaggggcttcatggggtaaaaatggaagcagacgatgtagtagccaaggtcgagcaccatgaggcaggtgacgagccagtagtagttgtcgatccttccacggttgatgttgtcctggagccagtccccacggggggggggtggccctgaccaccgtgaccagcaccgtgccgaggtagtggccgatggagctggcgagccaaaaaagcgcagcgggagtactgcgcatgctctcgggcgcctggtcgtacaggaactccatgggccccaccg

SEQ ID NO: 142179 - DNA, 438 bp, Zea mays
  Clone ID: MRT4577_61149C.1
ggggttggttttattaccttaaagaaacgcactagtcgaaacccatctcacgggaacaacatacaaccaagtgtgtccacaacgccctaaaaccaaccaaaacaaagaaaacaccccccggaaaacccccgggaaccaccccgccagcccccaaagaccacccacagagcgtagaatgagcgcccaaagaacgtggaaacacataccgctccaagaatcccggaacaaaatcattaaactgagcaatgtacacaacaggcaccccccaaaattataaccagcgcccacggggcaaccaaaaggctcaccattactcacattgaacgcgcgggacccaatccccactttatagaggggatacccgacagcaccgaagccccaaggacaccgcccccacgcggggaaacgcacctaaaaactaaggggagagagcaaaaa

SEQ ID NO: 142180 - DNA, 2095 bp, Zea mays
  Clone ID: MRT4577_6114C.1
gtcataaatactaatggcaaatctctcccgttatcactttgttttcctatgggtgaggtgtgattgtgtgcaaagaaccgcttgctaccggcaagaaaaccctctacaagcccttctttttttgttatccggtccgcccaggctcctcctgttctccggcgcttccctctctgtcccttggctcgctctggcgtggttctcccgtcccctggtgcgtgcgcgcttctcgctcgctcgctctctcgtggcggcgactgggcgacagccgcctccgccctacaccagttgctcaggtcttctttgggcccttcgccggggacaagcacccaccggagaaaatcaataaatacatcggcctgaaagaatgggttatggcatgagtaggctagaagatgaatactatgaggctgaagggcagaatactggtggatctggctcagttcaagtgaacgatgagtttgcaacactacataatgatatttttcatatgacccgaatgagatcaggacttactgaaagctacaagtccatgggtaccaacagaggcataatatcaactgccaagttattatctcgaagggaaattgattgttctggaaaggggatgttctcttctggtgaccgtgcatttgttctaggtcgtcatgttccgatgaacaatcctgaattattggataggatggattctcgtgcttacgtttcacagttttctgctgatggtactctttttgttgctggttttcagggaagtcacataagaatatacgatgttgatagaggctggagcatacacaaagacattcatgctaggtgtttaagatggacaatcagtgatgtatccttatcacctgatcagcggtatcttgcctactctagtctggcacctattatccatattgtcaatgttgggaatgcggcaagagaatcctatgctaacgtcactgacatccatgatggattggatttttcacagcatgaagatgttcaatattcatttggaatattttctgtaaaattttcctctgatggacgggaacttgttgctggcagcaatgatgactcaatatatgtctatgatcttcatgcaaacaaattgacattacgtttatctgctcatacatctgatgtcaatacagtagcatttgctgatgaaaccggccatctcatatattctggaagtgacgacactttatgcaaggtctgggacaggcggtgtttgtccgcaggacaggctgccggagttttgactggacatttgcatgggataacacatattgatagtcgtggagatggccgaagtttcatatccaatggaaaagatcaagcaatcaaactgtgggatatcaggaaaatgatgtccaatgctgatagttgtgcagatggagccccagcctgggactacagatattcaaggtatccgcatcaacataaacagttaaagcatccgcatgatcagtcaatagcgacgtaccgtggacatacagtcctccggacattgatccgttgctacttttctccttcgtatagcactgggcaaaagtacatatatacagggtcgtatgattccaatgtttgcatctatgatgtggtaagtggatcccaggttgcgaagctgaaatggcatcaaatggcgattcgggactgcagttggcacccatttgagcccacgcttgtgagctcatcctgggacggccgggtagtgaaatggaccagcgcacgtgatgaaggggcttctgatgtcgattgagttgagtcgaccgtgcaggtgcagcgcgagtgatctttactgttcgtggttgtgggctaaaaaaaaacatacccaatcttgcactaaaaaaaaggagagtaagcacagctcgtaataaagaaagaagatcatgtgttgcagtggtaatttgtaaatgtaaatactgaactgaaaccatgtgggcaggaccgagtgcataagcacctttgtgaatatggttgttccataaagccttttccatgtcctttggagggaaaaaaaagaaacgaaagaataaacaaacggaataaccaggtacaaagaacaccaaccttagaagcaccacaacctaaaaaaggacctaagacg

SEQ ID NO: 142181 - DNA, 420 bp, Zea mays
  Clone ID: MRT4577_61150C.1
accagtgcaccgccaccaggcggtcgccatacgattcaccgcgcacgtaacatgagaacagcgaaaacgaagatgcttccccgggcggcagcggacgaggagacgagagagggagagatggggccggacctcctgggacttggcttgctgccgccgccgatggccggcggcggccacggaggtggttcagcggcgcatcagaagacgggattcgacgagcccctacgtttcgccgctgacgcccctttgccggtgcgcgcttgcgtgcgcccgcggccccggcccgtggacgtggacgacggcgtcgtccctgcagcacctccggcgagcatgccgaagccgccgcgtcgtcgacggcacggtgggcgccagctgagctggcgtcgtccccgacgaagctcggttctttcagggagatct

SEQ ID NO: 142182 - DNA, 705 bp, Zea mays
  Clone ID: MRT4577_61151C.1
aaacttggacctggaaagcttgaggcgccgggccccgatcgatcaagcgcacctcccttcggagagaggcatcagccgtccatctccggcgccggctggctcgacctcggccgcagtcatgtcgaagaagaaggcggtgacgacgatgacgctcgaggacttccacggcggctccatcccctccgagctccctctcccctccgcccccggcgtctctgcacgaccgcccgaccgccccacggccgctccgtccgcctcttccactgcatccgcgcgcccgcgcactcccgccgcttcctccgcagcggcggcggctgccgctgtcccttccttcctcaccaatccctcccgcatcggccgccacttcgatgaggacgagcgcacgcccttcgagctggccgcgcctcgccgccctgcgccgtcgcccccgtcgttcccctccgtgccggcggtggcccccgctagatctggaccgggtaacgcctggggtgcgaagagggaggtcgctccagccgcgccgccggttgttcctgccgccagcagcggtcagatctggtcggcgacgcgcatcgcgcaggcgagcgctgtggagaaggtaatctccggtaggtggcatttgtcgaagccctcctccccgcccgcgtctgtgtcggcaccagtgctggagactcaggtggtcccgcctgagatggagaggtcagggtt

SEQ ID NO: 142183 - DNA, 553 bp, Zea mays
  Clone ID: MRT4577_61152C.1
tttaaaaaaaaaacaaaaaaaaaaagaaaaagcaaaaaaaaaaaaaaaaaataaaaaaaaaatatttaattaaaaaattattaaatattatatgggtttgttcttgcccggggggccttttttaggggggatttttgcgtttttccttcccgttggggggcgtttgggctttttttttgggggcccttttccccttttggggggttgttttccattttcattgggccccggtttttcccctcgtcggggcttgggaaaacccttgggtttccccaattttttcgctttggagcctttcccctttttgccggttggctttttatccgtttgggccccccccgtttttttttcccaacgttttcccaccctgattggggattggccccccttttttgggggcctttaagcgcggggggtgtgggggttccccccagggggcccctttcctttgccgggccttttggcccccctcttttggtttttttcccttcttttttccccccgttcgcgggttttcccggttaggtttttttttgggggctccttttggggt

SEQ ID NO: 142184 - DNA, 140 bp, Zea mays
  Clone ID: MRT4577_61153C.1
acttcctccacatctcgtttatagcccggctcatgatgctgcagttgaggactggaccagtgctatcacgttctgaaggttcacaactttcagagtttgatcaagatgtgattgctcgtagtgacattattacttcactg

SEQ ID NO: 142185 - DNA, 289 bp, Zea mays
  Clone ID: MRT4577_61154C.1
ggtttacgcttcaaaagccttaccaagggcgtgtgtgacactgaagtttttggtctgatactgattaacaaacaaatgacaaagctaacataggaactataatcattctagacaaaagatgaaccagctacgatactcaaataaaggatcacatatcatgcttattcaaataaagagagacaccttacagaactactttaccaaggtaccagaagacatgcatacaagcggcccaaagctgtgcaaatctacaactcactaaactccttgtccacatgttacaacaatt

SEQ ID NO: 142186 - DNA, 269 bp, Zea mays
  Clone ID: MRT4577_61155C.1
gtaatgttctttttttttgtgggtggttaccaagacttttgaaactttttttgggggcggaagagcctgaacaggaacacaaggggtcggctggggtaggacacaccagcacaatgcggctccaaaaaaaaaaaaaaggccaagcaaaggttactccatacataaaacgaatgccaaagtataaagagacggggggggtaaaaccaaactttacaccccaacccccggaggagacgaaccaaaagtttgggcacggaggtttacccccc

SEQ ID NO: 142187 - DNA, 594 bp, Zea mays
  Clone ID: MRT4577_61156C.1
attgggtacctcgaagccggccgggagaatctcctattctcccacgtcgagatttgcgcaattgcccctctctctttattgctctctctcgccttagctcccctcctctccatcaataagacgcatcgcctctcagatacagatcagatcattcatgtactcgcatctctccagaacgcgtgttgcatacctatactcgctcaacatagtcatacccctgctcggcttcatagatcgcagtaagtactctatgcaagcatccgatgatgcttacaacagcttctttcgtgaaaatagaacaggaaacgaaataccccgaactagatcatgctgatgtacactgcaccggcatgcatgggggaatcagtgggacctaacgacagctctgccgttctgagcagctcactcggagaggccagaatatgcaacccacaagataacacctgtaccacatacaccgttagcgatcagatagcaaacactggtgctagaacgccttcaccaacttgcttcaaggtggaccaggtctacaacctcttctccaattgaaacatccccgtcggagcacaccgtctctggtctgtgactaccacc

SEQ ID NO: 142188 - DNA, 305 bp, Zea mays
  unsure (1)..(305): unsure at all n locations
  Clone ID: MRT4577_61157C.1
actcgagagacccccacgcccacactctcaccttaaaaaacaaacccaacaagaanggcgccgggtacagcacacagcagcaacaccacacaccctaaaccaacaaccccaaaacagccccacccacacaacaagacaaacagtgcgctggcaaagaccccgacaaacacatcaaacgcctcctcaaaaccaagctctaccaccaccacaactcctatgacaaccagaacagagcccccacgcaaagatcgtccaaaaccatcacctcgcacaagaaagccaccctcagagctctgatcgaccac

SEQ ID NO: 142189 - DNA, 342 bp, Zea mays
  Clone ID: MRT4577_61158C.1
gctcggaatcggtttgctcttggggtgttcgaccccggcaatctttccgtttttagaacgcgccctggacgcctgagaacaggagcaaactctcaagcccgggcctcgatggttctactatacttctaacggttcctaacaaagggggacctttttacagattactacagtgcaaaaccccccaccccacctggagaaggagctggattgggcaccctgatcaccaaaaggtttcaggcacaagcttgccctgcaagaaccccctgaaaagaaccagcgatcccccgggcttcgaaaagggcgccttgcgggaagcgcccctgatggtggggaaagacagcg

SEQ ID NO: 142190 - DNA, 297 bp, Zea mays
  Clone ID: MRT4577_61159C.1
atgccttgcgcccttgccttgccttgccttccttcgagcgcgaggaccacgtctctcctggccttcccggcgtgcgagggtagccctaacaccgtcctcttctcgcgtctcacaccgttaggtgcgttccctgtttccatattaacatcgtcactttataatgccctgtgttataaattatttacgtgttgttatgtctttacttttctcagacttctttacaattgctattgttgttagatttatcaaaattattacagattttaaaatattctatagaatttttcatactttttt

SEQ ID NO: 142191 - DNA, 706 bp, Zea mays
  Clone ID: MRT4577_6115C.1
gccggccggtggggggccacccccctctgcatcacgctttaggaaagcaatcaagacacgattgcttaggccgccatgcagatcttcgtgaagacccttacgggcaagactatcacccttgaggtggagtcgtccgacaccatcgacaatgtaaaggccaagatccaggacaaggagggcattcccccggaccagcagcgtctcatcttcgccggaaagcagctcgaggacggccgcactcttgccgactacaacatccagaaggagtcgaccctccacttggtcctccgtctccgtggtggtggtaagaagaggaagaagaaggtctacaccacccccaagaagatcaagcacaagcgcaagaagaccaagctagctgtgctcaagtactacaaggtcgacggtgatggcaagatcgagcgcctccgccgtgagtgcccccagcccgagtgcggtgctggtgtcttcatggccgctatgcacaaccgccagtactgcggaaagtggcacctcacctacgttttccacgaggccaaataagcgcgccactaccggggtacgcgacaccgatcgattaacgagtaacggcatcatggcatggctgggaagaactgaataaaatccccccggattggcccgacatggaccctccatccactccaaaaaacttggcatgcatccgaaaaaaaaaaaaaaaaagggccct

SEQ ID NO: 142192 - DNA, 535 bp, Zea mays
  Clone ID: MRT4577_61160C.1
cgagacgtccacgccaacactcgatctcggacgcatgcctgagaaccgacggttctacttttatttggcgaaccggtatactctgatcaaatcgtagccgcacaatgtcagatggacgataagtgttcatcgtctattccgatgagcagcagacggtggcgcccgctcgcagcccgcggtagaggactcaccagagttcccagttcgtcacccaatgccccgctatccctggtaacagatgcaacgcaacgtggagaccaaatcgaacaaagactgcgacgtctaaccaatgggagaagatggtagcaggtccgaccatggtgtacggtggaccatcgacggagttcggttgatggcaggggcacgtgtttcccacgcaactactcactatctcaagcacacacacctttggttcaacgttggtgtggctcccacgagcgggcgcatgcccggaacgggacgacgacaaggtcgagccctgctacggccggtcccccatctctctcatctcggcgctctccggtgtttctcgtgc

SEQ ID NO: 142193 - DNA, 270 bp, Zea mays
  unsure (1)..(270): unsure at all n locations
  Clone ID: MRT4577_61161C.1
ccggccggancccgggcgcccacgcgtcgtgacgcgtgacgcggcttacatatatattcacctccatccattttgaccagggcgaggcagtattgaggaccataagtcggagatctcgcaccagcctagagcagaggagatgaaagacctttgacccagggcgcggctcttattttgatcggatagtgagacatcgctaacctggctcctattcgtcaacggagttttcggacatccacccggcatttcaatttaattatcaaatagtat

SEQ ID NO: 142194 - DNA, 220 bp, Zea mays
  Clone ID: MRT4577_61162C.1
tgacctacatgatcaagtccgacactgagcgcggactttttatggacaatgacgacatggcatacgacttcaaaaacctattgtttgatgagaaggaagttgctatgtttgtcttctataacattgagatacatccaatgaagggctcttgactctgaatatcgataggacaatactgatgtgggatctgaccatgaagaacgctgaagcttactctgac

SEQ ID NO: 142195 - DNA, 281 bp, Zea mays
  Clone ID: MRT4577_61163C.1
cccacgcgtccgaccacgcgtccgtccacgcgtccgccacgcgtccgcccacgcgtccgggaagcaagcaagcaccgagtacatacatactaggcagccaggcagccatggcgccaaccgtgatgatggcctcgtcggccacggccgtggttccgttccaggggctcaagtccacgcgaagcctcccagtcgccggccgttcctccagaagcctgggcaacgtaagtaacggcggaaggatccggcgcatgcaggtgtggccggcctacggtaacaagaag

SEQ ID NO: 142196 - DNA, 200 bp, Zea mays
  Clone ID: MRT4577_61164C.1
ccggggatgcaaaccgcagccgcccaatgttcccttcccccggcggcagcaaacatggcgctggaggtgctgccggaggagtccaaccgcgctctagaggaggaacggcgtaggggtactggtaacggtggaatgctgtgcaggctcggagagcactgtgtacgaggcattggtgggcggggagcgcgctgagggcaaga

SEQ ID NO: 142197 - DNA, 532 bp, Zea mays
  Clone ID: MRT4577_61165C.1
gccacacgtccgtgcacacgtactgtgagacctacttgatgaaccattatgtcaacgctacgatcagcactcattacatggctacgatcggcccggatttgctcacccatgacgctctgctcgtggacaggatttttactctgcaaatgtgggacactgttggccatgaatggtaccagagtctagacggtgcattctaccgctgtgctgattgttgtgtgctattctatgacgtccatgctatgatgatcatatgacgacctgaataactgtcgagaatagtatctagttcatgctagctccatcatatcctgataacatacctgatgttcaggtgggtaacaaagctgatgtatatggtgacaacagcacacgcgttatctgctaacaaggcgaacgcttggtgcgcttacacagggaacatcgactgctctgacacgtctgataccgaccgaacgatcgtggaagacgctttgcagagtgtcccgaagaatgctctgaataatgaccatgccgaagaactgtatgtgcc

SEQ ID NO: 142198 - DNA, 849 bp, Zea mays
  Clone ID: MRT4577_61166C.1
cattgggtacctcgaggccggccgggatagtgttacccacgtggacgactccgtcttcaccatggcgcgacatcttccccacgtcgtcctcgactctcggcctcaaccacctggcgacgctcagctaggacgccactgtgccccctgcacctccatcgcgcccacctccctagcgctcggccagggccacgcgtcgttctccctggctatcgtctccgttcgcccagatgtcgagctccgctcccagccatggccggatcccacacccccttttctgtttcgggccctggctaggagaatcagcacagcaaccagccagctcccacctcgtctcctctccatcaccccctctcttccagtttcatgtagtgctcaggattcacctcctcagtcctcatggacgcgcaacatcttcctccggctgctccctcgccatttccccatgcccaatacgtgctcgacgtaatgctcagtcgattaattgttagtatggtggagattggtctggattacgagttatgtgaagaatgtcgtgataaacctgtttgcgatgaatggtttagtgccgggtttccatcaattcagcaaattcttcatgcgaccaacggaaggaatcctatgatgcacgtctccacctcatatgacgccactaatgatcgcataaggagccgcaggcatgatggaaatgctgcccagtctgaaaacaagaagcagtttgagctggaccttgaccgcatagctaagggtgaagactcgcgcaccacactgatgataaaaaacattcctaacaagtacaccagtaagctgcttttggctgtcattgatgagaatcaccgaggaacttatgat

SEQ ID NO: 142199 - DNA, 428 bp, Zea mays
  Clone ID: MRT4577_61167C.1
ctccacccaggaccgccgccctcatccgtctcccccgtcttcctcgccctcgtctacctcgcgctcgtcggaaaaaacagctcaggtgagtcatctacctcgctctcatccatctcgtgtcttcctcaccctcttcctctgctcatctcgacgatctggaggtcgcgatctggaggtgtgtctatcaaggggattcccaggatcgcgtaggatctgcagctctggagcgcgcgggcgtcggggaagtagcggtaggatctgcagccggacgggacggggcctgaaggtccagcgccgctctggacctcgcgtgggtgaagtccgaagcacagtggcctctccttggtttcactctcctcctcgtcgttgtccaatctggcgccagcaatgcccgagaagcgagcgctgctaccaggaacgcccgtgaa

SEQ ID NO: 142200 - DNA, 2172 bp, Zea mays
  unsure (1)..(2172): unsure at all n locations
  Clone ID: MRT4577_61168C.1
gacagttcctatactatactgctcccagttcttcctgccctgctgtgctggttcccaatcctcacactgattgtggccttccagttcttgtggtctctcaaccagcatctgatacccaattcctcgcacaaacctgccacacgcaatgtccaagaccgagagcaggaagctgtcggacgactatgaggttgcggaggtcctcggccgaggcggattctcgatcgtgaggcggggagtgagcaagtcagaggggaaggcggcccaacaggtcgccataaagaccctgcgaaggctgggcccggccaccacgaccggcgggagcacgccgccgcagcaaggctcaaataagggcggcggcctggttccgacgtggaagcaggtgtcgtccatctccgacgcgctgctcaccaacgagatcctcgtgatgcggcggatcgtggaggccgtggcgccgcaccccaacgtcatcgcgctgcacgacgtgtacgaggacgcgcgcggcgtgcacctggtcctggagctctgctcgggcggcgagctgttcgaccggatcgtggggcgcgaccgccactactcggagttcgacgcggcgggcgtcgtccgccagatcgcgcgcgggctgcaggcgctccacggcgcgggcgtcgtgcaccgggacctcaagcccgagaactgcctcttcgccgacaggggcgaggcctccacgctcaaggtcatggatttcggcctcagctccgtcgaggacttcagcgaccccgtcgtcaccctgttcggctcgatcgactacgtctcgccggaggccctctcgaggcaggatgtctcggctgccagcgacatgtggtctgttggggtgattctgtatatcctcttgtccggatgcccgccgttccatgcaccaactaatcgagagaagcagcagaggatactgcagggagagttcagtttccaggaccatacatggaagacaatctcttcatcagccaaagaactgatctccagtcttctctctgttgagccttacaagaggccaacagcaagtgacctgctggggcatccttgggtgataggggactgcgcgaagcaggacctcatggacgcggaggtcgtgacgaagctgcagaggttcaacgccagaaggaagctgcgggcggcggcgatcgccagcgtgctcagcagcaaggtggcgctgcggacgaagcggctgcggaacctgctgggacggcatgacctgagctccgaggagctcgacaacctgcgggctcactttgcacggatatgcgccgacggcgagaacgcgacgctggcggagttcgagcaggtgctgagggcgatgaggctggaggcgctggtcccgctggcgccgcgcgtgttcgacctgttcgacaacaaccgcgacggcacggtggacatgagggagatcctgtgcgggctgtccagtctccgcaactcccgcggcgacgacgcgctccggctctgcttccagatgtacgacgccgaccgctccgggtgcataagcaaggacgagctggcgtcgatgctgcgagcgctgcccgaggagtgccttccgggcgacatcacggagcccgggaagctagacgaggtgttcgacgagatggacgccaacggcgacggcaaggtgagcttcgaggagttcaaggcggccatgcagaaggacagcgccctccaggacgtcgtcctctcgtccctccggccgccgccgccgccatagctagaccgggagagagattccaactcgttcaacttcattcccacgagaacgcaccattgattacagtaccgttcgaatcatttaatcagtctccggcctgtgccgttgtccgatccggccggctagttgttggaaactccggtcgtgggagaacctcgatggatcctgctagatatggctgtgctgttatgtgtttctggatcctgatagattcgatggctgtgttattaaaaaaaaaaaaaaaaaaaaaaaaaaaaaaaaaaaaaaaaaaaaaaagttacaaaatcgaaaggggttcgagaggctaaaatcacttccttattagtctttgaatggaggagattttagtccctccaattcacttcggtttttgtactcctaaactagcttttaaggtagaaaaataaacgtgtcaagagtgggtaaaaaaaaaaaannaaaaa

SEQ ID NO: 142201 - DNA, 263 bp, Zea mays
  unsure (1)..(263): unsure at all n locations
  Clone ID: MRT4577_61169C.1
tggtttattttatgaagtgnagagggtgaaggtgggtgggggtttaatttgtgaattgccatcttcaaagctatgtaantngcattgcatatgtataaacaacgctcatacaacacagcggaagaataatagtcaattgnccctcttctccaatccctcnaanctttaaacatcactcatcctgcatcaaaggcttgtaaaccatgaccttcataaggccctttgcctattattatcacattagaatagccccgctcaacatg

SEQ ID NO: 142202 - DNA, 648 bp, Zea mays
  Clone ID: MRT4577_6116C.1
gccggccgggtccgaccgcagccacaccccaacatcaaaaccctcccatctcttcccctccgccgccgtctctgctctcaagatcgccatggcgccagaaaagaagcagtcgaacccgatgcgggagatcaaggtgcagaagctcgtgctcaatatctccgttggagagagtggagatcgactcacccgcgccgccaaggtgttggagcagttgagtgggcagtctccggttttctccaaggcaaggtatactgtgaggtctttcggtattcgtcgtaatgagaagattgcatgctacgttacggtcaggggtgagaaggcaatgcagcttcttgagagtggcctcaaggtgaaggagtatgagcttctgaggaggaacttcagtggttccaggtgaagtacgagggtgtcatcctcaacaaggcccaaaacacctcgtaatcattgatagtcatcaaacgacttgcccttaattctgtgtactatgaacaaaacaccccgtgtttggttcaagtataatctgtgtactatgaattctgtgtttgttggataccaaatgcactgccagttttgcgtctgtgcccgtaattccatcttgataatcagactagcagttaggagtaaaaaaaaaaaaaaaaaaggccccta

SEQ ID NO: 142203 - DNA, 431 bp, Zea mays
  Clone ID: MRT4577_61170C.1
ccacccgtccgcccacccattcccccactcgtccacccacgcgtccttttttttttataaatacaaacaaacccctataatgaatagctaaaataaaaaacaaaaacaaaaaattcacaaacaataatcaccctaaacaaaactattactccgcacagcatcttgttaacttcgccccccccttttaagatctccttttcacaatccccacccttgtggggaactactttttttattattcccctaaaaatcccttcattgccccctttttacctacagatgttctggtacaccctattcctccccacattaaaccccttccttacatttctctttttcatatattcaagcatttgctaataaacccccttaaactcctcctcccacctttcccccttttcaacctgaacacatcccccccctacatcatg

SEQ ID NO: 142204 - DNA, 171 bp, Zea mays
  Clone ID: MRT4577_61171C.1
agcgttctttataaaatggttcgcttttaagaacctgcccaccgagaaggatggcgattggggccgcgcccgccgaccaaacaattgcgttcgcgaggggccagcctttttattggattttcgcgcttattgggggccacttgccggcggttcacggggttggtgttccct

SEQ ID NO: 142205 - DNA, 358 bp, Zea mays
  unsure (1)..(358): unsure at all n locations
  Clone ID: MRT4577_61172C.1
tcctctgcttccgcccagctctgctccgccagtccaagcaacgcaccaatgatatacaggcgaaatcccgctcccacgtaaaaaataaatacggatgcaaatgacgcaacaacgatacggaaagnnnnanaaaaaaanaaaaaatgaaaaaaaaaaaaaaaaaaaaaaaaaagaaaaaaaaaaaaaaaaaaaaaaaaaaaaaaaaatttactactactaaaaaaaaaaaaaaaaaaaaaaaaaaaaaaaaaaaaaaaaaaaaaaaaaaaaaaaaaaaaaaaaaaaaaaaaaaaaaaaaaaaaaaaaaattaaaccaaaaaaataaaaaaaaaaaaaaaaacaccacaaacatatcccc

SEQ ID NO: 142206 - DNA, 711 bp, Zea mays
  Clone ID: MRT4577_61173C.1
ttttgttactgtaacttcggcaattttcaactgataacattttttcaattaacaacgtgaaagttgcattcgtcatcttcacactactttctagcacaagtcattggccactccactaaattacttccttttgtgtagccaaagcttttaatgtgcacttcagacttttagccattttgtattgactaatgtgttacatgtcgtattgcaatgcattagcatatgcctttactttgcgctggtattctttgtgtcatcttgctctaccctgtaacattactgcatcttttgttatcttatgtctactttgtaatgcatggtgtattcatcctttcattgtctcatttcaccatcaagaggcacccaaagtttgtttgcatgatttatttttaacattggtctaaatatgtattttgttaggtgatatttcattttacatgctgatgtttccgttatttcctatagtctttgcacactgtgctatccttattccttgtaccaaattttttgaagcaatgattagttgcagaatgcagatagttatttgttcgtttcctgtgttctatctttcttttgcagctcgctataagctaataatttttcttatgcctctgcttctattccatcagatgcagcttttcatgtctgcctgatttttctttttcatattgcaacaggttgatgctgtagtatacctggtagatgcatatg

SEQ ID NO: 142207 - DNA, 667 bp, Zea mays
  unsure (1)..(667): unsure at all n locations
  Clone ID: MRT4577_61174C.1
cggggtcgttgtagtatagtggtgagtattcccgccaataagtttatatgccacaattttccatgttcccatgaagtgaatctctcctaatggtttaatagctgggttgaaggctgacaatacctgccattgaatttgcaccaggatcttactgtagctatttaggcacacaatgggaagttcgcctgtaaattcgagtttgtaaggtagtcggagtgatggattacatatacatgtttttatttatttatttttctgctttgctatattattcctcgatgactcctgagatgcgtcttacgacattttctaaactttttccattctttgacatggagaatatttttctgctttccaacaactgatgtatttatcaactttgcatccttccgaaggttagccattatttccattttgctttttgtgaaagagcacatgatcttggatactacaagttaactatattggaggattatctaaataggacttgatcgaatctgttgtgtagttntgtttacataggcctatacattntgtcatactcatgatttattccgaaaaagaaaaacttcctctagatttagatgtatttgntatgtggaatcaataattatgtgcacgacttttcttattctatgaacaataagaacaatatattttgggagta

SEQ ID NO: 142208 - DNA, 490 bp, Zea mays
  Clone ID: MRT4577_61175C.1
gactagttctagatcggcgttcagacgcctttgccaaaaagacgctacgtatcggctgtattcgcgcagggtcaactgcatcaacaggaagatcacgaagctccagcagactgcggctagggttggcccgagggggctgttcgccgtgaagcagaagatggaaatgtacaagcgcgagaaggcggagctttacgacgtgatcaacaaaggaatgcaggagaacgagaggggcggcaacagcggtgctgggccttcgaatagggctgctgccggtccttcttcccatgaagctgctgccagcagtccttccaacactgccatcccttccgacggtgctgatacatcaaaggacgatgatgccagtccttacagcgttccctcttccaactgtgctggtccttccggcagcaagtaggggtcggagccggccgctcactaaatataatggtgcagtgagagactgaataagcgcgcgctgcacatcgtattc

SEQ ID NO: 142209 - DNA, 418 bp, Zea mays
  unsure (1)..(418): unsure at all n locations
  Clone ID: MRT4577_61176C.1
ttggctttaaaggtgctaaaagaggacaagggtgattattgctctgaattctttgagcttgcagctgaatttttcagctcaggtaatggtgaagatggtgctaaccttctcttgatttgcaaatcattgatcatgagtgtcagtagtatgctcctggctgacgacctaaacaagtctcaattatcagattctgaccttaaaaggggcattgagatgctcagaagagctgggaaggtaaaatagagcttgccaattatcaagagtcgctgataccagtgtgtgcggatttgcttttcttggacattattttgattcatttgtactgatttgcagctattacccttgactntgtcttcagctctggtgacctctgatcaaattgagaacaacttgccctttctcatacattcagcttcta

SEQ ID NO: 142210 - DNA, 139 bp, Zea mays
  Clone ID: MRT4577_61177C.1
attgggtggtttttatctatcaggtgttgctatttttatataatggcatttgcattctttgccccactcacacaataaaatgtttttttcatgcccagatcatataaatgaacagtttttataaaaacaaatggaaaat

SEQ ID NO: 142211 - DNA, 321 bp, Zea mays
  Clone ID: MRT4577_61178C.1
acataatagcaaattttaaaaaagggataacacagttgccccaacttatacacatctttaaagggcggggtcgaaacacaaaagttttacatactttcgtacaatagtacaacgttacccacaaaaaaagcacgcgacgcactgtcaaagagttcttacaaacaatgacatcactctggggtacattgggcacctgaaaccttgaggagcacatgcgtttttaccccaatggaggcggggcctcaaacggaatgggcacttttacgggcgggaccgacggtattggcggtaaggcccccaccttggggaccacggatggaa

SEQ ID NO: 142212 - DNA, 306 bp, Zea mays
  Clone ID: MRT4577_61179C.1
gttgaagaaaatacattatcatctcatgtacttcttgtttcatagaaacagaaaatgcaaatatacatcaataacaggaaaaaaatacatctaaaaaaactggatcgatttcccgtcaaacaaaaacatgcaggaaaaacctaactgattgtgtgcaaaatcataagaaaaaaaaggactgacagaaaaactcaaattttaggttacttctctatatacttcgctcacatttctggcgtatattagaagatccttcaagctaatcaacttgatggtgtcttctttgcttcaagatccttcacaata

SEQ ID NO: 142213 - DNA, 931 bp, Zea mays
  Clone ID: MRT4577_6117C.1
gaaccaaagacagcacacaacataattgtgaacgaagtacctgataaatgttcctcagattttgctggcgagctcacattaacacaatcaaaacagttatttgttcctaactgctagtctgattatcaagatggaattacgggcacagacgcaaaactggcagtgcatttggtatccaacaaacacagaattcatagtacacagattatacttgaaccaaacacggggtgttttgttcatagtacacagaattaagggcaagtcgtttgatgactatcaatgattacgaggtgttttgggccttgttgaggatgacaccctcgtacttcacctggaaccacttcatggcgtcttctttggtcaccctgtgctggatgccaacacgggacttgcacctgcgccgacgtgcaacacgataaccagctcgttccagaacgacgtaaaagtccatgccataaataccagtagacgggtcatacttgattccaagatcaatgtgctcctgaataccaaaaccaaagcagccagtatcactgaagttcctcctcagaagctcatactccttcaccttgaggccactctcaagaagctgcattgccttctcacccctgaccgtaacgtagcatgcaatcttctcattacgacgaataccgaaagacctcacagtataccttgccttggagaaaaccggagactgcccactcaactgctccaacaccttggcggcgcgggtgagtcgatctccactctctccaacggagatattgagcacgagcttctgcaccttgatctcccgcatcgggttcgactgcttcttttctgacgccatggcgatcttggagagcagagacggcggcggaggggaagagatgggagggatttgatgttggggtgtggcttttttttttttttttttttttttttttcccgg

SEQ ID NO: 142214 - DNA, 604 bp, Zea mays
  unsure (1)..(604): unsure at all n locations
  Clone ID: MRT4577_61180C.1
cttggcatcctctanaaccccgcccttgttttgttggtttttaaaaaattttttttttttttttttttttttttttttttttttttttttttttttttttttttttttttttttttttttttttttggaaccccccgtcctttcacaatcaaaaaaaaaaattttttccccctgggggggggaaccccccttnccctttcacatttttaaaacccccacatacaattttttatccccctaaaaacaaaaaccgctttccccaccccataactttgcatttctccggggcgtggcctccccccttacaagctaagcctcccctccgcggcccccaaaataaccggaaacaattttttccccaaagggtcccttaagtcctttgcaaagttctccaccgggccctcccccgtaacctaacccctaataaaaaaagccaacattgaaaacattgcccccccccccttcttaatcccctctccctctaaaaaaggcccccctttccgggtcccttcccccccccccgggggtccaaagccccccccggggtgcaactttttccccaaagtccacaccccttggtgacccccgggtactcccccccccc

SEQ ID NO: 142215 - DNA, 363 bp, Zea mays
  Clone ID: MRT4577_61181C.1
acgaccaactatcaacatatcaagaacattacagtaccaacaacggcaaccaagagatgggcgctacttattctcatcctactcaccgcaagacacaccaccacatccattcacccacaatgctcacaatctcctatacctacccccttttaccaataccacacaccaacgctttctaccaagtggtaaaaccaaattgaacaaccctacaacaacaaacaatcaatggttacacccatcttaccattattaccctggtatattcaacaaccgaaagatttataacaagagtgacctctttccaatattcttactaataacattatggatcaacaactacaacaacttgtgctaacaaaactt

SEQ ID NO: 142216 - DNA, 312 bp, Zea mays
  unsure (1)..(312): unsure at all n locations
  Clone ID: MRT4577_61182C.1
gctccgggtcattnagggcaatgccggcggcgtcttacctaaggctcgagaagcccgtcgccgccgcggactccaagctggacccacgtcgatgacgtgaagcctcgcgttcccagctcccgcaagcctaatccgaccaagctcaggtcgagcatcacgcctgggacggtgctgatcntcctctcggggcgctttatggggaagagagtggtgttcctcaagcagctcaactccgtgccgcgtccttcgtctctgggtcatttaagatcaatgtaggtcccgatctgtttgtgtcaaccaagaacctatgtc

SEQ ID NO: 142217 - DNA, 931 bp, Zea mays
  Clone ID: MRT4577_61183C.1
ggccgcttttttttttttttttttcctttcaaaaacctcatgccactaatgcttgacatccgctagacagctgcgagcatttaacaagaatgtgttgttcatgcgaactcacacgaatgaatgctgctgccatggcagtgtcatccatgtcacttccacgaacaccaagactagagagctagacatgtatcatgccgttggaaatttgcactgtactgtaatagcttccttcattcacacgataactctactccaaggtcaaaagaaatgccatcatatcaaggctggagaagaacaaggatgcatgtttggcagctctggggcagaacaaaaaggaaaacgcaagaccttacgcgcatattatctcaaattggggcaggtgtccacagtcacagatcttctaatgtaaacaccataacatacgtaataacgtccaatcgcctgtacactttacaagtcccgggcccaagccaatgaactgcctacccaaaactgctttccaggagcctagtgcccgagatcagggggaagcaggccatgcatcgacccgctacctattcggtttactgagatcaccgcctggcctggtcatctatgtgcttggtatacggccacaggaacctcaaaatatcattaccaaaatctgtcacaatttcgcatcttcgtgagaacgcaaccagaaggtttgcacggtgcatggccccttgtgtcaattgctgcaaccacacgatgggacaaattttcttctgtgaatttttacgatcctcaccttggtctcggtgtcgctgtcgcagctgtcacaaactacatctgtaattggcatgctaccaatgatctcatcattcccttccgatctttccggcgatgcaattacaatcaaatctccttctttctcagcttttgagctgccaaaatctgctttcaccatacc

SEQ ID NO: 142218 - DNA, 126 bp, Zea mays
  Clone ID: MRT4577_61184C.1
ctccacgcttccgttgtttatttgtaacatcaactaccatttcactcagctagctgctgtctaccctcagtattttcttccacttcaaacaattgtttgcattagtctctagctgccattctacaa

SEQ ID NO: 142219 - DNA, 187 bp, Zea mays
  Clone ID: MRT4577_61185C.1
aacggaaaagcacaccagaagtaagtgggggcttctatacactacacatctagagggaacgttctaggagcccatctatgccagctgatacaaattgttaatattatccaatctggggctgcgataagacactgatgggtctaaatcaaaggacaaatgttaacaaaagtagacctcctgactccat

SEQ ID NO: 142220 - DNA, 199 bp, Zea mays
  Clone ID: MRT4577_61186C.1
acgcctctacacatgacgttgtgctaacgcgtccgaaaaaaaaaaaaaaaaaaaaaaaaaaaaaaaaaaaaaaaaaaaaaaaaaaaaaaaaaaaaataaggaaagacaagggaggtggtcctggaggattgttagcttgcatgcccgtccatgggatgtcaaatcacttccatggtgtcacctaatttgacttccttgg

SEQ ID NO: 142221 - DNA, 232 bp, Zea mays
  Clone ID: MRT4577_61187C.1
gatccataaggggttataagagacattttatacataccttgggggggcaaaacatgtgctacttttttaccctttccaaaaatataccccaacctttaaaaaggggtaacattaccaataaacccagcttttttcccgggccgggggaaaacccattaattgccaaaaaccctgaaaaattagtgtaaatttaccctttccccggttggttttcctggggaaaaataaaacg

SEQ ID NO: 142222 - DNA, 276 bp, Zea mays
  Clone ID: MRT4577_61188C.1
agctatgatgtcgcatgctcccgtccgtcagctgctaattcggctcgtggtggggtcgggagcttttttctcaagtgggcactgccctcagctggggagcgaatgcgaccctgtcagtttctcatgcgacctggccacgatgtccggcttacatcatgcagccagatgccgggacacaccaaccgatcgtggtccgcagagcacagtgtgaagaggtcgcggtacacatccaatgtctgatgctacagcatgcatgcagggcccacacccttgccg

SEQ ID NO: 142223 - DNA, 173 bp, Zea mays
  Clone ID: MRT4577_61189C.1
aacagccgcgccagcgtggtgcaattatttttccttgagggcgcggcgcgcgaacaacaccttgcatcggacagttggaagcaccattaagtgaaggcgaaggactccagtacccttctctttggtgagaaggaggatgactgcgtgttgccttgtatgataccctgaggcag

SEQ ID NO: 142224 - DNA, 320 bp, Zea mays
  unsure (1)..(320): unsure at all n locations
  Clone ID: MRT4577_6118C.1
tcccactcgtccacccactcttccacnaatttgtaaaatacctccttatcgtacgatttcgcaaattcataaacattatcattccaattccatatcaaacatattctctcctctcaacattaataacaaatataacaaaattctcattctatctttccaaaactctatatatcctgaaacacaatcacatcttttttatcttcacccctcatttccatatatacattgttacaatcaaacattctaataacaaaacacaactctatttatttatttatccactactcaaaaaattttcttattaaaccaactataaaatc

SEQ ID NO: 142225 - DNA, 593 bp, Zea mays
  unsure (1)..(593): unsure at all n locations
  Clone ID: MRT4577_61190C.1
ctattcaagaaactatatccctgccattaaaactctacatatgtttgagatacaccattatgtacggctagaaacatcttgggcccactgccaggctatggagaggtaccatacatttctatgggtaagattgctccatcctcttctcattcatattcaccctccctctatataccttttccatttccgatcataggcacacgccaagcgcaagtgggggcctgctgccaacaggcaaccgcatcaatgaaggcggagaaagcagcggtagtcacgaccagcgtcaacagagacaaggtaatgacaaatgaagatcccttaagcaccgtgcatgagatccagttcttccccagctgcgcacacatgcagcactgtgcctgtatcacgtcatgtgtctccctgtcctcctcggcctccagcaacgcgatcagccacacccatagcctcatcaagtaggagcacgggatcgtgcacttgaggttcttggccacagattcctctcccacaaagatgaaggactaggcctgcagcactcaagctccattgtccaccatggcagtggaggcaagnaaccatggaattgaagcatatga

SEQ ID NO: 142226 - DNA, 729 bp, Zea mays
  Clone ID: MRT4577_61191C.1
cactactatgggaagctggacccctggcgtaccgcgccgcaattccccggcgaccacacgtccggtccatttggaggtgatttggctgaactgaagaaccaaggaacagtccccaaatctatagttcatgctacagctcttgcttgtggtgctcgtgctgttcctcttgaagatgcagcttcgcttattagtgccattgaatccaaaatcagatctggaggggccataatagcgaaacttccttcaaacaacctagcacctctagttcctccagccattgctatgtcatcttctagtgaagatgacgaggagcatgaccacagtgagccctcgcaatgatcgatgtcgatcgcaacgttaatcatcagagctccaacgcgatgaagcttcagagggagctatcggagttcgaaactgaagctggcaactgacctggtctgaagacgaaagaaaatgatcatactgattgctaacatacgcgaagtgaaggactgaagttgttctaaagatcaaagcttccctgaaaggtggcagatctattctatgatttgagacattttttaaaagattggattaggattgtagtcacttgtttctgttgagtttatattgtaatcagattaactcaagttaatacctccagtggagaattgtagaaaggagtaaccatgctatgtacatgtcttctgcataaaagaaaggcgatagagtttaaaatccagctgtgct

SEQ ID NO: 142227 - DNA, 289 bp, Zea mays
  unsure (1)..(289): unsure at all n locations
  Clone ID: MRT4577_61192C.1
ccgcggggcgatcccctgtcagtcgggactacccgctgcgtttacgcctctccgtctgcggaggagaagaatcttacgaggattcccctagtaacggcgagcgttccgggngcagcccagcttgggaattgggcgggctcgccgcccgatgtggggtcgggtgaggctgcctctgcgtcgggccgggccccggttctgtggtaggggtcgcctgggcgggtgtgcgccccgtccgggccgggccctgttgccccgcgaggggccgtcgcgggtttggtttgtttgggtt

SEQ ID NO: 142228 - DNA, 145 bp, Zea mays
  Clone ID: MRT4577_61193C.1
atgaaaataggtccgcgtgtggatcattaatccatgcttgaaaaataccttgtccacaaaattaacttcatctagatcgagaccaattgtttggggctctatctgtggggaaaaccctttccattttgaggcccttgcgggtgtg

SEQ ID NO: 142229 - DNA, 129 bp, Zea mays
  Clone ID: MRT4577_61194C.1
ttattacccgtgtggccaatgaactagcacactttattactggcgcattgcagcttaattttttaaacccacggcggtcgatgaactagcagataggttcagaagggcacacacgcccttacgtaataa

SEQ ID NO: 142230 - DNA, 755 bp, Zea mays
  Clone ID: MRT4577_61195C.1
aagtgcttgcggctagttttgtgcttgggcatgagagccacgtgtactagccatgctgctctggcaccctcagagctcacccatgctgtgcccttgacaagcttagtcactgcccctaccctcttattcagtcaccatagggcaggttgcagtgaagttgctctcctatcctcgagcttagttgatctctcgggtgtctttgtggttgtgcctacaagcttgagtttccctcctcaatcacttagttggtcagctcatgtatcctgtggtgttttccctttgtctggtgaccacgcagccgattcacccacctcgccgtggccagagatttccagggagtcgcatgcccgtgtaatccttgttccacgttctccaaaggtcagtgaagcttacagagttgcctgttctagctctactattgtgtgctgcctggaacagtgcagcgacgccgtgaactggcgctgcggaccgcctctgcgtcgacccgttcacccgtgtcgtcctcggtcggtttcacgcgcacaccgtagccttgttaggtcgttgaagctctccacgccattggtttgagctctaccacgtcgtggccgtggaatcaagctcgagtttccgccgccgccgttggtagctggataaatgggtctccacgggtcgattaagtgcatatataagtctggtgtggtctgtggatcatgttggtaccctcgcttttgtctatgctactacaccacggtggtcgatccggcgccggctta

SEQ ID NO: 142231 - DNA, 283 bp, Zea mays
  Clone ID: MRT4577_61196C.1
ctctcagcgagtggaatcgatggaagccctgcccatactgagccgtaacccaagcaggagcacagaccgagactgggagaccgcgtcggcggcatcttccctggcctcagtggccgagtacacaggtcccaagctctttaaggagcccagtagtaaatcacacaagccgattattcacaatgccatatcccattgctgcctggctggaaaagtgaacgaaccccacaagaattccatattggaggagcgtgagaagtgtgatgcaatcactacatcatactgt

SEQ ID NO: 142232 - DNA, 280 bp, Zea mays
  Clone ID: MRT4577_61197C.1
gtgggggggggggtttttaaaaaaataaaatggggggggtggcgagaaaaatctaaaccaataaatggattatttcaaggaaacacatgccgggaggagggcaccattatcgagtacatcgcaaatgtaatctaaaagaaggcacctccagaggggggggggggggggcgcaacaagacaggagtcatcagagagaaccgggggtatggcagcaattggtgctgctgcaggaagggagcgaccaaggggctagccacggccaatggagaaaggaaccgga

SEQ ID NO: 142233 - DNA, 274 bp, Zea mays
  Clone ID: MRT4577_61198C.1
gagcgcggacagtggctgcacggccatacggacggtgcaacgcaacgacgaccacggcggctgcgccgtgtacgccctcgagtacacggtggtgtagatggcggacacacctgcactgcagatgatgactacctggaggcggcgtcgatcatgcttgacaccgctagcgtcgtcgtcccatccgctgctgctaggttcgacggcgccaccgctgatgagggacgacgacgactcaagatgataatgacagtactacaatgatagcagcatcgtc

SEQ ID NO: 142234 - DNA, 304 bp, Zea mays
  Clone ID: MRT4577_61199C.1
tatttttgtcaggccttcaatacctcagggggtttttttatttctcaagggcacacatatgttaaaaaggataattgactccttaaatgctcatactcatgagatgatgatatacacacgatgttctggagctagaataccaaaactagatggtaaaatggcaattgctttaaaagaccaacagcattcatttcgacaatgcattcaggatccttgtaagtcaaaacactaagcattttaagaccttgactgcggcagacttgaagacgtccacaaaatcaagttctaatgaggctatcacccg

SEQ ID NO: 142235 - DNA, 821 bp, Zea mays
  unsure (1)..(821): unsure at all n locations
  Clone ID: MRT4577_6119C.1
cggaaatcaatcaaaaacgaaaaaggtggcgagagggagagggagaggaaggtgccggccctagcaatggcggggtggtacgaggaggcggcgggtctgctgctgcgccggtcggcgttggcggagatggcggtagatgtgctgctgtgcgccgtgccgatctgggcggcggtcatgatcggcctcttcatagggtgggcatggcggccgcgctggaccgggctgatcttcctcggtttccgcagccgtctccggctcctctacgtgcctcccgggctcggcgcgcgccgcctatggctcgcctgcaccgcgctctccgccttctccgtcgcgccgcagctgctctcctccgccttccgccgccatgggaagtaccagcgcaaggatccctcgaacgacgacacggacgcctgcggggattctggcgcttgcgctaacggcaggtcaatttttgaggtcaagcatggtattgtcactgagaaggacctagatcacctcgtgcagcttttagataataaggagagtgggcatacaacatggcagcatttgatggagcgtaccacttccaacatgacgtacaaggcctggaggncatgagcccgaggtgggacctataatgcattgtagccagaccattttcgaggatgctactcctgaactggttagagatttcttctgggatgatgattttcgtctaaagtgggaccccatgcttgtgtgcttcaaaatttttggatgagttccctctgaatggaaccacaattattcacctggattaaaaagttcccctttcttctgcagtgaccgtgaaatacattttt

SEQ ID NO: 142236 - DNA, 481 bp, Zea mays
  Clone ID: MRT4577_611C.1
ggaactttccgccccgccgtcccgcgagcagcaccgccagcgtaaaccggcgacgcgctattaatccagcccacaaccaagtcatcactgccaccaagtataccaggagcctggagggggagtataccaggagcggagtggctgcggtgcccatcgatcttcggggagtgtctgggatcgccggcggcgaagccatggaccaggcgcgaagcaagagcggcctgctgtcgcacgggtctggcaaggcttcctcgcggccggggtcggggacgctgggatccccggaggagcaaccgatgctacccgaccgccgggaagtcgtcgtgaaggtcgatgggaacgggaacgggcacgcgccgttttccttccacggcgcggacgcatgtggcgggggaaaggcggggaatgcgacctccagcacgcactccacggcgaccacgacgccggccgagagcaggccgaggtcgagcgaggcgaactc

SEQ ID NO: 142237 - DNA, 161 bp, Zea mays
  Clone ID: MRT4577_61200C.1
gaccacaaactggtggggcttttcaacgaaaattccaaccattggcccatttccatgtcctggattctacctcaaagtgtcagggaaacttgaatttacacactaaccatatttaacaaacttcttcaacatacttctgaggggggggagggggtgtttca

SEQ ID NO: 142238 - DNA, 764 bp, Zea mays
  unsure (1)..(764): unsure at all n locations
  Clone ID: MRT4577_61201C.1
gaagctcggaattcggctcgaggttcccagttctctcttttttttgcccatcccccacctcggctggctcaggttagttcctaaacccgcacctacctctctgcctgctgggccggcccctgatcctgatttccccaatcgagagtccgagacccgagaggaggcacaggcacctgcgctagctgcagctgcaaatcgtcttccccagatccggcgccgcctagttcgctcctgctcgcgacagcgcccagagccgtccgcttgttgcccgttcttggctgctgttgctggcgagagcgcgcaggaggagcggctgatttttgattctctctgtccctccctccctcgcttcgctcgcgcggggtgcgtgcacgtaccatgagaagatgatgcgcgccaggcccaaaggtacattcgccgacgcgatgagggagagctcccctcctcctcctccccctccggctccggcttcggcagcggtgaaggagacgagtgggaggtgcggcccggcgggatgctggtgcagaagcggagccccgacgccgacgcccccgccggggcgcccgnccctaccatccgcgncaaggncaagntcaacggcggggaccacgagatctacatcaactcccaggcctccttcggtgagctgaagaagatgctggctgggcggaccgggctgcacccccaggaccagaagctggtgtatcaggacctagagcgcgactccaagcccctcctgtacatggccggcgccaaggaccgct

SEQ ID NO: 142239 - DNA, 834 bp, Zea mays
  Clone ID: MRT4577_61202C.1
agttgtatcctctcctcctccttgcggctcccatcttccttcctcttcgttcgtttctccaaccgaagcttaccggcattcgctcctggttttcccggccaccgccggccaagaaccgatttttttccggttccggcgtagcagcaggcagctagctagcttgccaccagctgattcattgcctctgctagcacggtactactagtgtttttcctgagctcggtggggtgatcggtcgatcggccgccgctcgagacacgtacgtacgtacgtacccgatcgagggtcgctccaagatgatgatgagcgggaaccggaagcagagggtggcattgtcgccggtgaaggaggccgccgcggtgcccaaggaggaggtgtgggaggtccggcccggcgggatgctggtgcagaagcggagccccgacgcggacccgccgcctgtgcccaccatccgcgtcaaggtcaagttcaacggcgtctaccacgagatctacatcaattcccaggcatccttcggcgagctgaagaagctggtgtcggagaagacgggcctgcacccggacgaccagaaggtggtgtacaaggacaaggagagggactccaaggcgttcctggacatggccggcgtcaaggaccggtccaagatggtgatgctggaggaccccgccgccaaggccaagcgcctcctggaggagcgccggaccagcaaggccgagcgcgccgccaaggccatcgcccgcgtcgccctcgacgtcgacagctcgccaccaagggtgcgtgcgtgcggtgcctttatgtgctatagctccagttcatgcgtcgtcgccagtcgcg

SEQ ID NO: 142240 - DNA, 1914 bp, Zea mays
  Clone ID: MRT4577_61203C.1
cattgggtacctcgaggccggccggggtcccttagttgccgtaccatcgtgtccttttcctcctacctcctccttggctggccctcttccccgtcttcctccctcttccttcgtctctccgtttcaagccctaccgacaggcatttgcttctgctccagtgatcagccccctcccctcctggcctcctctccacccggccaaaaactgatctttttttttcggttctggtaccatagctattagtagtcgtagcggctaacttgcaagccgattgtctctagcacgcaagtgtttttccctcccctgagcttggtgggcgatcgagagttcgagacagtgtacacatacatactctgctcgtcagctgaggatcgatcgcttggtctcgttgttgcgtagataggtactagaggactatagctactagtaggactaggagaggatccgagggagagagagtaagcaggccaagatgatgcgcgggaaccgggagcagagagtggccttctcgtcgacgaaggaggccgccgcggtgcccaaggaggaggtgtgggaggtccggcccggcgggatgctggtgcagaagcggagccccgacgcggacccaccccccggcggcgcgcccgtgcccaccatccgcgtcaaggtcaagttcaacggcgtctaccacgagatctacatcaactcccaggcatccttcgggagctcaagaagctgctgtcggagaagacgggcctgcacccggacgaccagaaggtggtgtacaaggacaaggagagggactccaaggcgttcctggacatggccggcgtcaaggaccgctccaagatggtcatgctcgaggaccccgccgccaaggccaagcgcctcctcgaggagcgccggaccggcaaggccgagcgcgccgccaaggccatcgcccgcgccgccctcgacgtcgacaagctcgcaaccaaggtgtcggcgctggagacgatcgtgagcaagggcggcaaggtcgtggacgcggacgtggtgacgctgaccgaggcgctgatgaacgagctggtgaagctggactccgtcgccgccgaaggggaggtgaaggcggcgcggcgggcgcaggagaagcgggtgcagaagtacgtggagacgctggacgccatccgcgccaagaacaaggcggcggcggcggcggcgccggccaaggcccgcagcggcagcaacaaggcccgcgcgccgcaactcccgccgcgcccgccgcccgtgtcgcagaggcggaacttccagcagccctccccggcgccagcgccgcccacgcagggctgggagtcgttcgacctgctgtcgtcggtgccgtccacgtcctcggccaccgtgaccaccaccatggcggccgcgaccaccaccacctcgccggccggcgtctccccgatcccgcggttcgactgggagctcttctgaagccctccctcctcgcggcgcgtcggcgtgccggttggtcgatcagacggtacctacctcccttgtccatggatcttccctgctctcatcagtagtgccattgtttcttctgtggattctttccatttcttttcgcctcattctctcttcttttcttccatttcctttcgaatttgtatatctactatatgtctacaaaaagaacagagagaccgacgcggtgcggtgagtgtgttcactgggtcaaaagtccgtcagttgacaactcctcctcgtgaggatccatccatgcatgttgttcagtcacagcaaataagtggtggtcttattatgatggcgatgaagaagttttcatgacagtacacacacatataaatagcatgtatattttggtaacatttatttatacgcttgtgtatggttacaataaaaactaaattaaaaaaaaaaaaaaaaaactcgaaaagggg

SEQ ID NO: 142241 - DNA, 555 bp, Zea mays
  Clone ID: MRT4577_61204C.1
cccatgcgtccacccattacctcatctgggagctgggccttgctgttccccctgccgatacggggaccgagaaggagaacccaaggcgccgcgcatggcgtcgtccatggactactcggctgagaacgcggatgaggcgccggaggaggagccccaggcccagacacagcctaacacagaggtgaccgaggaggctcccgatgaggctgaagatgaaccgcaaaccctagagctagcgcacgagctcttcaacaggagttacaaggacatctaggatgacgacttagactacgtcatacactgtctcaagagaacgctttaaaacagggcttagcattatggagagctcgcgccggaatagtccaaatcatacttcaaatatggatgcacactgctatacaaaactcatgaggagagtgatgttttgagaaatgttcccaatagctagtcaaatgaaaactcagtgactagtacagatactaaagattacagtggaacttcaaacgactctggtactgatgcggaagatgctgacgtatcagataaagaaggtgc

SEQ ID NO: 142242 - DNA, 1748 bp, Zea mays
  unsure (1)..(1748): unsure at all n locations
  Clone ID: MRT4577_61205C.1
acgctctcctcctccttggacctcccatcttccttcctcttcgttcgtttctccaaccgaagctgaccggcattcgctcctggttttccggccaagaaccgatttttttccggttccggcgtagcagcaggcagctagcttgccaccagctgattcattgcctctactagtgtttttcctgagctcggtggggtgatcggtcgatcggccgccgctcgagacacgtacgtacgtacgtacccgatcgagggtcgctccaagatgatgatgagcgggaaccggaagcagagggtggcattgtcgccggtgaaggaggccgctcgaggccggccgggacgcgctgttatgttcccagttctctctctctcttgcccatcccccacctcggctggctcagctcagctcctaaacccgcacctacctctctgcctgctgccccggcccctgatcctgatttccccaatcgagagtccgagacccgagaggaggcacaggcacctgcgctagctgcagctgcaaatcgtcttccccagatccggcgccgcctagttcgctcctgctcgcgacagcgcccagagccgtccgcgtgcgcccgcagagatcgtttcggggacagccgagcagagcagagcagagcagagctgactctgccgcttgttgcccgttcttggctgctgttgctggcgagagcgcgcaggaggagcggctgatttttgattctctctgtccctccctccctcgcttcgctcgcgcggggtgcgtgcacgtaccatgagaagatgatgcgcgccaggcccaaaggtacattcgccgacgcgatgagggagagctcccctcctcctcctccccctccggctccggcttcggcagcggtgaaagaggacgagtgggaggtgcggcccggcgggatgctggtgcagaagcggagccccgacgccgacgcccccgccggggcgcccgtccccaccatccgcgtcaaggtcaagttcaacggcgtgtaccacgagatctacatcaactcccaggcctccttcggtgagctgaagaagatgctgtcggcgcggaccgggctgcaccccgaggaccagaagctggtgtacaaggacaaggagcgggactccaaggcgttcctggacatggccggcgtcaaggaccgctccaagatggtgctgctcgaggaccccgccgcgcaggccaagcgcctcctcgagcagcgccgcaccgacaaggcggagcgcgccgccaagtccatctcccgcatcggcctcgacgtcgacaagctcgccaccaaggtgtcggcgctggaggccatcgtcagcaagggcggcaaggtggtggacgctgacgtggtcgccctcaccgaggcgctcatgaacgagctggtcaagctggactccatcgccgccgacggcgaagtcaaggtgcagcgacgaatgcaggagaagcgggtgcagaagtacgtggagacgctggacgctatccgcgccaagaacgcggcggcgcccaaggccaaggccaaggccaacggcgacatgaatgggcacgccaaggcccgcgcgccgcaactcccgccgcgcccgccgcccgtgtcgcagaggcggaacttccagcagccctccccggcgccagcgccgcccacgcagggctgggagtcgttcgacctgctgtcgtcggtgccgtccacgtcctcggccaccgtgaccaccaccatggcggccgcaaactagtgagctgnnnnnccgggaatt

SEQ ID NO: 142243 - DNA, 1023 bp, Zea mays
  Clone ID: MRT4577_61206C.1
acgactctcggcaacggatatctcggctctcgcatcgatgaagaacgtagcgaaatgcgatacctggtgtgaattgcagaatcccgcgaaccatcgagtctttgaacgcaagttgcgcccgaggccactcggccgagggcacgcctgcctgggcgtcacgcatctctagcctgcgccgccgcctccaccgcaccccccaaaaccctagcgctcgcttcgccccgccccaccaccatggccggcgcgcaggagtccctcgtgtacgccggtgtgatgcgcggccacaacgacgtggtcacggccatcgcgacgcccatcgacaactcgcccttcatcgtctcctcctcccgcgacaagtcgctgctcgtctgggacctcaccaaccccatccaggccacccaggactccagctccgagtacggcgtccccttccgccgcctcaccggacacggccactttgtccaggacgtcgtcctcagctccgacggccagttcgcgctctccggatcctgggacggcgagctccgcctctgggacctctccaccggggtcaccacccgccgcttcgtcggccacgagaaggacgtcctctccgtcgccttctccattgacaaccgacagatcgtctccgcttcccgcgaccgcaccatcaagctgtggaacaccctcggtgagtgcaagtacaccatcggcggtgaccttggaggtggcgagggccacaccggctgggtgtcctgcgtccgtttctcgcccaacaacttcgccccgaccatcgtctcgggctcatgggaccgctccgtcaaggtctggaaccttaccaactgcaagctccgctgcactcttgatggtcatggtggctatgttagcgccgttgcagtcagcccagacggttcgctttgcgcgtctggtggcaaggatggcgtcaccttgctgtgggatttgaccgagggcaagagactctactcgctggatgcggggatcattatcaactcactatgcttctcgcccaacgctactggctct

SEQ ID NO: 142244 - DNA, 249 bp, Zea mays
  Clone ID: MRT4577_61207C.1
tctcccgcgcgtccgtgatcatatagaactacaaactggatacatctccgtggtttatccaaccgaccatggcctgcgctggtgctcacggcttgaaggtgtcgtacgagcttagcctgacagtcacagggcctcatctgatggaagatgtctcggcctaagagggctgcattgggaccgttcgccgtgaagaccctggagcactcccaggttctgccccccatctcggacaagcacatatgccaggtg

SEQ ID NO: 142245 - DNA, 267 bp, Zea mays
  Clone ID: MRT4577_61208C.1
aggggccggccttttattcggggctggcttacaacaggagttttcttaatgttaatggacccccggccggggaaaggagagagacactttcaagaactaggtggtactgaccttccacgcactttccaacggactctacgcaagattgcatgctaaggaaagcgggacaatgggtctctcgcccctcaatgtttacgccttgctctcctctttgccgggaggaaactgggggaacttgggaaaaaaggggttcttttttatgaaggg

SEQ ID NO: 142246 - DNA, 431 bp, Zea mays
  Clone ID: MRT4577_61209C.1
ctcacgcgtccggtcagatccttgtgcacaggttctcataccctactgttgatagcgtggtcgagtaccttgctgaagaatatgccttggatcacacaaacgggacgtggctctatcctcactctgcagagcatttttgtgaacgcctctatgagagcgagctcctcatgcgccaggctgtgaacgagcttggggggctggtgatcctagagaatatccatagagtatctagtcacgcttgctatatgaccggggttgacaatataaagccaccgcctgcagatacagctgtctatacccataccacgactgtggctctatctcattatgaccatactttatggcgataacaatatcgcagggaaaagcttatgtcattcttgacctggtacgggtaagggactttgtcctaactgagtacccccagtagg

SEQ ID NO: 142247 - DNA, 784 bp, Zea mays
  Clone ID: MRT4577_6120C.1
gatccagcgaataagaatgatggtgcttatccaccaacagaccctgatatgaagaaagctaataaggctagaggagctaggaagttttctgagcaaccaagacctgggaatttaactcaagtggatcttgcacgtccatctcattttgatgaagcaagtagccatgtgccagaactcaagaaaagccgatccagcaagttaactagtcaaaaagatttggttgcagaaagaaaacgacaacgcgaggatattgacactctgctttcgtcatctcttatatcatctacgaaaccttcctcaagtcgtaatactaagaaacagaaatgagaagactccagcaaagcttttgtgaagcaattttggtagcaatggtgcttggatcacgagtttccatcttccgaagcaagtagaggaaagctaactgcctgtaatctgggagctgtatgtgcagcaactgacaaacatccagtggacccaaggagccctccctccatacggttgcaaaagtgctggaattttttggacggctgttaatggtttattacgtcattttatttcccattttcatccgtttggatgcgagcaaaatgagaccatacagacaaatagagcaatcatactgcttgttgaggcgcaagccaattttgcagtgtacataactgtaagtagcacccttgtagcaagaaggcagattagcatttgaacatgcctggtggtgtccttaaaatgaaatgtagcatgtgtggtgtgcagccaaattacagccgaagctctttggccctcc

SEQ ID NO: 142248 - DNA, 219 bp, Zea mays
  Clone ID: MRT4577_61210C.1
cggctgcctccgcctatacgaactcgagcagggggggggctcctagctactatactcgccaggcgccatgggcaagattaagatcggaatcaacggcttcggaaggatcggcaggctcgtggccagggtcggcctccagagcgaggatgtcaagctcgtcgacgaaaacaacccctgggagggggggggggactacaatgaccatacatgtaacaagaa

SEQ ID NO: 142249 - DNA, 144 bp, Zea mays
  Clone ID: MRT4577_61211C.1
gccacgcgtgcggccacgcgtcagtctgcatgccaggggggacaccctttgggcacggggcatgcaggacctaattgcctttgcgcgggaccacggacgaactaaagggtacatctcgcctgcttcaagctggaatggtgcgga

SEQ ID NO: 142250 - DNA, 538 bp, Zea mays
  Clone ID: MRT4577_61212C.1
attgcttcagttatatcgtgatcaacatgccgcgttagaatatatactattataatgtgttatctaaaatatgaggacgcccattcagttggcacattgacgttgtgtgcatgcaccacaattgcaacattgacgatggagctcaataccaccacacgtgatgtcatggacgaagttgtcgtccaagcacatgatgattattctttcctcgctcatcgatcgatttttgtatattgtgtttttcttggtggttccctcattgcttggaagattaagaagcagttagcagtttccctgtttgagtacagaggttgagttgtgtgctattcctcttgctacggtagaggtgacttgggtatggtggttgcttgttgattttggtgtttctgtgtctatattgacacccctttgtctagcagtattggttctattagtacttcttgtgatccaataatcattattggttctattagtattggtcgtgatccggtaaagcatgagcttactaaacatattaaacatattggtgtttatgctt

SEQ ID NO: 142251 - DNA, 291 bp, Zea mays
  Clone ID: MRT4577_61213C.1
gttattccaaattgcggcagtgggaataatactaagtcaccctatccgcaaccctggtagatccacccttgttcagtgcagaggcctagattaatgctaaattttcatgtggcataaatcttacagtttgttttgctgagtcttctattcctgtcttcttggttgacatttaaatagttcactgtattcattattatttgcatatttggtgagaagttgtgttgcttcttttttaacacaaattacttctgcccagtcaccaatcatagtaactccataatgcatagctgc

SEQ ID NO: 142252 - DNA, 283 bp, Zea mays
  Clone ID: MRT4577_61214C.1
aaacttaaatttcgaccccatggatcttttcttaaattaaaaaatgggtttgttcaccacttgtacagggtacgtcgcttttgggttggttgcattttgggggggggccctaaccctaactagaccttgaaaagggttttgaagcccatgtactgatgccgctccaccctggggactttgtttgggatgcctaccccttctgcaaagagccagcaaagattcttggtttttaaacaaaagcgagcgtaagcgcccttacaaaaataatggaccccaggataaa

SEQ ID NO: 142253 - DNA, 196 bp, Zea mays
  unsure (1)..(196): unsure at all n locations
  Clone ID: MRT4577_61215C.1
gccctcctccgccctccgcctcctcagtgctccggcgcctagcgacctgctcctgcccccgccgccgctcgtgcacgcatcagccggnagcagnngagcagcgcttgcccgccccttttacccgtttgccccatgggagnaactcctgcccgcccgcccgnccgnccgaaacgggccgcggccctcacccgcgcag

SEQ ID NO: 142254 - DNA, 282 bp, Zea mays
  Clone ID: MRT4577_61216C.1
acccactcgtcctctcactcttaccataaatcactcctttcttttgcgcatactatctaaatactaatgtagccttctaataactcattccctcctaaattcacctcaaaatagcttcaacccacaccaatcctatctcgtaaacccaataattacatgcatcatcgtcccatctccctcaacctattatcaaacatcaaatacccattactacgccatcttcttccactagccattccacctaatctttatctccaaataccccatttttccaaccaaaac

SEQ ID NO: 142255 - DNA, 248 bp, Zea mays
  Clone ID: MRT4577_61217C.1
tgctggcggcggcagcgctcctgcagctgaggcgaagaaagaagagaaggtggaggagaaggaagaaagtgatgacgacacgggcttcagcctcttcgactaagtctgtgccactgccatgcgtattgtattatgacgctcttacgatgtacagcttacatgtacctgatgttcatcgtggactctctgcgcatggcaaaccatctgccctgagctgctagtcgaagaccgacgagaacaaggagccc

SEQ ID NO: 142256 - DNA, 1182 bp, Zea mays
  Clone ID: MRT4577_61218C.1
cccacgcgtccgatagattgtccaaaccccactcaccgcaacgagccgccgtatccatggccggcaaagacggctccgtcccttccccgcctcctcccctggccttaactttacggctgcaccgaccgaaaacccccatttcctcttctccaaaccccactcaccgcaacgagccgccggatccatggccggcaaagacgggtccccgcctcctcccccgctcccatcctaccctgagatgatcgtggaggcaatccgggcgctgggactcgagaacggctgcaacaagactgcgatctcggactacatcaagggcagctacggctccaacctccctgcccagcacaacgccgtcctcacgggtcacctcgcccgcatgaaggctaccggcgagctcgccttcctcaggaacaactatctcctccccaacgaggacgaagcctccccgctgagcaccggtgggcacaagggccccgccgccgccgaggaggagtctactggcgtgttggacgttggtgacgatgtgttgcttgcttcccctctcgtcatcgacgctgacgccgtcgacattgatgtgcctgctccagctcccgttgtcaccgctgatgtcgacgatattgacgtgcctgctccagctcccgttgtcaccgctgatgtcaaccctgttcataccaagcggggacgcggacggcccccgaagcccaaggaccccgttgctgagggctacggtggtaagcccgctacagctcccgtcgccgccgctgccgtgcctgtcaagcgcgggcgcggacgtccgccgaaacccaagaaccccgtcgccgaggactcagctcccactgcggcttccgttgtcaccactgatggcaatgccgtgcctggtgaagcgtgggcgcggacgccccccaaagctcaaggaccccatcaatgtggccactgaccaggccaccagcggcatgctgagcccgacgtggccgtgggcgcccgcccaagcagctcaggtcctggtggaagatcccagaggtgacctgctgaattgaatcctatggtggctgaggtttgggagtagcttggtgtatcaaattgagttctgaactatcttatccagttgggtgcatagcatcggaagactaatctcaataatcgagaaatttgctgttttgccactcgcaaaaaaaaaaaaaa

SEQ ID NO: 142257 - DNA, 805 bp, Zea mays
  Clone ID: MRT4577_61219C.1
gtgcggcgctcagccggccgggtcgggaaaagcgaaattattgcgagtttgctagccccaaccacaccaacaccacccgctccgcgtggccatcttcctcctcgtctccactctccactgcaagagctagacgaattaatgctgaggcgtctagctcttccctcgccggcactggccgcatgctaaggcgagagtggccttcttctcatgaccagtgcatggttggtccgggcgtacgttcccatgttgctccgtagcagaatctcgtcggcgtccatggagaagacgcgccgtcaccgggtgctggctgtgctgctgctgctggtggtggtgctggtctccgcgctccctgatctcggcagctgccacaaagatgatgccggacaaggaggaactacgaacccagaggaagatatggtctctgtctccgaagctagcaggacaacccaccacggtgaccggaccaggaaattcctgcacgagcagcagcagcagaacaggtactggtccggggatttcggcgacaaggtgtcgtcgttgccagactccaccgagtaccctccagccggtggaggcagttcttctcaaagcccagcgtcgacgttcaagccagaccagtggcagccatggctaccgtgggcacccaaggccacgccacagatgagcgttcctccagcgcaggccccggcaccttcccccgcgggggtggtctcaaaccctgggcacagcatcgcgctgcccccgcagccggcggtgccggtgccggccgacgccggcagtaggccggcggtgggtgccggcgttc

SEQ ID NO: 142258 - DNA, 395 bp, Zea mays
  Clone ID: MRT4577_6121C.1
gttggctatggtgcttttaaagaagacacttaatgatgacccatacaaggcatttcatagcagcacctacactgactgactatattgggtgagactatggaggaggacgctatgtccaaaatcacagcatgaaaaaaaatgattttatttgacggattaggaccccactcactaaggattgtaagacaggaattctttgctacatttgctcaaatgctttacctcgatataacctaagacactaccagaagtgtcgacttaggcaatgggaccgtgacctgctgtgatgcgtgctggggccatcgcctgtcttataatagacaccacggtatagcctgcgaagtgatcttatagaaccataggctacgtgagggtgcatgagatgaatgtaacca

SEQ ID NO: 142259 - DNA, 169 bp, Zea mays
  Clone ID: MRT4577_61220C.1
gacccacgcgtccgaaaagaaaaaaaaaaaaataaaaattaaattataaaaaaaaaaaaaacgacaaccgggtcaggccgactttgcattagtccaggcccatgcgaagtaataactatccaatcgaatcacctaaatccaactcactgtccgtccttttacaacacct

SEQ ID NO: 142260 - DNA, 809 bp, Zea mays
  unsure (1)..(809): unsure at all n locations
  Clone ID: MRT4577_61221C.1
aattcggcacgagngccccaaccacaccaacaccacccgctcctcgtggccatcttcctcctcgtctccactctccactgcaagagctagacgaattaatgctgaggcgtctagctcttccctcgccggcactggccgcatgctaaggcgagagtggccttcccatgaccagtgcatgattggtccgggcgtacgtccccatgttgctccgtagcagaatctcgtcggcgtcggcgtccatggagacgacgcgccgccaccgggtgctggctgtgctgctgctggtggtggtggtggtggtctccgcgctccctgatctcggaagctgccacaaagatgatgccggacaagaggaagatatgggctctgcctccgaagctagcaggacaacccaccacggtgaccggaccaggaaattcctgcacgagcagcagcagcagcagaacaggtactggtccgaggatttcggcgacaaggtgtcgtcgttgccagactccagccagtaccctccagccggtggaggcagttcttctcaaagcccagcgtcgacgttgaagccagaccagtggcagccatggctaccgtgggcacccaaggccacgccacagatgagcgttcctccagcgcaggccccggcaccttcccccgcgggggtggtctcaaactctgcgcacagcatcgcgctgcccccgcagccggcggtggcggtgggtgccggcgttccggctggaggagcgggagcgaggccgcgctctggcggtgttggcaggcctgtctacgccatcgctgcggccggggcctccctcgcc

SEQ ID NO: 142261 - DNA, 247 bp, Zea mays
  Clone ID: MRT4577_61222C.1
cacagtacattacagtaagtacttcctagtatacttttttgggaacttgccaatgtctgggtggacacgtctatggggcaagatgtgtacctactaataattgccgacgaataaaaggttgagctcttgatctaaataatctttggagaacggcacgaatccctaatttgtgtctggactccaattggattaaacaatttctgcgtggctcgtataaaaatttacttaaggagttttgactaaaatt

SEQ ID NO: 142262 - DNA, 896 bp, Zea mays
  Clone ID: MRT4577_61223C.1
aacggatgcctgcttgctttgtttacgtgtgcggcggatcgatgcgccactagctagtagagtagtagtagctaataaaaatggatcggaactaccagctgcttttttctggtaggcggcagctagtggggactggtcagatattacgcattttcgttattgacggagcaactagctaggttagttacagtgtatatatatgttcttctcttgacttgtgaattgcttgatgacagcagctaataggatgccgaaaggagacacttgctgacagggttgatcaacgtttcgctgcaaattaaacaaacggatgcgtgcgtgcattcatgccaaattaaacgtaatggtgatgtgacatgagcttatgcatggtaatgactctgctgctgtctgcaacacggacgacggcgacgacgaagacgacgacgacgactcccatgtcacctgtgtctgatggccaggtgttgtgtacacaaccacaaacagtacacctcctaccaacccacccctcagcatctagtagtagtagtacgtacgtacgcatgcacggttacgtgcatcatcattcatcatatcgcctggagcctcgcgagctcctgtgcgaacaccttcctgaactccggcatgctctcgggctccagcgacagcgcgagcgcgacggcgccctccttcccgggcgcctgcatcacgtacacgaagccgctgtagtacatgagcgcgggccccatgaacacgggcgcgccccagccgaagtcggagtcgtgcagcgacatgcccatccagctgatggcgcgcaggtgcgcgcgcgagatgccgctgcggggcaggttcatggcgtccacgccctccaggtagtccaccagcgaccgcgcgtagtcgtccccgggggctggtcg

SEQ ID NO: 142263 - DNA, 257 bp, Zea mays
  Clone ID: MRT4577_61224C.1
tttgacactaatgagacactttgaggggggggggtgagaatcggagccctgcgccgttgccgatgagagagaactctatcgccgatgggacggcccacatggttagccagactcggagtggagcccatcgcaacacggaaccccatggaggtagacccttcgtgcaacatgagcgagggggggggtgagatcaatattattgcggcgggtcaggacgcccaggccggccacataatgtagaacaacaatagggtgaa

SEQ ID NO: 142264 - DNA, 256 bp, Zea mays
  Clone ID: MRT4577_61225C.1
acgacgatgcacgcgtacgtacagcagcatccatctcatagacagacccacgcgtccgttccttcaacaaccctacagctccccatgagggaatgcttgctcgaaaggggctgccccacggggctttcaaaatctgccggtagaacctgcaagcgaaggcgagacccatttctgaccgaatcctgaaccctaacgccgaactgctcaacaagacggcagagctgtacatgaacatcaacgccgacaagggcctcca

SEQ ID NO: 142265 - DNA, 4467 bp, Zea mays
  Clone ID: MRT4577_61226C.1
atggactctgataaacacattgcaaatacgaagaaacgaaaagtcagttcctctgtattatattcaccgccaataacgaatgctacggaagcaaggcaaaatcgaaggcgtttattggaccaacaacgtattgctaaaagaggtctaccatgtcaaacaacagaaaattcacagtgtggtcattttactaaagaatacatacaagcactcaaagcttcttatccaaatcgatcatattatggaacccctgactatgaatgtcgtcactgtaaagctattttctggtatggggagagagttagagccaaacaacgtgatggaacaattgtttacaacaactgttgcaaaggtggcaaaattgatattcctccgtacaaaccaagacccgaacctctatccactcttgcaaggtttgatggcgatcacacatcaaagaagttcatcaagaatatcagacagtataactgcctatttgccttcacatcaatgggtgctcaaatagataaatcagtaaacgatggacgtggaccaccgctattcaaaatatgtggtcaagtttatcatcgtgttggatctctattacctccggatggttctcctccgaagtttatacagttatatatctatgacactgcaaatgaagtgcaaaacagaatagaatgtattaaagacaatgaagggccacatcaagatctagatccggccatagtgaaagatctaataaaaatgctcgatcttcataatccattggctaaaaaattcagaatggcaagagaacgtctggctaacaataaaaatgaagaattcatcatcagactaatcggagccagagaaggtgattctgtgcagtacaacttaccatcagttgaagaactcgccatgttagttgttggtgatttctctcttgacacattcaagcgtgacataattattgaaatgcgtagcaaagaacttaaacgaatatctgctttacacccagctttcatggctttacaatatccacttctttttccttttggagaacgcggatttcagattggaattatctacaacggtgtcaatccgtcagataaaggtaaacgtactcacatgactatgcaagagtattattgccatcagtttcattaccgaaaaaatcagcccaacccatatctatgttatggattactatcaagtcaagcaaaggttgatgcccgagcttgtattgatgagagcagattagaatacatactacaaaaccaaaaaaatttacgcatggagactattcagggcataacggatgctattagtcatggatacacaagtggcaatgagatgggtaaaacaattattttacctgcatcacatatcggtggcagacgatatatgatacaaaattatcatgatagtatagccatctgtcgtattcacggaccaccagatttctttatcactttcacctgcaatgcaaactggcctgaaattcaaaaaagcttttttgaacctggtcaaaatcctccagatagatctgatgtggtcgtccgagttttccatatgaagcttcaagatatgctccatgatattaaatctagatctttttttggtccatgcaatgcagtgctttacactacagaatttcaaaaacgaggtcttcctcattcccatattatattttgggtctcaactgatacaacacatccgacatcagagctcattgactcttttatatgtgctgagattccagatccgaatactgatccacttgcatactgcttggttgctgaacatatgatgcacggtccatgtggcacactcaatccaaattgtccctgcatgaaaaatggcagatgctcaaaaaactatccaaaagaatttcatgaaaccacctcatttgatagtcaaggttttgttatctacagacgtagaaacagtaacagatatgttataaaatcaggaaacaaactcgataacagatgggttgtaccatacaatccaacacttctgaaaatttatcaggcacatataaacattgagtggtgcaacaaaaccatttttgttaaatacctcttcaagtacgtgacgaaaggtccagactgtagtaaagcttatctacaaaaaataagaaatggtgaagaagctccatatgacaaagatgcagaagcaaggaatgaggtcaaagaatatttagacagtcgatatttatgtgacaaagactcatgttggcgtgttttaggctatgaaatccatagacactatccttctgttgaaagaatgccagttcacctgccaaatgaaaattcaatcacttataatgcaacatcaaatatgtctcaaatactatctgaaccattcttgcgtaaaactatgctaactgaatggtttactaccaataaagaaagggaagaagcaagagagctaacttacatagaattcccatccaaatggcgctgggaagaacaaacaagaagttggaagccgagaggaacaaaggaaggaaaaattggtcgtatctactatgttcatccatcaacaggagaaagatattatcttagaatgttactactgactgtcaaaggtgcacaaagctacgaagatctacgaaaatataatggtgtgttatatcgtaccttcaaagaagcatgcaaagctcgtggtcttctaaatgatgatcaagagtggtataatgcgttcgatgaagcagctagatgggcaacttcgaaccaacttcgacaactttttgtaactatgttacttttttgcgaagttggagatgaacattcattctttgaaaaagtttggaaattactagcagatgatattcaatacaatatgcgcaaaacactaaatcatcctgcatatcaaatggaagaacatcaaataaaagatcacctaatagaccagctcacagttctattcaacaaatgtggtggaaacattaaaaaccacgacctaccttcaaaaagtgtatcttccgaaactttgcatggaaatcgtttcatcgaagaagaattgttttataatatcaatgacatgttgactcaatcccatgaattgcaatgcaaattgaatacacaacaaatgaatgcctttcattctattgtacaaactgtactctctgatatgccagggttcttttttgtttctggttatggaggaactggaaaaacatttctatggaaagccattattacatacctacgagcacagaaaaaaatagtacttgcagtcgcatcttcaggagttgcatcattgctgcttcccggaggtcgtacagctcattcccgcttcaaaattccttgtgatttagatgaaactacaacatgtgatattaagagagctttcatgacacatagagctgcatttgaagctctcgatcggacccttcgagatttaatgtctacaaatcatcagcaagctatgacaattccctttggtgggaaagttgttgtgttaggaggggatcctcgtcaaatactaccagtaatagaaggtggtagtcgcacacagattatcaatgctgcaattactaactcaccattgtggcattcagtcactatactccaactaacagagaacatgcgactttcatcactacatttaccaaatcaggctaaaaatgaaattgatcttttcagccgatggacattagacattggtgaaggaaaaattgaagcatcaaccaaaaatggggaattagaaccttcgtggatcataataccttctgattttttattgatgccacagggcaacaatttatctatgctgatagaaagtacataccccaacatatcagaacattatgatgatcctgactacctaaaagcaagggcaattctaacacctacaaatgatatggtcgacttagtcaacgactacatagtctctatgattgctggtgacactaaagaatacaggagttgtgatacaattatcaaaggtccaaatacgaatgatgactacgatttattatatccggtggagttcctaaactcactacaaggcaataactttccacaacatctacttgtgttgaagaagggtgttccaataatgctccttagaaatctaaatcaatctgaagggctatgcaacggcacaagattaattattacttcattgggagatctggtattagaggcaaaaataataacgggaattcaaactggaaaaactgttcttatcccaaggatatgtttatcattgaagaattacaagctaccttttgttttggaaagaagacaatttcctattaaagtatgttatgctatgacaataaataaaagccaaggtcagacactttcagatgtgggaatatatcttaagagacccgttttcactcatggtcaattatatgttgctatatcacgtgtcacatcaaagaaaggattaaaaatactgattgaagatgacaatggcaagtcaaacaatgaaacaaaaaatatagtgtacaaagaaatattttcacgctttagtagcataaatatgtaa

SEQ ID NO: 142266 - DNA, 348 bp, Zea mays
  Clone ID: MRT4577_61227C.1
acacatcgacgctaaaaaccctagagcgaggaggcgtgccaggccagctgtttgcgatgacggcaccggtggacaaggggaagaatgccaagacttatgcctacggcggcgaggagaacgagctaatcgacggggcccttgtcttttccatctagaagcttcagtagattcatgacgagcttgagaaggtttatgtggaagcaagtgacatggttattgaagtggagcagatatacattgagattcgcagaccttgttatctcacgaggggtgacatttttaagaccatccttgactttttgctcacagcgtttttgagccatcctctactaaatgagctttttactg

SEQ ID NO: 142267 - DNA, 832 bp, Zea mays
  Clone ID: MRT4577_61228C.1
cggccgctcaagccggcgggcgggaagcacagcaaggcaaaggtggctcgcccacagtctcacacatacggagcgacagatacagaccgggcgtgcgagggagggaggaagggagctcggaggaacacagggatcccatccgctccggcggtgccaaggctctattacaaccttcaccttagtcatcttcgacaacaatctgaccacaatggcatctgcaccgcactgttaatcactgtcgataacaaaaaccttgcaggaagctgatcctctgggccgctgcagcgcgtacactgactgagcaacgagagacaagcactgaggtcagcaaccatgggggaggtcgcgatggagctgtacacccaggatgacaccatcgacatcaagggcaacccgggcctcaagaagtgacaccggcaagtggcgcgcatgcccctacatcctctggaacgagagctgctagcggctgcactagttacggcatgagcaccaacctcgccaacttcatgaaggactcggatggggatggacaacgccgccgccgtcaacaacgaacaccaactggggcgggacctgctacatcacgccgctcatcggcgccttcctcgccgacacctacctcggccgcttctggaccatcgcctccgtcatgatcatctacatcttcggcctcggcctgctcaccatggccacctccgtgcacgggctcatgcccgcctgcgcctccaagggcgtctgcgaccccacgccggggcagtcggcggcggtcttcatcgcgctctacctcatcgcgctcgggaccggcgggatcaagccatgcgtgtcgtcgttc

SEQ ID NO: 142268 - DNA, 335 bp, Zea mays
  Clone ID: MRT4577_61229C.1
tcctggtgcgatgagttagagagctaacagggtatcataccaaggcacggcgacgactcgggtgaaacctactagcaactacagagtcggggcagtactcgcaataacctgactgtttacactgcagcatctgacggcctgctacagacgatcctgattctgtgtgcaaacctactaccagcggtagatcattgtcattgctgggacactgctggacatcgagaatctcatatgatttatagcgcatgtatggatcagacttcgatactggatctggtgagggagatgcctactgcgcgctagaatccgccgccgcttttcttattgggggtcgg

SEQ ID NO: 142269 - DNA, 600 bp, Zea mays
  Clone ID: MRT4577_6122C.1
ccggccccccttgcggttttttttttttttttttttttttttttttttttttttttttttttttttttttttttttgggaggacaaaaccaaaatttggggctcattattaaagctttattttctatacaaaggccttggacaaaaaaattcactctcgtttttactttgggaacggcaagttcaactccctttttttcaaacggaccaaaccagcaccagggtttaaaaggggggggggaaaggacccggagggtcataacaggttcaccccatcaaccaagtacataaccacccacaacaattatggttttttagctaaccacacaaagccggggccaccatttaaagcgccggcgggatctttccacttttttatttttggccgccgaaacaccaaccccgggcggttgggccaggggttttgattccctcccccccctttggttcttttgagctgcgggcttgtttggccatgccggggggactttttcaggtccccgggcctcccttccaaaaggcggaccaccttggtttggatacaaacccgccccataccataaggcccacaactttattaaaaaaccagcggggatctttt

SEQ ID NO: 142270 - DNA, 376 bp, Zea mays
  Clone ID: MRT4577_61230C.1
attatattccggggcttttttgaattttttggggggttcattttactaaagaaaactaacaagccaccacttcctacgcaagccatctttccccacgtgagggaacaaatttaatgatatgccaccattccggtcactgaattcagcacgaatttcaccatacatgaaaaaaacgcccacctccccgaaataaataatgtttgttcagcccaaccattgaatgcaaacgcatttaaaaaacggtgaaatttggcgctggacaaatacaatctcagtttgatattccaccacctcccctatgaataattgcccggcacctttgtcggacaaaaagaataactgacaatagaccttttttacaaaaaacaagaggggg

SEQ ID NO: 142271 - DNA, 257 bp, Zea mays
  Clone ID: MRT4577_61231C.1
tcaggtctgcaggtcttctgcacccccctcaatgaggagtccctcccagaaaggaaactgatctctgggacgtcagctgctgagaggagcaagcggtagtaccaccccttagttgagggagtcagcacagtcctttctgagcttctaacccaggaccatgaactcaggtgcctagagaagccaggcagctaaattacaaggaatgctgggggctgtgggaacaggaatgcagataccctttgaaggagcattcctgc

SEQ ID NO: 142272 - DNA, 342 bp, Zea mays
  Clone ID: MRT4577_61232C.1
agtcgaaactatgtacccaaagatggctggggaaacatggaagagtgtgcggcagtgcgtgggcgctcaatcacagcgaatgcttggggctgcaggaagttaacgtgacactccatcttcagacacacgtcgtgcagaatcacatattcggagcatgcttgaggatttcacacagactggcgaacactgcatgtcgcttcgacatcactgatggaatgaccatcgaaggttactgaagaatacctcgcatcacgaattacaaattgccgacatgatgtggactgtcgcaagtatggagactcacaatcactccttaggtgtgcattcatagtgttcaatgat

SEQ ID NO: 142273 - DNA, 600 bp, Zea mays
  Clone ID: MRT4577_61233C.1
attccttctacctctagctcgggcgtcggttgcaaccactcgccgatggacccgcggatagctcgggattgatccggccgattcgccatgaccagactgagctgcgaccctggggttataaatcacgcctgggccgctggttacccctttttacccgcccagcttgcgactcaggagagagagaagtgagagacgcggcggcgattggggcattcgcttctgtcgccgattaacccgaagtttggactagaggggagaaggagttaggtgtgtggagggtgaacatcaggatccatcgtcttgaagggactcaggtcaccggcaaatcctcgccagtcgtgcataccgcggcggagatgcttcgctccgtggtctgccctgtcatcaacttaatcacgagtgaagagcaggtggtcgaagaggagccacacaacgaggagttcgacttgatctaggtggcgtctccgagtcagctttgtggcgccagggaaataatatttagtttgttttatatttatcatttattttgtaagacttctgctatgtaataagtacatttataatatttatgacatttatttctatgcactatgttattgg

SEQ ID NO: 142274 - DNA, 313 bp, Zea mays
  Clone ID: MRT4577_61234C.1
cacaggaaaggtgtgaatgatatttcgaagtattaaatataatctaatataaactaattatacagataaggcctaaacaataagacgaatctactaaactttagccccaacaaaaaggtaatggtaatgccagaaggcaatattcaaggggaaataaaaaaccctgggataaccctgaaaagcaaaccgcctaacagataacctgggataaccctcaatcatgggagggggaccgcacaacaaatgagtggtagggggcctctagccccttgaggcttggggctgcctcctgcccaaacctctccagaatttt

SEQ ID NO: 142275 - DNA, 578 bp, Zea mays
  unsure (1)..(578): unsure at all n locations
  Clone ID: MRT4577_61235C.1
gtaccctcgaagggccggccgggnaaaaaaattaccaaaaaaaaaaaaaaaaaaaaaaaaaaaaaaaaaaaaaaaaaaaaaaaaaaaaaaaaaaaaaaaaaaaaaaaacccacggaggttcgttcccaattccaaagcaaagcgggatcccaaaatgggaacagggaacccactcggttcagtcctttcgttcacccccatccatccagccagccagggggggaaaggattggggaaaccacggggaggacaacctgggggggtcgggccggcgcctgttagggatcctccaagcccgggccctgatcgggggggggatcgcgttgatcatctaccggggggcccgccccaggaaccggggtttttacttacaggacgggtcgctccagaagttaaacttctcaaattccacaacccggtcttcttccttcttttcaaaaaggttgaaggggacgttggcctcgcgaaacccgaacgagggcgggggggggaactacaaccggttggacgggaacgcgtcgaacaagaaccagcaggggacgggggccgcggcgttgccggccgtgaaccagggccac

SEQ ID NO: 142276 - DNA, 348 bp, Zea mays
  Clone ID: MRT4577_61236C.1
ctgccactcatagcgaacgcagcatattgatagcgggacgcaggctcctcgtgtttgtacgacatcggctggtgctatagatataaccactgacactctgcggatgttgacatgaattgggaagggttaatatgctgctgcatgtagtacacgatcaactgagggttgtatgcttcagcgcatcaagatcgctgctggtgctatagaggccaccgactctattgatgccatggtgcatactccatatgttcaactggacttctccatatctcaaaccttatagctgtaatatctatgaggggcaactgaaacagtcaatcgctagcatccggagacacttatagccgc

SEQ ID NO: 142277 - DNA, 358 bp, Zea mays
  Clone ID: MRT4577_61237C.1
agagatgctacagaaatcagcgtcctgagcttctggaaagcgcaagagcagagtgcggacaaagagtccgaactttcagctgtgaaccggttaaaacccaaatgctcagcccaggacctctccatctcagactggctggccagggagcgcatccgctccagcgcctccgacctcagccgaagcgaaggctgcgagccccaggccgagagccccagcgtgctgggaacacccaccagcacccacacaccggcgtcctctcagcagcctgaagctagggctgctgccagcacctcggcttcaaccagccagccccctctttccacaccaccacagtcacctgaccaaataaacggagaca

SEQ ID NO: 142278 - DNA, 571 bp, Zea mays
  Clone ID: MRT4577_61238C.1
ttgttttttttttttttttttttttttttttttttttttttttttttttttttttttttttttttttttttttttttttttttttttttttttttttttttttttttttttttggaacaaaaaccggccaaacataaaaaaccgcccccccccggggggggggccaaacagttcccacaacgggggggggcccccaaatggggctttttttgaaaaaacccccctcggggagcttttttgggccccccccaaaataaaaaaccctagccctaggacagggggccttccttggggggggggaaaacccaaccggactttgggggggaaacccatgtaaaaaaaaaacctttctcctggtgcccggaataaaggaaggacccatccgattgggaaaccaaaccaaacttttttttgccggcccagggggggaaagccccaacacgggacgagtttggcaactccacaccgggagttttggttgggaaaaggatgtaggccttttttggagaaaaaaaatcgggcttttaaccttaaggcccaaaaaggttaaccttgtttacagccatggggg

SEQ ID NO: 142279 - DNA, 405 bp, Zea mays
  unsure (1)..(405): unsure at all n locations
  Clone ID: MRT4577_61239C.1
gacacaatcaactctatgtaatctgcagggaacatgaaccggatggacaacatgaaggcggggctagtgggcctagtttttctggctttagctgagagcgacagctacacgcttatgatcggctgatggccatgccatgcaccagcagcggtgcatgtacctcaggcagggcatgtggcacctccggtacaactggaacttccggtggatcttccaccgcatgctgaactagcagccgcagagcagctagcaccggcggttcatgtgccggcanatagtgatataactgacggagatgcgccgactgtactaaaccactccatgctcatactctattgccggcagagtcatgcactggagaaaatatgtattgaagcataggccatgtgtaggtaactatgtgag

SEQ ID NO: 142280 - DNA, 533 bp, Zea mays
  Clone ID: MRT4577_6123C.1
ccggatctcccataatattttcagcattcagaaaccaccaagcgaagcgcactagcaacgacctaacaacaatggctaccaagatattagccctccttgcgcttcttgcccttttagtgagcgcaacaaatgcgttcattattccacagtgctcacttgctcctagtgccattattccacagttcctcccaccagttacttcaatgggcttcgaacatccaggcgtgcaagcctataggctacaactagtgcttgcggggagcgccttacaacaaccaattgcccaattgcaacaacaattcttggcacatttaaccctaccaaccattggaacgcaacaaccaccacatttttttgccttaattggcccccttgcagggggggacccttgcgccttatttgaaccagaagttgttggcttccaccccatttgttttggcgaccgtacttccatcccagcaccaacaacagttgaaccagtttatgccaccgctcagtcaactagccttggggaccccttgccgtttacctac

SEQ ID NO: 142281 - DNA, 191 bp, Zea mays
  Clone ID: MRT4577_61240C.1
gaagaaacatcaaatgaaatacaagggaggtactttggaaattatgggataatccgtgacatagttcacagccacattcttcaaacaatagctctatttgctatggaaccacctgtaagtcttgatggagaggatatccgagatgaaaaggtgaaggttctcagatcaattcggaaagtgaaccttgatga

SEQ ID NO: 142282 - DNA, 1331 bp, Zea mays
  unsure (1)..(1331): unsure at all n locations
  Clone ID: MRT4577_61241C.1
ggatcgaatgtcacatctttactatataacaggagttctgtacgaaaataattaaataattacatcatatgaggaaacgatccagcaacccaaagttgactgggagacgacggcctagacctctcacgaacacatcgcagcatcctccatgcgcctcatcctgcagtacctgttcttgatctgtgggggggtgtgagacatcaagagtgagctcacatacgttcatcgctcaacaagttgtggggaataatgtgcatgaactcgccaaaggtgggagctcacgtgaagtgtaaggcttaccaaagaggatggttgaagctgagcattgcttttaatgttggtcaaaattttattagcaattactaagtataagtaaataccaacccaattaagtagtagaacaaaagtaacaacatcacctgcgatgcaatgcatatgacaaattgaatttagttccataaattaatcatgtgagggtccaagccgctcatgaccgtgagcacggctagtataccagttttacactctgcagaggttgcgcatatttacccacaagtcatgttacccatctgccaagggatggccaatcccatacacctctaccgaggaggcgaggcagggtaacactacgaggcctttacaaagttccactagcttcagaaaacccgctacagtttataggaagctccaatgcagggttcttgcctgaccgccatcgcagcaaaatcaaccaaggacctccctacactgaccactcccctactgcccttgcccctttcgggtaaggaagacctccactagctttcctagttaatcagccaagggcgtcccattatacccttgtggtggcacttgtttctcaagtggtcgctccatgttcgcattaacaataatgatcttgacatgaacagtaaataaaatancaacataattggtacatggatataatgaaatattaacccaaaacaatataaagtaatagcaaaactactcaaatgattcaggggtaaacaaggtaaaatggataaacagactagggtgacatattgggtcccgtcaaaattaaacctatgcatgaataatgacattaaagaacattattgggtgaaaagtggtcaagggcacaacttgcctggcacttgagattccaggtaccaggatgattcttcagatcctcgcgacctcactgctagtcgtagcaatacaaacaaacatggtatagataaaattaacatcacaccaaacataagtacaaactgaataataataatctacacgaagctacgagctcgtgggatcgagaactactaagatcggagtcatgactaagg

SEQ ID NO: 142283 - DNA, 1455 bp, Zea mays
  unsure (1)..(1455): unsure at all n locations
  Clone ID: MRT4577_61242C.1
ggccgctttttttttttttttttgaaacgaatgtcacatctttactatagaataggagttctgtacaaaataaataaataattacatcataaggagacaatgatccagcaacccaaagttgactgggagacgatggcctagacctctcacgaactcgttagaacatcctccatgcgcctcatcctgcggtacctgttcttgacctgtgggggtgtgagacagcaagagtgatctcacatacgttcattgttcaacaagttgtggggaataatgtgcatgaactcgccaaaggtgggagctcatgtgaagtgtaaggcttaccaaagaggatggttaaagctgagcattgcttttaaagttgatcaaaattttattagcaattactaagtataagtagataccaacccaattaagtagtagaacaaaagtgataacaacacccgcaatgcaatgcatatgacaaattgaatttagttccataaatntaatcatgtgagtgtccgggctgctcatgaccgtgagcacgtctgatataccagttttacaatctgcagaggttgcacatctttacctacaagtcatgttacccatcttccaagggatcgcgacttcccatacacctctaccgaggaggcgaggcagggtaacactacgaggcctttacaaagttccactagcttcagaaaacccgctacagtttataggaagctccaatgcagggttcttggctgaccgccatcgcagcaaaatcaaccaaggacctccctacactgaccactcccctactgcccttgcccctttcgggtaaggtagtcctccactagctttcctaattaatcagccaggggcgtcccattaaacccttgtggtagcactgttttcccgggtggtcgctccatgttccaattaacataatgatcttatcatgaacagtaaataacaacagataacaaaagtataatcatgaatattgtatcttcatacccaaaaccacataaagcactagcaagtactacccaaaaagttcagtggtaaacaaggtataaagatagacaaactagggtatcctattaggtcccatcaaaattaacctatgcagatcattatgattaattagaacatgagtgggtaaaagaagtgatcaagggcacaacttgcctgggacttgagattccaggtaccaggatgatcttcaggtgacacgtgtcctcactgcggcccatgagtagtagcagtccttgtccacgaaacaaaggagcaccgcggcggtgatgtactccggcgacgaattcctggtttcccggacgctctccagaccaaactccaatgcttgtcgatggcgtagacacgagggggcttcctcctttctctcacccgcatagcaatgttgatggctctcagatttcttctacaagaacatgcggtggcttgttggcggtgaccgttcccggccgg

SEQ ID NO: 142284 - DNA, 2170 bp, Zea mays
  unsure (1)..(2170): unsure at all n locations
  Clone ID: MRT4577_61243C.1
ctgcaggtcgacttttgattaggtttgtttaggttaggttgttatgactagatagacttgataagatttcattaattagatcatggttgttactttagaataagatatgtaaagtggttaggataggatgaatctttcaagataatatgaaccttttaagataaggtggatctattaagcttgatacatttttaataagggacaatctaagttgattagttatcttatatataatttttaatgcctaagtatatgtagatgcaattgtggacactactccacaactcatcacactcaatcaaagatccaaatcagacaagtgtcataagaacaaacattcaagcatacaaatatttacaaaaaaaatagttttgtttttattcctatgagtaggtctcctattcctaaaggtcactttaggcacatgatttcaatgtgtgaaatccacattggtctttagaaggaacaggtaagaataatcagagtaaagcggaaatagatgagaaaagatttaaggaaagtttagaaagaatcagagtggcaaaggtaagtagagaatggttgtccagttctatctaggttttgtcctacagtcaacattcctctgataccacttctgtcacacccggatttcaggggcaccaagacccgggcgcgaacataatcaccaggtgtgctgggaccaagtctcacacatatgatgattcatggcacaggatcgaatgtcacatctttactatataacaggagttctatacaaaataaataaataaatacattataaggagacaacggtccggcaaaccaaagttgactaggagacgacgacctagacctctcgcgaactcgtcacaacatcctccatgcgcctcatcctgtggtacctgttcttgacctgtagggggggtgtgagacagcaagagtgagctcacatacgttcatcgctcaacaagttgtggggaataatgtgtatgaactcgccaaaggtgggagctcacgtgaagtgtaaggcttaccaaagaagatggttagagctgagcattgcttttaaagttggtcaaaattttattagcagttactaagtataagtaaataccaacccaattaagaaaagtaataacatcacctgcgatgcaatgcatatgacaaattgaatttagttccataaattaatcatgtgagggtccgagctgctcatgaccgtgagcacggctagtataccagttttacactctgcagaggttgcgcatctttacccacaagtcgtgtatcccatgtcgcctgggtttgcaaggcccttagacactaccgaggtgaatggctagggatccactacgaggcctttacaaagttccactagcttccgaaaacccgctacagtttataggaagatccagtacagggttcctggctgacagccatcgcagcaaaatcaaccagggacctccccgcactgacctctcccctactgcccttgcccctttcgggtaaggtagtcttccactagctttcccaaccagtcagccaagggcgtcccattatacccatgtggtagcactgtttctcaagttaagctctatgttccaattaatattaatgatcttgacatgaacataaatagaataataaaataattggaacatcgatataatgaaataataatcccaaaaccatataaagcaatagcaaaaactacccatgtgattcgggggtaacaaggtaaaaaggataaacagactaggatgacctattgggtcccatcaaaattaaacctatgcattgaataatgataataaagaatattattgggtaacaaaagtggatcaagggcgcaacttgcctttaatgagctcctgctcagctacttctatctgctggtcaccaggatcctcagtcacgggtccttccgagaaaggagcgacgataatcagcgcgcacggcgataggcggattcccggtggactggtgctccggcgaggaattaactcgccaccaccggttcacccgatccaactcatccgtagcgtcaatcaccgaacccagtcaaaactccagacgtcacgcaggacatcggtttgaccccgaggtgtggattcncgcggtggcggctgtatccgtccgcgcggcgtgcggtggcgcagtagatggcgatggagcagcggcggaaaag

SEQ ID NO: 142285 - DNA, 705 bp, Zea mays
  unsure (1)..(705): unsure at all n locations
  Clone ID: MRT4577_61244C.1
cttcttggntcgagaccggccgggaaccaagccaccgtcatggcctccacgtgccgccccgtcctcctctcgctccttttcctcctcgtcctcctcaccgcgccggcgttcggctcgacgctcctccccgccgcagccggcggccccggcccggcgggcaccagcgtcccggtcccggtcccggtcccggctcagccgagcgcgtacgagatgctggaggggttcgggttcccgaggggcatcctgccggagggcgtgaccgggtacacgtaccgcgcgtcggacggcgcgttcgaggtgttcatggacgacggggactgcgagttcgaggtggacggcggctaccgcctcacgtaccgccgcagggtccacggcaacgtcgcgggcggcagcatccggaacctcggcggcgtctccgtcaggatgttcctcttcgactggagcatcgaccgcgtcgccgtggaggacgcggcccgcctcgtgttctacgtcggcccgctctcgcaggagttccccgccgataacttcgggcagtcgccgcggtgccgccgtcgccgccgcggtagcgggaacggcgtgggcgtggcggcggtgtagcaggggacggaggccggacgagagaatcagacgatggagatcgttgattcaattgtacgtgtacagattcaacttcgtgtttttgcaatgagacgcttcaattatatg

SEQ ID NO: 142286 - DNA, 2566 bp, Zea mays
  Clone ID: MRT4577_61245C.1
cgaggttgatattgtccttttccagtcttgctctttggtgtctccatccaggtttgggacaagaggctaagatagatctgtgtatgtaggtcaagttgttgggtatggccaagttggtttaaggcaccaatttagttttaagtgcatgaggggtatggccttatcttttgtatcatcattaagtaacttactctagattagatcataatagattagatagaatctagattaggttggatatgattagattagactagttaagatctcattattttggattaggtcccgattgtttcattaggatgagttaagtaaagtgattagggtaagacaaatctttcaagataagatgcatctattaagataagagagaatcttttaagttaagatgaatctattaaactggatatgtttttaatggggaatgtgttgtctattttataaatattttcccttatgtctaggtgtatatgcagatacaattgtggacattacttccacaacccatcacactcaatcaaagatccaaatcatacaagtatcataagaacaaacattcaacttcatagatatctataaaaatagttttgtttttattcctaagattaggtctcctattcctaaaggtcactttaggcactggatttcaaagtgtgaaatccacatttgtccttagaaagaaaagataagaataatcagagtaagcggaaatagatgagaaaagattaagaaaagtttagaaaagaatcagagcagcaaaggtaagtaaataatggttgtccagttctatctaggtttcgtcctacagtcaacattcctctgataccacttctgtaacacccggattttaggggtccaaaacccggggttaacataaacaccaggtatgctgggaccaagtctcacacctatgatgtatagtggcacaggatcgaatgtcacaacattatatatcacaggagttctatacaaaataaataattacattataaggagacaacggtccagcaacccaaagttgactgggagacgacgacctagaccactcacgaactcatcgcagcatcctccatgagcatcatcctgcggtacctgttcttgacctgtggggggtgtgagacagcaagagtgagctcacatacgttcatcgctcaacaagttgtggggaataatgtgcatgaactcgccaaaggtgggagctcatgtgaagtgtaaggcttaccaaagaggatggttagagctgagcattgcttttaaagttagtcaaaattttattagcaattactaagtataagtaaataccaacccaattaagtagtagaacaaaagtgacaacatcacctgcgatgcaatgcatatgacaaattgaatttaagtttcataatttaatcatcagagagtcatgagctgctcatgaccgtgagctcggctagtataccagttttacactctgcagaggtggtaccctttacccacaagtcatgttacccatctgccaagggatcgcgacttcccatacacctctaccgaggaggcgaggcagggtaacattacgaggcctttacaaagttccactagcttcagaaaacccgctacagtctataggaagctccaatgcagggttcttgactgaccgccatcgcagcaaaatcaagcaaggacctccctacactgaccactcccctactgcctttgcccctttcgggtaaggtagtcctccactagctttcctaattaatcagccaagggcgtccataaacccttgtggtggcacgtgtttctcaagctaagctctatgttccaattaacacttaatgatcttgtcatgaacataaataaaataacaacataattggaacatagatataatgaaatattaacccaaaaccatataaagcagtagcagaactacccaagtgattcaggggtaaacaaggtattcaggataaacaaactagggtgacctattgggtcccatcaaaattaaacctatgcatggtaaatgattataaagaacattattgggtaaaaagaggtgatcaagggcacaacttgcctgggacttgagattccagttaccaacttgctcttcaggtggctcgtaacctcgcacagtagcagcaggcgcgccgataggagttagccacgccgaaggggcggatatatccgtggtgagcagctccggtgagaagtcggccacaccccggccacctacgctgcccgccaaagcgatgagggcgcgcggcgtgtacttgcgaccacaccaacagcactccgacggtatacgttcgaacagcacggggcagacaccaagccgtcagcacatgaagcaaatccccacggcggcgctcacaactctctctcctgctgtcggcctttctctgctactcatctcttgttttgctcacgcatggtgacgattgaatcagcggctcccggttttatagaggcaagggcagagtccgccatggagtttggtcgaggaggccccgcacttcgcgcgaccgagaaccatggcgacatcggtggagcggttttctgttggcgagccccggcccggccggcc

SEQ ID NO: 142287 - DNA, 415 bp, Zea mays
  Clone ID: MRT4577_61246C.1
ggtgggggggaggggagattcttttagggttggaaggggaagagaaaaagaacaaaaaaaaaaaaagggaaacccgggaaggatggaaaaaaaaaaaccggcccacaaaagcagggagggccaggataaccaaacaaaaaaaacaaataaaccatttgcaagctcaataataaaaaacaaagggcatttcaagagcctgggagggcagggtttcccctccaaaaatacccgggaaaaaggcgaacccgcagaaagaatccaggggggacccggaacaacgggacaaggggggcagggaaaaccctcagtcccttccggggggggcggggaaaggcccctagggggcccccgggccccccgaaagggccccgagggaaccccccaaccacgagggggggcacggcgggaaaccccc

SEQ ID NO: 142288 - DNA, 568 bp, Zea mays
  Clone ID: MRT4577_61247C.1
cacgcccacggcagctcggaattcggctcgagcgactctgccatatttgaccttggcgtcccgattctgggcatttgctatggctggcaagagctcgcatggcagatcaactcggccaacgtcgcccgcggcgaggcccgcgagtacggccacgccgacgtgatcatccacaaggttgacaaccacgtcgaccgtctgtttgccggcctcggtgagaccatgcacgcctacatgtcccactttgacaagctggtgtcgctccccgagggctttgtcgtcgtcgccagcacctccaactccgagtttgctggtatcgccaacaagaccaagcccatctttggtgtccagttccacccggagctcgagcacacgccccgcggcagcgagttgctgcgcaacttcagtgtcgacatttgcggcgccaaccccagctgggtcatgggcgactttgtccagcaggagatttcgcgcatcccgcaccttgtgggtgaccgcgcgcaggtcaatggtgccgtgtcgggcggtgtccacagcacggtggcggccaagcttatgaaggaggcgatcg

SEQ ID NO: 142289 - DNA, 533 bp, Zea mays
  Clone ID: MRT4577_61248C.1
aatataattgaagcgtctcattgcaaaaacacgaagttgaatctgtacacgtacaattgaatcaacgatctccatcgtctgattctctcgtccggcctccgtcacgtacatgtatgtacatacccgatgccacgtacggtaccctacatcggcgccacgccgccgccgttcccgctacctcggcgacgacgccggcaccgcggcgactgcccgaagttatcggcggggaactcctgcgagagcgggccgacgtagaacacgaggcgggccgcgtcctccacggcgacgcggtcgatgctccagtcgaagaggaacatcctgacggagacgccgccgaggttccggatgctgccgcccgcgacgttgccgtggaccctgcggcggtacgtgaggcggtagccgccgtccacctcgaactcgcagtccccgccgtccatgaacacctcgaacgcgccgtccgacgcgcggtacgtgtacccggtcacgccctccggcaggatgcccctcgggaacccgaacccctccagcatctc

SEQ ID NO: 142290 - DNA, 1635 bp, Zea mays
  Clone ID: MRT4577_61249C.1
ggccctaggggccttttttttttttttttttgtcacaggatcgaagtcacatctttactatataacaggagttctatacaaaaataaataaataattacatcataaggaggaaacgatccagcaacccaaagttgactgggagacgacggcctagatctctcacgaacacatcgcagcatcctccatgcgcctcatcctgtggtacctgttcttgacctgtgggggggtgtgagacagcaagagtgagctcacatacgttcatcgctcaacaagttgtggggaataatgtgcatgaactcgccaaaggtgggagctcacgtgaagtgtaaggcttaccaaagaggatggttagagctgagcattgcttttaaagttggtcaaaattttattagcaattactaagtataagtaaataccaacccaattaaatagtagaacaaaagtaacaacatcacctgcgatgcaatgcatatgacaaattgaatttaagttccatagattaatcatgtgagggtccgagctgctcatgaccgtgagcacggctagtataccagttttacactctgcagaggtggcgcatctttacccacaagtcatgttacccatctgccaagggatcgcgacttcccatacacctctaccgaggaggcgaggcagggtaacactacgaggcctttacaaagttccactagcttcagaaaacccgctacagtttataggaagctccaatgcaggaattcccttgcctgaccgccatcgcagcaaagtcaacccaaggacctccctacactgaccactcccttactgcccttgcccctttcgggtaaggtaatctcttactagcatccctaattaatcagtcaagtgtgttgcattccacccttatggtagcactgttttcccgggtggtcgctccatgttccaattaacataatgattttatcatgaacgataaataacaacggataacaaaagtataatcatgagtaatgtatcttcatacccaaaaccacataaagcactagcaagtactacccaaaaagttcagtggtaaacaaggtataaagataatcaaactagggtaacctattgggtcccatcaaaattaacctatgcagatcattatgattaattagaacatgagtgggtaaaaagaagtgatcaagggcacaacttgcctgagacttgagattccaggtaccaacttgctcttcagatgactcgtaacctcgcgctaggattagagtgtcagtgagggccgcctgtaggaggtcgcggttggtgaagtccggcgaggagtccgccacgatctgtgtcgcaaccgagcctgacgtcgccaccaacacccactagattatcccagctcacctcggcgctacccatcgggtcccaaagtacggcggaagcacgaaccggccatggcggatgtttggcctcctccgatttctctcaccaatgctctgctctgaggatggggaatgccgattcgtccaggcagggacgtatcttatagggccaaggagcgcccggccggatcgagattccgctgtccccggcgtggtggttcacaacaactccacgatcctacaactgcgcaacaacccagcacccggccggcctcgaggtacccaatg

SEQ ID NO: 142291 - DNA, 297 bp, Zea mays
  unsure (1)..(297): unsure at all n locations
  Clone ID: MRT4577_6124C.1
ccccagcggggggggagaccgaggaagcgggaaagaaggccaggagcaagcagaccgcccgcaggcccacgggagggaaggcgacccaggaagcagcgggccaccaaggcagcccgcagggcagcccccggacccgaggagagaagaagcccacccgaccggcggggggggggcccaccgagagaaccgcacgaaacagaacagcacncagcngcggaacaggaagcagcccgaccagaggcaccgcggggaaagggcacaggaccacaaaaccgacncgcgagcccagagccaaga

SEQ ID NO: 142292 - DNA, 815 bp, Zea mays
  Clone ID: MRT4577_61250C.1
gcactgtttaccggggtggtcgctccatgtccaattaacataatgatcttatcatgaacagtaataataaacggataataacagtgtgatcatgaataatgtatcttcatacccaaaaccacataaagcactagcaagtactacccaaaaagttcagtggtaaacaaggtataaagataatcaaactagggtaacctattgggtcccatcaaaattaacctatgcagatcattatgattaattagaacatgagtgggtaaaagtaagtgatcaagggcacaacttgccttcaatgagctctgaaaggaaattaggcttacacctttttcctaattgattttggtggctgaattgcccaacacaaataattggactaactagtttgttttagatcatacattctacaggtgccaaaggttcaacacaaaccaatcaaaagaacaagttggggttcaaaagtaaggagcaaaaaggaaaccgaagtgtgccttggtctggcgcaccggacagtgtccggtgcaccagggtgaaccaactcaaactcttcaccttcgggtttcttaggcgcacctccgctataattcaccggactgtccggtgtagcaccggacagtgtccggtggcgcaccggactgtccggtgtgccagcggagtaacggctatctgcgcgtaacggtcgactctgcaaagtgaacagtgcaattcagaatgtcagagcagaagtcagaggagcaccggactgtccggtgccacaagaggacagagcctccaacggtcaaccagctccaagccctaacgacaggatgacgggcccc

SEQ ID NO: 142293 - DNA, 837 bp, Zea mays
  unsure (1)..(837): unsure at all n locations
  Clone ID: MRT4577_61251C.1
ggtaccctcgggttcggccgggacgatccgggcggggttgttaggatacggctgtcgttccttgactcaggctccacccttgagtatttatacgaggcacatacactacttctctcccatcaaaacaaggatgaccaacaggtacgagcaccgctattgccgaccagagagagagccaccataccacaaaatcatcagcgtcgtcgttttgccgcggagtcatctggccggtggagcaatgggtcaccgctatgcccgcccctgcgtgcgccgtcgttgacctctgctatctccccaaacgccggtacgacccctgaatcgcttcgtcgtgtctacggggagccgtcagccactttctcgggggaaaagaaagctctcgtggccggtgattgctcaccagaatcgcggatctacggcgaggccgcgggcgtcgtgggcagcaacacctacacgactatacgtgaggacacgtgtcatctgaagagcaagttggtacctggaatctcaagtcccaggcaagttgtgcccttgatcacttcttttacacactcatgttctaattaatcataatgatctgcataggttaattttgatgggacccaataggttaccctagtttgtctatctttatgccttgtttaccactgaactttttgggtagtacttgctagtgctatatgtgggtttgggcattgagatacacattattcatgattatacttttgttatccgttgntatttactgttcatgtcaagatcattaatgttaattggaacatagagcttaacttgagaaacacgtgccaccacaagggtttatggatgcccttggctgat

SEQ ID NO: 142294 - DNA, 421 bp, Zea mays
  Clone ID: MRT4577_61252C.1
ggtacacggcgccccccctcgagtttttttttttttttttttttttttttttttttttttttttttttttttttttttttttgttttttttttttttttttttttttttttttttaacaggagttctatcccaaaataaataattacattataaggagacaacggtccaacaacccaaagttgactgggaaacgagggcctaaacctctcacaaacacatcgaagcatcctccatgccccccatcctgtggaacctgctcttgacctggggggggggggagacagcaagagtgaacttacatacgttcatgggtaaaaaagttggggggaataatgtgtatgaactccccaaaggggggagctcatgggaagtgtagggcttaccaaagaggatgggtgaagctgagcctcgtgccaaatt

SEQ ID NO: 142295 - DNA, 1512 bp, Zea mays
  unsure (1)..(1512): unsure at all n locations
  Clone ID: MRT4577_61253C.1
tttttttttttttttttcttttttttttttttatagtggcacaggatcgaatgtcacatctttatatataacaggagttctatacaaaataaataattacattataaggagacaacggtccagcaacccaaagttgactgggagacgacggcctaaatctctcacgaacacatcacatcatcctccaagcgcctcatcctgtggtacctgttcttgacctgtggggggtgtgagacagcaagagtgagctcacatacgttcatcgctcaacaagttgtggggaataatgtgcatgaactcgccaaaggtgggagctcacgtgaagtgtaaggcttaccaaagaggatggttagagctgagcattgcttttaaagttggtcaaaattttattagcaattactaagtataagtaaataccaacccaatttagtagaaccaaagtaacaacctcacatgcgatgcaatgcatatgacaaattgagtttaagttccataatttaatcatcagagagtcctgagctgctcatgaccgtgagctcggctagtataccagttttacactctgcagaggttgtaccctttacccacaagtcatgttacccatctgccaaggggtaacgactcccatacacctctacctaggaagcgcggcagggcaacactacgaggcctttacaaagttccactagcttccgaaaacccgctacagtttatgggaagagcacttgcaagaatcccccgtctgaccgccatcgcagctaaatcaacccgagaacctccttgcatgcaactcccctactgcccttgcccctttcgggtaaggtagtcttccactagctttcctaattangtaagtcaagggcgtcccattccacccttgtggtgngcacgtgtttctcaagttaagctccatattccaattaaagataatgatcttgacatgaacataataacataatagaataattggaacatggatataatgaaatattaacccaaaatcatgtaaagcagtagcaaaactagccaaatgattcacgggtaatcaaggtaaaagataatcagactagggtgacctattgggtcccatcaaaattaaacctatgcattgaatagtgataataaagaacattattgggtaaaaagtggtcaagagcacaacttgcctggcacttgagattctaggtaccaggatgattcttcaaatcctcatgacctcactgcgaggatcgggcgcgcgagcgagctgtccacgatgagggtcgactcgcgacgagggaagaactccgatgaggaattcacgagatcctgtcggtcctcaacgtccgcggatgcaccgtactggtacccagcgccgctgcgacttcgctcgatcgcaccaccagggcagggcaggtagccaagagcaggtagccgagagccccaggcggagccgccgccgagtccctggcacaacgatgccctatctctctctagaaattaacggttgaggaacgacgaaggcccggccgg

SEQ ID NO: 142296 - DNA, 181 bp, Zea mays
  Clone ID: MRT4577_61254C.1
cgctctaccgccgccgcttcgttctctaaccttggctcccgctccctccgcaggagcatcgtaacaccgccttgaggaccgcccaactagacggctgcagacatggcgataatatgagcagaccgaagaagaagagcaaagtcgtccagcacacgaggccggggcgcgcaggaggcgctgc

SEQ ID NO: 142297 - DNA, 1364 bp, Zea mays
  Clone ID: MRT4577_61255C.1
ggatcgaatgtcacatatttactatataacaagaattctatacaaaataaataattacattataaggagacaatggtccagcaaccccaaagttgactgggagacgacggcctagacctctcacgaacacatcacaacatcctccatgcgcctcatcctgtggtacctgctcttgacctgtggggggtgtgagacaacaagagtgagctcacatacgttcatcgctcaacaagttgtggggaataatgtgaacgaactcgccaaagtgggagttcatgtgaagtgtaaggcttaccaaagaggatggttagagctgagcattgcttttaaagttggtcaaaattttattagcaattactaagtataagtaaataccaacctaattaaatagtagaacaaaagtaacaacctcacctgcaatgcaatgcatatgacaaattgagtttaagttccataatttaatcatgtgagggtccgagctgctcatgaccgtgagcacggctagtataccagttttacactctgcagaggttgcgcatctttacccacaagtcatgttacccatctgccaagggatcgcgacttcccatacacctctaccgaggaggcgaggcagggtaacactacgaggcctttacaaagttccactagcttcagaaaacccgctacagtttataggaagctccaatgcaggaatccctcgcatgaccgccatcgcagcaaaatcatcccaaagggcctccctacactgaccactcccctactgcccttacccctttcgggtaaggtagtcatccactagctttcctaactaatcagccaagggcgtccataaacccttgtcgtagcactgttttcccgtgtggttctccatgttccaattaacataatgatcttaacatgaacaataaataacaactgataacaaaagtataatcatgaatagtgtaatcttcatacccaaatccacataaagcaatagcaggtactacccatgaatttagtagtaaaatcagtggtaaacaaggtataaagatagacaaactagggtaacctattgggtcccatcaaaattaacctatgcagatcattatgattaatcagaacatggctaggtaaaaagaagtgatcaagggcacaacttgcctgggacttgagattctaggtaccaggatgatcttcagaggactcgtaacctcgcgctagtcgtagcaatacaaacaaacatggtataggcaaaattaacgtcacaccaaacacaaggataaactgcgcattaataatctacgcgttgctacgagatcgtggggaacgtgaaccattaaaatcggagttacggttaaagagtcatgattttatagaag

SEQ ID NO: 142298 - DNA, 2391 bp, Zea mays
  unsure (1)..(2391): unsure at all n locations
  Clone ID: MRT4577_61256C.1
cggnagcgtggggaagtccatgaaaatagcatggacaacaaggaggcaatcctggcaagcattcctgaagagcataaggaggagggtgccaagctatatacctcattactcgaagagaagggtggtttgcagactctcttgaaatatattaaggagaataaccctgacaaactttctatagcacttgcttcatcacttgacactgttgctgaattggagctgttacaggctcctggtctgtcctttctcctgccccaacagtatatagaatatccaaggctgacaggaagaggagttgttgaattcacagttgaaaaaggtgatggttcaacattctttccaactggtggtggtgaaccgaaaagtgttgctacaattcaggtcgttattgatgggtactctgccccactgactgctggaaactttgcaaaaatggtcttggatggggtatatgacggggtaacacttaaatgtgcaagccaagcaattattgctgataacgagactggaaaaaacgggtacactgttccattagaggtcctgccagcaggacaattcgaaccattgtacaggactccactaagcattcaggatggagaattgccagtcctgcccatgtcggtgtatggtgctgttgccatggcacatagtgtggattcagatgaatacaactcaccaactcagttctttttctatctttatgacaagagaaactctggcttaggaggaatatcgttcgacgaggggcaattttcagttttcgggtataccactgatgggagagatgttctgtcacagattaaggccggagataaaattcggtctgccaagcttgtacagggcagagaacgccttgtattgccatccatagcccccgaacagagtttttattatcgatcccattcatttgctgcattcttttacactgatgaggcaaccaacattttgtatatccaagccactaaacctgaccgaacagttcacagtcaaatactgagtatagcatatataacaatcgttgtacatgaaacatttttcttgtgtatccatgcatccgaatgcttattcgacaggtatgttacggtgagttgcctgggctgtgcatctctcgttgagccaggccaggatgtccccacggacacgctcgatgttctcgtccggttccccaaatagcaaggagtggagcatcccgtcgtatatcttgatagtcttatccttgctggcggcggcggcgtacagggcgcggctgacttccgggtcggtaacctcgtcggtgctgccgtgcacgacaaggaacgggatgctgacttcgccgaggcgcttggccagctcgtcggtggcacgcaacagctcgacgacggtgccgagcctgggacggccgttgtagcgcacagggttgcgcgctgcaacgatgcgcttggcgggcaccttgacggacttctcgatgaggtcggcggtgggcacgatggccgccgtgggcgcgaagcgcgcgacgaaggtgagaatctccggcagcggccacggcgggcggatccggtcggagatcctgcacatgggagcgacgaggaccgcccccgcccactcctccggccgtgtgcggaggtggatgagcaggcagatggccccgcccatggactccccgaacaggaagcagggcaggcccgcgtgctcctccctcgccctgacggcgcggaagaaggcgaggaggtcagcgacggcggcgtcgaggtcgggcacgaaggcgcggaggccgtgggagcggccgtggcccgggaggtcggccgcgaagcaggcgaacccggaccgcgcgaggaagaccgccgtggactggaacgtccagctgatgtcgttgccgtagccgtggaccatgaacacgagcgccctgggccgctcgggcgcgcggggcctccacgcgcgcgtgaagagccgccgggcgcccgcgtcgggcgtggtgaagtaggagggctcgccctctgtgccgtgcgccgagtagaactccgcctccgtggccgggtgctcgccccagaagtggacggccggcgccagcgcctccccgtccgccggcatagtggggatcggagtttggtcccggacgttggcgtcgggtggtgtggtgtggtgcgcgttgtgtgtggatgtaaagggaactactggtggccgctggccggcgagcaggggagtcgctgctatgctggatgcttgccagttgcgtcgcggcaggggcagcccgcagccgggcagggctgcttgggggacgtttcgatgcgggaggggaaatcgctggattcgtttcgggttggtgccttggtgggacggctcttgtgccgcagatccaccggctcgtccccgcgccggtgcaatgcaaaattcacgtggtatgctcccggccgg

SEQ ID NO: 142299 - DNA, 427 bp, Zea mays
  Clone ID: MRT4577_61257C.1
cccggggtggtacgagcacgtcgggaggaccgtgtgcttcctcgtctgcaagaaccacctgctctgggagtggctcttcagcctgctcaacctcaacaggggcgcgcgccaagctccgtgtcatggacaggcgcgaccactctacggtggttctcggcagggagagaggcttcgccgaggagctcagggcgttctggtgcgcttcaaggtccccggttcacgttgttcgtcgaggacgctcgggcccagcgagtgcgttcatgggccaagccctcaaaggctatcctaccgtaaaaagagattagacgagtgggcaattgataaatttttaaacgcgttttttcatgtaaagcaatttgaataaatttccatgtaaaaatgtatttttacgattttaaattactttttaaaaaatatttccaatgtc

SEQ ID NO: 142300 - DNA, 554 bp, Zea mays
  Clone ID: MRT4577_61258C.1
ccggccgggatctgaaaatacacactctgccaacactgagatggaagaatctgtgatcatgatgtgtatgctgaggaatttccgaccttgaatggatgatcgaaatgagtaactgtgtagctcaaggagtggccacctttccattgacacacacgccaagaattatttttaacctattcgaggcccttggtagtgattgaggcataatgaatgggaacatccctactagtggtgccctaatagatggatcattctgtgggagaacaagtcacctgaagaagccccacaactcatatcatgatccctggaagcaacatacgcagtcttccagacttgtactatcaagtatgccatctagctacatcaagcccgagaaatctcgtgttgagctctcctaaacacatggtgcgggaggttctcgacgtgatctctaaacgtatctggcgtaccgacataaatgatgcaaccgcattttacatctcaatagactagagacagcatttattgagcactgatgaaaaacttaatctgcaacatgaacttgcacatgaata

SEQ ID NO: 142301 - DNA, 349 bp, Zea mays
  unsure (1)..(349): unsure at all n locations
  Clone ID: MRT4577_61259C.1
ttttccgccttttttcccnccccggttttcccccaaccaaaaacaactggtttttttccccttgaaaaggcacagggtcacgttcccccccccgggaagaagggatcggggccttttgcaaatcgtttaaaaaaggcccaaacatttttaaaaaacggggggctgaaaaaaaccctttattgggggggaccattgggctaattttaacaggggggttttttggggtttaatttttccgggggggggatggaaattttgggcccctgggaggggttccgggaaaatttgtaaaaagtctttttaacccccaaagggtttttccaaaaggggttttcctgggggggttctt

SEQ ID NO: 142302 - DNA, 428 bp, Zea mays
  unsure (1)..(428): unsure at all n locations
  Clone ID: MRT4577_6125C.1
ggccgaccacgcgtccgatgtancattcaaaacacaccaagcgtgcgcactatcaacaacctaacaacaatggctaccaggatattagccctccttgcgcttcttgcccttttagtgagcgcaacaaatgccttcattattccacagtgctcacttgctcctagtgccattattccacagttcctcccaccagttacttcaatgggcttcaaacattcagccgtgcaagcctacaagctacaactaacgcttgcggcgagcgtcttacaacaaccaattgcccaattgcaacaacaattcttggcacatctaaacctacaaaccatcgtaacgcaacaacaacaacagtttctgacatcactgaaccacctagccgtggcgaacccttgtctcctaattcaacagaatttacttgcatccaaaccact

SEQ ID NO: 142303 - DNA, 342 bp, Zea mays
  unsure (1)..(342): unsure at all n locations
  Clone ID: MRT4577_61260C.1
accacccgtccgccatctttttttttttaaccaacacacgcttgctacttcccagggggaggttgagctatgctcaaaggtggaagcttttacttatcaacaacctcgactagtcgnaatgctgataggctttcgcgtagcagacagagggcgtttatcgcgtaacgaggccatctgactctcatctttggatccacatgagtatgaggctaatctgagaaacactgcgccgactgcagacaaaccatgccgttcttgctaatcggcgcgcgccgtaccttcaccaagaatgtacgcgtggatgcttacgccctcgtcacaagagaccaaaaaacatccttg

SEQ ID NO: 142304 - DNA, 353 bp, Zea mays
  Clone ID: MRT4577_61261C.1
ggtcaccgaagagttcgatcgatcagaaacatggaagggcgagagtagtcatgttcctgccctgtgtgtgttttctttgcgcgaaagttccttcctttcttgcttggtcaccacctcatgggttatgagttatgacgaccatgatgccggccgtgcgtccgagcacctgtggtttgtacatcgacgacctgcctttttctcattttctggtcaccgaagagttcgatcgatcaaaaacttggaacgggaagagtagtcatgttcctgccctgtgtgttttctttgcgcaaaagttccgggccataccaacctgctttttcccccctctgcgctagctccaagatgcatgtctc

SEQ ID NO: 142305 - DNA, 1276 bp, Zea mays
  Clone ID: MRT4577_61262C.1
gggaccctcgaggccggccgggacacatttcccttcgcccttcccctcctcacacacacacggtgtatccaacttcaagatgccttacccagagaccaccgacgcttttgccgtcactgacatcaagaactggagcaactttacccgcaaggagctgcccctcaagaaattcgaggagcacgacgtcgacatcgctattgatgcctgtggtgtatgtgcttcagatgttcacaccattagcggtggatggggcgagtcaattcctcttcctctctgcgtaggacacgaggtcatcggcaaggtcatcaaggttggatcaaaggtcaccaaggtcaaggttggcgaccgtgccggtattggcgctcagattggcgccgacttgacctgcgatcaatgcaagaacgaccaagagaactactgccccaactctgtcgacacatacggtgctaagcacaccgatggcactgttgcacagggtggctacgccagccacatcagaggtcatgagtactttgtcttcaagatcccagacaacatcgagacttccctggcggcgcctatgctgtgtgctggtctcaccacatattcgccattgaagaggctaggagccggtcctggaaagaaggtcggtatcattggactcggaggtctcggtcactttggtgtcctctggtccgtcgccatgggcgctgacacctacgtcatctcacacacccccaacaagaaggacgacgctctgaagatgggagccaaggacttcatcgtcaccaaggaaaagggctggtccgagccatggaagttccacttcgacttcgtcatcaacaccgccgatgccaccgacaagttcgacctcgcagaatacttctccatcctcaaggtcaacggcaccttccacatggtcggcttccccgacaacccgcttccccccattcccgcccagatctttgcccccaacggctgctacatgggcgcctcgcacattggcaaccgacccgagatggaggagatgttcgagctcgcttccaagcaaaacatcaagagctgggtgcaggaaatccagatcagcgaggagggctgcaaggaggccgttgagcgcgtctacaagaacgacaatgttaggtacaggataacgctgacgggctttgacaaggtctttggtaagagggcttagaaaactgcaacagacagacactattatatacccgcaggctgtcagtgcttctattacaaaaatatatactgatatattcccaaaaaaaaaaaaaaaaaagcggcc

SEQ ID NO: 142306 - DNA, 638 bp, Zea mays
  Clone ID: MRT4577_61263C.1
cggccggggttcccgccggactggcggggggtgccgcgaagccgaggcggacgactcagtgggcgctgcgcgtgtggtaccacgcgccgggcattctacactggtggatggagcagagctggttgcccacctgcacggaggtggacggaaccacgccgatgcccaacgagcgcgtcgccgtgatccgcttcaagatgaacgagtgcggcacgctccagcataagcggtagcaagcgactcaacaggagatccacgagtcctactaccgcgacatgatccgggatgtgctgctgtgggagttcgaccacatggagctgtcggagccgtcgagcaccgtgcacctttggcaaggagacgaggacggactctttcctgtcgtgctgcagaggtgcctagcctgaaatgatcggatggactcaactaccatgcaactccctggcaccgggcactatactgtcgtgatgcgcctagacgtaggagacaactgtacttaagaccattgtcagtgacaaggagctaacagacaatcatgcctcacagacgtatcgaagctttagagcatggctgtgaccggccacgcattacactattttattatcgctaaggcccgtgcatttgcgctcagtaaagatgatata

SEQ ID NO: 142307 - DNA, 1058 bp, Zea mays
  Clone ID: MRT4577_61264C.1
cattgggtacctcgaggccggccgggtattctgttgtcctaggcgtagaggaaccacaccaatccatcccgaatttggtggttaaactctactgcggtgacgatactgtaggggaggtcctgcggcaaaatagctcgatgccagaatagctctcgcccccataaataaagcagctcctccgggggcggcgaactactcctcgtcgccaaaaccctagccgccaaaaccctagtcctgcttctttgccatggcgagcagcgctagccaggcgagcctcctgctccagaagcagctcaaggatcttgcgaagaaccccgtggatgggttctccgccgggcttgtagacgacagcaacatcttcgagtggcaggtcaccatcatcggaccgcctgacaccctatatgatggaggctacttcaatgcaataatgaccttcccccagaactatcccaacagcccgccatcagtaagatttacttctgagatgtggcatccgaatgtttatcctgatggacgtgtttgcatttctattcttcatccacctggtgaagatcccaatggttatgagcttgcaagcgaacgatggacaccagtgcacacggttgaaagtatagttctgagcatcatttcgatgctctctagtccaaatgacgagtctccagcgaatatcgaagctgccaaggattggagagaaaagcgggatgagttcaagaaaaaggtaaggcaatgtgtccgcaaatctcaggaaatgctctgaaggagaaacatatggggagttgaacgagtgctgcaacttcacaaccagttacctagccagcattcttttgcttttcccctgtatattttccattcagtgtcattcgtatggtggtgttgggtctctttagacaaactggggactgttgcttatcctaaaaattcgattgtattgtgtggcatgaaatgatcgatgtcaaagaatattttgaacatgctgccacctaattatacttttcatatgaacatcataaagaagaagtgatgtttgcaccaaaaaaaaaaaaaaaaaatttgcggcc

SEQ ID NO: 142308 - DNA, 261 bp, Zea mays
  Clone ID: MRT4577_61265C.1
ggcacaccgctcctcctcgctgttctacgcccacccgcacaagcaatcgtcgcatcgccaccaccaccaccgagaagcagccgcctcgcgccccagatctcgccggcaggggtcgcacgccctagcatgcgcgagtaagtacatgagggcggcgcccttcagtgccgacgggaaaggggcggggaccatagaggcgctgctttggccgaacggtgaaggcggcggcggaggggacctgctgttggagccgacgtcggtgct

SEQ ID NO: 142309 - DNA, 338 bp, Zea mays
  Clone ID: MRT4577_61266C.1
ctttgggctgctttatgtgcttggaggacgtagttaataatcctgtctgcggctatcatattaccggtaaggagaccgccgattcgcgttccgattgtactaggaagtccgtagacaaccgtatcggctcttagggtccttctgctcctaatgtcgccggcggaggaatgggtctcgggtccggcctctcttcttcggagtgttcgctcgccgatcacggtaagaagcttaagtctggccctattgcgcatttacttttttaggcgcttatacttgcggccgagttacataatagcgcttcgcttatttatctctcttctgagtatatcgacgccgtc

SEQ ID NO: 142310 - DNA, 364 bp, Zea mays
  Clone ID: MRT4577_61267C.1
acccgtccttatttatttgccttggccatccttcccgtggaattttcccatggtgggaccgctaaaaccttaaggctaacccgcgaaaataaaatttatttttgccaatttcaaaaactaccaccccgtcccaccgttttccgtacccctaccccccccgtttttttccactaaatcttaccccgcccctttgcctaaatacacctcttctgagttgacctactttcagaaccaccgcatttttcattatgtcattctcaatatgttggaattaacaacttattttcctttccctaatattattacttattcacttgtcaactttttattttcacaaattgtttatattttttttttttgttta

SEQ ID NO: 142311 - DNA, 399 bp, Zea mays
  Clone ID: MRT4577_61268C.1
cagacacgtgagcatacgcgggggcagccgtggcgagagcagtcttgcgaatacacccaagaacggagaagatgtactcgaacgccaggatgcttggaccactatagacaggagcgactaagaggttcatctgacagacatggagaggaagaaggacctttgtgtcctgcttggcgccgacgactggggagcgagctgttgggactgggctgctaacgggcgccctctgaagggcgcgaaggctcggacagcggagaggttggacataattcaaggggcgcctcttgctggcgtctgaatgacgcctgtgtgctacaaagcctgcttcgatgcatatagcttgagtgtaagacgacatgagcggtagaaacgttaggatgcaaccagtgtgagtgatac

SEQ ID NO: 142312 - DNA, 625 bp, Zea mays
  unsure (1)..(625): unsure at all n locations
  Clone ID: MRT4577_61269C.1
aaaaatcgggttccaaagctttgggaagttcgttttccataacagaccaaccaaatagacccccaacccgttcctgcaaccttaaacaaaaaactaagtacgttcagcctaaacctaacaggtttttttcattgggggggggtcaaaaaaatacaaaaaaatcattgtcctcctaaaaccctaagcaggaaaggctaaaacaacagccccgagctcgtttaccaatttcaggtgaaaataaaaatacccccaaaaggggacagtttttttcctgaacagaagtttgccaccttttttcctttttttttaccatcaggggggggagggccccctcacatggccagaggaaaaaaagccaaaaaacccccccttttttttccactcaccaccttgaaaaaacaaaatacacaaccctaccataaaaaggccataccatgcccccacaatgcctttggccacattttccttccgggctctccctcccataaaaaatcaccatccttttttttgaccaggctcctggggaaaagcaagcagatgaccacgaaacccaggcctacggttcccccgagacaagggctacagtctttgttgtttgctgccctccggngccgccgccgggggg

SEQ ID NO: 142313 - DNA, 376 bp, Zea mays
  Clone ID: MRT4577_6126C.1
attaattaattcggtttttttttttttttttttcccaaaaaaaataatccatgtctatatcaaacaacctgaatgggcatgcagccgatgatcattgcaattttcagatgaatgaaaagcaaacaatctaggatcgcggaagccaaaatttcgaagtcaccgacccagcgtggatgaagtaggctgattatttgagatggtgagagatagggcgatgggagacagcgtgcgcgcagagaaagtctcctgcacccgcccggaagccaactttgcacgaccccgcaggcgcttccaactgggagggatctccctaggtcaccccgggcgtcctgtgggtgttcacattggtgacaaatgtgagcaagctgatgacctt

SEQ ID NO: 142314 - DNA, 472 bp, Zea mays
  Clone ID: MRT4577_61270C.1
cagccgcgctgcagacaataaaacactgtcctgggcgctttagtgaattggtatctgcaatgagtcactcttgagcttcaacgagggtccatgggggggcaggtgtgccgccacctgccgggctgatgtgagctgccatgagcgtgtgttgacagccggagcgtgatacaaactggcaagccgacctcgggcctggccgtgctgcccgtctgcatccgtgagaaccaccgattatacccttatccgcgtgctgctcttcctggccttaactggccagaccccgcatatggggtcattacttataagatatccgatatctcactattccttgcatccactatctggtacattaatctttgtacaacataataacattcccatgctatataatggatctgtgaaatctgactaatgaataattgcgtacagtaaacggcttcaaaataaaataaaacagaggtgacattctaga

SEQ ID NO: 142315 - DNA, 743 bp, Zea mays
  unsure (1)..(743): unsure at all n locations
  Clone ID: MRT4577_61271C.1
ggggttagggtcgctggtgtttcattaaaacatgctttactctggccataatttgaagtggacagagtggggggaaaggaattgtggtgctgcaatgtgttgttggtaagctggggcagcgcaattactgattgacaacaccccagcaaactacaaacggggcccattagtaatggtcccttgtcaatttggctccctagaagacctggtcggaggaaaagtaatatgttcaaaaggatgatattttagtgtagcagaagcaacatgacacttgttcaacagcttcactatctagttgttagaagttatggaacacatctgcagtacacaaagttttagaaaaagatgacatggaaatgcatctacgacatgatactgcttatttactctagaggttccttgcatcccaatttcaagcagtggaacttaatggtaccttttgagtattttaatgcaaaagatttaattcttcagcctagaagtggcataaacttctgacttttgctaagcacgtttttgtgttagttgtgtaatgctacgcaggtgtgcccatctcactgctaatgtcaaatgatctccacatggtcagatacacgaatgcaaaacatccatatgtgttcattattattattttccattggcttttagacgtcgatggtgcctatagatatatggtggtgaagtgaagntacaactgatagttttatgcagggtgacacttgctgatcagtcagtgtatgaag

SEQ ID NO: 142316 - DNA, 119 bp, Zea mays
  Clone ID: MRT4577_61272C.1
gatgtagcgtacgtgagtacggattcaggtcgagcggcacagacagagcgccatctgcaagctccagccgctcctccctagcgcatggggcagaagcctccatggcgaagctcctatga

SEQ ID NO: 142317 - DNA, 257 bp, Zea mays
  unsure (1)..(257): unsure at all n locations
  Clone ID: MRT4577_61273C.1
aactcnacgggcagacaaagcaaaccagagtttttgtgaagctggtagtagcgacctagctagctgagcacgggaaacgaggctcgacccggaccaagggtacggggtgaagcggacccgcagggggctggcgccacatgatcgggcgacacctccgtagacacctgagcaagcggtgatccacctgcgggcgaggctgagccacctggaccagccgctggagaacaagaccgccgtcgagcaccaagaaggactac

SEQ ID NO: 142318 - DNA, 201 bp, Zea mays
  unsure (1)..(201): unsure at all n locations
  Clone ID: MRT4577_61274C.1
gcgacggtggcatgggcatccggtgtccggccaatgaagaagacnggataaatgtgacgtaaccctctgttcgagaaaagggccgaagcacgttcgtgcatcggtcggcgcgttgccatcccaagaaggatcctgtcaccgattcgtcaatgtggcccataggtcgtgctgcattcagcgccatgcgtcgcattcctcaag

SEQ ID NO: 142319 - DNA, 468 bp, Zea mays
  Clone ID: MRT4577_61275C.1
ggccgcttttttttttttttttttctttttttttttttttttttttttttttttttttttttttttttttttttttttttttttttttttttttcttttttttttgaacccccgagggaaaaaccttgttatcttaaaaacagggggaacgggccccaaatcccccggcatccaatttgctaaacaaacaaaaacctttgcataaaaaatcccctggtgatacaaccttgaaaaaaacccagagtttctaaaaacaacaaatcccttgaaaaacccccaactagttgaaccccatatacttgggggttgcacggaacttcgggaaccccctgatgaccttgttaaccgaatcgaaaaaatccttttcgggcaccgtttcccggggggggcgaagggggtacaccccggcttcggggaaaccgctccttaaatcacctcccagaaaaacgggggcaaaccccggccaaa

SEQ ID NO: 142320 - DNA, 203 bp, Zea mays
  Clone ID: MRT4577_61276C.1
agaacgcggccctagcgtggtcctggtcgatgtccagttttcagccctttttcttgtacacgtaattgcgggttgggaaaggaaagagctaggggtctgttttttcaaagcccccaccccgactgctggtgggaacgaacgaagaccacccggcattctggttggaaggcctccttttctctcacgccggcccaagtgcccca

SEQ ID NO: 142321 - DNA, 261 bp, Zea mays
  Clone ID: MRT4577_61278C.1
aataagggttgaccttgattagaatataaataacacattgttgaagtccatggcaccacccattccttagccgctaggtacccggggtttagggggacaaatttattgtactgtgaagtctgatatgctagaagactaaaaatcaatttcggcggaagtgaggatatatggatcactatgtgacatgtactgaacagtatatattcacccatataaaggtccggcaaaaccagactattattcctcacattcttctacctc

SEQ ID NO: 142322 - DNA, 391 bp, Zea mays
  Clone ID: MRT4577_61279C.1
attcggctcgaggctggtcaggacggaaggacgtttgggtccttgtgttattactcatacagtggtggtagtgtgaaatatactactggaagcaccgggcaggctactatgctgttgctgtatttttatacaataaccaccaagttgatacgcttgacttcgagggaactatactgagtgggttgcacattgtgaatactgaaaggttcaaggagctccctccttatgaccctgactggagcgccatcccggctgaatgtgttgcacggcccagctattatattacaagccgttacctggtggcggaccacatatgacttatgggggccgtctgaggaatggatgacacacaggtcactgctgctagagctgtgaaaccattttacgctac

SEQ ID NO: 142323 - DNA, 335 bp, Zea mays
  unsure (1)..(335): unsure at all n locations
  Clone ID: MRT4577_6127C.1
acgaaatcatacagcctttcatgcctacaggcnnnnatgacgcttgcggagagcgccttacaacaaccaattgcccaattgcaacaacaatccttggcacatctaacccaacaaaccattgcaacgcaacaacatcatcaacagtttctgtcattactgaaccacctagccgtggtgaaccctgtcacctactcccaacagtagctgtttgcatacaacccacttgttttggcgtacgtatcttaataccagcaacaacaacagctgtaacagttttatgcctatgctcaatcaactagccatggtgaaccctgccgtttaccttacaactactt

SEQ ID NO: 142324 - DNA, 356 bp, Zea mays
  Clone ID: MRT4577_61280C.1
tttattttctaacaaagacacacaaacggggggggtttattagacgacgacgtgcatatagaggaccaccatagggcaccagacgacgcagatacccaggtacaggagcagcttaaatggcccatggcttactgaccaccacggaggcggagcaccaggtggagagggctctccttctggatgttgtaatctgcaagggagcgggcattctccagctgcttgccagcgaagatcaaacgctgttggtcttggggggaatccctcattgtcctgggactttcccttcacgttgctaaatggtttccgattcctaaaccttcagggttatggtcttgccagtcaaggacttcacaaag

SEQ ID NO: 142325 - DNA, 300 bp, Zea mays
  Clone ID: MRT4577_61281C.1
aagctatttttttttttttttttttttttctttcttctttcacttttttttttcatcaatcatacctcagcatttttacacccccgctcaatcacaggcgggacaactacaaccatagagccagctagccagactggggggcggggggctggatgacacaacctcacttgcgggccttctaccagcacgctatgcctaacgctgacaccctcgtacaactgcaacaacaggtgtcattcaaccaacctgccttgacaaacccagcagcatcctaccaacaacccatcactggtggcgccc

SEQ ID NO: 142326 - DNA, 363 bp, Zea mays
  Clone ID: MRT4577_61282C.1
gagctatcagtcggcggccgcccttgagcactgttgggcactttacggtggtttctacaccggctgtaccgagctcggcccggggaccgggatcgtcaggcacatgctgtcggcctaggaatctcgtgtacgagaagctcacccactgtcacgaacgggaacgagaagccgactttccggacgaactctgcggcggggctctccgtgaacaccaccttcgtcgacgggaccacggtgcgcgttcaccgtttccaggaccgtggtgccaaccgtggtgcgccccgtgttggcctgacactcgatcgtgcacacgccggactggaaccccaggatgttggcgcgactccctgcgaccaggatcct

SEQ ID NO: 142327 - DNA, 418 bp, Zea mays
  Clone ID: MRT4577_61283C.1
agcatctgcccacctctaatgctatcttggatggagaatgacgcaaatgatacaggacttgaaaactcaatgcttggagcactttaatcaggaatggtcaatccaaagttcaatgtttcagcatagttcttatcctagaacttctctttaaaacccttcctctattgataacaggttcttgctgccagtgaccacattttggtttagttacaatgactatagcatgactttacgacattccctcaagcatccagtttttttaccatatggatatgtgtggatacaatatataacaattagttttattgtctatcccaattaagaatggccacgatgtagcatttgattgccatacacctctaatctatcctacataagcaagaatatgttaatacagcggcagtttgttacattacag

SEQ ID NO: 142328 - DNA, 815 bp, Zea mays
  unsure (1)..(815): unsure at all n locations
  Clone ID: MRT4577_61284C.1
gagtgtcttcttcttccccctctcagaggaggaggagggctccgtagtcgcaggggcttctcgcgagcgaggctcctcccccccgcctcgttcatcagcagctcgtcaccacctccggccgcatactattattaccaccatcacccccgcaaatcctcgttccctccccgttcgtcctccggctgattgattgattacccgccctaagaaccgaaaatcaaaaataaagatctccgctttggccgtcgatctccggtggttgattctgtgagcgtccgctgctgcttcgtccaatccgttcggccgactcctctcttcggtttcctttctcaaggttggatcgagggcattaggcaggagatggacgtggagggcaagatgaatttggagattggatccaaggacatggaggtggagagcaagaacctgaagctggaggacccactgccttcctccgcgatggacatggacgagcctgctgttgctgagagcggcgaggtggatggcagcaatggcagctccaaggagtgccccttgacccccagagattccatgacctccaatgttcctgtggccaaagagccgagatcagtcagcaccgactttggggatgagctggaccttgagcttgggagtggagagccagagcccggcaggcagcaggagaggaagctctcaaggcaagaccggctcgagctcagccggttgttccagcatgccgtgagcgctcatgattgngagtgcgccgatggcttgctggccacagctgatgcacagggactcaatgatgtngctctgcgtggcggtcgatgcca

SEQ ID NO: 142329 - DNA, 232 bp, Zea mays
  Clone ID: MRT4577_61286C.1
attcggctcgaggcggattgtccagcacaatatatttaggccgcagtgtagtttttacaacagggagtggtttataaccggagccagcaagactaccggcattttccttcaagatgaccaatagcgcgcacacgaccaccgtgaagtagacgctcgtgacaagaatctgtagacagggccggctgcaatacacagaagtgaaactaacgtcccagcgtatggataccagaat

SEQ ID NO: 142330 - DNA, 306 bp, Zea mays
  Clone ID: MRT4577_61288C.1
accggagcgcgacccacacgtacggatgaatcctatctatcagacgacgttttttttttattttacaatgcaatgattgggctgtgtgtcattaccctgatcacatcactactatcaaagtttgttgtgagcacaattgaagcaacattgaaatcttggtagctatttcacaagaccattagcgcaatctagactccaattatccgttatgcagcagaacatactcgtgcaacactatttgcttttaaaaacaacatcaacatcaccctcggagtatctttggtgtccgctacacaaaacttcatg

SEQ ID NO: 142331 - DNA, 637 bp, Zea mays
  Clone ID: MRT4577_61289C.1
ggtttggccactcacccactcattcctctgctactacccgactcatctgaccgtacacccaactacccaagcaatcttcttcaccggctgcctgcctgcctgtgcccggtggggtcttgctgcagccaaacccggacgcagggggttggtgcaacaacctgacctgaggccgatggcggcgccatcgcgcgacaggatcgtcagccccacctttgcgcacgcccacgacgtgttcgtcgagatgccaagccgaagatactggggctggacatctgcgccgacaccatcgtcggcgaccagatgcagcgggggatctctggcggccagaagaagcgcgtcaccacaggggagatgatcgttggcccgaccaaggtgctgttcatggacgagatatcaactgggctggacagctccacgacgttccagatcgtcaaatgtctccagcagattgtgcacctgggcgaggccaccatcctcatgtccctcctccagccagcccccgagaccttcgacctgttcgatgacatcatcctgctgtcggaaggccagatcgtttaccagggacctcgtgaatacgtcctcgagttcttcgagtcctgcgggttctgctgccccgggcgcatgggcactgcggact

SEQ ID NO: 142332 - DNA, 376 bp, Zea mays
  unsure (1)..(376): unsure at all n locations
  Clone ID: MRT4577_6128C.1
cccacgcgtnccgaaaaaaaaaaaaaaaaaaaaaaaaaaaaaaaaaaaaaaaaaaaaaaaaaaaaaaaaaaaaaacgaaaaaaaaaaaacaaaacataaaaatacacaaagcaatgcaaaacggggggctcttttgtggtggacccctactttcaatccagtggcccggcgcttaacatctcttttttcggggcagccccatgccgtttacccggcccagttgtttcgcaactgcatcccctgtttaaccccttggggtgcccgaattagaggcccggaccgcaccgtcctcctttccgaagtggcgcctgactggaaagggggacgcgccctgcctttcccattattcgcgcgcggtgtgggggttgggcacacc

SEQ ID NO: 142333 - DNA, 230 bp, Zea mays
  Clone ID: MRT4577_61290C.1
gaactctatttgttatacttgattaactgaaagagaggagttagctagtttgtgtgaagacaatcaaatgctgcaaatcatacttgtcaaaaacctgatatgttgctttgatagtgtcaaaaaatattttttattttttatttgtttacaccaaaaaaataaaaatttcaaaaataaaaaaatttttaaaatccgatactattaaaattaacgatctcttcctttataaa

SEQ ID NO: 142334 - DNA, 256 bp, Zea mays
  Clone ID: MRT4577_61291C.1
atgtcacttgctggcacaagaaaaatgtcttttttcgctttccaccttctcctacaccctggtgggctctttgttttgaatcagcatcacctaatacttctctcgaaaatacacattctatgttgtctatctctaatatttttaaattttatgtcctattacagtttcacaacctctccatataaactggattctattgaaccttatattatcaatataacagtttaacttcaattgttttagcaccatcaatatt

SEQ ID NO: 142335 - DNA, 497 bp, Zea mays
  Clone ID: MRT4577_61292C.1
ccggccgccggccgggaagctattcactccaacacaaactcaacacttttttataaccttttcgaagttttcttcaccaacatcttcaacatgtctccctgctcttgctgtaaccacgccggcgcttcttgcaccagcgactgctcttgctgcaagcactaaatccattattatccaaacctgacaacacttggcttacatcacggtttcgtgacaatgtctcatcggagtacattatgaggacgtctctggatcggtctctcatcaagcaagtcagacagacatgggaatggacataatgaaagaaatggtataacatgcggataaatagctgcgacggccacttttcgatggtagcgcatggtagataccaaattggagcttgcatacattgaaaaaaaaaaaaaaaaaaaaaaaaaaaaaaaaaaaaaaaaaaaaaaaaaaaaaaaaaaagctccctgccctgaaagaaaaaaaaaaaaaaaaaacccgcggcc

SEQ ID NO: 142336 - DNA, 166 bp, Zea mays
  Clone ID: MRT4577_61293C.1
aaggggtgacttttttgtttgtaggtagaaaaggtttgtagaattagtgatcggtctccagggtggcaacctttggaaagcgagattttcgcaccatcgctttgaccggactagatcatgggacgtattgggcccaaccccatactgagataagaggggcaagcac

SEQ ID NO: 142337 - DNA, 482 bp, Zea mays
  Clone ID: MRT4577_61294C.1
gggaccctcgaggccggccgggagagatgttcttccactgctgcccgctgtggatccagtgccgccatcgcacacgcgggacaaccgcaccgtttcgtcccagcgttcatggcaaggatccagtgttcgtgcgccttaccgcacgcgatgccaggatcggtggcgtcgtcgatggcccccggtgatgcgcgcttgaagagtcttgcctgctctatcagcggtatccccgactgctcgcaagccatctatcttgtaccacatgcatacacgacgctactgctcaatcccaaggctgtatcagtgacatcggcgacatcgtgtggctcgcggacatggagcaatgcagcaccgtgacctgctgcagcttctgcaagatggttggtctctcgtgaccgtcctctatcaggtttaggccacggctgctagattcgtgctgtgtgtagtcgaaaagtaacctgctgacgcgatctcgaagatataca

SEQ ID NO: 142338 - DNA, 205 bp, Zea mays
  Clone ID: MRT4577_61295C.1
atcggtgacagtccagctgggacgcccggttgctaccctggcatgtgctaggccgcgtggcggccagcatgctagacgtgccctactaggaagacgacaacggtgtggtaatgacggatggctcctagctccgaaccgcagacacgggtgtacgaagagtacagctactaatacgccacatcggcaaacagcttgcccgaatacc

SEQ ID NO: 142339 - DNA, 325 bp, Zea mays
  Clone ID: MRT4577_61296C.1
ctctggaacgaacttttaaaaggggaagtgtttaacattgtcactacgcccaaaatagtatctcgcatgtttcctgtggaacatcatgtacaacacccccgcgtaggacaaaaaaatgtagccaataaattatctttccaaaatccaaaccggatagggacccactatttgtacctacaccccaatttcgtagcttacaacatattttctttggtaaaatcccccattggcccccgatggtaaacaccactgacgtggacattttggatccttcggtctcaaattctctggagaatcttttggggacgtacaaaattattgttgg

SEQ ID NO: 142340 - DNA, 792 bp, Zea mays
  Clone ID: MRT4577_61297C.1
gccggccgggctgcgggcgcggcacttccaacacacaccaggccaccaccaccaccaaccagggtccagactccagagacaatccagccatgccgcctccgtccaccgccgcggcagtctcctccattatccgcccgacgccgcctccggccgtatccttccaccccgtacccctcccgcagatcaggcggcgctcatcagctggcgccgcagccgcttcccggctcgccgtggcgcgcgccgccgcctcgggggcgcgcggcggcggcgacgccgagacggtgttcttcgacggcggcgcgcactacggcgacctggcggcgaacctgctcctggggctgaccctgctgtggctgccgctgacgctggcggccgtgtcccgcgcgttcatcctgcggtaccgcttcacctcccggcgcgtgacggtggtctcggggctctccggcgccgaccgcaccgacttcccctactcgtccgtcacgtccgtggtggtcgtgccgcggttcgtgggcgagtggggcgacatcgtcatcacgctcagggacggcaccaaggtcgacctcaggagcgtgcccaggttccgcgaggtcgccgactactgccgctccatggccggccgctgagggctccctcgtcgtcagctagcgccgccagcagcctgtgatgcctgttcgtagccatgcataacccgttgccgttgggattcagcaaaagtcttgttatatgtttcttacgcgacgtacgtacaacatcattatctgtaattcttgagatgaagtattcaagagtgat

SEQ ID NO: 142341 - DNA, 358 bp, Zea mays
  Clone ID: MRT4577_61298C.1
aacacaccaagcgaagcgcactagcaactacctatcaccaacggctaccaagatatgggccggccttgcgcttatgggcctttgactgagcgcaacaaatgcgtccattattacacagtgctcaattgatactagtgccaacattccacagctactccgatcagttacttcaatgggcttacaacattcagccgtgcaagcctacaggctacaactagcgcttgcagtgagctgcctacaacaaccaattgcccaaacgcaacaccaatgcttggcacatctaaacttactaaccattgcaacgcagcaaccacaccaacagtacctgccataactgatccatctagccgtggtgaac

SEQ ID NO: 142342 - DNA, 416 bp, Zea mays
  Clone ID: MRT4577_61299C.1
tctgcatctaacaagggagtcaagtacacaatcaacaggatgaggctgtaatgtcatctgctgattccaacagcattggtcttgctggacctggtgtgcccaggttgaactctagcgttcggcgaagcttgagcgttgctacgagcatgcatttgcataatgatgtggaagacctaaagatgttacttgaggcctacttcatgcatctggatggaattcgtaacagaatcttgtcggttcggcagtatatcgatgacacagaagactacttcaacattcaacttgacaaccagcgtaatgaactaatacaactccagcttacactgaccattgcatactctggcatagctgccaacactttcattgttggagctttagcaatgaacatgccgagctctctgtacaacaccgataac

SEQ ID NO: 142343 - DNA, 365 bp, Zea mays
  Clone ID: MRT4577_6129C.1
ttctcctagttgcagtcaggcttcatacgctgttgtcctgcccgttagagcagccagcgggtacagaatggattttggaagagggagtcaccactggacctccaaggaagccacgtgcagacatctacaaccttcgatctcctgacgagtttattgttggccaaaaccaggctttgattgaaccaggatgaatgcgggtgttggaagtagaatatatatatacatataaaattggttgggagccacgtgtaccagtgtgtgttgatcttggcttgattcagtctgccttgtaacagaaactggcgatggaatatgagaggagccctctggaaagaaaaggacagaccctgtgctttcatgaaagt

SEQ ID NO: 142344 - DNA, 552 bp, Zea mays
  unsure (1)..(552): unsure at all n locations
  Clone ID: MRT4577_612C.1
cccacgcgtccngaaaaaaaaaaaaaaaaaaaaaaaaaaaaaaaaaaaaaaaaaaaaaaaaaaaaaaaaaaaaaaaaaaaaaaaaaaaaaaaaaaaaaaaaaaaaaaaaaaaaaaaaaaaaaaaaaaacaaaaaaaaaaaaaaactggggggcgcccttttttagggttccaaattttacttccccttggtttggaaaggttttactttttttttttggggcccttaaaattaatttcacgggcccggttttaaaaaggtgggaatgggaaaaaccttgggtttcccaacttttttggttttggggaaattcccttttttcccagttgggattatactaaaagggcccccacagatcccttttccaaaaagttgcccacccttattgggtaatggaaccccccttttaggggccatttaaacgggggggttttgggtttttcccccaagggtacctttaatttttccagggcttttggccccggctttttcatttttttccttttttttttccccaccggccccggttttcccccaaaagttttaaatgggg

SEQ ID NO: 142345 - DNA, 517 bp, Zea mays
  Clone ID: MRT4577_61300C.1
tttgaaaagacttttgctaacatgatctatacaaaacctttatatcctgatgcgatctaaaaaaaaaaaaaaaaaaaaaaaaaaaaaaaaaaaaaaaaaaaaaaaaaaaaaaaaaaaaaaaaaaaaaaaaaaaaaaaaaaaaaaaaaaaaaaaaaggaaaaaaaaaaaaaaagaaaaaaaaaaaaaaaaaaaaaaaaaaaaaaaaaaaaaaaaaaaaaaaaaagaggggggggggtttttttaggggggccggttttttaacggggtgggggcgggaaaacctttttttttgggggcccaaaaatttaaagggcggggcccttttttaaaacctgcggaatggaaaaaagggggggaacccaaaattaattcgttggggagaattcccctttttggggggggggggaaaccggaaaggggccggtaaggggggcctttcaaaaagtttcccccccttgggggcggaaaggggttgccccccttgtaagggcccctttaaactcgcgggggggggggg

SEQ ID NO: 142346 - DNA, 353 bp, Zea mays
  Clone ID: MRT4577_61301C.1
gggccttatggcccaagctcctgcaacccgggggggacattcaactttttggaggcctcaaatgacaccacgttgtgcggctgcttgatagcctcgccgaggtcgatctgactaacggggttcagccccgcaagatcgagatgttcaatgtcgcgaacacccccgacatcacgatctttcaacgaatggcgtgcggcagccacgattacaagaccgatgataaccactccatctggagcagacacagcaaaggccttgacgcatatcgttccaggccattgtaaccctcgtcgccgtatatacccacatataactagctacggtgtactcggctaggccttgtacgtcatgta

SEQ ID NO: 142347 - DNA, 315 bp, Zea mays
  Clone ID: MRT4577_61302C.1
atggctgaagaaaccaccttgctggcaaattcgtatggaagaaatgaaggaaccaagggcatacatcatggaagaaagctgatggacaatagtattggttcaaaccagttgtttcttactgagataagactacttgataaaaaaactcggccgggagggaactacacgccaccaccggtgataccagcaccaggaggagcttatgcaggggagggagctactacaagagagaatccaaacccgttacacgacttcgtcaacgagtttttcgcttctggaggtagtggtcacaactccaatgaccctgatatgtga

SEQ ID NO: 142348 - DNA, 339 bp, Zea mays
  Clone ID: MRT4577_61303C.1
cgaattttcacgtttctgctatgtgaactcacgagacattgtgggtagtcacaaatataatacactgattcttatgagatgataatgcctatctcatcataggttgtgaagagctcaaaagtctccttctgcatattcaaaaaaacgactgcttccaaactgctgcaacacaaaataaaggttcagccctgggcgacgaatgcacacatcacatacacgaatttcggaatgcttctctgtagtccttatgagaagatatccatttttaaccatcagactcaaacgcctcagacatatccttttgcctattttacacaaagaatgatctcaaactgcata

SEQ ID NO: 142349 - DNA, 265 bp, Zea mays
  Clone ID: MRT4577_61304C.1
ctcggtgactgcctggttaagatctacaaatctgatgggattaagggcctgtacataggctttaacgtgtctgtgcagggtattatcatctaccgagccgcctacttcggtatctatgacactgcaaagggaatgcttccggatcccaagaacactcacatcgtcatcagctggatgatcgcacagactgtcactgctgttgccgggttgacttcctatccatttgacaccgttcgccgccgcatgatgatgcagtcaggcgcaa

SEQ ID NO: 142350 - DNA, 364 bp, Zea mays
  Clone ID: MRT4577_61305C.1
cggacgcgtgggtccaggagatggagaagcaaaatatgatacagatacaggaatggtacatgggctgaccaagtctaggaagccatataagaagaaaggaagacgttcccagcacagctgaaaggagagctaagaacaagcttgccaggatcttcttggaattggacgtccaggatgagaagtggaggtagctggaccccaagtggtgtatacgaggggtttacctttagatcagctgctcgtggccagagcccaaagtgaagttcacaaattttggttacagtcaaggttgtctgcgtggccattagctcaatcaaagaatctactgatacgaaagtttcttaagatttgaagcaaataaaaa

SEQ ID NO: 142351 - DNA, 545 bp, Zea mays
  unsure (1)..(545): unsure at all n locations
  Clone ID: MRT4577_61306C.1
cacataaaaatcgggaaaggaaacttcttatttcgggggggccccatacatcacccaaaaaactatattctggaacaacaactaacaggggggcgagaagagggccccaccaatgaggcgcagcagctacgacgccgtgggcctgcgcccctccccccctacgggcaactccagcagccccgcccctccccccaactaggctcattgagctccgcttcttctctgcccccccccccctaccatncanccnngctcctgctgcctacccccagcnntttcttcccttcaaccccctngccncnttgncctctcctgcttntttaccgccgccccccctactaccnttcanccccctngctggtgngngccctgcctcccttcttgcccacccccanntgncgccgttcctcccccgcgnngcgcctnccgctggccccctcttcccctgccncntngctgcctttccaccaacttgctttggccccccccccccggttcctccccccccccntccttggtggtgcccatgaaaaaaaaaataaaaa

SEQ ID NO: 142352 - DNA, 111 bp, Zea mays
  Clone ID: MRT4577_61307C.1
aaactataaagcagcggacggaattctcacaaaggatggagtcgtttctaaaactctcttactcatctcataaactgatacaccgcccaatttctgttctgagccatcaca

SEQ ID NO: 142353 - DNA, 210 bp, Zea mays
  unsure (1)..(210): unsure at all n locations
  Clone ID: MRT4577_61308C.1
anngagcgtacggtngcntanctcgaggacgtcgcngacnggctcgacagcngncgcaacgcgntcatangactcttcnacgntcgcaacgttngaaangagctcntccgggtctcnannaggactgagacgctgntgattcgattggcnncagacgatccatgtgtcactgttgctatgtttccttnccgatttncatgantaattaat

SEQ ID NO: 142354 - DNA, 520 bp, Zea mays
  Clone ID: MRT4577_61309C.1
atacatttttacgtccacgccgcgcgtgtgtgtgtgtgacaatgggagccatgccctgtatctgtaaatgcgtactgcccaagacgaatagaaaaaagattaaggtatgcaagaaagaaccaggtgccctgcactcctactatcctagaatgctctgctcatggtatggtcggggaatcgtgtgtgtcgctgaaagacaccctccaaacgaaacgcgcgcggcggcggcggcggcggcctagaccgcgcggcggcacagcgggcacgacgcgtgccggagcagccagacgtcgatgcaaggcaggtggaacgtgtgcccacactccggcaacctccgcgccgtctcgccggcctcgaagtcctgaaggcagatggggcagccgatgggctccccggaggcgtcggtgacggtactctcggtgacggccgtgacggggagcgccgcgatggcggcggctggcatgcccgcggcggccgtctcgaacatgtccgccagtgtcggcgccgtgtcctgcgagtc

SEQ ID NO: 142355 - DNA, 281 bp, Zea mays
  Clone ID: MRT4577_6130C.1
ggggagggtggtcttttcatttgtttcttttttttgaaaacaaagcaaccgccgaatctgttcttacacaaaaagaaatggctccttttctacacatgggccatggattggcgctaaagagtacaatttcgaggctcaaacccctaaagtcccttccgggggacggtaggtggataaaaaacacggagccgggtctggaaacacccttcctcatgacggggacacaccccgggaaacttaaccctacaacagccgtttggtgcctgttttcaccccccccc

SEQ ID NO: 142356 - DNA, 321 bp, Zea mays
  Clone ID: MRT4577_61310C.1
ggaaaaggtcccggagagctgagcagtcaagatgtgtgacttcaccgaagaccagaccgcagagttcaaggaggccttccagctgtttgaccgaacaggtgatggcaagatcctgtacagccagtgtggggatgtgatgagggccctgggccagaaccctaccaacgccgaggtgctcaaggtcctggggaaccccaagagtgatgagatgaatgtgaaggtgctggactttgagcactttctgcccatgctgcagacagtggccatgaacaaggaccagggcactatgaggattatgtcgaaggactgcgggtgtttgac

SEQ ID NO: 142357 - DNA, 345 bp, Zea mays
  Clone ID: MRT4577_61311C.1
tcttcaaccaacatccgctcggttagagtacgacaaactatctgtgtctgtttaaactgtacgggcgcagcccccacttatctcaacaattaacatacacattacactatcatatatttccttcattattcttactcccaatcattcttcttttaacataaatatatcaaactaatttactcttatacaactctcctttttaccaatatcactaatatcataccttaaactttcttcaaactttatttcctctacatttacacatctcttctctccaatataataatttacaacacatatatattcttccaccatcttctctatcaaatcatttccaaacttaaa

SEQ ID NO: 142358 - DNA, 1604 bp, Zea mays
  Clone ID: MRT4577_61312C.1
cccccgaggctggcctcttcgcgcgccgccgccgccgccgccgccgcggctgcctactccctctttatactcccgccgcccctccgcgcaccaggtatcccaattaagaaccatcgtgccaagaccttcaaggaggcgtcatgccgttcaagttgtcacggcatttgatgatgatcctggtgatttctcgctggtgcacgatgacggggacgagcagtttggtgttcctcagtattcaagcgagagtgaatggagcgatgatgatgtcatattgacggcattcacagatgttgagttaccgatggcagtcaagagccgagccgagggtgcactaactatagctgcccataggttcgccacgattgacaaagggcataagaagagcagaactcaacaagggctgatgaataatgttggactggttgctttcttagtgatgttactttcctttgtcgactggtgttcttggaagattgttagactaccgctggactctttttacttgacacgtccttttttaacatcggcagttttatcagcacttgctggattcctttttgcaccaatcgctgatagtctgaagatccaccatttccggaggagaggaaagtctgtttctccatcaagtagaaagccaacccctggaatgggaggattattctttgttcctgttggtatttttgttgcaaaaagagaggttggttccaactcgaatggagttaatggagcagctatgattaccctcatatttgcgatggttgggttgcttgatgatatttctagtctagcagcagatcacaattataaaataccgcaatggataaggttcttggttcaaattgttgctggcatttacttctctatctggttgggttctacagatatttcaacaccatatagcatgaaatatcttgttcctctgccgcctcctttcggccttgcactcattggaaaagtatatatgggtctggctgctgcatgttcactttccatggggccggcagtaacactggttgatggtcttgatggtttggctggtggtattgctgctttagcactcatagcactatctgttgcagctctcccgatttgctctgaattcagtgtttttggagcatcaatgtcaggtgcttgcattgggtttctttttcacaacagatacagggcctcagtggttatgggccgggttggttcttttgcactcggaggagcagttgccacaattgcatcatgcagtggaatgtttcttccaatgttaatagcatgcagtctcttctttgttgagctgctgtttgcaatattgcaggttccttttcacatggctaaaaactctttccgcggaacaagcagacatcccctgaaaatccgcccctcgcattactacctcagacttttagggataaaggaaccttatatcgtggcgggcgcatacatggtatcatgcttcctaactctgttggcaggatacctcggccttgtctcagcatagatgaactttcgtcgcttcatttttttttcagttgtggtacatgataaaatccaggcagccattattgcttcatttttatgccaggtctgtgttacagtgacacagagaatttaac

SEQ ID NO: 142359 - DNA, 1041 bp, Zea mays
  Clone ID: MRT4577_61313C.1
atggggagctgcgtgagcaagaaggccgcctccgcacgcgccggcgccgtggccgataaggaggcggcggcgccgctcccgcctgagaaggaggtcgtcgctctgccgccgcccgtggtggtggaggaggaggaggtgaaagaggtgctgtccgagacggccgtgcccgtgtcgcggcccaggccgccgccggagccggagaaggaggtggtgaagcggaaggaggaggaggaggaggaagtttcggagagcgcgtcggtggcgtcggccacggcggagaaggccaaggcgaagggagggggtgagggtgagcaggaggtggagaagaaggcgattggcgggatggagaaggggagggcgaggaggaggacgccggagcagaggaggcccaaggaggctgcaggcaacgggagggcgaggtcgccgtcgcccgcgtcggcgcagaggaggtatggcggcggcgaacacctggcgccgccgacgcggccacggcgggagcagcccgcggtggtgtccggcatcgggtgccgaagcggcaggttctctccgtccgcggcgaggagggccgccgagagcgccgtcaggcgaaccaactccgccagggaggccgacatgatgctgccgcattcttcccggacgccggcagccgccaagcggtccctcaacggcaatggcggcgcctacggaggaggcgcagccaaacgggaccccggcgagcgatccgggcggcggccggactccccaacatccaagcacatcccgcccgcctcgccggcagcgaacggcgccatctcccggcagcagagcctcaacggcggcgccacgcgcaagaccgcgaaggacgacaccaccctcgagcaaaccaagccgcaatgccacggcggcggcggcggtggccggtcaccggaagagggaagagacggctccgacgagtcggcattggaggaggaagggcacgagcaagagaagcagacggcggagggcggcgcgctgggaccgatcaacccctcggtggccatggagtgcttcatcttcctgtag

SEQ ID NO: 142360 - DNA, 188 bp, Zea mays
  Clone ID: MRT4577_61314C.1
gtatgattctcgctttgggtgcgagaggtcccgagttcgtttctcggaatgccgcgccaagtgaaaaaaagggagagggccgaaaaaataccaatacataaataaagacctgcggtattaacaataaagagggcccggccggtctgcatctacggggtttcctctccgtacatacaccccctaatctt

SEQ ID NO: 142361 - DNA, 393 bp, Zea mays
  Clone ID: MRT4577_61315C.1
aaaaacaaagggggctttgtaaatccaggggggccaccatcaaacccaacccccgttaaagggctttttagggtcccccaaacaaccaaaggggcggggaaacattttatcaggctggttccccgttaattaacaaaacaacaacttgggccccccccttttgtcaaaaaaagggaacccccccttttgcatgcccccccctgttccttacagggggaccccccccaacaaaaatttcccaacctttttatcccccccaagtctcaattttttacaaaaaaacccaaaaaaaggccaaccccttaaccccccaggggttttcaccattaatgcctcgccctaaaaccccttaatttcgggggggggattcccagggccaacattttaaacagg

SEQ ID NO: 142362 - DNA, 386 bp, Zea mays
  Clone ID: MRT4577_61316C.1
aaacggccaagggggacccccgatgtttttttgcccgggtaaaaaaggccacacagggccgggggcacccgggttattaacccggttttttaaaccctaaaagccccagccacagattttaaaaatttaaaatcgggggcatccacccaggaagcggagggggggggggcccctgccagtcgaaaagcgggctttgctgctcccattcaaaaaaggggggccccactaaaaacagggctaaccgggaattttccccccacacaaagttaatgcgtccggaaaaccgggttttttataaaagggaaacaaaatcctaagggccctaaaaagggaaagggttttttttaaccctccgggggggggggcggttcgcccaaaacgggtta

SEQ ID NO: 142363 - DNA, 170 bp, Zea mays
  Clone ID: MRT4577_61317C.1
ccttccttccggcttccgcaatcccatcggggtccccattcaaaaggccccttccctgaaaagcacgcgttccttttgaaagtccgccagcactaccaagaccccaacccagaactttttaaccaccaagttctgcctccccttaaccataaacccaatattcaaaacct

SEQ ID NO: 142364 - DNA, 455 bp, Zea mays
  Clone ID: MRT4577_61318C.1
aaaggggcaaattaactggcccaaaaccaccccctgggggggcccccccattcaaaaataattgggctgctgccctcccgccctgatcggggtttgcatgtccaggaggctgccacccctttggggggtctgggtcggggggggctactatactagctagctagctgaaccacttgctttttcatcccccgtggaagttgaggtccttgatggccagggcaaaaaccaccgcaaaaaggacccaaaaacccccccccatggcccaaacggccccaagaaaatcgtggcaaaaccccaagtgcccccccaaaaaaaccaccccggggggggaggggacccccccccccataaacaggggctggcccaggtcccccaactgaaaggtcaggaccccctaaagcgtccaccacacccggttggcccaatagtcccccccccaccaaactgggatgccc

SEQ ID NO: 142365 - DNA, 2053 bp, Zea mays
  Clone ID: MRT4577_61319C.1
gaattaatttcccgggtacgacgcagctcactagtttttcggtccgtgttttccccgccggttttcttgctcgcattgggtccctcgaggccggacgggaccatgattgtgccaagcgcactctgccacgagccgcccggcaccccggcgggtgcggcggaggccatcggcgggggcggggaccccgaggccgcggcgaggcggcgctgggatctgcccggcaaggtggccgggaacattgcaatggggaaaattgatatgtctactgacgaagaatcagattgtgtagctatatgtccacctaacagaaatgctggtcacgaggaagttgtgagtggcagccatgatgaagattcttcaggaaagcaagagaacccttatgctgtgaactcacatatggacagcaatggccaggaagatgtgtctgtaaacctagacctgctcaagctgattcatcagcaggaatcttctgtcagcaattcaccaacaaagcctgcagtagctagacagcaagggtctggccatactgtccttgagccatgcgctgttgcacctgaaagaagatcatctggagcagggaatattgctcgaattcctcatcccaccagcagcggggaaaaactttcggataaaagtagctcctcaccaagaagcatggcaaagaagagtccatcattcacacccaggaagcctctccaatctgacaacacttctcacagtcaagatgatgactcatattctgtcacttcttcaactgtaacttcagcaagagctgggaaaactaagaagacaactgttgctgttgcacctacattcgtctgtgctaatcgtgctgagaagagaggagagttttacacaaaattagaagaaaaacgcaaggctttggaagaggagaaactccaagcagaggccagaaagagggaagaggaagaagaagctctaagacaactgaggaagaacttggtcgtccgagcaaaacccatgccaagcttctaccaagagggacccccaccaaaggttgaacttaagaaggtgcctccaactcgtgccaagtcaccaaaattgacacggagaaagagctgcagtgaaacccctcatacaccagagggaggaaatggcagtgcagtatgctgccggttgcatcgccacagcattgggaacgccagagatgttagcagcaaggcacaatgttctccaaagagcgcctcaaaggctggatcagctactagatccagggtcaccaaatccagggaagacctgaaggcttccgtgaagaaagtgggactgccaagcgccgcgaacttcgctgtacaaacctaactcatcaggcattcactcccatatgccatttttcattttaatttatacctcacatcaccaaaaagatggcctcgtgttatttttgcattgtccttgtaagaacctggctaccagagacctgcgctgttcccgtcctgtaaatttgttgaaggttttgtaagggggtaaccgagtcagtcctgtgagaaccaagcgggtgggcagctgatgggatattggagtgacatattgtcgttgtgtggcggcattcgcgcgttctatgtattgtatctgagctgtaacttattgtggacattggcaaagcgattctgattgttgtcgcaaaatttaaaaaagtcgtgtttcgaactttttaaaaaaaaaaaaaaaaaaaaaaaaaaaaaaaaaaaaaaaaaaaaaaaaaaaaaaaagtgtgagaaccaaacggccgggcatattgtcattgcgtgggggcagcattcgctgatactatgtaatgtgacctgagtgagctgttgtaacctgttgtgggcatattggcaaagcgattctgattgctgtcggataaaaaaaaagtaataaaacaaaaaatgaacgtaaaaaaagaaaacttatacgggcggccgttcacgatattccgaattcgttcaaactgatgaacactttttcctcgtcccatacaagccaatcgaagccgagatacgaccatggactccaccggctccggaacagggggtaaggggaagaaaggagc

SEQ ID NO: 142366 - DNA, 251 bp, Zea mays
  Clone ID: MRT4577_6131C.1
aaagggggcaccaacggacaacggtaaaatcaaaacagctttaaaacaggtatgggaacaagcaacctgggcaggccgggaactaaaagaatgtgaagcaggcacaacatgggtaaccgcgaaaacccatcagaaagaagaggggggggcagggggaaaaaaaaacaaggggagcgccaaaacagcctaaaatattttggggacctagccaataagggtcccctagaagggtgagaaaaccccataagggg

SEQ ID NO: 142367 - DNA, 1174 bp, Zea mays
  Clone ID: MRT4577_61320C.1
cggacgcgtgggctaaaaaaaatttatggctgctactgtgctacatatttccaagggcaacaggatctcatcaaatttccaagcaacgacatgaactgtggtaatccggcagctgtcgcccgcggcggccgtggcggcgtcttacgcggctggagccgggtgacggcgagcagctgcctcggcgtcgccggtcgacattggagccgccgcagacttcggggctctcgacgctgctgacgctgacgccgcctggcatgatgcagcgaccatggctttcgcagcagtgccttcccacggtgacaggagcaggaagcgtggatcgcgaccggctgcgacgtcgacgcgcgccgggcggaggtggaggagacgcgcgagcaggctgctccggcgccggtcgagccgtgcctgtcctcgttcgtggacatgtcggagatcttccccgccagcgtcacgctcagcagcggcggcgacgtggacaatagcggcaacaagccagacgaggaaacggccccgcgaccgcagctgttggccacgacggcgctggtgccggtgacggaaaagaagggcggctacgacgtggcccaccccgaccgcggcacggtgatctcgcgctacaaggagaagcggaagaacaggaggttcggcaagcagatccggtacgagtcgcgcaaggcccgcgctgacggccggatgcggatcaaggggcggttcgccaagtccggcgaggtctgagacactactcccccgatcgatccggaggagtagggggaccgtggcgtggcccgtgcctcgctcgctctaccagggcgacagcgcagcatgtgcttctcgtctcgtctcgtgggttgcttggttggtttggtgttgcaggtcggtcgctgctcgcacgtgttgttgccgccggccggtcgctcgcgaggacggcgatacttcactgtcctcctctctctgtgcagcagaaataaatccacgacgtactgtagtgcactgtactacttactagtctgcgttgagtacattcggcttccttggctggctggccctgacctatgttgttgtcgtctactcttgcacattcagctccgaaccaccaagtttcatctcgatttcaaatttgtgcataactgactgtagtcaaataggaagataataaatctaggatacttagactatc

SEQ ID NO: 142368 - DNA, 447 bp, Zea mays
  unsure (1)..(447): unsure at all n locations
  Clone ID: MRT4577_61321C.1
gtctacagctcgctgctcgccccatcgtctgcacactctctccaccatgtctttcgtggactgacagtcgttcgaccttcaagcgcacctctgccacaccacaactcgcctcgccatgaaacccacgcggcaccatctgcttctggcgcttggcttctcgctcctggccatcaccctttccatcctctactcgctccggcagagtgcgctcgataacctcctctccaaccatgtctcggcgtcaccaaagccctcgcgtcctgttgcgctggctcgtccacccgcgccaaagagccggtgggaccctgctcaaaagtaccttgtctatctgccctttgagggcatatccaaccagttctactccttccagaacgccgccaccatggccaaacgcctcaaccgcaccctcgtcgtgnccccatcacctcanaccgccatgaccgtctc

SEQ ID NO: 142369 - DNA, 901 bp, Zea mays
  unsure (1)..(901): unsure at all n locations
  Clone ID: MRT4577_61322C.1
tgcataacctggtgacaggagcaggaggcgtggatcgcgaccgcctgtgacgtcnncccgcccggncggaggtgaaggtggagnaggcgcgcgagcagnctgctccggcgccggacgagccgtgcctgtcctcgttcgtggacatgtcggagatcttcccccgccagcgtcacgctcagcagcggcggcgacgtggacaatagcggcaacaagccagacgaggaaacggccccgcgaccgcagctgttggccacgacggcngctggtgccggtgacggaaaagaagggcggctacgacgtggcccaccccgaccgcggcacggtgatctcgcgctacaaggagaagcggaagaacaggaggtgagcgggcgagccggagtagtggtagctccgatcgacaccacagtcgctctcacgtcgctagctctcgctgctcttgcttgcgcacaggttcggcaagcagatccggtacgagtcgcgcaaggcccgcgctgacggccggatgcggatcaaggggcggttcgccaagtccggcgaggtctgagacactactcccccgatcgatccggaggagtagggggaccgtggcgtggcccgtgcctcgctcgctctaccagggcgacagcgcagcatgtgcttctcgtctcgtctcgtgggttgcttggttggtttggtgttgcaggtcggtcgctgctcgcacgtgttgttgccgccggccggtcgctcgcgaggacggcgatacttcactgtcctcctctctctgtgcagcagaaataaatccacgacgtactgtagtgcactgtactacttactagtctgcgttgagtacattcggcttccttggctggctggccctgacctatgttgtcgtcgtctactcttgcacattcagctccgatcc

SEQ ID NO: 142370 - DNA, 2340 bp, Zea mays
  Clone ID: MRT4577_61323C.1
tttcagatccaccgcgcagaccctctgttattagttgtatacacgtactcgacgtcctgtgttggcgcagcgtgcaatggagtgcgagaccggcctggtcgaccgccccctcaacagctcagcgccgcgcaccggcgaccccttgaagtggggcaaggcggcggagggtcttactgggagccacctggacgaggtgaagaggatggtggaggagtaccgcgtgccgctggtgaagatcgacggcgccgtgctcagcgtcgctaaggtggcagccgtcgccggccgggtacaggtggcgctggacgaatccgcacgaccccgcctggaggctagccgcgagtgggtcttcgaaagcaccatgaacggcacagatacctacggcgtcaccaccggcttcggtggcgcctgtcaccgccgcacgaaagagttcgccgcgctccagaaagagctcatccgatacctcaacgccggcgtctttggagccagcagcagcgacggctacacgctgccgccagaggtcacgcgcgcggccatgctcgtgcgcatcaacaccctcacccagggctactcgggtatccgcttcgagatcctcgaggccattgccaagctgctcaacgccaacgtgacgccgtgcctgccgctccggggctccatcaccgcgtctggcgactgtggtcccgctgtcctacatcgccggcctcatcaccggccgcaagaactccagtggcggtggccccggacggcaccaaggttgacgccgtcgaggcgttcaggatcgccggcattgagcacgggttcttcgcgttgcagcccaaggaagggctcgccatcgtcaacggcacggccgtgggctccggtctcgcggcgatcgtgctcttcgaggcaaacattctcgccgtccttgttgaggtcctctcggcactgtactgcgaggtgatggctggcaatccggagtacaccgaccacctcatccacgcgctcaagcaccaccctggacagatcgaagctgcagccatcatggagcacatacttgaaggcagctcctacatgaagcttgccaaggagcagggagagcttgacccgctgaccaagatgaagcaggacaggtacgcgatccgcacgacgccgcagtggctcggcccgcaggtcgaggtcatccgcttcgctaccaagtcgatcgagcgggagatcaactccgtcaacgacaacccaatcatcgacgtcgcccgccgcaaggcgctccacggtggcaacttccagggcactcccgtcggggtgtccatggacaatactcgtctggccgtcgctgccatcggcaagctcatgttcgcgcagttctccgagcttgtcagtagcttctacagcaatggccttccctccaacctgtccggcgggcgcaacccgagcttggactacggtttcaatggcgctgaggtcgccatggcgtcctactgctctgagctccagttcctcgccaaccctgtgacaaaccatgtgcagacagcggagcagcacaaccagagcgtcaactctctcggcctcatctcctccaggatgaccgccgaggccgtcaccatcctgaagctcatgtcctccactttcctgatcgcactgtgccaggccgtcgacctgcgccaactcgaggagagcatcaaggccgctgttaagaagtgcgtgtcgcatgtcgccaaaaaatccctggccatcgacgaccacgacctgctcgtcgctattgaccgcgtggcggtgttcacgtacgcagaagacccgtgcagacccagctatccactgatgcagaagctccgcgcggtgctcatggagcatgcgctcatcaatggtgacagcaacaccgagcgacctatggagacctccatcctggccaaggtggctgagttcgagaagcagctcagcgcagtgctaccggacgaggtggaggccgcacgagcggctgtggagagtggcacgaccccgaacaggattaccgagtgccgttcgtacccgctgtacaggttcgtgcgcgaggagctcggcgccgagtacctgaccggcgagaagacgcggtcgcccggggaggaggtggacaaggtggtgatcgccatgaaccagcgcaagcacatcgacccactgctgcagtgcctcagcgagtggaaaggcgcgcccctgccaattatctgaactacagataagagagaagacaaggtatgacggatgagaaaagaagtactatcctgctactgtacacgaataattcacgcggtgtggcgtgcataaactatactattaccatggccatgtgtcttgacggcacacagttatatttgattatcctgatcttacttc

SEQ ID NO: 142371 - DNA, 136 bp, Zea mays
  Clone ID: MRT4577_61324C.1
gaacagcagcatatgagagacgagggaacaattctggggatctttcaacaatttcactacatagtctaaaaggggggaaaaagaaagaaagatatctgaccgaccaaattagcgaaagataacagatcaggtcata

SEQ ID NO: 142372 - DNA, 315 bp, Zea mays
  Clone ID: MRT4577_61325C.1
gttactccgtccctcacacactcactatacagggctctgttgcagcaagaaggaagaagctcgcgcctccctagctctcgttgtcagcaatggccaccaccgtcgcgtccagcctactcaagtcgtccttcgcgggctcccggctccctttggccacgcgcaccaccaccccgttgttcgtggtcgtggctcaccccgcgcgccggcggcggacccattcggccgtccatttgctacttccccaccccgccctacgacctgaccgtctttcgggtcagccccattaaggagcccatcgtggcccccgagaggacc

SEQ ID NO: 142373 - DNA, 195 bp, Zea mays
  Clone ID: MRT4577_61326C.1
ctggggttttttttttgacaaaaactacgatatttctagcattatcaaactataatttccgagaaatattcgccgccaaatagacccttacagtatgccctctctctctaaagtataatctaagagattaaaactggatggccattacatacttcgtgctctaggggactgaaaaaaaaacgtgatccctctttt

SEQ ID NO: 142374 - DNA, 989 bp, Zea mays
  Clone ID: MRT4577_61327C.1
ccggccgggaaaaaaaaaaaaaaaaaactctctctctctcccctatccgtgctttgtgcctgtttggtgcgcgtccacctttcggggtcaccggcttctgctttcttgctacgccaccgcgcctctcgtctatttatggagttccccgatccatgaagccggggcaggccgagagttgtcaacgacgacgtctgccggcagtgctcctgctcctcctcctcctccttcccggccgccgcgcgagcttggtgggttagtgtctcttcttcgcggagacctgtgagaggagccatcatcatggccgccgttgagactgttgtcctcaaggttgctatgtcatgcgagggttgcgcgggggcggtcagaagagtgctctccaagatggaaggagttgaaaccttcgacatagacctcaaggagcagaaggtgacagtcaaaggcaatgtcaagcctgaggacgtcttccagacggtttccaagtcggggaagaggacctcctactgggagggcgaagccacggccccggacgctgcggcggcttctggagccgaagcagctcccggcaccgcggcagaagcgcctcctgctgctgctccggcggcgccagagatcaccccagccaaagctgacgcctgatcgtcacgctattattcactcacatgtgatgctgcggctgcgactcctaaaccttaaatctaaaaatagctggggattgggtttgcattgcatcgtgttcttgccggtctagcaagtgactataagaataatggaataaacgatgacccagtgtgtgtatgatttccgttttgaagaacaacacatcccttgcaggattgttgttcagtagattctacttgtaccgcggctttggagttccgcaaaggactttacttgttcaagaacttcttctctgacaggaaataacaaaaaaaaaaaaaaaaaaaaaaaaaaaaaaaaaaagaaataaaaaaaaaaaaaaaaaagcggcc

SEQ ID NO: 142375 - DNA, 704 bp, Zea mays
  unsure (1)..(704): unsure at all n locations
  Clone ID: MRT4577_61328C.1
agaagcttccagaaggcgggattgagccaagttcgctccccggatcgccgggaaaccaacaaaagcagccgctttatgcttcttgggccagacgaggaatcctcgagaaaccgatagaaggtgcaggcaggcagttagctgggtcgcggaagcctccaaaggcgccgttttcgccgccgacctcgcgcgcgccggaagcaacaactccccctcccctgatgcttgccatttgacacacagcaaccgggcgctctgctgccggtgatggcggcggaggagctgctgcggaagttacgggagctggaggaaggccaggcggagctcaagcgggagatttccaagctcgtgccggagcagcagcaacagcaccaccaccaccactaccacgcctcgcgccgcccgccgcagccttcgccggcgcgccgcgccctccccgcggcgccttccttgccgtcgcggctgcagcgcgtgggccgcgtcgggctcactgaccgccagcacatcagggccctgcacgcgctggggcaggccgtgcatatcattgcctccggcgggaagctcatttactggaaccgttatgccgagcaaatgtatggctattctacatcagaagcagtcggtcatgatgccgttgagttattggtccatcctgatgatgctgaggcagcaaacaatataattgggaatatatttatggngaaatg

SEQ ID NO: 142376 - DNA, 1370 bp, Zea mays
  unsure (1)..(1370): unsure at all n locations
  Clone ID: MRT4577_61329C.1
gtcaggtcatgtcaggccaggcatcttgggcaacagcgactggcaacagccgggccttttgagcgtgctctctctctctctctctctcccctatccatgctttgtgcctgtttggtgcgcgtccacctttcggggtcaccggcttctgctttcttgctacgccaccgcgcctctcgtctatttatggagtcccccgatccatgaagccggtgcaggccgagagttctcaacgacgtctgccggcagtgctcctgctcctcctcctcctccttcccggccgccgcgcgagcttggtgggttagtgtctcttcttcgcggagacctgtgagaggagccatcatcatggccgccgttgagactgttgtcctcaaggttgctatgtcatgcgagggttgcgcgggggcggtcagaagagtgctctccaagatggaaggttgttctttttttttcactctaatttctatagtacaaagttcattactaacaaagcgattgattctagtagcctgcagcttgcgcctgcacaatgaaaagctagcttaccagaaaattatcatttttttaatcataagggagtagccctaattaataatcgatcatcaaaacgttaacccaaaattaaaggctcatgcattgcaagctttaccacttacgcctgttcttctggaaccagnagttgaaaccttcgacatagacctcaaggagcagaaggtgacagtcaaaggcaatgtcaagcctgaggacgtcttccagacggtttccaagtcggggaagaggacctcgtactgggagggcgaagccacggccccggacgctgcggcggctccagaagccgaagcagctcccagcaccgcggcagaagcgcctcctgctgctgctccggcggcgccagagatcaccccagccaaagctgacgcctgatcgtcacgctattattcactcacatgtgatgctgtgcggctgcgactcctaaaccttaaatctagaaatagctggggattgagtttgcattgcatcgtgttcttgccggtctagcaagtgactataagaataatggaataaacgatgacccagtgtgtgtatgatttccgttctgaagaacaacacatcccttgcaggattgttgttcagtagattttacttgtaccgcggctttggagttccccaaaggactttgttcaagaacttcttctctgacaggaaataacatgtgagtgcagtccgtgcttttatcttctggtgttccctcttaattaatgggaaaatgtgcttagtttgggtcgtgaaattcttaccagcttgagattttatattgaaaatttgaaatacaaacattagattaagggtttccttcaaaaaaaaaaaaaaaa

SEQ ID NO: 142377 - DNA, 228 bp, Zea mays
  Clone ID: MRT4577_6132C.1
attagtaaccggagctttccagacattcaagtccccttttatttcgaaaccatcactctagcaaatcccacaaacagaagttaaaaggtccccagctttgcctggttagctttttttatgttgcatcaaataaggttactttccccgtttgcgaggacgattcagtttcttatttcctagtttggctacagaaaatccagatatctctcccatgctttaagggcacca

SEQ ID NO: 142378 - DNA, 233 bp, Zea mays
  Clone ID: MRT4577_61330C.1
ctgttgttagcacctgcaactgcaatgtggagctggagctccatggcgtttggctctctcctcctcctcttcctcctggctaccagagcttatggtcttgggaggcaggacatgcagttgcacacagcacacttgcccatgaacacgaaggtcaatagccagaaggagataccagctgacttcaagtggcaactacgaccgccggcgggcacactggacagccgccggaacgc

SEQ ID NO: 142379 - DNA, 329 bp, Zea mays
  Clone ID: MRT4577_61331C.1
cccattccaccgacgcgtacgcaccctgcaaataaaccctatagattatgatcaaaaacttccaaaattataaccggaagggagaaataggcgctcggcttaacaatctacacactaacattcatcatcttattacaacgcaacctatacaagttatctcttaaattgaatttaatagccgatcttatacaactgctggaactgaaaaaccacaacatcacccaccttaatcaactgtcagcaaatggtcatgaatccagattccctacactcctagatgcccaatcccaatacctttttcaaaagatactcatccaaacttgctgata

SEQ ID NO: 142380 - DNA, 725 bp, Zea mays
  Clone ID: MRT4577_61332C.1
cccagcgtccgcccagcgtccggagcggacgcgtgggggaagagaagcaggtagtggacgacggagggagacagccagacaggacaggagcctaccagaccagaagggcatgccgggcgccccatgcaacgtcgagccgacgggccgccggttgcgctggagcgggctcggacgccggcgccgccgcaggctcccggtcgcccggctcggcggcgagagggccgggcgcggtcggggagtcctgcggcggctccggctgcgctggctcacggcaaggtggctacggcgcgcggctcgcaggctggcggcgatctacatggcggcgctcgcgggcccgccggctcccaccggcgcgtcgtcgtccacctgtccgccgtggatcggcctggagccgtgcttcgccacgccgttcgtgtcctgcacaaggccgtgctggtgaggcggcgtcggcggcgcccgccgtgcatggatcgatttcaggctgcgccggcgtgcagcaggtgaccatcgatccacgtacggcaaggtaagacataaagctttggtgtaacaacaacaaccagccatgaggccacccataactggagacgtactggagcacctggtctagaatccagatgcatgcatatatcgaattgtactgatccttttcttcttctctattcgtctcctgttcttgttcttgtcttgttaagcaaataagtagtagtatcttttccatctgg

SEQ ID NO: 142381 - DNA, 1518 bp, Zea mays
  Clone ID: MRT4577_61333C.1
cacacgcgtccgcccacgcgtccgcccacgcgtccgcggacgcgtgggtttttcccgtggaactatgattggcacagagatcaacctcatgttgatgaaagtgttataaaatcttcagaggtcactaggagatgtaagtcagggcccgtagagcatgatgctgtattgagggcgatgtcacgggcgctggaaacgacagaggaagcatacatggatattgtggaaaatgagcttgatagacacccagaacttgcattaatgggttcttgtgtccttgtaatgttaatgaaggaccaggatgtatatgtcatgaatcttggggacagccgagctatcttggcacaggacaatgatcagtacaatagctcaagtttctcaaaaggagatttacgacatcgaaacaggtcaagggagtcacttgttcgtgttgaacttgataggatatcggaagagtcgccgatgcataatcctaacagtcacctaaacagcaacacaaaagctaaggaactgtcaatatgtagactaagaatgagagcggttcaattgtcaactgaccatagcacgagtattgaggaggaagtcttgaggattaaagtagaacatcctgatgatccacaagctgtctttaatggtagagtgaagggacagctgaaggttacaagagcttttggtgctggttttctaaagaagccaaaatttaacgaggcactacttgagatgttccgcatcgactatgttggaacatcaccatatatcagctgcaatcctgctgtacttcaccaccgtctctgcgcaaatgataggtttcttgtgctgtcttcagatggattgtatcaatatttcagcaatgatgaggtagtttcgcatgtgctttggttcatggaaaatgtaccagagggagacccagcgcaataccttgtagctgaacttctttgtcgggcagccaagaagaatggaatgaattttcacgagctactggatatcccccagggcgatcgtcggaaataccatgacgatgtttctgttatggtagtctcgcttgaaggaagaatctggcgatcttctggatgagtgtttgaaacatgacctggtctgttccttgcagccttacttagtgtagtaaatctcaatcaggaaaggcaccaatgtcttgctcgtcttaatttttcaaccatgtttcaaattctggcaatccatgtgccttttctgtcttatacgttttggatttgcgctgcattcttgggcagtccgaattgacgtatacatgtttttctcttttgttattaggaagaaaaggttctttggagggcagatatgttttcccggtgttcccttaaaatttatttttgtattgtggggttattattttattttttctatttttttacatttgctaaaaaaaggaccgttcttttctgagttggggcacagccgcacaggtgacgggtgtccatggtgttgtggatcgatgctaagcaattatgcattatgtttatgtgataaattgttttggggcgt

SEQ ID NO: 142382 - DNA, 287 bp, Zea mays
  Clone ID: MRT4577_61334C.1
cggacgagacgacgaacgagaggcccattccaatcgggttccgtttgggggggtccttttgtggcttggccttggcggcaaacaaaaaccccggacccgagaggccgggcccttttggttgggccttaaagttttgggggggtaacccgcggccaaccttggagaggactccaatttttttttccctaaggccaaggttgggctttcgcgctttttttacacccgttgggccgggccggggccaatcgtccccaatggccccccgccgggaggggaagacacggaag

SEQ ID NO: 142383 - DNA, 227 bp, Zea mays
  Clone ID: MRT4577_61335C.1
ggccgcccttttttttttttttttgggaaaaaggatgcgcgcatcatattggacattgcgagaagccatttctgaagacacaaaccgctgttacctgcgcaaacctaattttggacgaactgttgtaactgacggacaaacagaatatcacagttgtgacgtataggatcagctccgtccaatgcatggacatgattgagcacggaaatattgagcctcctgacatg

SEQ ID NO: 142384 - DNA, 198 bp, Zea mays
  Clone ID: MRT4577_61336C.1
gttcgggcgtggtggtggtgtttttttttttttttgttaagaaaaagagagtggcgggcgtggggttctattcgctatccaccaatatccacaaacccatgcatacacacacccatacatacgatagataacttacccacctttattttgtcataacacgagcgcatacattattcccgcgcccacaaaacggtgggc

SEQ ID NO: 142385 - DNA, 809 bp, Zea mays
  Clone ID: MRT4577_61337C.1
gccggccgggctgcgactcgtaacggtaaagccaccgacccaactggtctcgtagccgaactgcaagagggaagagaagcatcgcatctctgagtctgaaaccctagccgcctgtctccctgtccggtctccactcgtccgggcgacgagacgacgacggagggtttctgcgggggatttgtttgtcgctgactcgccggcgaccaagatgaggccggttttcgtggggaacctagactatgatacccgccactcggagctcgaccacctcttctaccgctatggcagggtcgagcgcatcgacatgaagtcaggttgcccgcccttgcttttgcccacccctcgttttgtcgtcgtgttcggtcgatttaggttcgatctgatcttattgtgtacctagtcagctgttatatcttgatgtttgaatttcattgaattgaaaaaaaaagtgagggaattcccccattctgtataaaaaaataaaaaatgagggaatgagcacgtttgtacagtaattgttttgataagattcatcatccaatagtgctgtattagttgttccagttattcttggttgattagctaatgatattgttgaaatgattcgtcatctaagttttgaacacgttataccactaggagatcttttgccgtacagaacttggatagatgtgtttttaaactgggattgaagttgaaatgagtaagatactctgatactttgcagctgtgctgtactcgggttacctctacttcataaagagcacagacttgcatgtgtgtgctgctccatgctacctgggagttgc

SEQ ID NO: 142386 - DNA, 846 bp, Zea mays
  Clone ID: MRT4577_61338C.1
cattgggtacctcgaggccggccgggaccaacaattcccgagacgccattctcaccatccacacaaagccacagcccaagagcagagtcgtcgtcgtcgtcgggcatggcggggttcaaggtgacgcggatctcggagggccccgtgaagccggcgtcggcgacgcccgaggagacgctgccgctggcttgggtggaccggtacccgacgcaccgtggcctggtggagtcgatgcacatcttccggtcgggcgcgggcgaggccccggccgtgatccgggcggcgctggccaaggcgctggccttcttctacccgccatccgctgcaccgccgacggcgtctacttcgcggaggccgaggcggactgcagcctggaggacgtgcgcttcctggagcggcccctgctgctgcccaaggaggacctcgtgccttaccccggcgacgaccgctggcccgtcgagccgcacaacaccatcatgatgatgcagatcaccaagttcacctgcggcggcttcgtgatgggcctgcggttcaaccacgcgtcggcggacggcatgggcgcggcgcagttcatcaacgcggtgggggacatggcgcgggggctggcggagccgagggtgctgcccgtgtggcaccgggagaagttccccgacccgagcatcaagccaggcccgctcccggagctgcccgtgctggcgctggactacgtcgtgctcgacttccccacggcctacatcgacgggctcaagcgggagtataaggcgcacagcggcaggttctgctccggcttcgacgtgctcacggccaagctctggcagtgccgcacccgggcgctggccctggacc

SEQ ID NO: 142387 - DNA, 781 bp, Zea mays
  unsure (1)..(781): unsure at all n locations
  Clone ID: MRT4577_61339C.1
ccggccgggacccacaaattcccgagacgccattctcaccatccacacaaagccacagcccaagagcagagtcgtcgtcgtcgtcgggcatggcggggttcaaggtgacgcggatctcggagggccccgtgaagccggcgtcggcgacgcccgaggagacgctgccgctggcttgggtggaccggtacccgacgcaccgtggcctggtggagtcgatgcacatcttccggtcgggcgcgggcgaggccccggccgtgatccgggcggcgctggccaaggcgctggccttcttctacccgctggcggggcgcatcgtggagggggagcagccggggcgccccgccatccgctgcaccgccgacggcgtctacttcgccgaggccgaggcggactgcagcctcgaggacgtgcgcttcctggagcggcccctcctcgctcgtggaggtgatcgacatcatccgggagaccaaggacaggatggccgtcgagttctcccgcttcgctggggaggagacggaccaggacccgttccagatgaccttcaactacgagtccatctacgtctccgactggagcaagctcgngcttctccgaggtcgactacggcttcggcccgcccatcttcgccggcccgctcgtcaacaacgacttcatcgcctccgtcgtcatcctcaaggcgccgctcccgctcgacggcaccaggatgctcgccagctgcgtcaccaaggaacactccgaggagttcgcccgtggnaatgaaggaagacctgccctgaacttg

SEQ ID NO: 142388 - DNA, 139 bp, Zea mays
  Clone ID: MRT4577_6133C.1
accctttccttctggccgatagcttcacgcctgacccatgccaaggcccgggggtgccggaaggccacacaatgaatgccacaacaggcttttggggtttgctttcctggatgaacggtgcagcattcttctcaaccgg

SEQ ID NO: 142389 - DNA, 1712 bp, Zea mays
  Clone ID: MRT4577_61340C.1
cattgggaccctcgaggccggccgggaacaaattcccgagacgccattctcaccatccacacaaagccacagcccaagagcagagtcgtcgtcgtcgtcgggcatggcggggttcaaggtgacgcggatctcggagggccccgtgaagccggcgtcggcgacgcccgaggagacgctgccgctggcttgggtggaccggtacccgacgcaccgtggcctggtggagtcgatgcacatcttccggtcgggcgcgggcgaggccccggccgtgatccgggcggcgctggccaaggcgctggccttcttctacccgctggcgggccgcatcgtggagggggagcagccggggcgccccgccatccgctgcaccgccgacggcgtctacttcgcggaggccgaggcggactgcagcctggaggacgtgcgcttcctggagcggcccctgctgctgcccaaggaggacctcgtgccttaccccggcgacgaccgctggcccgtcgagccgcacaacaccatcatgatgatgcagatcaccaagttcacctgcggcggcttcgtgatgggcctgcggttcaaccacgcgtcggcggacggcatgggcgcggcgcagttcatcaacgcggtgggggacatggcgcgggggctggcggagccgagggtgctgcccgtgtggcaccgggagaagttcccggacccgagcatcaagccaggcccgctcccggagctgcccgtgctggcgctggactacgtcgtgctcgacttccccacggcctacatcgacgggctcaagcgggagtacaaggcgcacagcggcaggttctgctccggcttcgacgtgctcacggccaagctctggcagtgccgcacccgggcgctggccctggacccggccgccgaggtcaagctctgcttcttcgccagcgtccgccacctgctcaagctcgaccgggggtactacggcaactccatcttccccgtcaagatgtccgcgccggccgacaaggtgctggcctcctcgctcgtggaggtggtcgacatcatccgggaggccaaggacaggatggccgtcgagttctcccgcttcgctggggaggagacggaccaggacccgttccagatgaccttcaactacgagtccatctacgtctccgactggagcaagctcggcttctccgaggtcgactacggcttcggcccgcccatcttcgccggcccgctcgtcaacaacgacttcatcgcctccgtcgtcttcctcaaggcgccgctcccgctcgacggcaccaggatgctcgccagctgcgtcaccaaggaacactccgaggagttcgcccgtggcatgaaggaagacctgccctgaacttgttcttcctagcttattatatactgctgatgatcatcctgagccctggctgcagggagatgatgaatggtgacgtaaacatgcttctgtttcgttgatgctgttgttacttttggttgtattttttttggggttcactttatcttggtcaatacgtaccacattagatcacagcaaccaaattcgatcttaatttgtactacaccatttgatatgagaccgagacaataaaaaaggttatactgtccaaaaaaaaaaaaaaaaaagcggccaagaaaaaaaaaaaaccactttggttgtatttggttgctgtgatctaatgtggtacgtatcgaccaagataaagtgaacc

SEQ ID NO: 142390 - DNA, 303 bp, Zea mays
  Clone ID: MRT4577_61341C.1
gcggggtgagagagggagagggagagcttttttttttttaccagacccgcgcgttaccgataggggccgagcctgacatcactacgactctgttagaatcttggtccgcgacgcaaggttggtatacagatggggcgagttcgcatcggacaaaatgacaaacctaattctttccaccctcgggcttgtgggtgtcgtggttaactgcgtcacactttgcctatggatagtgcgcctaattgcagaactactcgttactgtaaaagtttggcaaggcgtgactagttaggtctcaaaacaaaa

SEQ ID NO: 142391 - DNA, 257 bp, Zea mays
  Clone ID: MRT4577_61342C.1
cccattcgtagtcctttctcaagtgggtacttcaactttctgtgaacacccagtctgtgtccagggtctgctaggttcgatgatgtcgaactcgtatctacatccggtgcaagttttagctggcagaggtgagaccggtggtgctagtctgcctttgccaactatagccagtctagagacttgatataatacatcagtgagaccagcttctcatcatcttaggcccggcgtgctgagactgaaagtcacactacatg

SEQ ID NO: 142392 - DNA, 428 bp, Zea mays
  Clone ID: MRT4577_61343C.1
cggacgcgtgggttaattttgagccaacctctcatctagagccaaacacttccaatttttgtaacgacacttctcagatcttaataatcgagcgagagcatcatcagcctttttctctagattgtttgtctttgtagcacatacagtgaaccagaactggtgttttgattattaaatgcggctaaaagtatggggcacaaatacgattagaactttgcagtcttggtcaacaattggtgataatcatgcaatcaatgcccaccacttgctgaaatatgtggcgatttgcgttgaaagtttgttttgcctgtcatagaaagcaccacgcgctgtggcacaattaatgtagaatagcttgaacatgtacattaagggctagtttgggaacattatttttctaagagatttctattttcctaagggaaatt

SEQ ID NO: 142393 - DNA, 279 bp, Zea mays
  Clone ID: MRT4577_61344C.1
agcagtggtaacaacgcagagtactttttttttttttttttttttttttttttttccttttttttttttttttttgggaaaggaggatccacgttttatcgcagggcaacatgcaaacatcaggcacaactcatgttccagcaagattctcctgcatcgggttctactaggaacaccctactagtatgaaattttcaatccatgggtcccgtctccgggacactgggtgcagttctaaccatccatgtcccccgcgtactttgcgttgttaccactgct

SEQ ID NO: 142394 - DNA, 165 bp, Zea mays
  Clone ID: MRT4577_61345C.1
gaggctgggcgggacacacagatccgaactgagccatggtgctctcgcacgcgagctccggccagaacgacgactacctgggcttcaccttcttgtcttgctactggctctagcgtatgccgagggacctgatgctggagcgttaggtctcctcgcgatgccgct

SEQ ID NO: 142395 - DNA, 276 bp, Zea mays
  Clone ID: MRT4577_61346C.1
tgtttttttttaaaattaaggggggttaatgctaccatttaatgcctctatggggcaatcgcgcaagaagcggggcctaatattcatccccatcaaaagcccatgaaaacaaacccaaaaagggctaaaggcccgaaaccggcgatacatttaaacacggggaaatatcaaaggcggtcatgggctactggactggggaccccccactttgggtggcccggtttttaaaacaactttcaaagaacggtgcaaagccatgaaaccgaactgccccgt

SEQ ID NO: 142396 - DNA, 327 bp, Zea mays
  Clone ID: MRT4577_61347C.1
aaagggccgaaacccccccccgacatagttggggtgtttttttttggcaaaatctaaaagttttcaaaggtttaaggggtttttttccctttgtttccaggccgccccgggtttcaatccccctttcccgattaaccaaaaaaaacctttccttttaggaaaaaaaattttatcaaagccgggggatttttgggtgggcccgtccccttacccaaaacaaaaagctttcaaccccttccctttgggggatcctccccaaaaagaacacctaggactgcccaagaggggtctgaaggaaaaaaaacccaaagggtttccccgatcttt

SEQ ID NO: 142397 - DNA, 435 bp, Zea mays
  Clone ID: MRT4577_61349C.1
tctagcagcaagaccagctgccatggcaccctgaaaaatctcgcagccgagctcctcttccggtcgccgctcctccctgcgagctccctgttcctgtcttcctcacggctgcgcgcaggagtttcctcccagccatggccgccagcccccggcgagctcgggttcttctccctggccgccctgctccctgtccacggcgcccaggaattccagcagcagcagggagtcgtgctcccctccatggcgagcagcaagccggcgccctctccatttttcccctgctccatggcgccccctgctcctccctcggcgcgctgaagcttcccccatggcagcgagcttgcagttgccgatggccagcgccctgcacattgtccgatcccctcttcttcccaaacagcgggcgacgttcatcttcctgcttccagatgggct

SEQ ID NO: 142398 - DNA, 276 bp, Zea mays
  Clone ID: MRT4577_6134C.1
attgggtacctcgaggccggccgggcgccaaaaggcccgccgtgagcagctcctctccgcgtagatatggctagtaattctggagcagctagtttcaccgccgacgctcatatattgctgaataaggactggttgcacacttgcacttagcacgttgtgcagtgcagccgaggtttggatgacttctgcccctctgttccatttcagaattcaggtttgcatgacccctgccctacatggttgagatcctttaaaaaaaaaaaaaaaaaagcggcc

SEQ ID NO: 142399 - DNA, 200 bp, Zea mays
  unsure (1)..(200): unsure at all n locations
  Clone ID: MRT4577_61350C.1
tcgggcgcatccgatcgttccttggggacgatgcttcatcgcgatgtggtgngaggcggtgaggcgccggttggtcgcgacggcgcggcccgcgttcctccgggcggcgggggcggaaaaaaacttccgcgccgtggtggtgccgcgtttcggtgggccggaggtgctcgaggtcangcaaggcatgcctgtgccccatc

SEQ ID NO: 142400 - DNA, 430 bp, Zea mays
  Clone ID: MRT4577_61351C.1
cggccttcactggctggacccacgcatgcgtttggttgctcgcagcagtaccgtgcgctcactgggggtgaactataaaacagatgcgtatgccaccaacatgatgggtgctgatgacccacccctggttcggtatatcacactctctgccatgtgccttcaggctatgatcactgctgaggtgcttgagcagatgatggatgttcaaaacaggcccaccggctactagggggagtgatccccgatatctgcacataatgccagtgaggttaccctgcaggaggtcctggcatgggctatggcttgattctctagttcagattactgcacggaggggaacatccgtgaagataactgatcgactgtatcatcacgatgacagctttaaagcgatgttacacactatagggcatgcagaagaacttgttga

SEQ ID NO: 142401 - DNA, 323 bp, Zea mays
  Clone ID: MRT4577_61352C.1
ccacgatccataactgtggaagatgatgaccttatcgtatggacacgaggaaacacctgggaatacggaacagtcaaaaccttatgtgcaaaaataccccacatcgacgcacgtaacaacaagttagtaccatccccccacttttcacacaggctctgctacaatatgactcactcttgcctgaactgcatataaagctgtaccagattctaggctggagcacgattacaacagcgtctattccactgcgccctggaatccccacgcaagatacaccagcttgacggtgatggtcttgagcctggcaccggaaacggacacct

SEQ ID NO: 142402 - DNA, 136 bp, Zea mays
  Clone ID: MRT4577_61353C.1
cgccctcgtcagttgcgtctagttcccaacctataccggattcgatataattgacccgtgcgattgaaatcgaatataatcagccgttttagagtttcccaagggagaaagagagaggaaaggggcattgatcaag

SEQ ID NO: 142403 - DNA, 291 bp, Zea mays
  Clone ID: MRT4577_61354C.1
ccaagcctggaaaggggaccaggatgaattggctgcggcctactgcgccggcggcactgggttgaacgatggtggatcgatggagaccaagaacgatctctccgccgacagcggcatgacgatggagacgacgaaccgcggagcgcagaagcgccactggggacactacgcggacgagagcctgcacacgcgcatgaaggcccacgcgcagctcgactacatctacacggacgacgccggcgagcgcggatactaagccaccaggatggagtatgccggggctgaggacaa

SEQ ID NO: 142404 - DNA, 367 bp, Zea mays
  Clone ID: MRT4577_61355C.1
ggggggaaaaaaacacatcttacatttcatacataaataaaccatatgccaacgagccaggaaaacaaagggcaaaaaaaaccgccgacaaaataaggaaaactcactatgtgacaccccgaaaaatgggtaccccaaacattaaacaaacgtccagcactgccccaccaaaaatttcttatacacaggaaaaaccatttttttaccgggcaacattaattcttacaccactggcaaaaaaattttacgaactatgcgggacaaactgggggcaccggggaaccgcaacccccttaaaaaaaaaaggttatctccccttaaaaaaatattatacacatgggcccgggccttaaaaaaaaaccccttt

SEQ ID NO: 142405 - DNA, 237 bp, Zea mays
  Clone ID: MRT4577_61356C.1
tgcgaggccgaagcttttgatgaaatccttagtgataggggggatttttgtgcatgcatcgacgcccgaggagctatctcgctgctcgaaaaagctggctatgagcatgtgaaagctgtaattcagccagaattctcagtttcagcgagtgatgtcaaggatccttcagccgaagcgatcgcctttagtggaaaattttattctgaagtatgcgtgaatggtggccgtaaaatggca

SEQ ID NO: 142406 - DNA, 187 bp, Zea mays
  Clone ID: MRT4577_61357C.1
gcagctactcaatcctcagtggctacacgacgcagagatatacttgaaacgccaaccaagatccgattctttgtgtacagaaagaggggagataccagctccgaagggagacgattatcacagaggcggggtgtgagaaaaactatgccaagccgagagaataaactcgatgtggacacatcctcct

SEQ ID NO: 142407 - DNA, 271 bp, Zea mays
  Clone ID: MRT4577_61358C.1
ctagttctagatcgcgagcggctgttctcgatctagaactagtgttctacatggcgagcttcccagcagggaggagcgacacgccgcctatcaccgtggcactggcactgtcacccccatgaaaccgcagcaacacgcgccttcctgttcctcgagcgatccagatcgggcgtccgatgtgttcctggaagcgtcaccgaggcataactcgccggtcccgatccccaccgcgcacaggcagcagcagcagccgcatccgtacttcaaggtc

SEQ ID NO: 142408 - DNA, 801 bp, Zea mays
  unsure (1)..(801): unsure at all n locations
  Clone ID: MRT4577_61359C.1
cattgggtacctcgaggccggccgggcttattgtctcaccattgcttttgtccttttttattgacacgtttgctgtgatagctacgcggtgcagatctcaacctcggaagcttggtactacataatcgatacgcatcccgatcttctctcctctaatcctttctctttgatatcaaagccaaaatgccttcatacacatcagtccacctcgccgagcgacctacggacggcatcgtagctggcaaaaccttcacacccaagtctcacccggtcccctcggcctcctcgctcaaagatggcgaagtcctcttccaaaccctgtacctctccattgaccccgccatgcgcggctggctcaatcccacacgctcctacatccctcccgtacagatcgatgccgtaatgcgtggacagggcatcggcctcatcgtcgccagcaaaaatccaaaattccccgtcggcacctacgcaaaagccatgtgcggctgggccgaatacgccattattccaggaaaggacgttgagtccctagaccttcccgaaggcgctgtaccaacggatgcactgggtgtccttggaatgacaggactaacggcgtactttggtctccttgacgtcggtcaggttaagccaggagactttgttgttgtgagcggagctgcgggcgcacgggaagcgtagtgggtcaattgctaagctcaggggcgcaaagttctagggcttgcgggcgagggacagtaagttgcgtggcttaaggacacgcttggnattcgacgaggcgctcaactacaaggacccgga

SEQ ID NO: 142409 - DNA, 353 bp, Zea mays
  Clone ID: MRT4577_6135C.1
ggacatgtcttttggggcgattgggcctttccgtgagttgggtgtgcactaaagaactgttgggctccgggcaaccctaatttgttgggcctcggccaaccccacctgggttgggtgtatcactctccgggcgacggctcctgcgtcctccctctctgtgcggcagctcctggtcccggctctcctgtgctccctcctccagcgcgccctccctgctccctcgtcccgacgcggcgcacggcgaactccggtattccggtgctccctgctctcaaagtctcggggtccctctgttagtcacttgacttgttatctagttatgtaccctctgtcccaaaacaaataattttctg

SEQ ID NO: 142410 - DNA, 185 bp, Zea mays
  Clone ID: MRT4577_61360C.1
gcgatcaaaatttgagggctagcacataacatatgctgtaaagattcggacagtacatatacaggccgatggtgctaccgcacacacgagagaccacgacgcttcatgctgtagcacacacacagtctacatgatgccgagtcccgtcaggggaacacatatgcaaggggagcagagcacgtatg

SEQ ID NO: 142411 - DNA, 194 bp, Zea mays
  Clone ID: MRT4577_61361C.1
gggactccggcgtcgacgcacgcgaacgggctgactggtgctaggccgacgatctgtagatgacggatacggtgcagatcgggaacatgttctagtttctggcgtttacctcacttagacctcttacctggcgccaatggcaagtcttcaggagactctgtgcactatggagctcctggtgcggaaggaggtcc

SEQ ID NO: 142412 - DNA, 533 bp, Zea mays
  Clone ID: MRT4577_61362C.1
ccaagctttttttatttttattttttttattttttgtttttttttttttttttttttcttttttttttttattatttttttttttttttttttttttttttttttttttttttttttttttttttttttttaaaaaaaagacccgggggggcccccccccaaggggaaattccacaaaaccgggggccgttactaagggaacccgaatccgcccccaacttgggataacaaaggaaaaaaatgcttcctgggaaaaaattgtatcccctaaaaattccccaaaaaaaaaaaaccggaaacaaaaatggtaaaccctggggggcccaaaaaggggacaaacccaaattaattggggttcccccaacgccccctttccaaaaaaaaaaaccttggggcccacttcctttaaaaattcccccaaccccgagaaaaaggggtttgggatttggggagcctttaccctttcctgcaaaatgaaaggaggggcttggggggtcggggggggggaggggtgaaaactcactaaaaggggg

SEQ ID NO: 142413 - DNA, 769 bp, Zea mays
  Clone ID: MRT4577_61363C.1
ggtaccctccgggtcggccgggccactggatcctgggattttctgcagctgaggttccggggccctctgtgtggtccatcgtatggttagccttcgaccatagaatcgtgccacatagtttaaatcagagaaacactagttattcaatatatatgttgcgttgcgagtccgtcttgactcgtttcagccgtagcgacttcgtaataacctcgactacgtattagtaatattatttggccgcaatgcatgttttcattaattaggtagttaatccgaggtttatttgaacgtcattttaattaaaattaaggtatagttttaaatgatgattttatagatgcaaattaatgtggttagtgccgacttagatgatttcaactaatattcgtttaacgtaaacgtgtagtctgtttagctttcctcgcgcgtcgcgcgtggtctgcgtgctgagttgtgtgagtcctcgcgtcgttgcgcatcgttcgcgcgctatcgcacgttgttcgcatgttgttgcgcgcattattttgcgtgtcaatcgagcgatgtttgcgcgtcgtcatcattccttcgcgcgttcgtgccgcgcgtctggttcgcgtgtcgcgcatatcccgcgtgtcgatcacgtgtgtcgtacgacgtgtgtgcgtaataataaattgttttcgcttataacacacatgttaataacgttaattcgtcatgtcacatattttagataattaacttaatttttgctcgactaatatttattagtttaatatcc

SEQ ID NO: 142414 - DNA, 2906 bp, Zea mays
  Clone ID: MRT4577_61364C.1
cctgcacatcgtcatggccttcggcaacagcatccccgtcaagaacaggctcaccaggcaccaggacaagacctccttcaccttcgatttcacaacgggcagagcttcggtggacgggtccttcccatacggcctgcggcgtgcgcacggcgcgctgaacgtgttcgcgtggggagtcctgctgcccatcggcgccatcctggcgcgctacttccggcggatggacccgctctggttctacctccacgtgggcgtccagctcgccggcttcatcatcggcctggccggcgtcgtcgccggggtggcgctgtacaacaagatccaggccgacatccccgcgcacagggggctcggcgtcttcgtcctcttcctcggcatcctgcaggtgctggccttcttcctgcgccccagcgccgactccaagtaccgcaagtactggaactggtaccaccactgggcgggcaggctggcgctcttcttcgccgccgtcaacatcgtgctcgggatccacgtcggcggcgccgacagctcatggaagatcggatacggcttcagcctggccgtcctcctcgtcgccgtcgccgcgctcgagttcatgctgtggacgaggtggtccaagaacagcaccgccaccccgacgtactaggaacctgctgctgcacgtaccttgttgtttttccggggtcggatgatgttttgtgtttgcctttgaccttgttttttttttgttgttggtggtggtggtgtatctatatgatatatatcctttggaactgcctgcaatcgcgtcagcgtgcgttcaggcaagtgcactgccactgcccgtagttcctgttcaccgcacgcctggtggtgtagtggatcctctatgacgccgcatgcgcgcgcgcgcggcgtcggcgacggcgtcggcctcctccctcctcccctttcccctcgccgcggtcgactccgcgccgccgacgtggtgccccaagaccagccccgccaccccggccaagaacgccaccgcggtggcggccgcccttttttttttttttggtcccagccatcatgtggcgtatagctacgccaccaccaccaacaacaaaaaaaaaccggggtcaattgcaaacacaaaacatcatccgaccccggaaaaacaacaaggtacgtgcagcagcaggttcctagtacgtcggggtggcggtgctgttcttggaccacctcgtccacagcatgaactcgagcgcggcgacggcgacgaggaggacggccaggctgaagccgtatccgatcttccatgagctgtcggcgccgccgacgtggatcccgagcacgatgttgacggcggcgaagaagagcgccagcctgcccgcccagtggtggtaccagttccagtacttgcggtacttggagtcggcgctggggcgcaggaagaaggccagcacctgcaggatgccgaggaagaggacgaagacgccgagccccctgtgcgcggggatgtcggcctggatcttgttgtacagcgccaccccggcgacgacgccggccaggccgatgatgaagccggcgagctggacgcccacgtggaggtagaaccagagcgggtccatccgccggaagtagcgcgccaggatggcgccgatgggcagcaggactccccacgcgaacacgttcagcgcgccgtgcgcacgccgcaggccgtatgggaaggacccgtccaccgaagctctgcccgttgtgaaatcgaaggtgaaggaggtcttgtcctggtgcctggtgagcctgttcttgacggggatgctgttgccgaaggccatgacgatgtgctggtgggtgaggcggtaggagaacctgagctggaaggcgaggtagatcttggcctgctgcaccacgacagtgtggtcgtggtcgttggaaacgaggaagccacggtcgaccaccaccttggagctgctcttgccccgcagcgcgaactgccggacgtgggggagccccttcttgccgatccaccccaccatggcgctggagccgaccatgaggccgtccctggagaaccccatgcccacccaccccgtgctgtacatcgtggacagcaccacccgcagcacgttgtccttgtcctggtggtaccggagcacgaagttgttccagaccggctggcaggccaggccggagtagttggcggcgagcacgggtgggaggtcgccgctgcaggtctccatctgcgccgtcgccaccgacgctgccacgccgagcacgacgagcagcgccgcggccaccgacgccgccgcacgcgccatgtcacccgttcctagctaggtcgctgcctgcaggctgcagccccggcgacgacgacgacgcgagacaactggtgcacggactacggggctcggccgcgggttgctggggagtttagggaggagggagggagggaccgagattgttgggaagttgcggtcagtgtcccgccgcggcgacgtccccaatcgcaccttttttttttttttttttttttttttttttttttttttttttttttttttttttttttttttttttttttttttttttttttttcccgggcctcgaggcatgttatagccgtgtctgatatttggcgacctcttcatgactgccgcctttgcagagtggattttctccacacatgtacatgtggccatatataaagacttgccctcaactatccattttgctttgaggttcgtgctggtagaaggagagagagctggaaatcagcggttgagattccttgtgtggccatgtaaaatatcataggcactaaaagctaagcaacaatgtccaaacttgaatgtatagtgtgtcttgaactcttgttgttttgtgtattgcatactcgaaggcatgtatatatatatgttcggtagcctgaattacatctc

SEQ ID NO: 142415 - DNA, 259 bp, Zea mays
  Clone ID: MRT4577_61365C.1
ccctacccctagcccacactctctcttctatctttttccctctcacgcacaacgcgcgtgtctcctctgttcagggcgcacactgtttcaagcattgatcctatcttcaagctccaattgcggtccaactcctttcctgctccatgtgcgcatttacctgttcttcctgttcatggcgccacactcccttctcttcacctttacctactgcccttcttcttcactgctttcatttcatacaatcctttattcttattta

SEQ ID NO: 142416 - DNA, 377 bp, Zea mays
  unsure (1)..(377): unsure at all n locations
  Clone ID: MRT4577_61366C.1
attattattaaaaaccggggcccagggggatacccggttgttgcacttttttggccccttcaaacaagtgggagcaggtgagagcgggggggggcacccctccccccgccccccaagggggaggcaaaaaaccctaatagtcgctaggggcaccttgggccccagggggccccagcggcccactggttatcccctggtaggcctcttttagccgcccccggccgccctcggggcgggtgggtccggccctggggaggccctgcccatgcgggcccgggccgncnggggcccgtcgcaggggtttttggccccgtttgccgggcccggcgcggcccccgcggacccccgggggggcgggcggaagcggaccctggggg

SEQ ID NO: 142417 - DNA, 428 bp, Zea mays
  Clone ID: MRT4577_61367C.1
gagacacccaacttattattattatggcccacataataaggaattgtttctggcacccttggttaaaacttaccattgtgcctgctttctaagaacaccaactttttctgtgaactgggactcccttaataggtttatatctacaacaaaaaacagggtgtttttgtgaaccgacctgacctgtggcacaaaagaagataattaaggggaccttggttgccctttcccagcccattacatagatgttggcacggctgaccaccagaatgggctttctgggaattagatgccatatcaacacacctgttcaacagcaggtgctgattctccaacctggttgtgttattatgaaggaaaaatgctgggtggagactgaccctcacctacatgattccccaggctaaagtcaaactttacttgcttgtact

SEQ ID NO: 142418 - DNA, 552 bp, Zea mays
  unsure (1)..(552): unsure at all n locations
  Clone ID: MRT4577_61368C.1
tccgatctgcacatagntggatcatgaattatgtggttgggagggcttgagtatgtcaactagatgacttggaatgtttgcttgggctcccacactttgaagtggccggttggggtggtatttatagccaccaaccaaattgtagccgttggagaaggctgttggcgatgggcgcactggacagtccggtgcgccaccggacagtgtccggtgcgccgccacgtcatcttgtcgttaggccctggagctggtcgaccgttggaggctttgtcctcatgtggcaccggacagtccggtgtcacaccgaacagttcggtgctcctctgaccgtctgctctgacatctgaattgtactgttcactttgcagagtcgaccattgcgcgcagatagccgttgctccgctggtgcaccggacagtccggtgacacactggacagtccggtgaattatagcggagctgtgcctgggaaacccgaagctgaagagtttgagctgattcaccctggtgcaccaaacattgtccggtggtgcaccggactgtccggtgtgcc

SEQ ID NO: 142419 - DNA, 421 bp, Zea mays
  Clone ID: MRT4577_61369C.1
gttggactccatgatccaggattgaacattcatacaacagaggggattattacctatatgccctacacgagcacatggccaatgcatatatgaatcacacaagtagtaattcactatcagtgcattgaacgattggtatcaagcgtgaatgccagcttctgtagaccgtagatgactcatggaatttgcattcataagcactttggacactgaagcacctatatattcccacaccaacaaatctgttgcagtgtaattggtgtcgactgcttcgcagtcagcgttgaatgtcggcttcctcggactttggtgatgcacgcttggcaacggaatagcctgcttcgacttcatcgctacaggagaatgcgagcttctgcagtttctcggacgccctggagttgaacaccagcagtggtttttt

SEQ ID NO: 142420 - DNA, 955 bp, Zea mays
  Clone ID: MRT4577_6136C.1
ccggccgggccggcacgcggctctattgatgtgcctgttgcagcttataaagaagcgcctgttgcaagcaagaaacccacgcgtccggcagcacgcggctgcgctcgatcaggcatcagtgatgtgctaccgcctaccgcgtatgtatcgccgatgagcaaccccagcttcgaccacagctacgagctccctctgcggcgaaacctcctgcttctgcgcgacctcctcgacctcctccgcttcatcgccggggtgatcctggaccgcctcggcgtcgcgccgtgccagggcgaggtgcgtctgccaggacaggctttaggcggcgtcggcgagcatgccaacgatgttgacttggaacgcctcctggaggcgaggctgtgggagaccgtgacgcggtcgctcacggctccgcggtacaggcggcggcgggttgcgcctgcgcagccggcggacgtccagctggacgcagaaggcgacgccgagggcgcggccgtctgcgcgatttgcttggcgggtctggaacagggagatttccagacggtcgtggagctgtgcggctgctcgcacgtgctccacgcagcgtgcatcgatgcttgggtccgcagtggcgacgatgcggccacctgcccgctgtgccgcgcgcccatgttgcccacggcgtgggacgacgagcagagttcgttcggcgctcgccggggtgactgaggtctctgtctctctcccgaatagtaattgctgcgctagcacgtctcgacagacagacagatagatagataaacatacgccatcgtctatagcggaaagatgcaataatgtgtatgcatgtattcgcgcggatcgatcgtttccctctgaactaagatgctgtttggtttcggcttacaaaaaaaaaaaaaaaagaaggagacaatggaagagcaacgagacaatgacaagggactacaacatgaccaaa

SEQ ID NO: 142421 - DNA, 348 bp, Zea mays
  Clone ID: MRT4577_61370C.1
gggttgggggagcccccaaaaaaagttttattgatctttgccaagggagcatggacctcattacccttgacattttccaatcctttaaagatcccccagcccattttcatacaacattttcccccgaaacatgtttccccccttttaaattacataactcaagccgggagcatcctttttgcaacctaacaactggatagggataccctgatcagtaatgactaatgagtcgttatccttccctggggaacaagagagagctcctttgttacagctcagctagaaaactctaattccctatttccccctagcaaatttattagtagccctctctcatttcaaacttgg

SEQ ID NO: 142422 - DNA, 314 bp, Zea mays
  Clone ID: MRT4577_61371C.1
aatcttctatactctacagccctcgccctttttttttttttttattaagcctccttacataagagttttttttcagggggaaaacattcatatttatatataaaaaattacattttttttacctactagcccaccctttctctcactatttcaaccaatcttccttttacacatttatctaccctccaatttctcacctgtacctactaacgtaccatatttttctttaatcaaccatattatagctctacataattattaacatatctgtatactaatacccaattattttactatctcaataacaaaaaaca

SEQ ID NO: 142423 - DNA, 965 bp, Zea mays
  unsure (1)..(965): unsure at all n locations
  Clone ID: MRT4577_61372C.1
gattggggaataacgtgcgggggagttccaggaaccctgggatgccggcgcggccgcagtgccactaccacgccaaaccagagcgttcaagtctgaggcgatcggtgtcatggacgccgccggcattggagcgagctccagcctcgacggcgccgtcatcggcccgtacgcgacgagcctcaacctcggcggcggcggcggcatcctgcaggaggccctcgcgcaccaccaccaccaccaccacggcggcgccgacgcgaggttcgtgcaggcgtacggcgacatggccggcttcggcggctacgacggcggcagcgtgtcgctgactctgggcctgcagcactgcaacgaggccggcgccggagccggccccgctgagccgcaggccctcctgtacggcagcgccggcgacttcgacttcatcagcggctccgaggacaggcagcggttcgggtcgtcgcagctgctgcacgattttgtggcgtgagcggctgcactggacgtcgttggggaataacgtgcgcggacggcgtcagaagcctgggatggccggccggcgccgccgcgggtatacctaccaaccatatgatggccgtcatggtacatggtctcaaattaaccagcaaggttaagcatgcatatatacatacacatatatatatataaggtgtggtaagtgaggtagcataagcagggtaagctgtatatgatatgaggtgtggtataaagtaagtgtagggattattattggtattatttttggtagcttgaagattcgtctaatgatgattcaagtccggccagatatggtgtggtgttgttggacctcaagtgagtccatgtacacacaaatgtttcatgttttgtactgtaccagttgttcagttcagcgctaacaacaatgcagaaacattaagcatactactctacttttctatanctatataaactcatgatttgaactt

SEQ ID NO: 142424 - DNA, 647 bp, Zea mays
  unsure (1)..(647): unsure at all n locations
  Clone ID: MRT4577_61373C.1
aattcggcacgaggccacccctcgtcctctttcggcgactctccaatccagcgcggcccaaggatgacgaggtcgacgagatcttcctccatgcagcgctgcttgctcttcctctgagcctgcccctgcccctgtcccggtcttgtccgtctggatttcgctcaggcggggcctttcctctccttgggagtttctgcgacgactgctgctgctgctgcctgcctctgctagctctcgtcgtaacgtaaccgccgctcctgctcctggtgctcggtcgatgcacgcagcgtagcaaccggcggcgagaagaattgcctgcttccctccctcggcggcgctcgcggccgttcatgccctgcaggaaaagagccgcctccttcccggatcgcgccgcctctcgccggagatgggaggctcccgctggctgctccacttcctgctcgtctccgtgctgctgcacgtcgtctggtccctggagtcccaggcgtgccaccccgccgacctgagggcgctcctcgacttctccggcggctgggacagcaaggccgccgggctcgtcgggtggggtcccggngccgncgccgncgncgnctgctgnntctggacgggcgtcgcctgcgatctcgggcgggtggtcgcgctggatc

SEQ ID NO: 142425 - DNA, 368 bp, Zea mays
  Clone ID: MRT4577_61374C.1
agctggccctggccatcgaggccggcaagatcagccctcgtgatgatttcaaggctcgtgcccgtgtcctggctgacgacttcggctgggatgtcactgacgcccgtaagatctggaccttcggtcccgatggcactggtgccaacttgctggttgaccagaccaaggccgtccagtacctcaacgaaatcaaggactccgtcgtctctggtttccagtgggcttcccgcgagggtcccattgctgaggagcccatgcgctccatccgcttcaacgtccttgatgttactctgcacgctgatgctatccaccgtggtggtggccagatcatccccactgctcgtcgtgtcctgtacgcctctgctctg

SEQ ID NO: 142426 - DNA, 354 bp, Zea mays
  Clone ID: MRT4577_61375C.1
gaatcgtggggaataagcatgtgtgctactgcagtgctaggcagtgtcctgtagaatggagcgagaagctattcatggaccctctccagctggatagacagacttatgccaataccataacacgctccccccatgtgctatactgggcggaggcgctaagcttttacatgctattgtcgctctgtgggactatcttgggctcatcttggggaacccggtgctcctctgaaaactagccttttgggtggcgaaaagacgcggccgtcggatactagtacaggctgctgcttcggaatgagatctatgatgagggatacaaggagcggtaagctaagaatgcctagatggggagtc

SEQ ID NO: 142427 - DNA, 324 bp, Zea mays
  Clone ID: MRT4577_61376C.1
gacttttatcgacagactggcctttaactatttttgaattcccgaatagccaaccttggtacccacgagggttggctttgacagccttacatcacacttatcttgaaaaggcatgcacaggatccacggctgtacttgggactgaggcctatgggttggtatacacgggccctatacacaacgaactaccatcctacattgtggttgataatatattcctgctaaatcgatccccacagaactactcttacgtgcgagagacgacagtggacctgcacttctataaatatcttaccaggttgcttggattatgcaaacaaggaa

SEQ ID NO: 142428 - DNA, 480 bp, Zea mays
  Clone ID: MRT4577_61377C.1
gggggggggtttttttttttttttttttttttttttttttttttttttttttttttttttttgggggaccaaaaagcaccattttttccttaagataaacttaaaataaagcctgagggggggaacaacatccatcaatccggggggcatgctgggggaaacatgggtctttttaaaccgagggtgaacacaggattaacaactgacacaaagggaccttgcaattaaaaacacaggggggggacaacaaacacgacacgaacgaaaataaaccctttggactaggggaaacattacgggagcaaacaggataacgtgggcgggcgggccccaccgtttaatttctccagttccccggggaggtgccgtaacccccgccacgggtgccaccgccctaaccggcgccaccaccaccgtaaggcgccggccgcaccgtaggcgccgccaccgccgtaggcggcaccgccaaaaaggggcccg

SEQ ID NO: 142429 - DNA, 817 bp, Zea mays
  unsure (1)..(817): unsure at all n locations
  Clone ID: MRT4577_61378C.1
gccggccggttcggggacttctcccagatccagatcgtttccccagatccagatcgcaggcgtgaagggcaactgttaccagattgcaatctattcccgagcttcgaggaatcgacgatcaagatttggtgaaccaccggtcctgagatcaagctcttcgagtcctacgagatcgaagaccctgagcatctgtttggtgaaggcaagtgtcctctgacctattatgtcccatttactttataattcatcaacccgcataccatgatcaacctagggattgactagcattctgttttcctgtccttgtttaccctttgggaattagttactatgattagcattctgctattgctttaacttaatcaatgaacatgatgggactatttatgatactgttatcctgatgatgttgatgatcttgtgatactctagggggctcaggctgtttcctgagtacctctccgtaaggacctgttcgttgagagaccacccgggataacagtgcaaccatgagggtggaatggggtgcccttagctaattaattagatgaactaggagtgtagttgcttcgccgtcgtgccgtcaatggggtccaggcacagtgcttgctctgccgaggtgnngtgccgaggttctttcgttttgctttttagtcgccctcctgcggggagaggtactgtgtttatcaaactggagaaacctaacgagcagctatgacctctagggaatctttgtaaaaggcttcgtagtgaatccctggcatttcacttgngaagatgaataagggtcttgcaagcccggggctagagagggaat

SEQ ID NO: 142430 - DNA, 303 bp, Zea mays
  Clone ID: MRT4577_61379C.1
tatataaaccactggtttctccatcaatggttcaaccatacagaaccgctcattataaaagtttgctcactcaacaaaaaatcctcttattcaattgactcaatactatcaacttaactctaaaatcctatttaaagcacaaacttcaccctttattcacacatttacactctataccatattcatctcatacacctattcaaccttcttcaaccactccaaactccatccataaataatcttaaaattactccacacaattaaccctcttcactaaaatcacttacaccttcaatagcttca

SEQ ID NO: 142431 - DNA, 464 bp, Zea mays
  Clone ID: MRT4577_6137C.1
ggagagggaaacgaacaacttccacgactaaagggggaaaacattggggtaaaagcccccccccattaccacaaaggggggggccccagacagaagcccccacatggggtcaggcccacgaccccggggcgggggaacaagcatccacaaaacaccggtacaaacgggggaaaccacgattcccaaaccccaaaataaagggctggggacaggcccccccggatctagctaaaaaaaccaggagcattattttattactttccgccagggccaagcaagcattcctcgcccgggacccccacaggaccccccactaaaaaaaacggggggcaaaaaacgggggggctgatcttggacgggaggggaaccccccacttgctgggcaacgcgggggcgcggttaaagaaagggcccctcccgtgggccccgttggcaactttcttgaggcaaccccaaatggggcg

SEQ ID NO: 142432 - DNA, 1238 bp, Zea mays
  Clone ID: MRT4577_61380C.1
cgcaagccaagcattctcacgctagctgttctcttcttgcctcatccatcgtgcatctatattctcggcgcgagttacgtctttttcgtcgtccggccggcgagcattttgcttctgtgatcgatcggcgcgcgcgacgtacggccatggagatgatcgacgcagagctgcgtctgggtccgcccggcagcagcaacagagacgtcatcaacgtcgtgcagccttcgttggcggcggcgaaacggccgtcgtcgtcggtggtggagagcgaggcgtccgggacggacgaccatgaccatgacgacgccgcaccgacctccaaggtgcaggtggtggggtggccgccggtgagagtgtaccggaagaacgcgttccacgcggcggcggaggcgaggaggaccaggcggggcgagcagcagggaggaggaggcctgtacgtgaaggtgagcatggacggggcgccatacctccggaaggtggacctgcggacctacgcggcggctaccgggatgagggacgcgctggacgcgctcttcggctgcttctcctcctcggccgacggcggatgccagttcgccgtcgcctacgaggacaaggacggcgacctcatgctcgccggcgacgtgccatgggagatgttcatctgttcttgcaagaagctcaggatcatgagggggtccgaagcaagataaccaagcaacgaggatgcaaggacctgttgtatgcatatgcatggaggccggccggactcatgctgtcatgcatgagagtttgagagaggagaagaagacgacctactggaactgaaggcggttgggtatacctgcatggggagggagcccacgcatgcacgcgcgcgtcgtcgtgttctacggccagctagccaccagaccggctgccggcccatatgcacaccacggagatggaggtgatggttcaaggatcacggcggcgtacgcgcgcgtcatcagtcacgccgtcctgtcatcagatgagatggaggggtgatgcatgagggcagtgctagctgtggacggctggctggacgtgcagatcggagcgagattgtactgtgcacgcacataagctttgtacagtggcatgtgctggtcatctgtaattttgatttttttccccctccttttgtaagtgagcaagtttgaggaaaaaatgtatgaatgaagaaaaggagaggggggatttcaaatttgagttagttgccgttaagcaaccaaagg

SEQ ID NO: 142433 - DNA, 580 bp, Zea mays
  Clone ID: MRT4577_61381C.1
cttgcaagaagctgaggatcatgagggggtccgaagcaagatacccaagcaacgaggatgcaagaaccctgttggttgcatatgcatggagaggccggccggactcatgctgtcatgcacgagagagaagaagaagacgacgacctgctggaactgaaggcggttgggtatacctgcatgcatggggagggagcccacgcatgcacgcgcgcgtcgtcgtgttctagccaccagaccggccgccggcccatatgcacaccacggagatggaggtgatggttcaaggatcacggcggcgtacgcgtcatcagtcacgccgtcctgtcatcagatgagatggagggggtgatgcatgagggcagtgctgtggacggctggctggacgtgcagatcggagcgagattgtactgtgcacgcacatgagctttgtaattcattctaggggtgcagccgcacccacgtagaaataaataagaataccgtggttagagccaattttttttgccatttatatatacttatatatatacggtaaacagttattacacccacaagacaaacgtctccgctggtttgctct

SEQ ID NO: 142434 - DNA, 1285 bp, Zea mays
  Clone ID: MRT4577_61383C.1
cccacgcgtccgcccacgcgtccggccacgcgttctcacgttttcgtcgtccggccggccggcgagcattttgcttctgcgatcgatcggcgcgacgtgcacggccatggagatgatcgacgcagagctgcgtctgggtccgcccggcagcaacaacagagacgtcatcaacgtcgtgcagccggcgttggcggcggcgaaacggccgtcgtcgtcggtgctggagagcgaggcgtccgggacggacgaccatgaccatgacgacgccgcaccgacctccaaggtgcaggtggtggggtggccgccggtgagagtgtacgccgccggtgagagtgtaccggaagaacgcgttccacgcggcggcggaggcgaggaggaccaggcggggcgagcagcagggaggaggaggcctgtacgtgaaggtgagcatggacggggcgccatacctccggaaggtggacctgcggacctacggcggctaccgtgagctgagggacgcgctggacgcgctcttcggctgcttctcctcctcggccgacggcggatgccagttcgccgtcgcctacgaggacaaggacggcgacctcatgctcgccggcgacgtgccatgggagtaagtagtaccgccgggcagcagcagcatctatatctatccatggataaaggaggaacaacaacacctgacctcacttgcgcactgctgtggaatctgcaggatgttcatctgttcttgcaagaagctcaggatcatgagggggtccgaagcaagataaccaagcaacgaggatgcaaggacctgttgtatgcatatgcatggaggccggccggactcatgctgtcatgcatgagagtttgagagaggagaagaagacgacctactggaactgaaggcggttgggtatacctgcatggggagggagcccacgcatgcacgcgcgcgtcgtcgtgttctacggccagctagccaccagaccggctgccggcccatatgcacaccacggagatggaggtgatggttcaaggatcacggcggcgtacgcgcgcgtcatcagtcacgccgtcctgtcatcagatgagatggaggggtgatgcatgagggcagtgctagctgtggacggctggctggacgtgcagatcggagcgagattgtactgtgcacgcacataagctttgtacagtggcatgtgctggtcatctgtaattttgatttttttccccctccttttgtaagtgagcaagtttgaggaaaaaatgtatgaatgaagaaaaggagaggggggatttc

SEQ ID NO: 142435 - DNA, 570 bp, Zea mays
  Clone ID: MRT4577_61384C.1
aaacatacaacccagaggccgaggaaaacgttccacacaggcgggggagaaagaaacaacggaaccgggggggggggggggggtgctcagagctaaaaatgttccaattttttttttctcttccatctttttcccccccctcccccccccgacccagaccggaaccaacccccaagaaaaaaaaaaaaacccggggaaagaaaaaaaaacccgtttttgcagaaaaacaccactcctcaccctccccccacccccccaacccccccccccccccccccaaccccccccccccccccacccgggggctggaacacctcttgggggctggggaaaacctcctctcctgcggaagcatcacccgccccccctcctcttgggggcctggcgcccccccccccctcgaaagcttgctcgtcttttgggaagacggcggcattcccctcttccttctggggcccctcttgggcccccgaaacttcaggggcgtggggggcattgggggcctcttgggcctacccaaaaaccccaaaatcccccccggcctaaaaaatccccccgcccccccctctt

SEQ ID NO: 142436 - DNA, 277 bp, Zea mays
  unsure (1)..(277): unsure at all n locations
  Clone ID: MRT4577_61385C.1
ggtgntggtttttttttaagggaggcggggggcgtacaaaaagaaacatttattgcgagtcccgatctactcacagggcgtaccccataactttggctggaaggaaggagccctccatagcttatacacgagcctatcgaatcgtgccccacaattgggaaccccctccagccacagggggagggagagaacttttttttttctactacaacatgggttcgaaaaccctagaaacagggggttgtttcgcaagccttccccgcctaagggaaaatga

SEQ ID NO: 142437 - DNA, 564 bp, Zea mays
  Clone ID: MRT4577_61386C.1
caaagagtgggcataggattgctggggcacaggaagatagccccataaaaggcaggaaaaggggcgctggggcacaggaaggtagccccatcaacggcaggaaaaggggcgctggggcacagctagatagccccggcaaaggcagaaagaggagtgcggcagcacaggagaataaccccagcaaaggcggcaagaagagccggcggtgaagctaccatcagctcaatgccggtgaaacagtgtacagcttaaccatatatcataggctggtcccttccaacgttgtttgcctgtcaaaaaagtttttgccccagtattcaaactgatgtaacaggaagggttagctgtttctgatgttgttttgtaaggagtatggacagttaggagggaaccctcattttcctgtagagattatccgagctaggctatacatgtctgactgtgtaatgcttaatagtttaatttatatcaaaaaaaaagagtttaacggcattgaatagaattattttatttaataaaaatatagatttatgtgattttgtacaatttaggtggagaagggat

SEQ ID NO: 142438 - DNA, 219 bp, Zea mays
  Clone ID: MRT4577_61387C.1
gcttgttaacatcactctaatgcaaaaagggcagccatacgatcatatacacgaggtattgatgcgaacatggatatggaacggatactaaattgaaatttacaagagaaaaagactttgtattttatgctgcgtaagaatatatgggggaggtgtgcagacatgctcacactggcagggggtaaagcttgcgatatacatggccacaattcggcccta

SEQ ID NO: 142439 - DNA, 615 bp, Zea mays
  Clone ID: MRT4577_61388C.1
cgggtaaacatggttcgtgcttgtcgagcacaaaagagctcgtcttcttgcggtttgtttctcttctggagttctagtaacctggatctgtccctgaatgttgatgaagccagctgttaatttcttcatgcatcaaaaaaaaaaaaaaaaaaaaaaaaaaaaaaaaaaaaaaaaaaaaaaaaaaaaaaaaaaaaaaaaaaaaaaaaaaaaaaaaaaaaaaaaaaaaggaaaaaaaaaccacatcccctccttttttgggttattcctcgccgggggccctcgccgaaaacctttgccatgggggaccagttaaccaacaagaaaatcggggagttaaaggaggccttaacccttttcaaaaaggagggcaacggttgaataattaccaaggagcttgaaacgggaatgccctcctttggccaaaaccctaccgaggcaaagttgcaggacatgaccaacgaggtcaatgcggatggaaatggaaccatcgatttcccggagttcctaaacctgatggcaagaaaaataaaggacacggcctcaaaggaggagctaaaggaggccttccgcgttttcaacaaggaccaaaacggtttaatttgggttgccaagctc

SEQ ID NO: 142440 - DNA, 122 bp, Zea mays
  Clone ID: MRT4577_61389C.1
agcaccgcacgagtcacacactcatggtgaaaatagatcagaattaggttggcgattgacctatgctggatatatataacaatcaagaaagcaccactagggcctcctttggtagagctctt

SEQ ID NO: 142441 - DNA, 229 bp, Zea mays
  Clone ID: MRT4577_6138C.1
actgaaacctacctacctagaataaactggaacgggattgtatgaatttaagccccttatataaaacaaaagagtagagggaactatgctgcgttccgcgtatggtcaccttattggagctattgttgctacgggccctgcgattcagagactcggactaacttttgcatgcttattttttgtgcatacaaaatgaacgaactgaatattcaaaacatgaaagccaaaa

SEQ ID NO: 142442 - DNA, 463 bp, Zea mays
  Clone ID: MRT4577_61390C.1
ttctggtcggacatacacttcgctgtgtgtgtgtgcgcttgatttcagactttcccgtgcacttcttacaagcaggcggtcaaacagatcttgaggtaatcataattagagcaagttcttactatgaaagtgaggactgatgaaactaatagcttgtaatgcggtgattggagcacagtttatggaggcgggctgcattggacaagctcgcatctggaaattgctgggtgtcttgaaccttttgggtgacagaaagttatctcatgtacaaaatgtttacacagcccagttgctaccaattgctgatttgtgtacttcttgggctttaccacttgcacggctcagaaacctgcactatgtaaggggatgctgatggcaattgacctcattttgtaaatgatcctggattatgttggattcatttttagtgttcggtttggcagttgaccaccattgttggctt

SEQ ID NO: 142443 - DNA, 534 bp, Zea mays
  Clone ID: MRT4577_61391C.1
ggaacaaaaggaagtcaaaatggggattttttaaaacacgcaaaaaagggttgatctagggggaaagaaaccaggattttcgccacccagccaaaacttgggaatgggaaaaacaataaaaccggagggacaaaaaagaggggggaacgggctagcctaaccgccgaagccgaagagggggcggccctggggcttgagggcgaaaaaacaaccatgggtgggaaggttttggggggcgcgtgctcggtgtaagggaaggggttgaggataaagtttttaagaaaaaatttgaggaagccggggggttcctcgaaaaaaaacccggagaagggcttaaacggaagggggggtggaacggggaatttgggaccggttcctgagaggggacaaagtttttcttaaagggagagggaataaaaaatggggggaaaaaaagggaaaaaggtgggctcctgggggaaaaatgggtttcgggtaagaaatgccaaaaaaaagaaaaaaaagcgggaaacaataaaagggaaaaaggggggg

SEQ ID NO: 142444 - DNA, 1247 bp, Zea mays
  unsure (1)..(1247): unsure at all n locations
  Clone ID: MRT4577_61392C.1
ctcgaggccggccgggccgggcgtgtccacagatagaagaatccctctccccatattccttttctctgcgccggcaccgccgtctcgtctggtctgctcttccattccgttcgcctttgaaaactacccacaccacaaagaaatcgaagaggggaacagaggagagagaagggagatggcggaggcgacggcgtacgaggagcagcgccggaggcaggtggaggcgaacaagcggaagctggaggagcttcagctccactacctctccgccgccgtcagagaggccgcagccgccgccaagccctcgccggtcaagaagcggaaggcgcgggtgccgcttgacgccgccgactccgtgatggagccactacggcggtccggccggctcgccaacctccccgataagtccgtgcaccgcgaggaggttccaactttttggagaaagattaggaggacgtatggatcagtgagaaaagatctggaaaaccgggtgtacgcgaccgacgaggcgaggagctacgccatctgtaaggcggaggaagtggagcaagagctggactccagcttccccgtcttcatcaaacccatgacccagtcccatgtcaccggaggcttctggctgggcctcccaaatcatttctgccggaagtacctgcccaagcgtgacgagacgatcaccctgctggatgaggatgacaacgagtcctacacgctatacctcgcattgaagcgaggcctcagcgctggatggagagggttcgctatccagcacaagctggttgatggagattgcttggtcttccagctgactgagagaacaaagtcaagggtatcataattagagcaagttcttactatgaaagtgaggactgatgaaactaatagcttgtaatgtggtgtttggagcacagcttttgatcaacaaacttcaacgcttaccacttgcattaaaactatctgtacttccattattctttatggaggtgggctgcattggacaagcttgcatctggaaattgctgggtgtcttgaaccttttgggttacagagttatctcatgtacaaaatgtttacacagcccagtagctaccaattgctgatttgtggacttcttgggcttaccacttgcacggttcagaaacctgcactatgtaagaggatgttgatggcaattgacctcattttgtaaatgatcctcgtttatcttgggatcattttttagtntccagtttggcagttgaccacag

SEQ ID NO: 142445 - DNA, 282 bp, Zea mays
  Clone ID: MRT4577_61393C.1
gctcgccggagcccagtgccgtgagcccagttcgacgccgcggacgccggcgcggagaacttcaacaccagctaggccgccgtgtactgggggccctggcagaatgcccgggccaccttgtacggccagcccaacggggccggcccggacgacaactgtggtgcgtgcggctttcaagcacacaaccagtacccttcatgtacagggctcttgcggaaacagccatgttcaagacgcaagggatcggctctgctcaagattggtgcaggaagaccgtctgct

SEQ ID NO: 142446 - DNA, 125 bp, Zea mays
  Clone ID: MRT4577_61394C.1
ggaagcaccaacgaaaacagccataatttttctaaataccccggtagcaaggcgggggaataaacaccttttacaacatcgggggtggaaaaccacccaatacttcaaaacagacccccataacc

SEQ ID NO: 142447 - DNA, 473 bp, Zea mays
  Clone ID: MRT4577_61395C.1
tttcttgttagggacgcggcccaactatgctctgagggtgagggtgcccaggtcgaagtctatcacctccgggaagaggagacctaacttcagggggccctttgtgaggtgagtctccgggttagggaggccgagtcgtcccttggtgaggccaatgtccacctagagagggaggatgcggagctttcgcgagagtgtgacactactagaggtaggtcttttccgtactcttatgccttctgttgttggttgcttttgccttccctcctcctcagagctccggaggatgttttctcgggccgatggggccaagaaaacagcggaggaggtgaaagcagcagttgaggcccgggtgcgtcaactttcgcttgctcgcgatggcgccattgctacgtcgaccgaggcggcgatcgtgctctctgagcgaagcgccgagctccaggagctctgcttgttcgtcggcaaggtgtgtg

SEQ ID NO: 142448 - DNA, 251 bp, Zea mays
  Clone ID: MRT4577_61396C.1
cggctcgagctagttctagatcgcgagcgtccgcccttttattacgcttgggggtcaacaaatttaatattcatggaaatcttaagaatgaaagggccggtccgaaacttgttcacgtggcgaataacccactagatggaaaagatcctagaataacaaatccagggcctttagcaaacgggtaacccctttctcatatgggccatagcggcagatcaaactttcggggcaagggaccacaagattacctt

SEQ ID NO: 142449 - DNA, 232 bp, Zea mays
  Clone ID: MRT4577_61397C.1
cccgggtcgagacaggtagaagattcagggatatgttttctacaatgaggcgtatggatttccatggtggtaggcatcaagaggctggacataatcaagaaaggggccacaggaagttaagcgagcttgtctctactgaaaggcatgcaaatggactttttgttagaagagatgcatagggtataacttatttagctgatcgcagaaactagggagagccaaataaggcata

SEQ ID NO: 142450 - DNA, 165 bp, Zea mays
  unsure (1)..(165): unsure at all n locations
  Clone ID: MRT4577_61398C.1
ttgtgcgtctaccccactaagcgcacatatgagcagaggtaggattagactacttgaaaggctaaacccacataacctggacacatgggtttcatctgatcatnccgccataccagaaatggtttgacccatgaaaccacttacctccaaactatctaccctaca

SEQ ID NO: 142451 - DNA, 429 bp, Zea mays
  unsure (1)..(429): unsure at all n locations
  Clone ID: MRT4577_61399C.1
gtacctcgagccggcgggaggcttttatgtaccgtgcgagatcgatcgaatcggatccccatacgatctactacctagctaagatacaagactcgaccgaggaggaggagcgcgctaacgncgtatagaaacttggagcatgccattaaccacccaagcgtttgcgcgtcccggntacaggaggtgaccggatctattacatcgtnatcgacactgatgaattgagnaaagctctgaaccgacatgatcacctggtggtggtcatgttctcgacgtagtggaacgaacnctgtaaggcgatgaataaaccgctcaggtacatggccccggctagaaagatgncgcncgtattctgcttggngtacatcgagaagcttaaagatgctgagtggcagcagatccaagtggaggcgctgccgacgttcgagc

SEQ ID NO: 142452 - DNA, 487 bp, Zea mays
  Clone ID: MRT4577_6139C.1
ctcgaggtcgacggtatcgataagcttccatattaagcaaatgaatcttgggaatgcatgtagcagctacattcagctgatgagcttaattgatcattcaataggcaactcttactgaaaagttatcaataataaagagggcacttgaacagccacattaggtgtgaatggacggttttgaagagccttaaaatgtgaacaccaagaaccgaatggccaaaatgtatccagcaatgtgaaggaaataatggcagcttgaaaaactatctctttagccgaatggtcacttagagaacttcaataatcagcacaccatttttaatgtagttcatgcatgtatcattaggtgcattgaatccaacatgcatgcatcttgcacaccacattcggccaacctttcccatgcatcttccacattcggctgaacctaaataaaacaaatgaacctcattaatttaactcaattcagctgaacataatatgaaca

SEQ ID NO: 142453 - DNA, 487 bp, Zea mays
  Clone ID: MRT4577_613C.1
ggggggttcttcttttccccttttttttccccaatggcaaaaaaaaaccaaaaaccgggcccctaaaaaaaaaaaaggcggggggccccccttccctaaaaaaagaccaaaaaaaacggggggcaaagttttttttttgatcagaaaaaaaaaaaaactgtttgggggggggtggaggcataaacctttgtccgtcctagtcggggttgactcccggggctaaacctcctactaaagggggacttcaaaggctcttttccccccccttgatttggccccattggaagggacaaagggcacttttttttttaaaaaaagtaatttcccagcgccggttgcccttggggttggttccccggccttgttgggggttgtcccccagggggggtttaggaggggctccccaacaacttcaaaaaggggggactttgggcccccggggtcgggtttggtgctgagaaacaggatcttgtcctccccagccttt

SEQ ID NO: 142454 - DNA, 1380 bp, Zea mays
  unsure (1)..(1380): unsure at all n locations
  Clone ID: MRT4577_61400C.1
cgagaaaagcgcagtacacgcaacgcaaagaccacgccgctacagtgctctcttgcctgccgctacgagccaacgactcgaacanatacactccaatgggagcgatggtgatggccttgatgagcctcctcgtctccgtcaccctcggggagaggcacggtttcagtggacggttgctccagtcttgtacactcgcggcgcgactgggtggcttggccgagaggggctacagccacgacgtacctcggcccaggcagaggcccacggtgtcagtgtcacctctgctatttcttcacccgtccggtcacttgccggcatccggcctacgttaaaatctctccatcccggcgacgactggcgacagccgctgccggcctactccaggtccccaggtctacgtcggacccttcgccgcggcgaacaccaccagagatctgtcactgattttgcagtcctcttgtcagatggcgagcacggggcggtcgatgctgctgtcactgctcctcttcgcagtgacgctgtcgctgctggagatgtacagggccaagttcgcctcgtcggagctcatgaccattgccggtggattcgtctgctccctcctattcctgctactcctcacctttattggaaactatcaagaagctagtggagatagaactgggtggggtgcagttgttgtagcacaacttgtagctcttattgtagccggcactgtccaccgtgtctgtatcacaacatgcttcctgttttccgctggactcctttacgaggttgacaagctctctggcatgatccttgcgaggagtgagtctaaggtgaggcggcactaagcacagaagcagcacagagagatgatacatcgatatttttatgtaagatgacatattttgtatgtcaaactggagttttggttcgcgctggccatcaggccttttctgctagccatataggggctctggattctggatactggtgcgtttgcaccgaggtcacactctgatgtttgtctaatcaattgactaggtgatttaccaccttttgccggtttaaagataaaataaaacttcagctacactcggccatctctgtttttgtcaaaaaaaaaaaccgcccctactagcgcggagatcggtggagagaggaggcatgacgagcagaggtaggaggaggcatggtgggcgaagaagggaggaggaggtgcggcgggaggagtcacgctgaaggaaccgagcctcgaggagaagagaaaggatgtgggatagataaagaataaattgttttgtgtaataagtgacagtggcaagtaaatacttcaaatccacatgtaggtttgttatacctatttttggaatagggaaagaggtactccagattttgtac

SEQ ID NO: 142455 - DNA, 191 bp, Zea mays
  Clone ID: MRT4577_61401C.1
gcagaaacgagagggccggagcaggcgcagccccgacgatcccaccgacggtgggcctcatacttcctcgtaactgtcttcgtttttttatccaacaatctacatgagccgcgtggactgcgcggggggcgggacaagctctctaagttacctctttgagagcggtgagccccccaaaccagcaggggcac

SEQ ID NO: 142456 - DNA, 225 bp, Zea mays
  Clone ID: MRT4577_61402C.1
gagcggacggtgaaaatcgtccgactgtagcctagtcgacggatttgatcccgcaggccgcagcgcagcggccgtgtccgctgccgccaccggccacagccaggcagccagctcgcgtcgaagaagacgacgtggcccgccaagctcccctgccaaaagaaacaggagggcccgcgtcgtcgcctagtcggcgcgtggtgggagtggtatggagaggggcgcccc

SEQ ID NO: 142457 - DNA, 958 bp, Zea mays
  Clone ID: MRT4577_61403C.1
cattggggccctccgggccggccggccccacggtgtcagtgtcacctctgctatttcttcacccgtccgttggccggccgggatccgggcctacgttaaaatctctccatcccggcgacgactggcgacagccgctgccggcctactccaggtccccaggtctacgtcggacccttcgccgcggcgagcaccaccagatggcgagcacggggcggtcgatgctgctgtcactgctcctcttcgcagtgacgctgtcgctgctggagatgtacagggccaagttcgcctcgtcggagctcatgaccatcgccggtggattcgtctgctccctcctattcctgctactcctcacctttattggaaactatcaagaagctagtggagatagaactgggtggggtgcagttgttgtagcacaacttgtagctcttattgtagccggcactgtccaccgtgtctgtatcacaacatgcttcctgttttccgctggactcctttacgaggttgacaagctctctggcatgatccttgcgaggagtgagtctaaggtgaggcggcactaagcacagaagcagcacagagagatgatacattgatatttttatgtaagatgacatattttgtatgtcaaactggagttttggttcgcgctggccatcaggccttttctgctagccatataggggctctggattctggatactggtgcgtttgcaccgaggtcacactctgatgtttgtctaatcaattgactaggtgatttaccacccttttgccggtttcatgatgtcattttccttcagccataaaaaaaaaaaaaaaagcaaaaaaaaaaaaaaaaaaaaaaaaaaagaaaaaagaacaaaaaaatagaaaaaaaaaaagaaaatgaataaaaagaaaaaaaacactaaagagtgatacagaaaataaaaaaagggggggcccctttaaaggt

SEQ ID NO: 142458 - DNA, 2909 bp, Zea mays
  Clone ID: MRT4577_61404C.1
atggccatagtgcgttcaacagctagaattacacgcgatggagaagaggccgaagctgctgagactgccccaatctccgaagtaatgaggcaatcgggactagttgtgacagaggatgcttctgaggaaggtgcacctgctgccgaagctgaacaggctgacattgaagagggtaatgttgatgaagaagagatagattataacactgtcatgccatccaaacccagccacttggactttggaaagtctactgtcactgaggctgatatgcccatgatgttgaaagctacgctacttcggggaagccgagaagaagctgattcgctttggcgggggagagaccaccccgaagccagaaaatgatgaggtggtagtttttaggagcttcttcaaagcagggttgaggtttcctctgcacggaatgattgcggatgttttggaagatttcgagatttatcttcatcagctgactcctaacgccatcgttaggctcatcgtctttatctgggctctccgaagccaaggagtggacccgcttgccgaagccttctgccgggtgcacgggcttcactatcaggcgaaggctagagaagatgggctgcacgagaatttcggctgctacaactttgcgtaccgcaaagacatgaagaccccggtggtcagctaccgcaccaaatggccatccggctggaagactgagtggttttatgttaaggttgatgagaaaaaggagaagctagttcggagcccgctggacctaaccttcgggttgactaggcccctgtgcgacatgctgcaagggtcaccatgccgagaagttgtgggtgaattccgagttgtgtctgagcatataggtactagagatttggtgcaggaatacttagccaatagagtatttccgacgttaaaggaatggaatatgccgaatcttaaaggagaaaagaaaacgaatgaacttgttcgactgccctatcacttcaagttcaagaaacatttcaaagagccttgccaagaatggctgaaccgagtaatggatgccctgaaatttgaataccctgattatgaacggttaaacaagggtgccgaagggccaaagcgaaaaagagttgtcagtgttatgaagaggcaagctgctaaaatgatagaagaagatgagaaagctttgaaaaagaaaaaatccagccctaagccaaaggtggttgttccgaagaaaagaaaagctgcggctgcgaagcaaaaaatagctgatatagaggaagaaactccttcaatgcctcctgctgctgacgtggaggaaattttaaaggtaatgaccgaatctttacctctcaagctaagtccactaggcccacaactgatgaagcttttacagaaggaggagcctgcgacaatcaagaagcttgctgaaaaaaggcgaaggattattactgttattgatgctattgaagaaacgccaccgtcggtctcagcatcaaaaagaccaactgccgaagctacaactgccgaagctgcggcggccgaagccacaaatcttgagggcgtattttctgatattgataagatgattttggatatggccatggaagaaactgctacagctaccgaagagaccctggccccagtgcccgagaaagagaaggagattgccgaggatactttggaggaaaaggattttaattttgaaaacatacttggtcaaaagctgtctaaggctgagaaggaagagctgagggattacacaatatcatgcggctatcaaccaggagcattgctcttcggtggcgttgacgaagagagcttaggatgcctccgggaccagactggagcgaaggttgtcagcactctagcgaagagtgttggctttccaaagcttgaggtcgacctcaccagataccggcgtcaacatatcaccggtagcttgtttcattctaatttcaagagtctactactaagtaaaaccttgaggatgcaacaagacctcaaggacaagaaaaatgagattataattgagggcttagagggcaaaattaaagaacacgaagctgctctggagaagaaggatttcgtgattcaaacaatggaggagaagaaggattttgatgcaaagcttgaggctgaagttgcaaagagttcgaacttgcaaaagtcattgaaggaacttcaagataaatgtctgaacttcggcaaccgttgcatgcagcgactgaagcaggtcttcaactcagttggagccagttctgaaaagtttaaaccttcagctgaagacctgccaggcatcttcgatcatattgaaggtgaagttgatgctcttgatgaagtcatagctgggcatggtgacttctacgctctactagcttctcgtggcacagctgttgcttttatgaaggctggttgcatgcacgggaagattgttaataggccgaacttcaacttatcaccagcggacttgatttatatccccagcctagcccgaagcatagggaacagatttataaagcaaatatgggcaaagggtgggcgaagcctagctggtgacgaagctcgaagtcacctcaagccggatgacgaagctgaagaacaaagagtcgaagcttagcagacaattcgaagctcaacagatggtgatgaagctcgaatacctagctgtggaagaattctaagaaaactcttgtattaacctttataaagagtattgtaacttaagaatcgttctgtaaatttgtccatcccttgtaatataatttttacctttccatcgatgtatgaaatgctttgatgtggacgaaacttgtattttttgagccgaaggtgaaaaacaccctccgttcttttcgtacacaacgaagcccgaatctgctttttgaagcagtatgattaaaaacgaaaaaactatctgtatctgtatgcga

SEQ ID NO: 142459 - DNA, 132 bp, Zea mays
  unsure (1)..(132): unsure at all n locations
  Clone ID: MRT4577_61405C.1
ttgggtacttcgaggccggccgggatgtctttgcgtcatccctgtatcgncgcgtcacgcattaccgcagacggcgggtgcgtgcgccggaacggccgcgtgaatcctccgcaccgtttcagcggcgacttg

SEQ ID NO: 142460 - DNA, 413 bp, Zea mays
  Clone ID: MRT4577_61406C.1
aaacggggaaaacccctctgaagggaaggggaaaaaacaacgggcccccgccgggaacttttcatttttttggggggggtacaaatctcaggaaatttacaattgaaacagctttctcctgggggttacaaaaatttttatagaggggaaaccctaaaacgatccgtaccggtgcgctccggcccaaacctcccgggaaagggcctccgtttttctcgccaacttggccgccttttttaaaatttggatcacaaacccaacaaacccccccttgaaacaaattccttggggcatcataataacaaacccccccttaaacaaatgccttatttttttggcggggccaacagccacttaggggttatttataataccaactaagtttgagcatagcccaaacctaacaacaaaaa

SEQ ID NO: 142461 - DNA, 279 bp, Zea mays
  Clone ID: MRT4577_61407C.1
caccttccaccatatccccctattccttctatatcacattcctttacaaaatcccaaccacactatttcatatacttttcatctatatttttcaacaaaatttcacaaacactttatcaaattatcaatctacctacatctcatcaccatcttaaaacaatacacctaataacaacttctccaattcaaaccactctctctatttcccaaacacattcacaactcttacacaaaaaccctctttttcaaacttacactatactacactcttcattacca

SEQ ID NO: 142462 - DNA, 572 bp, Zea mays
  Clone ID: MRT4577_61408C.1
ccggccgggaccctgatccgtgcaggcgagcgagcccccattgaagcgcgccgcctccccccgtgcgcgacggcagggcttggtgaacgaggccagtggtccgcgcgcgcctgaccgtgatggggcggtgccggcgccgggtctgatgcggaggccgctgccatgtcggacgtctcgtcagatctcggcggcatctgggcggggcccgtggagcttgacatcgagcaggagatggtgccacattggaatcagtttcggaccttgtgaaggcaatgtacctaaacattgaaagcttcccctgtgtgctgaatgtagcttccaaggacgactctatgtctttgttacctgtattcctgaaatgccatgaatcatgtcctaatggtagtggagtttccaaagtagacccatttcacttgatcataagttcctcacttatatgtttggtccttgttacttgtcctaaattgttggatgactctatgtctctattacctgtattcctaaacaatgattgaaggtcgtccgactaaaaaaaaaaaaaaaaaaacaaaaaaaaaaaaaaaaaagcggcc

SEQ ID NO: 142463 - DNA, 278 bp, Zea mays
  Clone ID: MRT4577_61409C.1
gaaattatgagagccattttaatataattccctccctagaaacataccttttatggaatttttatcactaaaccacatgttatttaaatacgtacatgtttaacataaatacatacatataattcacatgcatacttaacacttatgttaaatatattcaatgtatatacatatgtacacactatatgcatatatacatgtgggtatgtggtatgtgtgcatgtgtgtgtatggccagctacataatttgtgggactaagggcaaaatgaaactgtac

SEQ ID NO: 142464 - DNA, 292 bp, Zea mays
  Clone ID: MRT4577_6140C.1
agcctgatgatgtcaaggcctgtcttctttgctatacaaatcattttctcataaaacatttttttttcaagaggtccttacagcatggtagttgatcaggtacagattttggatcgccatcacctatttggcaagtttgctagtgtggatggaggggtttctacgcgtactgaccagaacctagcattctttggcgggtacaacatggtgacaacacatatcgtgttacttcataagaatccttctgaggatatacatgccttggtcgaacaatactatgatcattttcatg

SEQ ID NO: 142465 - DNA, 308 bp, Zea mays
  unsure (1)..(308): unsure at all n locations
  Clone ID: MRT4577_61410C.1
ttttggcggcacacaccgcncaaatggacgtttttatgagtcccgggggccacggttgacgggcctttccacaaattccaacctcaggattctatccggttaatatccccagattgcgggttccgccccgggggaatcatgattagcaaaagaagccaacgccattttgttgaaaaagcccatttttgtattcccccggcaccttgccgggaacccaacctttagtcttccggaagaaaaaccccgttgcccaaaaaaacaaaatttcaaccaggggatcgacctccctaaaaccttaaccctggcct

SEQ ID NO: 142466 - DNA, 611 bp, Zea mays
  Clone ID: MRT4577_61411C.1
ccctcctgcccacccaatcaatccgccaacaaccgccgcgaccgccgcgatccgccctccctaccttgtaaactttatctaccctgatctgcgagttgccctacccaccctgacccgtgcaggcgagcgagcccccattgaagcgcgccgcctccccccgtgcgcgacggcagggcttggtgaacgaggccagtggtccgcgcgcgcctgaccgtgatggggcggtgccggcgccgggtctgatgcggaggccgctgccatgtcggacgtctcgtcagatctcggcggcatctgggcggggcccgtggagcttgacatcgagcaggagatggtgccacattggaatcagtttcggaccttgtgaaggcaatgtacctaaacattgaaagcttcccctgtgtaaggctgctgaatctttctggtgaaattgggtgttctggtgcttacttagtgcttacataatgctcactcaggatgacaaatccacacgttactaaatggttgaatgaaagttgcaggtgctgaatgtagcttccaaggacgactctatgtctttgttacctgtattcctgaaatgccatgaatcatgtcctaatggtagtggagtttcc

SEQ ID NO: 142467 - DNA, 275 bp, Zea mays
  Clone ID: MRT4577_61412C.1
tacactatctatgagctatgacgcacgactgtcacctcatacctaagcttcgaatccagctggaggtccgcaccatgctacacccacacacagggcgggggagatcatgcatcgggcaggcggtaatcacccatacataaacgctaggaacatcagtcctgctatgtgcttctcatacggagatacaagacatataaaggttctctgcaatcaagaacattcatttacatcaaacgctactttcaagatacgacctgattcatcttaatttggac

SEQ ID NO: 142468 - DNA, 819 bp, Zea mays
  unsure (1)..(819): unsure at all n locations
  Clone ID: MRT4577_61413C.1
ccggccgggacgcggctacgcccgcccgccgcgacccgtcgcaaaccccgcctccacggccgcgatccgccctcccgcccgcccgatcaatccgccaacaaccgccgtgaccgtcgcgatccccgccgcgattcccgtgatccgccctccctacctcgtgaaatttatctgatctgcgagttgccctacccaccctgacccgcgcaggcgagcgagcccccattgaagtgtgccgcatcccccgcgtgcggcggcagggcttggtgaacgaggccagcgatccgcgcgcgcctggacgtgatggggcggtgccggcgccgggtctgatgcggaggccgctgccatgtcagacgtctcgtcggatctcggcggcatccgggcggggcccgtggaacttgacatcgagcagatcgatttcccttcccacgagtggattgaaagatcatcatctatcacctacgtgctctccgcccgcggaacttcaggagagctcgtgctctttgtgcgccgacatgaaatggtgcttgattacggtggaattcatgggcattgtgctgtttttcttcgtatgtgctacaatggagcttagtctggatattccaggagatggtgccacattggaatcagttctgaaccttgtgaaggcaatgtacctaaacattgaaagcttcccctgtgtaaggctgctgaatctttctggtgaaattgggtggtctggtgcttacttagtgcttacataatgctcactcaggatgacaaatccacacgtttctaaatggttgaatgaaagttgcangtgatgaatgtagcttccaggac

SEQ ID NO: 142469 - DNA, 328 bp, Zea mays
  Clone ID: MRT4577_61414C.1
aagggaagggacccacatagccccttataagggtggccatatttgttttggacaaactttttgtagttttgtaagtactaaataaggggcctactggcatattaatcagcccctacttttttccaagccatgggtgactttgggctatggcattcgagaatacccccccatttcattacgattggggggaacagtttcatcggatggggcaagcttacccattattggcgcctttaacaggggtggccccctcacactcataaatccattcactttttttatcaataggctcagggggggcattaacagttgggctgaagttttcctg

SEQ ID NO: 142470 - DNA, 615 bp, Zea mays
  Clone ID: MRT4577_61415C.1
acaagcacattctagcgcgccagacaggactgtcaagaagccaggtttccaattggttcatcaacgccagggtgaggctgtggaagccgatgatagaggagatgtacacggaagaagtgaacccgaaaccggccgacgacacaagccaaaaccctagcgccggtggcggcgtcggcgtcggcgtcgccatcaaacctgagcagcaggtgagcacagctgcggcgggagccaccatcggaggcggcggcggcggcgaccatctgttcggtcctagttatcccagcatgtacgggagccacggcggcgccgtgtcgcttaccctagggctccagcagcagccgtttgcgtcgacgatgatgcaccagcgacgaccactgatgacgtttcaaggtgacgagcaagagccggcgctgccgtacagagaccttatgggctctcagttactgcatcatttcgctgggtagcttgttacctacacatgcttgctagctagctaggagggtgggtatacggtggctaaatttttatatatattaaagacaaggtaaattttgtttaaatttcttgtcgactaaacgatcgatatatataccaaattaagcacacagattgttt

SEQ ID NO: 142471 - DNA, 1233 bp, Zea mays
  unsure (1)..(1233): unsure at all n locations
  Clone ID: MRT4577_61416C.1
agctggagcanaggttgctcatcttctgccagnagagctggtaagagacaaaatgctaggtcatcaggcttccaggtgcgccagttgggtaatgtcttccgaagagcacagactgagaatggttaccccagtacgttgtgtaaatatgagattgaagattcatgtgatcagagtgagtccgtgataccagataaggaccagtttcgatgtggtgcctcccgcaaactcgatcttaatgagacctcagtcccggacctaaatgcagaggtagtcatgccaacagagtgctgccagaatgagaacggctgtacttctggaaagaatgcattcacaaagtcgaacggttgtggtgactctgagacctgtgcagaggggcatgtaggggatgcaccagccatggaatcccggtcccagagtcgcaagcaggcatcagatttggagcaggagacctgtcttgatgacagcaatttggtggcccgtgcagctaggctcttcgccccgaggttaggacagttagatgacaactacgagtactgcgtgaagattatccgttggttggaatgttcaggcctcattgagaaggatttcaggatgaaatttctaacatggttcagtttgagatcgacagagcaggagcgaagagttgttatcaccttcatccgcaccctaattgatgaacccagtagtctggctgcgcagcttttggattcctttgaagaaattgttaccagtaagaggccaagaacaggtttntgtantaagttgtggcactagccaggtagagaaagcatggaactgatatctaatgatactctagcgttcttacatcagcaagattaactgggatgacagtgtaatagtaattttatttatttgtctgataaaaaacagccccctcctaggatctctcctcccaaacggggtccctcccgggagcgagattcaggagccgccggtgatcttccgccgcccctacgcacgcgcgaaccgtccggccgtcaggcaggggatcctagctcctgcaccaggtcgcggaccgtccggccctgtgccgcggaccgtccgcgtctgaccagggagcaccgccgcctcgcgccaggtcgcggaccgtccggctctgtgccgcggaccgtccgcgcctgaccagagagcaccgccgctggttcttttgaaatgcattggcccctccaaaaaggtgtcaacacccatctagctctctatgccaatctcatc

SEQ ID NO: 142472 - DNA, 331 bp, Zea mays
  Clone ID: MRT4577_61417C.1
gggggaatatctaatacctccccataataaataaatactgggggttgttatttactacacacacaaattttacaaaaacaacacccttggggagaacagttgggtccatccaatccgagagggaaaagccagccagccaaaccatgggttttacagcctggaaagctaatccatgttttacaagcaggaggccccgtattgggagctcatcgaaaagagaaagaagcaaaatttgtccccagttggttacaaattaaaaggggcaaacatggccggcaccaagtaaaccacggcccacgcgaggttggcgtactgaacaaacctgatgccc

SEQ ID NO: 142473 - DNA, 663 bp, Zea mays
  unsure (1)..(663): unsure at all n locations
  Clone ID: MRT4577_61418C.1
gccggccgggccgggatcgaactgcttgcttcagccttcaatctctgcgctgtgctgtgccccgcgaattgtttacgctcgctctcgagatctctctctagattctctcggctaccctcttctctctgtctcctgcaagaacccatggcggctacgacgatagattggcacgcccgcaacaacgccgcgcttcccgccgccatgtatggcgtggccgtgccggacagcaaggagctcgtgcgcgcgcttattgctccgccgatgcagcaggccccgaccatctcgttcgcgtacccctgctccggcgtggagcagcagagcgcggcgggctcgtttctgggtgccggcggtggtggcctgacccccgcgcagatcctccaggtgcagtcgcggctccagttcctgcgccggccggcgggggccgcggtcgccacccagccgatgaagcggcagggcgtgccgctgccgcaggcgccggcggtgtccaagctgtaccgcggcgtccggcagcggcattgggggaagtggggtggcgnagatccgcctgccgcgaaaccgcacccgcctctggctcggcaccttcgacaccgccgaggaagctgcgctcgcctacgacagcgccgcgttccgcctccgcgggggactcgccaggctcaacttccc

SEQ ID NO: 142474 - DNA, 317 bp, Zea mays
  unsure (1)..(317): unsure at all n locations
  Clone ID: MRT4577_61419C.1
tccggactagttttagncgcgagcggccaccgttttttgttttttaattaaaatnntntacangngagtgaaatgtttatatacttttcaaaaaaaaaaatngatccgtaaatgcttaaacaaaccagaaacacttntaacaagaaaaacgctcccaattacagcactcttttttttttnaggagggaagatgtgnnccancnncttttttgggtgataaaaaaanccnannaccnngacaagggtgagccatacattgaatggatagagaagatgnaacacgaaagaaaaactatggaacaagaggccagaatgaa

SEQ ID NO: 142475 - DNA, 281 bp, Zea mays
  unsure (1)..(281): unsure at all n locations
  Clone ID: MRT4577_6141C.1
ctgtttttgttgttaaacaacaaactagtattcatttcatttttatgtctatattcaaattaatctagacacatatacaaaaacacatacattaataatatgtcttgtttatttgtcttctaactcatttaataatctaaatgactctaaggggggggggnctaaatatctatcttcatcaaataatacaccnnatcaaaatcctccctctttaaacataaataacanaaaaatctttcctacactanccancaacaataatcaancctacttctctaaca

SEQ ID NO: 142476 - DNA, 241 bp, Zea mays
  Clone ID: MRT4577_61420C.1
cactcgcagttgcacctgtaacagccatggtccccagcgatggctgtcacatggcgaagtctggggcggacggtcgcaatgcatgcggccctcaaaataagtcattgactcgcccctcaggccgggctgcacttcacggtcccgccgtcttcatctcatctcacaaacggccgatactcacagcgcctgtggactggctcacgcgtctacctctcacccctgctggagtagttcgccacct

SEQ ID NO: 142477 - DNA, 1285 bp, Zea mays
  unsure (1)..(1285): unsure at all n locations
  Clone ID: MRT4577_61421C.1
gctctccatcgctaaccacggaaacaaccccacaggctgcgcctggctgcacgcactgttgtgtagttattacgagcatcggcattgggtacctcgaggccggccgggaagcatcagagctcggtgtcacaaaacctgaccgatggcggcccggtgctccacagctgcctccgtggtcagaacaggatcgcgagacctctccccctccttttccttcacagccgcggcgctcccctcggcgcgtctgaggccggtaggagcgtgggtccgcggtggagggtacacctgcaggctccgcgccgtccgcgccatgggctccgcgccgtcgtcgtcccaatccccgtctccgcacacgccttcaggacaaacccaagggaaagcagattataaatcactgagtgaagaggagtggaagaagcgcctgactgaagagcagtattatgttactcggcagaagggcactgaaagagcattcactggggaatactggaatactaaaaccccaggcatttatcagtgtgtctgctgcgacacccctctgtttcagtcatcaaccaaatttgatagtggtactgggtggccatcctattataaaccaattggtgaaaatgtcaagagcaagcttgatatgtcaatcatttttatgccccggaccgaggtgctctgtgcaacctgtgatgctcatctggggcatgtcttcgatgacgggccaccaccaacagggaagagatactgtatcaatagtgcatctctgaaattgaagccccaatagttgctggatactttagcaagaagtcaactataacgctggtccgccctatgtaaactttcgggtttctgtatataaactactcgagttgtagcatatttattattctctttgttatgtaatatatgtgttcacaaaccgatgaaagtatgaaacaaacagccgctacttcactctggtattctggtctagaattaaggtgttgtttggttgacgaattgtaacgtaaatggcaacggtaatggtttgcactcgagtgacagttgacaacggtaataaatttaaatagatctttattaaagaaaaaaaaaaaaaaaaaaggcccctaattttcgcttccgtttatagccacattaccccgctccatgtcctctctaactccaaggtttggtctgcacacgttttcggtgggtggtatagggtctaggggattgtgtcattgcgagtcctgctgcactttcctctgcagtgagccactgacnnatcagcccacttgcctgtactttcttatgatct

SEQ ID NO: 142478 - DNA, 1879 bp, Zea mays
  Clone ID: MRT4577_61422C.1
cccacgcgtccgcccacgcgtccgcaatatatttggcattgctgttcactccaagtatactgatggccccatttgcagagactcttggcagtaagtataggaaaacatggcttcgacttgtccatcgtactttggagcttgcaggtcctgcgtttatcaaatggggccaatgggctgcaacacgccctgatctgtttccaagtgacctttgtactgaattgtcaaagctgcacacaaaagcaccagctcacagctttacctatactaagaaaactgttgagaaagcttttggtcgaaagctatcagacatttttgaaaattttgaagaggaccctgttgcatctggaagtgttgctcaagtgcatcgggctgttctacgattccggtatcctaatcggcagacaaagcgtgtaactgttgcagtaaaagtaaggcatcctggtgtaggggactcaataagaagagatttcaatatcatcaatgccgtagcaaaaatatctagatatatccccacgctgaattggttgcgcctagatgagagtgtacaacagtttgctgtcttcatgatgtctcaagttgaccttgcaagggaagctgctcatctgagccggtttatctacaacttccgaaggtggaaggatgtatctttcccaagacctctctatccacttgttcatcctgctgttttagttgagacttacgagcatggggagagtgtttcacactatgttgatgaccttgaaggacatgatcgaattaaaagtgctctggcccatattggtactcacgcgctcttgaaaatgctactggttgataatttcgtccatgcagatatgcacccaggaaatattttagttcgtgttgcacaaccaaagaactcaaataacacccttaaaaagtcaaggccacatgtagtcttcctggatgtaggaatgactgctgaactttcaagtaatgaccgtgtgaatttacttgagttcttcaaggctgttgctcgccgagatggtcgtacagctgcagaaagtactctaaagttgtcaaaacaacagaattgtccaaatccaaaagcttttattgaggaagttgaacgatcattctctttttggggcactgctgaaggtgatgctatccacccagctgagtgtatgcaccaactgcttgagcaagttcgatgtcataaagtgaatatcgatggcaatgtttgtactgtcatggtgactacattagttcttgagggctggcaacgtaagttggatccagattataatgttatgaagactctgcaaactttactttttaaggaagattgggcgaagtctcttcaatacactatccaagggctcatggcgccttagggtcgtccgcaatcctttctaaagttttgatctggtttgtgttcgactggaggatcctcttctctcaccatcacgtctggcttcttttctacgttatttcacgtttcgtttctctgtacctgtcctggcgttgtgctgctaaagcagccttgatgataaagtaataactgcagtaaaaattttcagaagctaccagagtactatgctgctcagctctgggctgtcttcttatatgttcttgatgggccaaagaattaggccctttttcccccctcccaccaacacttttgacaatagcttttagatgatgtagcaaaaggcgttctgttctgatgatcttttttgtaactggagaggttgtatccgtggactggagagttgcttatgtacagacagagatactgttaatctcgaaggaatccacttgtcaactgacaattattcccaaaaaaaaaaaaaaaaaaaaaaaaaaaaaaaaaaaaaaaaaaaaaaaaaaagaaaaaaaaaaaaaaaaaaggccccta

SEQ ID NO: 142479 - DNA, 1072 bp, Zea mays
  Clone ID: MRT4577_61423C.1
ggtattctggtgtcctaggcgtagaggaaccacaccaatccatcccgaatttggtggttaaactctactgcggtgacgatactgtaggggaggtcctgcggcaaaatagctcgaggcggccgtaagcatcagagctcggtgtcacaaaacctgaccgatggcggcccggtgctccacagctgcctccgtggtcagaacaggatcgcgagacctctccccctccttttccttcacagccgcggcgctcccctcggcgcgtctgaggccggtaggagcgtgggtccgcggtggagggtacacctgcaggctccgcgccgtccgcgccatgggctccgcgccgtcgtcgtcccaatccccgtcgctgcacacgccttcaggacaaacccaagggaaagcagattataaatcactgagtgaagaggagtggaagaagcgcctgactgaagagcagtattatgttactcggcagaagggcactgaaagagcattcactggggaatactggaatactaaaaccccaggcatttatcagtgtgtctgctgcgacacccctctgtttcagtcatcaaccaaatttgatagtggtactgggtggccatcctattataaaccaattggtgaaaatgtcaagagcaagcttgatatgtcaatcatttttatgccccggaccgaggtgctctgtgcaacctgtgatgctcatctggggcatgtcttcgatgacgggccaccaccaacagggaagagatactgtatcaatagtgcatctctgaaattgaagccccaatagttgctggatactttagcaagaagtcaactataacgctggtccgccctatgtaaacttcgggtttctgtatataaactactcgagttgtagcatatttattattctctttgttatgtaatatatatgtgtccacaaaccgatgaaacaagcagccgctacttcactctggtattctggtctagaactaaggtattgtttggttgacgaattgtaacgtaaatgacaacggtaatggtttgcacttgagtgacagttgacaatggtaataaatttaaatagattttt

SEQ ID NO: 142480 - DNA, 367 bp, Zea mays
  unsure (1)..(367): unsure at all n locations
  Clone ID: MRT4577_61424C.1
aacggaacgcgtcgcaggccgtccgcctccccgagcaacagacgagcggagtagtaggtggcctcccgacccggggttctcctccactcccgcagtcncgctccagctttctctgccccgaccccgatcgatgctaaattcccgcgccgagccgctcgcccgcctcccaccccatcaccgagccgcctcgcgcggccccccgtcattttcgcccgactctctcgcctcggaggacgtagagagaggagaagggagtcgtcgtcgtcctgcgcccggcgctcgggccactggattcaaggggttccggtggatttggaccccggagtggactgaatgctgatggtaatcccccaaggaagaaggcagg

SEQ ID NO: 142481 - DNA, 302 bp, Zea mays
  unsure (1)..(302): unsure at all n locations
  Clone ID: MRT4577_61425C.1
gcgtccggcttggacactcgtccttgttcattgcgattgatctactaaatattccttacccctttgagttcttagctctatggctagaaacatgctctttcagacccaatcntcatgtacctgtactccaactatgtcccctatacctctactactaccttgcgctttgcacattctagaacagcgttatcaattcccgttagccaatccactacatgttctccaccttttaccccgtcttctccaagttattgtccatgtcgatgacttcacccgtgacatctatcccttctcctattcca

SEQ ID NO: 142482 - DNA, 262 bp, Zea mays
  unsure (1)..(262): unsure at all n locations
  Clone ID: MRT4577_61426C.1
agaaaaaaaaacgaggaacaaaactaaaaataagaaaaaaaaaaaaaaaatataaaaaaaaaaaaaagataaaaaaggaaagaggtatacgctgggtgtggggtcagtctagggctatactctgagggatgatagagggagcgcggccgttagggcacactactatggggacgattgggttctacagcgaggctctgttcggtcctctgcgccgtgtttaaaacccccccggctcgtgngctggcggcgggggggcgggggc

SEQ ID NO: 142483 - DNA, 155 bp, Zea mays
  Clone ID: MRT4577_61427C.1
cggatgcgtaggccgacgctaaggtccaagggacgggggtgtatcagaaggcggatctgcgcgagccttacagaacattgtacactaactgctaacggtaacaggaaagggccaatgtggaaatgctatcaacagggcctgaggatgaacaacag

SEQ ID NO: 142484 - DNA, 382 bp, Zea mays
  Clone ID: MRT4577_61428C.1
cagacagcaaagttcaaagcggccgaaaaacacccgaaacaacaaaaccacacagccaaccagcacatcacgcggaaagcaaaggccgcgaacggagacacagacaggacccaccaactaaccggacgaaaaaacgaagaaaaaacccagcggcagaccacagacaccccagcaagcgatccaacaccaaaggagaacccccaaggacagcaccccaacaagccacacaaagggaggtaaacaaccccaaaacataaaccaaaaatccccacaaaacggacccacaaaaacacaagagcagcagacacaaaagccagcgcccccaccccgaaaaactgaacccacaggaaaaacacaacacaaaaaacagcaaaaaaaggaa

SEQ ID NO: 142485 - DNA, 126 bp, Zea mays
  Clone ID: MRT4577_61429C.1
attgagtatacccggttactgacctgacgtgaaccgctggaggttgtcgattgcatggagagtgacacatttggggcacgggaagaaacgttataccttgaggtacaaaacgagctggggcacctt

SEQ ID NO: 142486 - DNA, 151 bp, Zea mays
  Clone ID: MRT4577_6142C.1
tgctgggatagttttggccacactttgctggttccttacaaacaagaaatggagaaacacaaccgaagtgattgttagagcagcatgtgaggcactctctccatatgctgcacagtaagtgtgatgttgcaaacacgaggaaaagaatcac

SEQ ID NO: 142487 - DNA, 366 bp, Zea mays
  Clone ID: MRT4577_61430C.1
acgcgtggggagggacgacataccgaccagggttttaagctaactaccgggccccctcgtgcgcgggacattgataccgcacactgactcgtttctgctctggagccgagccatgaaccagtgcacatattattgtgctctcccagaagggacgaactggactatgtccgctcttgcattacatgtatgctctgtgtgagcctatatgaacgtgggtgtactgcatgggtgcccctgactactgacttgacgtcatcgaggagccgaagatgtgggcgtagaataggggctgctccaacacggcggctggcaaaggtgacctacgcgggccaccggtcgtatcctaggaaaagggggcgcactttt

SEQ ID NO: 142488 - DNA, 554 bp, Zea mays
  Clone ID: MRT4577_61431C.1
gaggtgatcaattccatagacaagattaggagaggatttatttggagaggaagaaaggaggtaaatggtggtagttgccttgtttcatgggacattgtcacaaggcctttatatctcggtgggctcgggatttctaatctgctgtaccaaagttgggcgctgcaagctaaatggttatggttgcaaaaaacagatcctaacaaaccatggtctggtctggaatttcctattcagtagcatgtcaagagcttcttttctgcctcaattgttaccatggttggcaatgggtgtaatactctattttggacagatcggtgggtggatgggtctcgtatccaggattttgcccctgccgtggtggctaatgttggaaaaagggccctttcttccaggacagtggcccatgctcttgagaactggcagtgggtcagcgacattgtgacccctcttaatttgtctgggctgcagcaatatctgaacctttgggacacattgaggggagtggtgctgactcaggaggctgatagacatgtgtggattcattcttcctctgg

SEQ ID NO: 142489 - DNA, 337 bp, Zea mays
  unsure (1)..(337): unsure at all n locations
  Clone ID: MRT4577_61432C.1
gattggggtacctcgaggccggccgggncgggcttcctccctcctccattggactgcttgctccctgctgaccattgggtattctgaaccatcgagtcatggctgccaagctgactcacctccacagtcttcgcgaacgccttggtgccaccttctcctcccatcccaatgaactgaccacactcttttccacgaatgctcaccagggcaagggaatgcttcagcgccatcacctgcttgcggagtttgatgccctgaccgataaagacaaggaaaagaatgtaccattagatgacattcctccagctgctacaagaagaaattgtgcaccccccat

SEQ ID NO: 142490 - DNA, 369 bp, Zea mays
  Clone ID: MRT4577_61433C.1
attcggctcgaggccaaaaatctggacatagtattggccaggatggttccagacttttggtgaaagtaatccccacagaccacctgaagatgttgcattcgctgttgcacgtctttccgagaaaggtggcagtgttcaaaagtactatacctatcatggtggcccacaccctggtcgcactactggggggccattcatttcaactagctcctactcttatgcccccctctgatgaatatggacctttgagatttccgaagtgggcacatccgatggaacttcccaaacttataagattgtgtgagcacaccctgtcttatggaaatacaacgatatctctttctgggtcctaaacaagatagctgatat

SEQ ID NO: 142491 - DNA, 1403 bp, Zea mays
  Clone ID: MRT4577_61434C.1
gttgattcagacgtcctccgctgccagtctgcgttgtcataccgtggagtttgttcgtccaggatattgccttcggaggacgatagtcttgcaagggctcttcgctcgtgccactcgcagcctttctcattcgtagaggaaggagacaccggtgcatcagggatgataagcttagcagagtatctaggaactaatgtagctgaccacatccctgaaactcccaacaacctgtcagaggagatggtgagatgcatggcggggatatactgcagacttgcagatcctcccttggttcaccacggctcgtcctcttcaccgtcgtcgtcgttctcctcgactagcgcaatctctccgcagtatgtgggggacatgtggagtcccaaatacaggagagaggcgactctggactcccgtctgataaacccgttccatgtcgatggtctgaaggagttcagtggaccttacaacacaatggttgaggttcctatgattagccgggacagtcggaggctgaaagaagccgaggacctgctccagacttacaagttgattttgtatcggttggaagccgttgatctgaggagaatgacagatgaagaaaagatcgcattctgggtcaacatacacaatgctttgctgatgcatgcttatctgaagaatggcgtcccacagaacaatctaaagaaaacatccctacttgttaaggctgcctgcaaaatagccggacgcaacatcaacgccgccgtcatccagagcattgttcttgggtgcaacacacactgccccggacagtggctacggacgctgctttaccccaggatcaaaagcaaggtgagcaaagcggggcatgagtggcgggcctttgccgttgcgcaaccggagcctcttttacgctttgcgctttgttccggcagccattctgatcccgcggtgagggtgtacactccgaagcggctgttccaccagctggagtcggccaaggaggagttcatccgggcgacggccggcgtgtggaaggagcagaagctgctgctccccaagctggtggaggcgtacgccaaggacgtgaagctctcgccgcagggcctcgtggacatggtccagcgctacctcccggagagcatgaggatggccgtgcagcggtgccagcacggcggcaggtcgtcgggcaaggtcgtggagtgggtgtcctacaacccggccttccgctacctgctcgccagggacctcgcgttccctcacctcagctgaccgttcgttaatctttagtagtatatgcgtgtgtgccatagggttagaagtagagaagggatcatgtgcagtttttgtgtggtggttgtcaatggcttttgtagatgatgaacaggaaacaggggaagaaatgagagaaagcacgtttgccc

SEQ ID NO: 142492 - DNA, 297 bp, Zea mays
  Clone ID: MRT4577_61435C.1
aagcaaccctctactttaatcttaacaaaagacaaaaaccagttagcaaagtttttgaacttccaggcaattttggggacaagaacacaggataccccaccaaagagcagcttcccggaaaagtcccaaaaccaataaaaagacctggaaagattgggggggggggaaaagactaaaaaaatgaacaggggtcgccccagcttttatttaaacggaagcataagggttttgcacacccttactagcaggggaaaaggttttatcttccatcggcagaggggaaggagtccccaaacc

SEQ ID NO: 142493 - DNA, 769 bp, Zea mays
  unsure (1)..(769): unsure at all n locations
  Clone ID: MRT4577_61436C.1
ggccgcttttttttttttttttttgtaatcagtcaatgtaattatatcattaatcagcatacatatatgctctctaagtcggtaccaaaagctccaccggtacacttatatatagtagtacgcagttaagcacactgcgtcaggttatggcgtcatgctaccttgatcaacagctgacatgccggtctcacatgtcagcggcgctaccggggacgaacaggaaacaactctctgcagccgagaaggcgcgcacggccggggcaccaaaacgaacaaaacaaattttcggaggaggggagtcttcagccttgtcgctcacggccgcagcggccggaggtggacgggcacgccgtgcttggggcggagggtgagcacgttcaccggcgcgtggcggtagtcatcggagatggcngatgcggaagtgggacagcagcatggcgagcacgaccttagcctcgacgagcgcgtacgcctgcccgacacatggncngcgggcccgccgcgaacggaaggaacgccgggcgccggcccgcagcgaaccgctccggcttgaactcgtgcgcgtcggggccccagatggacacngtcgtggtggatggnccagcaccgggatccacaccgacagcccgcgcggcaggtggaggccgccggttaggntgggatgtcctcgaacaccatccggggcagcagcgtcgccggcgggtcagccgcagcgtctcgtgggatgatcatctgcagcacggtgagcttgggaaagggtcgtcgtacg

SEQ ID NO: 142494 - DNA, 268 bp, Zea mays
  Clone ID: MRT4577_61437C.1
tcgagcggcaagccggcggtcagaggcaaacctagctgctgggctagttttcatctaacgacttgagctttaaggaccctttctgccagataataagcgagcagggcggatctctctccccagttgtgctgagaacaatagcatcagttgccaaggaatatgccagcctaaaccgctttgaaggactgggtatcctgatctcaatacatggtcttagtagaatctgcaacccgcgtactctgcgttgttacactgttccgcgtacctc

SEQ ID NO: 142495 - DNA, 560 bp, Zea mays
  Clone ID: MRT4577_61438C.1
gggggaaattagggcctttaatttttaaaaaaaggggggttggggacattttgaaataaaccgccctaaaggcctgtaaaaaatttttggaaaaaaaaaaaaacccttcctttttaccctctttttttttaaaaaaaaaaactttttccccccaaattttcaagggttgcaaaaaaattgttgggcgggaaagggctttttaaaccccaaaaaaaaaacctttgttattaaaaactttgggcccccaaatttttttggggggaaaaaccccttttttttaaataaaaaaatttttttggggctccccaaaaaaacccctcgggggttgttaaaatgtttggggacccccccctttttttttgggagggaaaagggcaaacaccaaaggggggggtgtttttttaaaaccccgtccagggggtgagccccttttcaaaaaaattatcaaagggcccccctaaaaaatttattttcaactcgggcaaaaatcccccccttaccaaaaatgggcgttccggtgttctttaaaccacgggggggcttttttaaaaatttaaaaa

SEQ ID NO: 142496 - DNA, 1892 bp, Zea mays
  Clone ID: MRT4577_61439C.1
cggccgctcgggcggcgggcgggaaatgaaactacggcgcacagttctccgttttgcgacgtcttatccctccgctcctcacaaaaacgcgcttctcgccgccaccaccctaaccctagttcccccgccgccatggccgacgaccactactcctccaagcgcaagtacgacgactccccgccgccgcgccggacgggattctcctccggcccgccgcccgcctcgccgccggttgccggtgccccggtgccatcttcgtacaacactgtgccgccgcctcccgacgagatccagctcgcgaagcagcgcgcgcaggagatcgcagctcggctcttcagcgccgctgaggcgaagcgtccccgcgtcgacaatggcgatgacgacgtgggcaccgctggtggaggaggttccctggggggcggtggccgtatcggcggcggcggccttggattctcgtcctcagccggtggtggccatggttcctccatcccacccttatcttctcaaggaaactcacatcagtattcttcatatggtggtggataccagagtggtagtacaacaaaaaagattgatatcccaaatggaagggttggtgttatcattggaaaagctggagaaactataaagcatctccaagctcagtcaggggcgaagatccaagtaacaagggacatggatgttcaacccggttcacagacaagatcagttgatctttcgggcactcctgatcagataaacagagctgagcagttgataattgatgttcttgcagaggctgatgctggatcatctggcactatctctaatcggaagtacaacgcacctcaacctggtgctgagcaattccaaatgcaaattgctaacaataaggtgggtctggttattggtaagggtggtgagactataaaatccatgcaggccaaatctcaagctcgtatacaggtcattcctttgcatttgcctcccggtgatacttcaactgaaagaacactgtatattgatggtactgcagagcaaattgaaatagcaaagcagcttgtgagtgaggttaccagtgagaatcgtgccagaaatccaatgtcaggtggctattctcagcagggctaccgccctcctcgtcctcaggcaaactggggtgcgcctggtgcaccaacaacacaacagcctggttatggttacatgcagcctggagcttatcctggtgcgccaccacagtatggccagcaaccttatggcagctaccctccagcatctggaggttatcagacagggtgggatcagtcttcaaaccagcaatcacagcaggccccctctgccgctggttatgactactataaccaacagcagcaaccccaacagcaacaatctgccactggaactgctgcacctgctgatgctagcaactacaattacagccagcctcctgctagttatgcttcacaagggtatggtgattctacctactctcagcagagtggtgggcagcaagcttatgactactctggttaccagacccaggggcagcagcagtcttactcggagcagcctggatatgatcagcagagctatggatcagctgctaactcaactcaggatggtactgcacctagctatggtggtccaggtggtgctggtcaagcatctccagggcagcaagcttccactccatcctctggaggccaaccgggttatcctagccaaccacctactagtgctgctgcatcaagctacccagtgcaaggttctgcccctccatctggatacgttgctccacatacacagcctggttatggtacgcagccaccaccacagggcgcatacggtcagggtgcttatgggcagcctccgcaggctcagaagccgccttcatctgctcctacttatggaca

SEQ ID NO: 142497 - DNA, 430 bp, Zea mays
  Clone ID: MRT4577_6143C.1
attcggctcgaggcaaatctttacgccctattttgctgcctggagagaccttgctgaaacatgtggtgcctgacaagggagcaggcaagctgcctttggtaaagcggagctgatttctggccaacaaacgaacccactctataatataatctatgctgaggcgccgctcactataggtggcttggaaaatattcagacagctgacacgtactttgcataagcatggcaattgactggaggcccgaatacatgagccctatttgttttaagaaagtgtacttcggcgatctatcatctgaccaaaggtaggaataaatacgaagatggatcagagctgcatacattgactgcaaaagtctcgaggaataatttcttgaaaaaggctacacaaacgctcccctaatgagcacctcgctgaagaacatgaaac

SEQ ID NO: 142498 - DNA, 403 bp, Zea mays
  Clone ID: MRT4577_61440C.1
aaaggttaaaacgaatccccagctttggggccgggatggagaagaaccgaattacaggacatggtattagggccactctacccaaagggaacccgaacgggaaaccaaatctggaaaaactaaattgcccccagcgcaaaggggggggaaaaccttggccttggggggggccccggcgcccccgaggggggggggggggggcccatccccccaggggataaaggggggcacccccttgagcccaaaccggggggccaccccccacgggggccccggggcgccccaagggggcttgtcccccacgtaggcgcccaggaacaccgggtccttgccctccagggcccccagccggttggagaacaacggctcccccacgttgcagggggggcaccagggggggggg

SEQ ID NO: 142499 - DNA, 301 bp, Zea mays
  unsure (1)..(301): unsure at all n locations
  Clone ID: MRT4577_61441C.1
aanaggcctggngacaaaaaagagaacatggaaaagcangcccccagngcanggacagacacngagacgnnacnccnnnnagaaggagnccnaaaacanggaganganngggancnnaacgcncagcagggccgcacaaagaanaaancagaaggcanagcaaggcnnanncaaggacggggggggcgaacanangccgggcacaannaaaaggaaanncgnnagcaggcnccacanaaaccaggcaganganggaaaaacgaaccagcacannanggagnccacaagacacccaaccgaa

SEQ ID NO: 142500 - DNA, 258 bp, Zea mays
  Clone ID: MRT4577_61442C.1
tttcccttgtctttgttaatttttaagggggttttccttttaaaaggggataatttttaaatggtaagggtttttacccctatgttacagatggggaatttatttagtcatatattatgaaaaaaacaccctagggtgaaaacgctaaccccaagcaagaggaaaacacaaagaatgacaagccggagcacaaaagggcaacctagccatttaaacggaaagcggactaccactaaaggccagggggaaagccggggg

SEQ ID NO: 142501 - DNA, 604 bp, Zea mays
  Clone ID: MRT4577_61443C.1
gccggcccgtcacccaatactctctctctcaaagactctcccttcgacgtcaccggcaaactgaactatatctggatgttcttcgatcccgccgacacttacgacgaccccctattgcgatgccattcttaccctactctccgggtactgaggcttgtagcaacgagcccatgcacctgtgcggcgcaattgtcttactattaagcatttcccgctattgcgtccataacttcgctcactttcgagcttaacgacttcggaataagatgtctcttactgcaacatggataaacctaatcctaattgcaagtacactatcctgcaatgaccattccattgatatgccccaaacttttctgtatgtagaacaacctccttcaaaagcacggcccgtactgcctcttttgcttccagaactattggaacccccacttggtatgattgctttataaatctacagataccgagcaaaatctagatctgacccctgacccattgaaccctatcaagtactttattacaaacaatcaatgaacagcgccctacaacctcgtgacgtgtcaaaactatggcatcacccaacttagtcgacttgcatatcatc

SEQ ID NO: 142502 - DNA, 560 bp, Zea mays
  Clone ID: MRT4577_61444C.1
tttccggaagagaagcaaccgagcgaacggcggcgacgacccgaagagggagaagaagatggtgatgcccacggacccgatgctatggcacaaggtggccgccgtctccggggtcgctgctcttggactgggcacctatggagcgcacatgttccgcccccagaaccctagatacaaagagatttggcagaccgcgtccctgtaccatctcgtccacaccgcggcgctgctcggggctcccatgaccaagcgccccaacatcttcggaggccttctgacaactggaattgtgctcttctctggaacgtgctacactgtggcttaccttgaagacaggaagttctcttcaccagcaccgatcggtggctttgcattcattgctgcttgggccagcctgctcttctgattgtattgtgttttatcgggtgaaaactatgtctaccttacacaaggctttgtatcagttgctctattaggtcatgattgcactgctgtggcacacatctttctcgtggcctttatagataataattgaaataaaacagttcccttgatgttac

SEQ ID NO: 142503 - DNA, 810 bp, Zea mays
  unsure (1)..(810): unsure at all n locations
  Clone ID: MRT4577_61445C.1
cattgggtacctcgaggccggccgggaacgtcctcatcttcatctcccaggttttcccctccaatcacccccaggtcttcctctcgcgagttgcggtctcgcggccccctccaccgaccgccgcctcctcacaaccgcggaagctgcttccctctccattggacgcggccagcttccatctctcggtcacctccctctacatcccacggccgctaccaccttccctctacctcacacggccgccggcctctccaaggtctgcacacgcattcagcgacgcatttgcctatatcagcactgtggtcataactctagtagagaaaggagaagatgcaggcatctagggcaaggcttttcaaggagtacaaggaggtacaacgagagaagtcagctgaccctgatatccaattaatatgtgatgattccaacatattcaagtggactgctcttatcaagtatcctctactgcctcctcaagttcgatttttaaccaaaattttccacccaaatgtgcatttcaagacaggtgaaatttgtcttgatatattgaagaatgcatggagccctgcatggacccttcagtctgtttgtagagcgataattgctctgatggcccatcctgaaccagacagcccacttaactgtgattcaggcaatctcctgcggtcgggtgacatcagaggctatcaatcaatggcccgcatgtatacaaggctggctgccatgccaaagaaaggttagatgtagaacatgtgccaagccaagagcctatgtcagntcatatgttgtcaggtttgctgtgtgctgtct

SEQ ID NO: 142504 - DNA, 1044 bp, Zea mays
  Clone ID: MRT4577_61446C.1
gtatagcacccaccggccaccggtacctattggacaggcaacgtcctcatcttcatctcccaggttttcccctccaatcacccccaggtcttcctctcgcgagttgcggtctcgcgcccccctccgccgaccgccgcctcctcacaaccgcggaagctgcttccctctccattggacgcggccagcttccatctctcggtcacctccctctacatcccacggccgctaccacctttcctctacctcacacggccgccggcctctccaagcattcagcgacgcatttgcctatatcagcactgtggtcataactctagtagagaaaggagaagatgcaggcatctagggcaaggcttttcaaggagtacaaggaggtacaacgagagaagtcagctgaccctgatatccagttaatatgtgatgattccaacatattcaagtggactgctcttatcaagggcccttctgaaacaccttatgaaggtggtgtgtttcaacttgcgttcgcaattccagagcagtatcctctactgcctcctcaagttcgatttttaaccaaaattttccacccaaatgtgcatttcaagacaggtgaaatttgtcttgatatattgaagaatgcatggagccctgcatggacccttcagtctgtttgtagagcgataattgctctgatggcccatcctgaaccagacagcccacttaactgtgattcaggcaatctcctgcggtcgggtgacatcagaggctatcaatcaatggcccgcatgtatacaaggctggctgccatgccaaagaaaggttagatgtagaacatgtgccaagccaagagcctatgtcagtccatatgttgtcaggtttgctgtgtgctgtctgtctgtgaacttggtggttcttgtttcctaataagtcctaaccattcatgtgtgtgtattctgtattctgtatcccggattcccgatgcttggtctgtgatgtaataaatcctggaattcaacagttgttacttctgatctatttatttagttgctcagtatttccgtc

SEQ ID NO: 142505 - DNA, 384 bp, Zea mays
  Clone ID: MRT4577_61447C.1
ccggccgggctcccctctcgccgtctgccttctgcgcctccatttcgggctctgtcccttgcaacttctatctcacctccaaccatggagatccacacaccccacatctgcatgtctcccgcactcgccggcaccgtcctcatccgagcaggtcgcatggaggacgagggagccctcgacagatgttctcgcgcaaccagcccccaccctcgacgcgcatcacctgtcacccccctccgcgcgcgctgcccctctcctgtccgctccgccctgcgcggccctccctctgccccccctccccctcgccctccctcctcccccccgcccaccccctcccccctcctcccccccccccccccccccccccccccttcctcccccccc

SEQ ID NO: 142506 - DNA, 2064 bp, Zea mays
  Clone ID: MRT4577_61448C.1
ttttaaaaaaaaaaaaaaaaaaaaaaaataaaaaagataggactctggctctccttttcccctttctcccgttcacctttctctcttcctttttctttcccctccctccccctttctttcctcctggcgacgactgggcgagtgccgccgaacttcgccaggtcttcgccggcgacgagcacctacaaggtgacactattccttttcttcactcggtgtataatctctctttgctccgatcaagcttttcaaacataataagcaaatagtctctgcacgtgattgccaaaattagtcaagacgggtgctctttgctgcgtggccgctaggccacatgggacaaagtctgaccctgctagcagagatcgttctatggatcctactgagcctcgttggcgcataaattcgagcttttctcccccaacatcaaggagatgggattgccgctattcatcagatggattgccccacagagttcatgatgctcctcatgatcacccgccatatgtttcatcactatcatcccatagcaaaggaagcagaagtgcatttggcagtgatcagtacctcaatcatcatcattctgcatctgatggagcactttcttactttgggagtccagctgacagccttcaggccccacgctggacaccctctcttcaaagatttgatctcggtgaattctctacccctgcaggaggatcaagaccagaaacttctgattatcctcagtcaagtgagaggccactgactgccacaagcagtttcagttctgcatccccattttcggaatcaagccagctagcttcgtctagtaaacaagcggccccatatctacctcgcaaccatatgggcaggcggtctttcatgtctaaaccagtctacccacttgtcttccggaatcctgtgtccgaatcagaagcgtgcaggatgcttgaggttagtaatgccgggcgagcgacaccaagtgatgacagccaggcttctcctctgtggcgtcgcagcttggcgagcccagagctcaagttccataatgcactgaacgaacttgggaagatggaggtttcacctgaacggaacacgagctcaagaagggaagggttcagatggagcaacgccagcagttatgactttggatacgatggagatgccattgacatttcagatcatatcagcatcgagtcccagagatctcccacgagctcagcgaggttcctgaagtgtgggctgtgcgagagattcctgcaccagaaatcaccctggacctcgaacaggattgttcgaaacgccgacatgccagtggcagcagttctgccttgccgacatgtcttccacgcggattgcttggaggaaagcactgccaagacagaagtccatgaaccaccttgccccctgtgcgcgcgagccactgacgatgaagggcacgtgtcgttctcagaacctctgcatgttgccctccgatctgctcgcaggaaccttttgttgggcactggtgctggtgggaacagcggcatttctgaccctcctcgcactgatcgtggcttgaagaggaacaactctgcagtcatgcctaggcgcagcggcggcgcattgttccgcaatcgcttcaagaaacagttccccttcaaagcgaggatcgggaaggagctctttggcggtagggttctcaacaaggttggattgtctttgtcttcaggtcagcatgatgatcatcgacagcaagcgccaaagcatgaccggcccatgaagtagctagatcttagtggcacagagtataatatgttgtgtgccctcctgatattttatctatggcatctgttatcgaaacttggcatccatgcgcagcagtcgtccaagatgggggccctgtatggattatggaaggctgcttgcattgcgtgtaacagtagcaccttgccattgcatgtattttgcatgtagcacagtaagaatctatgccctgtgattgatatgttctgaatgttccgcttgatctgttcacaatggctgcttgcatagcgtgttacccccagcaattggaggaatagccttgatgaccattcc

SEQ ID NO: 142507 - DNA, 1450 bp, Zea mays
  Clone ID: MRT4577_61449C.1
ccggccgggccggaacttcacaagatagctaccaccctgtacctattggacaggcaacgtcctcatcttcatctcccaggttttcccctccaatcacccccaggtcttcctctcgcgagttgcggtctcgcggccccctccgccgaccgccgcctcctcacaaccgcggaagctgcttccctctccattggacgcggccagcttccatctctcggtcacctccctctacatcccacggccgctaccaccttccctctacctcacacggccgccggcctctccaaggtctgcacacgcattcagcgacgcatttgcctatatcagcactgtggtcataactctagtagagaaaggagaagatgcaggcatctagggcaaggcttttcaaggagtacaaggaggtacaacgagagaagtcagctgaccctgatatccagttaatatgtgatgattccaacatattcaagtggactgctcttatcaagggcccttctgaaacaccttatgaaggtggtgtgtttcaacttgcgttcgcaattccagagcagtatcctctactgcctcctcaagttcgatttttaaccaaaattttccacccaaatgtgcatttcaagacaggtgaaatttgtcttgatatattgaagaatgcatggagccctgcatggacccttcagtctgtttgtagagcgataattgctctgatggcccatcctgaaccagacagcccacttaactgtgattcaggcaatctcctgcggtcgggtgacatcagaggctatcaatcaatggcccgcatgtatacaaggctggctgccatgccaaagaaaggttagatgtagaacatgtgccaagccaagagcctatgtcagtccatatgttgtcaggtttgctgtgtgctgtctgtctgtgaacttggtggttcttgtttcctaataagtcctaaccattcatgtgtgtgtattctgtattctgtatcccggattcccgatgcttggtctgtgatgtaataaatcctggaattcaacagttgttacttctgatctatttatttagttgctcagtatttccgtcaaaaaaaaaaaaaaaaaaaaaaaaaaaaaaaaaaaaaaaaataataaaaaaaaaaaaaaaaaaaaaaaaatagggggggtgaaaaaaaagttccaatgttttaataagcgtgcatgttacttgggggggggcctttttaggggacccaagttaatgtccccgggcttgcgaggtaaaagcttttttttggggacccccaattttattccaccggccgggtgttaaaaaccatgggcttgggaaaaccttggggtttcccaaataaacccctttcgatatcatccccttttttcaagggggctgtatatggaaatggcccccacccttttgccttccaaaaagttgccccgccttaatggtttagtgggccccccccctt

SEQ ID NO: 142508 - DNA, 380 bp, Zea mays
  unsure (1)..(380): unsure at all n locations
  Clone ID: MRT4577_6144C.1
tttcatatgtgcatctgcttcaaatccatcgaggctgtaaactttatctccaaggcgggccctatcaatnaccaccaatactgttacaaagccctttgcttaaaaacctatgtaatagtagccctctgccaatatggcttcgtcctggaaaaaaaccaaattgtaaaatcttattctatctntcattttctctactaaggagttttatttgtgaaatataattcttattattattacgaatagcttttttttatttattaaatctacatctttaatgttttatttttttgtgtatctctattaatttttatttanctttaattgttcatttatttatattgtaatttttttatataaatttcatcatttttatatagaat

SEQ ID NO: 142509 - DNA, 203 bp, Zea mays
  Clone ID: MRT4577_61450C.1
ttgtcaacagcactacgtctatttactctagagggcagaacaacaggaatgagatcatgagggcggggcggggcccaataggcttacggcgattggcacagacgccgatgcagagccatatacgccagcctttagtggctgcccccaccggcgacgggtcatctaccggcgccggtgcatctgccacatccggtttacctggc

SEQ ID NO: 142510 - DNA, 791 bp, Zea mays
  Clone ID: MRT4577_61451C.1
ataagcaaatagtctctgcacgtgattgccaaaattagtcaagacgggtgctctttgctgcgtggccgctaggccacatgggacaaagtctgaccctgctagcagagatcgttctatggatcctactgagcctcgttggcgcataaattcgagcttttctcctccaacgtcaaggaggtgggattgccgctattcatcagatggattgccccacagagttcatgatgctcctcatgatcacccgccatatgtttcatcactatcatcccatagcaaaggaagcagaagtgcatttggcagtgatcagtacctcaatcatcatcattctgcatctgatggagcactttcttactttgggagtccagctgacagccttcaggccccacgctggacaccctcccttcaaagatttgatctcggtgaattctctacccctgcaggagacatgccttcccattgcattatcagtgggggattgtaaagttagaatttggttcttgattaacaacttgtatagctgctattaattaccagctttttcctactgaactttcatggatcaagaccagaaacttctgattatcctcagtcaagtgagaggccactgactgccacaagcagtttcagttctgcatccccattttcggaatcaagccaactagcttcgtctagtaaacaagcggccccatatctacctcgcaaccatatgggcaggcggtctttcatgtctaaaccagtgtacccacttgtcttccggaaccctgtgtccgaatcaaaagcgtgcaggatgc

SEQ ID NO: 142511 - DNA, 741 bp, Zea mays
  Clone ID: MRT4577_61452C.1
ttgggaccctcgaggccggccgggcttgcttctccgaaccccaaaccctatcttcgctcgttgcggcggcgagccggtgatggcgaagtctctgcgatccaatcgcgagtaagcgtgcttacaggacgtgtgcggccgcggtaggatagcgggagtccggttgcttagcgtagcaagcaagagagagaccggcccaagtctacggcacgctgccagagcgcgtcgcggcctcgtaggcttgcctcgacctccggctaccgcaggctcccgcgtggtccctccgaccgatcgccagagatagcccgcgcaggcgtcgccggcgcgagcgtaggctcgcgtgctctgagcctactgcgagtgtgtgacgatgatctagactgcagcggcatacaagcagcgtgctagatacgcttgctgtgacggcacacgttgggcatgcacttagacaaagacagaagtgtgtgttcttgcattctgcacgatctcgaaagacgagagaaaagctaggaagaagggatagttgtcgtttaacaaatacgaggagtgtatgataaatcatgcagattctgctcccagctctcgtcaaacaaacgcactgctcgcatgtcgtgtggcgcgcctacctaaatgcattctggagctgacctactattaaatatgctgtcatgaccaccatgaaaggatagtgctgacctatcagatgcatcatgttcatagagagatacaaagagaatgggaccg

SEQ ID NO: 142512 - DNA, 294 bp, Zea mays
  Clone ID: MRT4577_61453C.1
cttcctatcacatattcttagttgatgagacacaaaaccggggtgatcagttgaataccctgttcttttcataccataacatagttccaccccttgatagtatcacctaacaaataccacattgatacagacgtttgagaaaatggtctctgtgatttatcttgtagaaattacaaagattgtactgcatttcatggctataaaatcagattttcctggtgaccctggttataatttatatacccccttcacatttagcacaccactctttactgcaattcgtaaggacgattc

SEQ ID NO: 142513 - DNA, 668 bp, Zea mays
  Clone ID: MRT4577_61454C.1
aattcggcacgaggcggagaagaaaaaaatagcggtagcgctcggatcccttcttcctccagatcacaccaccgtcgcctccgcctgcaaatccattcctagactcgagctgttgctgcgagcgagctcgggttggggctcaggtctctagggtttcgcctccctgctcctggtgctcatcgccttggaccttggtctgtcgggttagggttgtcgcggctgcgggagccgtgggtcggcgggtgcggccgatgcggcgatcgccggagatagggaggctgtagcggcggcggggcaggggatctcctgggtggattctccggcgatggccgcagacgcactatccatcatcccgggcgccgtgcttcggaacctttctgacaagctctacgagaagaggaaaaacgccgcgctcgagattgaggggattgtgaagcagcttgcaatggctggggagcatgagaggatatcagcagttatctcgctgctcaccaacgatttcacatactcgccacaaacgaaccatcggaagggtgggttgattggtcttgcagcagttactgttggactcaccagtgaggcagctcagcatcttgagcaaatcgtgcctcctgtgcttaattctttcctggaccaagatagcagggtgcgttactatgcttgtgaag

SEQ ID NO: 142514 - DNA, 1173 bp, Zea mays
  Clone ID: MRT4577_61455C.1
ttttttttttttttttgtcctactctaacctcttttttttgttcctttttttggggaagaatttacactttgctccctcatacaaggtgcgtggttttactgaaccacacgcacacgccatgtggtgtttctttcctcgttctcttcctttttgaccccagttaatcggctttggtatcaaagacacaagggatcgaaaaataccgcagcctggagagcaatcgttgtgctcccgggtccaaacaattgggtttgggggtgctaaagaaggggaaacaaagcacccacggcaatggaacggcacggcgggccgggcggtatacaggctccgctaggaggaccagctcctgagcagcgacggcttgccgaacatctggtcgagcgcgaggacgacggccatggccagcgacacctccatcccgggcctgcaccaccagccggaacacgtccgagcccacggcctccttggggcgcacctccgccacggcccgccgccgcttcgtcgtacaccgtgcagcgccgccgcaggtacgacccctccacctcgtacccggccgcggctccggagacgccgccgccagagcacgccgcgacgtgcgccatggacttggcgccgccgccgccgccgccgcgcatgtactgcgccgccggccgcttgacggcgtagagcgggggcaggcgccgggcctcctcgcccgggtacaccagccactggtcggcgcccagcccgaggccgatcggcctctgcctgcggcggacggtgagcacggggcggcccgcggcgtccatgagcaccacctccgcgcgggagtcggaggcgtaggtgtccacgcggtacacgaggtcgccgtgggcgtcgaacaccgtgaacccccggcagttgaacagcagcgacttgcgccacaccgtcagggtcaccggctcctcgtcggccggcggcgacaccgccaccgccgccggctgcccgagcccgagcccgacagacggcacggccacgttcgggtgtaccttcgccgtcatgcttagatcggcagactggtgtttcaagatttaagaatggtgggcagatgggaaggcggaggctagagctatagagagagagggggaggcgaggaatcgcagctgatgactgtgtctcggtctcggccggcctcgaggcccgcaatgcctcga

SEQ ID NO: 142515 - DNA, 373 bp, Zea mays
  Clone ID: MRT4577_61456C.1
tcatcctatgacacctaccttcgaccataacatttttttaccttacactcatacaggatcaatgaagctgatatcaaacttcgccagctttcatcttgaacatctttatcatgtatcactatcatcactaaatcatcattctgtatcaaccacacatgactatataccttcacaatctatttccctcaaaaatcatttaacaatgatatacccacaataccaaatatattcaaaagttcacttctatgactacatttactcactactaaattctttctatacatcctgacttttttacttattgcatacattacacttataccaaattatcactcattacacatttctttcacacaaattttaaaatactttc

SEQ ID NO: 142516 - DNA, 482 bp, Zea mays
  Clone ID: MRT4577_61457C.1
tcaagcggccgcccgggcaggtgctttttttttttttctttgttcttttttttcttttttttgtttaatcctttttcatcattattagcaacaatggcgaccaatatagattccctggcttatgctccccgctctttgtacatgtgttgctaaccccacttggggccctcaatgctcacaagctccgagaacgtaccttcttatccctgcctggcatcaatctatagctcaaaaatcgtgaaaaccgagctccacaaccatatacgcttaaaaaagggccccccccatgcaacataccttgatagggcgcggtggggtaacaaaaaccaggcctatccaagggcgcaaattgtggtacaaaccaaaaggggcgcggggttagcccaaacctggtctgccaaaggaaaacctgttgctgtggcaaaaaggaagccccacttgttgcaactagctcgctaaagggcaaaagcatttgttgacgc

SEQ ID NO: 142517 - DNA, 263 bp, Zea mays
  unsure (1)..(263): unsure at all n locations
  Clone ID: MRT4577_61458C.1
cncttcntnnnnnnagacaaaaaaacaccaggagcgctgtttggaaganaaacgcacaccgaaaaaaaacgggcaccactcaacaanaaacncagaccaagangnnnanaanagacccagcnccgaacaacannncnngaanagacnagaagggacaaaccggcancccagcacaaaccngacgagcagagccgcagccgaagcccaaacccagaaaccgaacccnagancnngnngaaagccacaaagncgcaacccnggac

SEQ ID NO: 142518 - DNA, 408 bp, Zea mays
  Clone ID: MRT4577_61459C.1
tcggtctgacctggcttggcccttctgaagtctggcgggtcttccggttggtcacttctggtttcttggcggtcgagaaccttttgacacctgaaccgagttccaatttctttattcgcccgaaggccttgggttttttgaagggaaaacaccgggaggaacaaccggggggtattcttccacccgattggtggattgcccaggcttgcttgggaatgaaccagcctgatccaatttcccattaaaatcaaaaccttttttaaggggcatttgggccgttactggaccaaggatggggctgtccgccgattaattgctaaaatttcgtaaaaaaaagcaaaccagccgggttttgctgttgtttccgcgaaggttcgctggaataggcatttccaacctggggggaac

SEQ ID NO: 142519 - DNA, 204 bp, Zea mays
  Clone ID: MRT4577_6145C.1
actctgggataccattgcgggtggtgactcagaggatgaccaagaaggtgttagatgataatttcattgatgacaccggggttgatccagctgatcgttatggcagtgataatgagcggcattcacctgggcattatgcacaggctgaggagggtgaggaggatgatgaaattgagagactcttcaggggtggtaagaggaaga

SEQ ID NO: 142520 - DNA, 537 bp, Zea mays
  Clone ID: MRT4577_61460C.1
aatttctctcccatatcccaccgatagatgcctgcggtcgtcccctccaagacttcgctgttggcatgtccatctacgaagcctcgaccgccgggcccccgttttccttcccggcgctggccactccatcgcctttccgacagacgcatctcctccgcctccactttgcctatgtggggatcacactaccactgaccatatggccggttcctcaggtcgggcaccagatgctccgaacctgccatatcatgctcggctatggcgggaacgagacgatcgcctgggccacctcccatggtcctcggcagctcaaaataagaggtgagaaatcatgcacacctgcatgtgttcgatattgtgcgcaatgatcatagtggagcttctgggtctcgatcatcacaaacgtgaacatgacaggaaggacagacggcgtaggaaagacgctcgatcgagagacggctgcctctggcatcacaagacctctatgtcgccatggcagctagacgcgcgatgcagccgacaacgcgccctccctcc

SEQ ID NO: 142521 - DNA, 729 bp, Zea mays
  unsure (1)..(729): unsure at all n locations
  Clone ID: MRT4577_61461C.1
gcggccggggcctgctctattcggtgcgtcgagaacttgctcgtcgtcgtgtgatatccggccgccaccatgagcatgctcgtacgccatcgccagacaccgattcctcgccctgggttgtcgcgggtgtgcaccgcacctgaacagcccagctaattgcacgttggtgatgggtggggccgcaatttctcgacggaagttcgcctcacgcccaaacccatggatccccatggctagatcgctccgtagctctctatcgtcgatgagtatttctgccacgctcgaattaccctccctgttgcgaatcgcggtctggattggtgcggggtgcaccggggcgctgacccggcgtgctccggcgacggcttcgtagtcattgggggcgcgctgccgctctcctccaccgtgggaggaagaaagcccctttgccatccatccattgatgtgcggtcaagattagatctggaaacccttaagccccgaacgtccgatgctagttgaacgtttgggatcgcgcccgtgcataccccttcgcgtttctaattccgaccgtggatctcggatccaacggctgtggcgcgtaccggttcgcttanattttaggatctaatccgggcccttggtccttcatcgagcggcccaagttggnccgtaccccttcacgccaccgattttgctaatgagcccctataatattctcaaatcaacccgtcgtccgtgcccctgtgt

SEQ ID NO: 142522 - DNA, 274 bp, Zea mays
  Clone ID: MRT4577_61463C.1
gcccgcccggaggcgtggaacctgaacgctgttgttgggggcagccgccaagcctttttggggcggaaggcacaaaacaaccacccgatggccctgttgttgttgggcggttgccccgggccgccggccgtcaacgcggccccgggggggtccgggttgttccttccggggctgccggggggggggttgggggccgccgccttttgggcctcttcggggccgtccggcaggggggcgtctgtcgtccaaggacggccggggttacggaaccggg

SEQ ID NO: 142523 - DNA, 297 bp, Zea mays
  Clone ID: MRT4577_61464C.1
gcgcgcgaacagctccaacttttgtaaccagagggacctcatggagcaggacgtgaagattctggatctggatgagtctatcgctcgtatgaaagtgatttactgttcttggaccaatgggaaggtgtccacatgctcatttaccgagttaatcttgcaatctgttggttttcatactggtctgtttactttaccacatttgattgttgttagagagctattccatcttatttgacttaattttttttatttgtttttttttgaagtactctatctcttgtgttggatcttattctt

SEQ ID NO: 142524 - DNA, 312 bp, Zea mays
  Clone ID: MRT4577_61465C.1
ccggccgggtcatgcgcgggactcaccgtctgatgacgtgcccgctcgtccgacccggctgaaacaaggcgagtccgtcgacagtaagttgtcagtgaccggtcggcgttggtttacataataacccccaccggcctgtgttgtatcgtgtcgcggtcgtagtcgtcggctgtcttgttgtcgccggagttgtttggtgctatctttttatttcgaacgcgtcactgtccactgctacgacttttctttgttttgctttctctttgatgggaataatatgaagtaatctaattacacgtttgtctttacctg

SEQ ID NO: 142525 - DNA, 299 bp, Zea mays
  Clone ID: MRT4577_61466C.1
cagccaaaaaattcattttgggattacaactaataagcaatttaaagggggccccgccaatgatgtgttgttggaagaaggctggggggttggacaaagcaggtgtggaaaagggcatcatctgttgcagttgaaagagggttgcggggttagccaaaaactggtgggtaaaaggaagcacttgatggtgggaaaaaaagggaggggggttgggtgtagttaggtggccaaatggaataagtttttggtgtggaaaataggaaaggggtataatggggacaattggttaaagggagaaa

SEQ ID NO: 142526 - DNA, 273 bp, Zea mays
  Clone ID: MRT4577_61467C.1
tccacgcgtgcgtacaacttatgagaccatgtatgtgtccgatcctgactttgatccaccgtatgatgctaggaaagctgctgaatcagatgctgagtcaggcatataggtagccattaccgttcacaagactgatggcagggctgacggaagggctgactcaagggagtccactggagatcctgctgatactactgatgatgctaccggtgcagcctacggcgagacctatggggtgcaagagaaggcgccagggaagtcagcaggaaaagc

SEQ ID NO: 142527 - DNA, 310 bp, Zea mays
  Clone ID: MRT4577_61468C.1
gccacgctcgccacgcgttgccaccttcgccaccgtcgccacgcgtcgtcgaccttcgtttgagcttgatgacacgtgcgattttgacaccatagacctcatatctacatattagaagccccgtcgacttacgggagcgtcccgatccggcgttgacacgtgtgatcgcaaccctaatcggatgtaatgcattgtagcagcgtggcctgagtcgtgaccgtgtcttttctcgcgcttccttcaacgcctctcgctaaagatccaccgatttttgctgggagtcgagagcgtgataccgggacgacgacca

SEQ ID NO: 142528 - DNA, 393 bp, Zea mays
  unsure (1)..(393): unsure at all n locations
  Clone ID: MRT4577_61469C.1
tcgagccggccgggcgtgctttactagaagtgagttggcttctcattcgntccggttcgggttcgggttcgtgaggttctccggggttcggtttcgcgggcgagggtatagacatggcaccacagcatgatgaagagcgttgctacgcagatgggctcggctgggacacagacgaccacatccctgcacgacagctgcagtacctacggcgaggtattcgagttgaagatcatacgcgatcggaagacacaaaggtcccgcgggttcgggttcgtcaccttctccacggaggaggcgatgcggaacgccatcgagggcatgaacggaaaggagctggacggccgcaacatcaccgtcaacgaggtccagtcccgcggcggccgaggaggtgtc

SEQ ID NO: 142529 - DNA, 489 bp, Zea mays
  Clone ID: MRT4577_6146C.1
ttttttttttttttttttttttttttccctgatatataagaagaattagaacatgcagcttttttacccttctatgccactagcaatggcatgaaaaggtaagaaaattgcatccgagtggtaatataaggaattagaacatttacaatggcatggcaagtaaggtcttggacaaaattgcaggggaattttctctagaaattaccatggcttacatgtgatacaatgcaactatcatggttagagaatacacaaacttttacattgaggacttgtcaattccattgttgatgtgtagagcttgcaactatgtgaactgtgtattctggatatgtcagatcaacctaaaagagtctaggtcctaaattacttttgtaattgggcacttcatctcaaaacacccatcatatgacaaatcactgggtatttgttcctgatcaccagtctcatccttcactgatgcaacatctgagtcgataaatgaaagga

SEQ ID NO: 142530 - DNA, 378 bp, Zea mays
  Clone ID: MRT4577_61470C.1
gacaaaaaacatacgagtgatatttatgctttcgaaggactttacagaatatatggcaagagatcaaaccataaaacgaagcaaagttcttttttttaaaaacaagaagaggactggggataagtggcaaccaaataacgcacacctgtatactgcggggaaaagaaagggtgggactccagctgcacggtatcattctatgtaggctgaccatcacacaaaccaaccatcaaggatgttgccaaaaaagaaaaagcaacccacgaagggcaaagcgcatttagaagcgagacaggatttgatacacaaagcaaggactgccttcccacatgagaacctgatagaccaggggcacatggggtgcccattacagcagcg

SEQ ID NO: 142531 - DNA, 442 bp, Zea mays
  Clone ID: MRT4577_61471C.1
gtaggtgcgggatcttatttattttggacaaactatgttgccacaaaccctggactcatctaaggttattgagagggcgacaagatgacaacccttttagctatgaagaagcgcatgaacaacttgcatagaccaagctaatacttgtttgatgctaaagcgctatatattgccacaagcaaaccaccccggggagagaataaaattgagagtccaggacgctcttttgcttgcttattgactgctcaagttagttcagaagtggcaagggttttcctagccactagtaacttattgtggtcgagttttgggacactaatctaggcgcaggctacattgcttgggcaatgattcttacctgaaggatcattgccacaacaaaggtgagttggaaaatagcataacctaatcgaactccacctgatgctgaagctactggcat

SEQ ID NO: 142532 - DNA, 247 bp, Zea mays
  unsure (1)..(247): unsure at all n locations
  Clone ID: MRT4577_61472C.1
tctttttttttcttcttcaagttcataaatagggtactttaagtccataagtaataacttgtcataacacatgaacnccgtcactagctacatgacaaactacaaaccttaaagacttataagtaatattagtacatatccgacgaactaggcatctctctccatgacaaatcagaagccattataagcacccatttagctattgtgagcagttcacattttgaagtgggatctgatctctcagaga

SEQ ID NO: 142533 - DNA, 320 bp, Zea mays
  Clone ID: MRT4577_61473C.1
ggggtacgattccgccagctacgcgcgcaacttcgatgacggcgcgtggaaggccgaggagggcgtgtcctgggccggccccggcggcgcgttcttccccggcgccaacatcggcggcgcggccgtggacaccgcccgcctgtgatgccgttcccagctccgtccgtccactagctaactggtaactgttgctgcgctggaaatggatggatcgtggtcgtggatgcgtcactcgggatttgctttcttttctttttttcttgttcatctggattattggcatttactttcttcggtctgaaatgaaaaatattcaggcg

SEQ ID NO: 142534 - DNA, 443 bp, Zea mays
  unsure (1)..(443): unsure at all n locations
  Clone ID: MRT4577_61474C.1
attccctttggacgacgcgtcctcttccctttataccccacccactcaaatatcctactcatctctccggctcctcctcnnttgggagcggcctaccccggcgacggaaagctacactctatctccccctaccacctcaagcttatcgctctccaaaaacctctttttcangacgatgttacttttaacaccttcaaatcctaccatatcagtctgaaccacgtctccaacatctgcaatgctctcactctcgattaagaactcgctctaagctacgctcttgctgcgtcggcacctagcactaaatcaagaaaaactcactcttctgctggaactggtctccccgcaactcctccctcatactgaactagaactctctctcttcttttctttcagctcccctactccatcactcataccctctaactatcactcacctacca

SEQ ID NO: 142535 - DNA, 245 bp, Zea mays
  Clone ID: MRT4577_61475C.1
ggcgaaatccaaaaggcatcaccgacgcgacgaggggggcagcctcgctccaagccgcggccagcctgatgcagccggccaagatcggcggccgggcgccctttgcctgcgtgccgtcccgcccgtcgtcggaactcgcctgcagggacttctgcgtcggcgccggcgccgccaggatcacgtgctccctgcaggacgtcgccagcaggtgcgtcgacaccgcgaactcggccggcttcgcgctc

SEQ ID NO: 142536 - DNA, 241 bp, Zea mays
  Clone ID: MRT4577_61476C.1
acctgacgaaaaaacagcataccaccatctgaattttccaacaaacagggtggtacacggttttccaagtgcggtaggcgccaaacccgtggggtcgcctagggtgggggcgggacatccggcccggaacgcggggggggcccagaggtccctatagtgagtcgtgcataagcggggggtgatcacgggcgctgcagccaactgcagcgaaatttgaattcggctggatttacagggaaac

SEQ ID NO: 142537 - DNA, 391 bp, Zea mays
  Clone ID: MRT4577_61477C.1
aagacgtgtaaaacttctttataaacaactgtacatacaccaaaatttggggaccttggacggtaacagggtaaccttgactctaatactccacaagttcggaataaaaatttaaaaaagggacccccgaccaaacttttgggagaagccctttatcgatgacccaccccccttaaaaaaagggcatttaaaattttcctggtttaacgtcctttcactgttggaaaccacggtaattatgcctccctggggagcgtggccaaaggtttttaaccagaacaacccccccaggggcaaattctgcaaggccaaacatacccttccgcggaatcgctcggggaaaaacaaaaaaattcccgtctccaaagcttgccaaacgggccaactttta

SEQ ID NO: 142538 - DNA, 785 bp, Zea mays
  unsure (1)..(785): unsure at all n locations
  Clone ID: MRT4577_61478C.1
aacagtggtaacaacgcagagtacgcggggggagcacgacacggccagcagaccctgccccggttcaactgccgtggccgtctcgtccccgtccagtccacctttccctcttcctctccgactccgccgccggcggaaccccaaccggcgaggatggggaacatcttcgtgaagaagcccaagattaccgaagtggacagggccatcctcaccctcaagacgcagcgccgcaagctcgcccagttccagcagcaggtccgcctccccttccgcggcaccctgtcctaacctgagctacggatggcccgacgccctcgcccgtgtcgagttccggccgtctctctgcctcctcgctgtgggatcgtatcagattcggtgtccgtctcgcgccgtcgcgcggaagcgggtgtgtgtgtgtgtgtggcaattgggatctggagttggatcgaagtaactcgcgagtttctagttttgcagggatcgattaacgtgtatcaattggctgctttcgcatagggcgccctggttagagtcgtgtcacagcaccgatccaggtcgacatatctggctggcgatcaggagtggagaaaaaatctctcctaattccatgctatagtccagtattcattgtgaacgttagaactgctaattttgttcgtccaaacatcaatacaccagtttctggcgcgaaaaaaaaaaaaaaaaaactgcttgccctacacgttagtgtattccaataatcggtgctgcattttgtcgaanaaaaaaaaaaaaaatttgcggcc

SEQ ID NO: 142539 - DNA, 387 bp, Zea mays
  Clone ID: MRT4577_61479C.1
aaaaaacccaggcggggggggggaaattttggaaacacccttccccaaagccccttgaaacggggggggggtttaaaaacccgcggggaacccaatcctggggccccccaccagataacccccccccgtttaggcccttggggggtcccggggcctaagggccaaacccggggaccccagaccggggcccttttttttcaagaagccccccaatggtcaagcccctttggggggaaagggaagaaaacgcccttttaggcccccccaaggccgggggagggtttccccccggggggccaagggtccccaaaagcacccgggccccgggggttccaggggttttggttaagttgggcccccccttttaaaaaacattggggaccgggg

SEQ ID NO: 142540 - DNA, 561 bp, Zea mays
  Clone ID: MRT4577_6147C.1
agaagcgcaggaggccccagcactagcgccgccccgccgccgcagcagacatggcgctggccgctcgcctcgactacgcgctcccgccagcgagattgggttcaagccacttcggggaatggaggcgtcactcaagctcgctcctttgccaaggatgcagctccagctgaccgacctcctggcggcggggatgatctcctgaagggcatattctttgcaggcaaagacgaagtgtgagacagctcttggtgttcttaaaaaggaaaagatcactattgatccagatgattttgcggcagcgcctcgttatgcccaagtcatgaatactgtaagggaacaggcggatcttctctctgatgctcaaaggattaaatataccatcgagaccgtcaccaagggcatccctgatgcacggacttacttgaacactcttccacagctcagaataaagcgtggccttatacatcatcttggaattgaccctctgatgatggaagctcctgagaagactgcaacggacattaacaaaccacttctgaggagcgacaacaagaacatggc

SEQ ID NO: 142541 - DNA, 136 bp, Zea mays
  Clone ID: MRT4577_61480C.1
cccacgcgtccgggcaattcgccgcaaccttttatcctcgcgagtcccgacctctcgcaggcgccgcacaaatggcacccaaggcgagaagaagccggcggcaaagatgcctgcggaggaggagccttttacatag

SEQ ID NO: 142542 - DNA, 608 bp, Zea mays
  Clone ID: MRT4577_61481C.1
cctcgaggcggcggggactattccatactggacgtctgagccgctctgactagggattgcctctccactggtaccggatctcatgatcaccttcacttacatcatgggggacgccgatgtcaaaccggaggctgccgccggaggtcccgagaataggacgttccccaagtaccgctaccgcggggtcgacctagatgctcttctccacatgtgcacggacgacctcgttcagctcttccccgcgagcgccagtagaaggatcctgaggggtctgaataggaattccatggcactcatcaagaagatgggcgaggcgaaaacgatgctcctgctggtgataagtcacagccagtcaagagacatctacgaagcatgatctgtgtcccagagacgactgtgaccatcggtgcggcctacaacggcaagacattcaaccaggctgagatctagcctgagatgatccgccactaccttgctgagtgctccctctcctactagccgcataagcatgcctagcccggtatgggtggcacccactcgtcgcggcgtattccactgaaatgaggtggcacccggctctggactctccccaccacccgctggcaatg

SEQ ID NO: 142543 - DNA, 673 bp, Zea mays
  Clone ID: MRT4577_61482C.1
cattgggtacctcgaggccggccggggcctgcctctcccccgccgcgccgccacttcccctctcccgtcaactccggcttccgcgcgaggtcgagctagcgtttggagttctcgagacctgctgtgatggcgacagagcaagcggcggagaactacacggtggaggacctcgtggccctgaacccctacaaccccgacatcctcaacgacctcgagaagttcgtcaatgagcaggtctcatctcagacatataacttggatgcaaatctcagccttcttcgcttgtaccagtttgagccagaaaggatgagcatacagattgtggcccacatactgattaaggctctcatggcaatgccagcccctgacttcagtttgtgcttattcttaatccctgaacatgtgcaaatggaggagcaattcaagactgctaggttcagtcaattttgggatgaagcagcaaagaaccgccacatatcggaagcagtgccaggtttcgaacaagcaatccaatcctatgcgattcatgtactttccttgacataccagaaagttccaaggcctattcttgtagaggcaatcaacatcgaaggtctcgcgttggacaagtttcttgagtaccatgccgcgaactcaggttgggtgattgagaagggtgggcagtctcaagtga

SEQ ID NO: 142544 - DNA, 415 bp, Zea mays
  Clone ID: MRT4577_61483C.1
agttggtccacgaagagatttggctaatcaaaggcagctgagatccagtcaatgaaggttttgtcttacctcgagcgaagagaaggcttttttatgcaccgagaggtttctctcggttttgctgtagaaatatttatcatgcatcctatattatatattcggttactttatgaccaaggtaagtaagctttggactatactgattctataaatacccttgtaggaatgcttgacacagagaacgccttgctctatcataaggtaccagatttaaatcaaaaaccaaatttctaagaaaaaaacgaacggtaaccttatccatcagctttagtaatttatgtgtttatcttacttgcaacaaatactatactgagactaccaaactatgaatgttgtttatgtgacatgtaaatga

SEQ ID NO: 142545 - DNA, 1359 bp, Zea mays
  unsure (1)..(1359): unsure at all n locations
  Clone ID: MRT4577_61484C.1
cttggtcgtttcaatgggatgggaagaatccctgagggctagaattttctgtggatttattcacaccttaatagcagctggatgatattttagtccaggtggtacgcattttaatctatgtcctcatttgtcctgactctacataatttggcgggccaaccctaaatagggttcgcgccgccgggcgggccgggagatcaggatccattaacacccctacgtacgcctttcctctggaaacccttctctcgcctgcctctcccccgccgcgccgccacttcccctctcccgtcaactccggcttccgcgcgaggtcgagctagcgtttggagttctcgagacctgctgtgatggcgacagagcaagcggcggagaactacacggtggaggacctcgtggccctgaacccctacaaccccgacatcctcaacgacctcgagaagttcgtcaatgagcaggtctcatctcagacatataacttggatgcaaatctcagccttcttcgcttgtaccagtttgagccagaaaggatgagcatacagattgtggcccacatactgattaaggctctcatggcaatgccagcccctgacttcagtttgtgcttattcttaatccctgaacatgtgcaaatggaggagcaattcaaggtattgatagttctttctcactacctagagactgctaggttcagtcaattttgggatgaagcagcaaagaaccgccacatatcggaagcagtgccaggtttcgaacaagcaatccaatcctatgcgattcatgtactttccttgacataccagaaagttccaaggcctattcttgtagaggcaatcaacatcgaaggtctcgcgttggacaagtttcttgagtaccatgccgcgaactcaggttgggtgattgagaagggtgggcagtctcaagtgattgttcttccgcgtaatgagttcaatcacccagagctcaagaagaacacagccgatatccttccgtttgaacacgtaacacgcatattccctgtccttggctgattcaggcgtgctgagagatctatacaaaactcagcgagtgaagcttctcttagtcattgcatcttcagtttgtagtgtaccctattgagattatctcggtataccagtcctttttatgccggagttggtttctgcaacctatggttattgttattactataacgaaatgctcagatatgagattggtcttgtccttcgaaaaaaaaaaaaaaaaaaatggtaaaaaaaaaaaaaaaaaaaaaaaaaaaaacggacgcgtggaaaaaaaaaaaaaaaaaaaaaaaaaaaaaaaaaaaaaaaaaaaaaaaaaaanaactcgggggggggg

SEQ ID NO: 142546 - DNA, 914 bp, Zea mays
  Clone ID: MRT4577_61485C.1
ccggggcctctcccccgccgcgccgccacttcccctctcccgtcaactccggcttccgcgcgaggtcgagctagcgtttggagttctcgagacctgctgtgatggcgacagagcaagcggcggagaactacacggtggaggacctcgtggccctgaacccctacaaccccgacatcctcaacgacctcgagaagttcgtcaatgagcggtttgagccagaaaggatgagcatacagattgtggcccacatactgattaaggctctcatggcaatgccagcccctgacttcagtttgtgcttattcttaatccctgaacatgtgcaaatggaggagcaattcaaggtattgatagttctttctcactacctagagactgctaggttcagtcaattttgggatgaagcagcaaagaaccgccacatatcggaagcagtgccaggtttcgaacaagcaatccaatcctatgcgattcatgtactttccttgacataccagaaagttccaaggcctattcttgtagaggcaatcaacatcgaaggtctcgcgttggacaagtttcttgagtaccatgccgcgaactcaggttgggtgattgagaagggtgggcagtctcaagtgattgttcttccgcgtaatgagttcaatcacccagagctcaagaagaacacagccgatatccttccgtttgaacacgtaacacgcatattccctgtccttggctgattcaggcgtgctgagagatctatacaaaactcagcgagtgaagcttctcttagtcattgcatcttcagtttgtagtgtaccctattgagattatctcggtataccagtcctttttatgccggagttggtttctgcaacctatggttattgttattactataacgaaatgctcagatatgagattggtcg

SEQ ID NO: 142547 - DNA, 270 bp, Zea mays
  Clone ID: MRT4577_61486C.1
attaaggtgtcgcttcgccttacgttttactgtctaaaaggtagggggggtcagttgtcttatgtcaccttaccgtcttaataactatgtttgtgagacaaatactgacatattacaacattttgatttattcagtggtatgatatgcataataacttgctgtctgtgatgttacttttcgtacagggaacggcctttaagtcaagttattaatactcccaactcgtgtacatttcatttaccttactacagatttatttatttttacag

SEQ ID NO: 142548 - DNA, 1353 bp, Zea mays
  Clone ID: MRT4577_61487C.1
gaccctccgaggcttgccgggaaaaaaaaaaaaaacgccttccctctgaaaactcttcattctcctctcctccgccgcgccgccaacttcccctcccgtcaactccggctcccgcgcgagatcgagctagcgtttggggttctcgagaccggctgccatggcgacagagcaagaggcggagaactacacggtggaggaccttgtggccctgaatccgtacaaccccgacatcctcaacgaccttgagaagttcgtcaacgagcaagttgcgtctcaaacatataacttggatgcaaatctcagccttcttcgcctgtaccagtttgagccaggaaggatgagcatacatattgtggcccacatactgatcaaggctctcatggcaatgccggcccctgacttcagtctttgcttattcttaattcctgaacatgtggtatgaaaaattacatcctgcacttttagttcaatagtatcagaggtgctgtgtagacctgcaatacagtgtgtttaattgaggcttgtgtgtgattaatgtgcacaatatccaatatttataaatatttggtaaagaagcccccacatccatgcttgaatatatattgtgctctgcgagtttgaaaatttgcaggaagcagactagtctcgcaaatgtcacagatgcagagattccatacaggcccacgcgtccggcctttacattttttggctgcattattttgtcagcatgtttagtctacttgtctgtgtctttgtttcagcaaatggaagagcaattcaaggcattgatagttctttctcactatctagagactgctaggttcaggcagttttgggatgacgcagcaaacaaccgccacatattggaagcagttccaggttttgagcaggcaatccaatcctatgcaattcatgtactttccttgacataccagaaagttccaaggcatattcttgcagaggcaatcaacattgaaggtctcgctttggacaagtttcttgagtaccatgctgcgaactcaggttgggtaattgagaagggtgggcagtctcaagtgattgttcttccacgcaatgagttcaatcacccccagctcaagaagaacacagctgataccgttccatttgagcacctaacacgcatattccctgttcttagctgattcaggcgtagtgagagatatacaatagaactcagagcgaatgaagcttctctaagcaattgtatcatctcctttgtggtataccgtattttaagatctcggtatacctgttcttttttatggctgaattggtacctgcaacttggttattactataacgaaatgaccagttatgagattggtcggccct

SEQ ID NO: 142549 - DNA, 685 bp, Zea mays
  Clone ID: MRT4577_61488C.1
attgggtacctcggccccggccgggatctttttactttctttctctctcttctcttcttctgcccgaaggacaggggtggcggcggctgccagctctcaaccgcggccgtgtccgtgctccgatggtggtggtgcgcccgagcccgggttcctttgggccggagctgcgaggcggtgccctgtgcctgcgtggctgtgctgcggctacgccgctctgtggctgtgctgcggctacgccgctctgcgcctgcgtgctcgtgccgtggctggtgcacacactgcaactttcaacagcacagtccttcaacttcgacacatgcagggcgacagccagtggccgtgcgcctgctcacggcggcggcgtgcaccatcgacaaggcccacacccatgtgttcgcatgctctggcgcggcggctatggctcataaagtttcacggtaattacaaaaacatgactaaagcttgttcacatgccagtatgccatgtgcttgaccagtagtgaaagtgtcaactcctctctgcttctttctgttaggctgcagcgccgaagccattagaacatatgacgctttttcttcctggcttctttgtaatttgcatgtcagcttcaagccaacagataaaatatgctatagagatgaattttcttttgttaagaaaaaaaaaaaaaaaaaagcggcctac

SEQ ID NO: 142550 - DNA, 195 bp, Zea mays
  unsure (1)..(195): unsure at all n locations
  Clone ID: MRT4577_61489C.1
tatctgcggtactaatatatctacaggctggacaaatatacatgggggaatgtaccataccctacgcgtcgcttgatttctataactatttatgtctgcctacgcatccttacccaatacacgatgaggacccacttgatctctnnctattagcttatcaaaattacaatggagagttatatttcttactttaca

SEQ ID NO: 142551 - DNA, 319 bp, Zea mays
  unsure (1)..(319): unsure at all n locations
  Clone ID: MRT4577_6148C.1
aaaaaaaaaaaangccaagaaccccaggcaagcaagcaagaagcaagggagccaacaaaaaccaaccacggccacgggacgncggaaggaaagccagaacccccagagcgcggacacgccggaggcggcaccacactcacgagccgcacgaggagcagaagcaagcgctgcaagggccacgagaccatccaggtgaaaggcaatccgctggcgaccacggacctaaaccagaacaaggaacaagggaaggggagggggaaaccacgccaggacaaccccgtcaacaccggcaagggaaagcccgacgggcaagggccag

SEQ ID NO: 142552 - DNA, 119 bp, Zea mays
  unsure (1)..(119): unsure at all n locations
  Clone ID: MRT4577_61490C.1
gtgangaggtccangnagcaatgggtttcggcntagtgcacctcctcgangcngtgttccnccgcatgtncctgtcggccggnctccgcncnggctcggccacggtgaacnccgaagac

SEQ ID NO: 142553 - DNA, 313 bp, Zea mays
  Clone ID: MRT4577_61491C.1
cccggaaaaaaaaggggccttttaaaaaaaaaaaaaagtaaatgcccccaaacttgtaaaccccaaaaaaaagtgccccccccaactggagctaggcccccaccacccccagggggccctttgcttactaacaaacccagttccaaaatataccacccatttcccccttaaaaaacgggccccccgggaggtccccaataaaggccacccccacaaggcccaccatgggaaaacggcccttccaaaacttggggtgggccctaaaaaagggccccctcctggccttggggctttccccccttaaaaggggccc

SEQ ID NO: 142554 - DNA, 359 bp, Zea mays
  Clone ID: MRT4577_61492C.1
tcttctgtctcacgcgtccgaaaccaccccctgagcggcgctcttttttgtcagggacagcagagaccacccccttccggcacactgtctctaccacctgactccatcaccgtgcctgtctgtgttctaggtacaataagagcatagagatccagtatctatcataagctggtagaataggatgagcaccacatctgcttcttctttgaaccccaacgcgccgctctttattccggcggcttatcctcaggtgagaggactactaccccgatttgttttagctcgtcaacaccaccgccttttctcttgacctctttttcatctgctccagctccacaaggccttctgctaatactttt

SEQ ID NO: 142555 - DNA, 670 bp, Zea mays
  Clone ID: MRT4577_61493C.1
gcttagggggtgtttggatcccacgtgctaaactttagggtttagggtttatgtttcaactttagcaccccttgtgctaatgggtgctaaagtttagcacttcatttctattatcttttaacaccttttagcacttgtgtttgaatctctaattgctaaagtttactaatagtgtagtgttaaactttagcaccgtggatccaaacatgcccttattcaaacacatcacagtcgaacatttttgttgttgtcatttatacccttttctgttctgtgtcagctttaaacgatggcctcattttgagcatctactattttcagtttccttctgagcttcagtacgacaccaacttttcttatgtattttatccttagggtgtcctaaagttgaaacataattcaatggcgactgatgaacggccaattgatcatacgtgttcatgcatggtaaggattcaacttcactgggaacaaagtgttcaagtaatatgacaatattccttgttcgtgttatatgccacggccatcttgccaggtctgcaaaaaatatacgcgcgcctacttacattgcctggtcacaaaagagctatgggttctcagctgctgtcatatcataacttatcatttatgatgcgggtatgctattttttgtttttgctatgcgttattc

SEQ ID NO: 142556 - DNA, 314 bp, Zea mays
  Clone ID: MRT4577_61494C.1
gccacacgaaccatgcctacatcaggtgctacaggaactagcaccgaacgtcattcgggctcatatagcgctagaatgtacccattgcatcatcaactgttcgtatcaacaaacagtctcttctagctttcgatccttacatcgacactgtatcacggttccaagataatgctcgctagacatgctcccagatcccgaaaaccggtataggctcaaataaggctatgatctcaaacaaggactggtccatatccttgacatgcctctgctggtattcatctatcataatactaagaaaccgaccatgacatcct

SEQ ID NO: 142557 - DNA, 350 bp, Zea mays
  Clone ID: MRT4577_61495C.1
tcccgggtctgtcccacgcgtttctttggaacgcaaaaggcaactacccaaaggggggtaattataccttccagaggcgctagacccaaaagccgacgccatcccattcttcctcgcggcggggagagcctgagaacacataaacaatggcgaaggccggtgctgagcttggtagcagcgatggtgtcaagggcaccatcttgtccacccaagagggaaaagggcccaccaccggcaccggaagcgtccctggccacaagcctggcctccatggggcccatggacacgcacccggtgacaccaccaatggacgcaagtcaactggaccacaccacaaacccgcgagcaag

SEQ ID NO: 142558 - DNA, 619 bp, Zea mays
  Clone ID: MRT4577_61496C.1
gtagtggcctgggcgtgccggcgcggaggagggggcgagggcgcgggcacgcggcggtggcggctggtggaaagagggtcggatcgtctcgccttcatcaacagccagacacgcagcctttcctgcgacccgattccagattcaccacgtcgtccagagtttgaaggtagcgctgaaaatgagttcattgagagaaatcagttgcagaagtcagaacctaacaacgacctggtacctggatttcaacatcctaatactcgccaaggagtcaaagctagaaccttaagctatgatgatctggtacctggaattcaacgagctgatggtcgccaagaaatgaaggctagtaccttgagctatgaagatgagcttttccgcaaatttagggcgtgtttggcatggctctgctccaccccagagtagctctactccaaaactctaggtggagcagctctgctccagagtttagattgtttctcataaccggtggcagtggtggcctggtgggtaaataagtccaaactccatgactaggtttcttttttggagttttcagagcagcaaaagaggtactccaaaaaattgtactgcagctccaaaaactccatagagtttacaa

SEQ ID NO: 142559 - DNA, 658 bp, Zea mays
  Clone ID: MRT4577_61497C.1
ctcgagggctcggccgggaaaaaaaaaaaaactggtcaccaagtcaagcgaagcgaagccatcccacgccgacgccatcacgcggcggcggtaatgggtctcgtcgtctccgccaccgcctcgtgcagcgacatcttcggccgacgccgctcctcgacgctgcctcccgcaactgctacccccacgtcgagtaccccacagctcccggatacaacgccggagccagagctcgtccgcgtcttccgccacttcgacgcggatggcgatggccgcatctcggtggccgagatgcgcgagtcgtgcgggtgcacggccgcggaggcggaggagatggtcgctgccgcagaccgcgacggggacgggttcatcagcctcgaggagctcggggcgctgttcgaggacgaagaccagtcggacacgctgcgcgctgcgttcgccgagtacgacgagaacggcgacggcgtgatcaccgcggaggagctgctccgcgcgctgcggaggctgggtatcgtcggggaggagatgacggctgagcggtgcgcagagatcatcgcggcggtggaccgagatggcgacggggtcatctccttcgacgagttcaaggccatgatggccaccgagccggcggcgtgaaccatacgcgcccggcgccccatac

SEQ ID NO: 142560 - DNA, 360 bp, Zea mays
  unsure (1)..(360): unsure at all n locations
  Clone ID: MRT4577_61498C.1
ggtgntgggggggggtagtcggaggggagcaatcccccctcagaggagattcaaaagatggaggtgggggcccggagtgccctttttttttttttttttagcaaaagctatacgaaagatatgacttgagttctcaccctacagaccggtcggtaaatagcaagcagctaccgaatccgacaagcgattaaccagatagaaataaataagaacagggggggagcagaaagacgagaggagaggagaggagagaaacatttgaggaatgaatatgacatggacctccactcaagtcaaggaggaaagacaccaacggctcaacccgacaggaaaagggtatgagggagaggcaagcgccat

SEQ ID NO: 142561 - DNA, 468 bp, Zea mays
  Clone ID: MRT4577_61499C.1
aagaaaaaggttttttggaaaaaaactggcccccctcaacaataaactcagcccaagaggtttataatagacccagctccgaacaacgtttttgtaataaactagaagggataaactggcatcccagcccaaacttgacgagctgagcccctgccgttgcccaaactcaaaaactgaactctaaatcttgttgaaagccacaatgtcccaactctggacgtacccattgaggggctcttgcgtaagggggcccccaattaaaggggcgatggacccaaaatcgccgccaattggcaacatgaaagccatcttcttgaggccgtatccaacaggcccaagctttgatgccccccaagtcaaaccctccatttggcccctggggacagccccccccagctttttcatatcagtctcatcggcccatggttttacatccctaaggccgggggatttccccctttctttttt

SEQ ID NO: 142562 - DNA, 329 bp, Zea mays
  unsure (1)..(329): unsure at all n locations
  Clone ID: MRT4577_6149C.1
attaattatgattcttttgggggggtttnttttttttttggtagcaaacaattgctaaaaaaaacctttaaagttcgctagccctacaaaagaaacatccaatgcccctttttacagaaggttttacccaccccctaactcaacgaacggttaggctgtacgagaccttttctacatctacaggacctcggccgtcttgacctacaagaacattctgtgggagaaaagaactcctccatagttaaattcctcatcatttaacgccggtctttttctaaacccctccaactttctacatgagcccatgcttttagcacgcaaccttcaac

SEQ ID NO: 142563 - DNA, 574 bp, Zea mays
  Clone ID: MRT4577_614C.1
atgggccccaaggtcctcttttcgacgttcaacggcacgaacaagatccgcgcctacgcaccctgcgcgaagagatcgggaagggtcctttgctcctgatcaaccttgtcggcaacagcacgaaccgcatccccgtcccgagccaaggggcccaggcccaaagtgcgcggagggaaaaaacggggggacgcctggtcgcttccctttccctgcgcttggcggagcagccgagctgctcgcaccaaaagaggagtaccccctcgctcccaaggacggcgatttgcagagccagcaggtgctgctgaacggccatgttttggcaactgacgccgacgggggcatcccagagctggagcccgtgcgggtggatggaacgcagccggtaaccgtggttcggataaatccgggcgaacggcgaagcttgttcgcctgtccgtgcgtgaagtaaaactgcgaggctgaaaggtgtgcgatttgtccttgtttgggaaacaagtgttcggataatgtgtgagcaaaggggaggaaagtggagatgaaaataattaaaggaaaaaaaaggtttcgaattttt

SEQ ID NO: 142564 - DNA, 845 bp, Zea mays
  unsure (1)..(845): unsure at all n locations
  Clone ID: MRT4577_61500C.1
attgggtacctcgaggccggccggggggttctccaccaccatcttctccactgatgtgctcgctgctaatctccgcggaactggtaagcgggaacaccggcggcgacgacatggcggtgctcatccagctcaaggccttcctgcgggcgcacaaccagataaaccggggcgcgtacgacggatggccggaggcctcgccgtcgccgtcgccgtgcggcagctggcggggggtcgggtgcgacgcggacggccgcgtgagctccctcgacctctccaggtccagcatatcgggcccgctcttcggcaacttctcggggctcagcggcctcgtccgcctggacctctccgacaactccatcgccggcgagctcccggctgacctcgacaggtgcgtggggctgcaacacctcaacctctcgtacaacctcatatccggagcccttggcgtgcccagcctgacaaagctgaggacgttagacgtgtcgcggaaccggctcgagggcgaagtcgtcgtcgtcagcgggaacttcaacttcctcggagcatgtgacgacctcgtcgtgctcaacgtctccggcaacagcctcggaggcgacatcgccggcttgctcggtaactgcccgcggcttcggtacgtggatctcagcatgaacggcttcactggccgggtcacgcagtctctgggaatcgcgagcctagctcagttcagtgctgccgagaatcggctggnncgggagcgttcctcctggcgtgntcccanaagggtggtgggctgcagtccctggacctctccggcaacccgttgtctggcagctttcctgattccgtgtccaactgccccggct

SEQ ID NO: 142565 - DNA, 276 bp, Zea mays
  Clone ID: MRT4577_61501C.1
tcgaattcaagtacagacggttcacgaggacaccatgtctgggaaggacctctgccggggtcacggcgaccaacccgggtttttcctggagaagacgatatagagatgaaatcgacattgtatttggctccgaacgaatcgaatggtttcgggtttcgtacgtcactcgacgcagcactttcgccccagttttttgaccgaacgggtcaaattagtatgccagtccctattgagaaggttgacagcgaactcgatggtattaccttgaaatccaca

SEQ ID NO: 142566 - DNA, 1360 bp, Zea mays
  Clone ID: MRT4577_61502C.1
ggaccctcgaggccggccgggccgggacaatcggagtagatcaacacaatagctctccttgttttttttttcaaataaaaaagcacgagctcagcgccatggcgcccgccaaagcgcagcacacaagcactaaccagcagacattgctggatgcgcagctccagctctggcatcacgccttcggctacgtcaagtccatggcgctcaaggccgccctagacctcggcatccccgacgccatccaccagcacggcggctcagccaccctcccacagatagtcaccgagctggccacactccacccgtccaagacaccgtgtctgcgacgcctcatgcgcgtgctcactctcaccggcgtcttcggcgtcgtcgttcagcactcgacgaccgacggcggcagcgatcttgtctacgagctcacgccggcgtctcgcctcctggtcggctcggcgccgtcgaacggcccgaacgtgagtccgtttctgaacatgatcctcggcaccgccttcgtgtcctccttcctcgacctcggcgagtggttccagcacgagctgccggacccgtccccgttcaagctggcgcacgggcggcacgtgtgggacatggcccgccacgacgcgagcttcgccaagctctgcgacagcggcatggtcgcggacagccggttcatcatggacgtcatggtcgaggagtgcgccgacgatgttttccgagggatcagctccctggtcgacgtcgccggcgggctcggcggcgctgcccaggccatcgcgaaggcgttcccgcacatcgactgcagcgtgctggacctcccgaacgtcgtcgccgctgcgcccactagcaccgacgtgaagtacatcgccggcgacatgtttcagagcatcccagccgcagacgttgtcttcctcaagtgggttctgcatgactggggcgatgccgaatgcgtcaagatattgcagaactgcaagaaggccataccatccgaaggagggaaggtgataataatggatatcgtggttggagcggggtcgtccgaccggaagcatgtagagacgcaggtcttgttcgatctctttatcatggctatcaatggagccgaacgagaagaggaagagtggaagaagatcattttcgaagccggatttagctcttacaatatcatacccgttctaggtgttcgatccatcatagaggtctacccgtagtccatacaagttaatgtaacaaagtgctgttttgggcgacccagatgcagtttcgttgaaagcgtccctgaatgatgctagaatcaacagccacacacaataattaataatttgcatcacgtggacaaatttcccatgtgtttggttgctctcgc

SEQ ID NO: 142567 - DNA, 371 bp, Zea mays
  unsure (1)..(371): unsure at all n locations
  Clone ID: MRT4577_61503C.1
acgccgcacaccaagggacccgcagccgccgccgaccggccgggaggcgngggagggccgcagcgccccccgcgacaccaaggacggcgaccgccgagccnncngccgccccacccccggcgcgacggggaagaacgggaacaagacnngcncgccgaagccgcncgngggacgcccccnnggcncccgggggcggcgcggcgccggcggacccgnncccggcgccgccacggacgccacagcgcgggagcanaacacgccangagangccaacggacaaacgcaggangaaaccaaagacaacaggncgcgggnggcnaanaacacagcccaaaaggcagccagcgccgacacagaggccccgaagaggg

SEQ ID NO: 142568 - DNA, 588 bp, Zea mays
  Clone ID: MRT4577_61504C.1
aaaaaaaaaaatgggcaaggcgggaaatggaaaaaaaccccgggggcaaaaggggaggcccagggaaaaagtttgggagaaaaaaaaaggcccgcccccaaatatgacccgcacatcaccagggaaaagttaaggggaccaaaattcccaacagcggcggggggtttaaaaaaggggaacccaaaaaaggccaggaccccgagggttaacacgtccaaagggaccccccgggacagttcctccttgcccaggcgcggggggggaacggcctgcagggggggggccaaaaaggggacaaccccgggggaccccataaggcccacgtcctgggaaaaggccccgctggggagggcccacgaaaaggggggcaaaagggggcccatcagggaccccacgagggtgaccccgaggggggcgccggggcacacccgggggccggggccaaacgggaacacgcggaagtgggcccccttgatgtcaatgttcccccggaggaaccgctccggccggaactggagggggggggcccacacctggggggcgcgccccaccccccaaacgttgacaaccacgttggccccctggggg

SEQ ID NO: 142569 - DNA, 413 bp, Zea mays
  unsure (1)..(413): unsure at all n locations
  Clone ID: MRT4577_61505C.1
tgtcaacgacgacgtctgccggcagtgctcctgctcctcctcctgctccttcccggccgccgcgcgagcttggtgggttagtgtctcttcttcgcggagaccggtgagaggagccattaagacggccgaggcggagaaggccggctagaaggatggggggtgctactacaaggagctgagggagaagaacaagcaggggggggggggggncccccaccatccagaagagccaggagatctgcaaggagatgtgatacacccgggtgcggaaggctagcaggtgggtatgaggcaaggcggagggagcaggatgggagcagagcaggatggaagaacaggaaggacctcaaggtgggggagcctgggagtgcgagctctactcggaggtgagctgtagccagggggctgcggag

SEQ ID NO: 142570 - DNA, 314 bp, Zea mays
  Clone ID: MRT4577_61506C.1
ggagtccttcccggcgagccacgagctgacgacgatgtcccgcaggaaccgccgcttcgcctccggcgaccggaacatggcgccgagttcgctcccctcctcttcctccatcgccgccgcgaaccgcgacagaaggtgctgctcgtcgcagccgcctccgtcgccgacgccgcgcgaccgctcctccgactccatgatcgccgcgacgtgctcgtcgacgatgcggatggcctcgcggagccgcctctcgcttccgacgccagcgagctgcatcgccttccacacgacggcggtcgggtggagcatgcgcgcga

SEQ ID NO: 142571 - DNA, 589 bp, Zea mays
  unsure (1)..(589): unsure at all n locations
  Clone ID: MRT4577_61507C.1
cagctatcttactgcgcngaatggnaggatcttgttgctcggtttgatgggctcgattcgattctatgtttaccgagtgatgaaacagatcggaatgcaaagaaacaganatcttttaactgtttgttaattggagtctgccatccactgtacaggatgttgaagcctccgcctgtgctctggtttcccttccttcctcgccaccgatctgtggtcgccgccggcaaggcaccttgtgcaaaaccgttgcttcttctcacatttgtctctgcggcggcaagccggcagcgcccgcttcgggaagcaagcacgagcacccacatgaaaagcctctgtcgcgtcgcggccctctgaaaagcttggatgaatgagcagcgctcgtcgtgtcctccataattgacttctgtgccaacagccacgggaccatgcatccaagtgcaactgtctcgatccgtccgagtccgatcagacaacgcagtgtttctttgctgcgtgctggactggacattgctggagggcttccgggaaacgctcacggtcgctgggcggcggttaggccagtagatgtccaccgtgctgtcaaggcagc

SEQ ID NO: 142572 - DNA, 437 bp, Zea mays
  Clone ID: MRT4577_61508C.1
ctggcgcgtggatcagctggaggagcactttacatgtggcatgggatgaatctatcgacactgataaggctcttgattagaaagtagggctgactgatgagaatatcttatggggcactcacgctaatgggagtagttagagcatgctaaattagtgcaaccaacactctgatgagctcacaaataaggggagtggccgagcaattgggaacgcacatatcttatatccaattggccaatgaattaatacggatgaaactgcatgaatgagtataataactacagacaacaggtactacattgtagacaaacactaaccttgggaaatgatcattccacactaaagagaaatatagatgaactgccattataggaaaaacacgtacattaccgtgtctatgcagaacacaccagctgagtgatcgtggtacaacaca

SEQ ID NO: 142573 - DNA, 363 bp, Zea mays
  Clone ID: MRT4577_61509C.1
catggagtagatcgcctacggacgaaacaaaacgtatatctatctggatatctacacgggggtggttccgagacctgagggcctgaccttacatattctctgagcatgctactctatcttgacgctgatgagaagtggattcgctggccttggcctggctggaaaaagctacagggacatgcttatgacttgggcatgccgactgcgtcgtcttagaggtaccaatttcttactatgtgccttagaccatgagacatatgagttcttcaatcttacagggggatccaagttttaatagacccattgtcaccaacaaaggttaagctttgccaactgccactttggaaccaattgttttcaaca

SEQ ID NO: 142574 - DNA, 1822 bp, Zea mays
  Clone ID: MRT4577_6150C.1
gtcgtattaaattcggcacgagctcgtgacgaaaagacgaagcgaatggatgaccacctaaatcagcttcagtttgagcatgcccagctgatggctcagtttctcaccccgcgctggtcctggccagagcggtgtgcgcaggtttctgagctggaagaagaggtagagacgcagaagcttgtaatatccgagactgcagagggaaaacgagaggctctttagaagctgagcatgctcattgccaaatagatttgagtaccaactcagaagttactgaacatgaaaggccacaggagaccgttggtgatggcaaccacatcatgagaaaggtgccggattgcacagattctgctttagagagctcaacagaagtcaacagccaaaaggaagcattggaagctgtgctgtttgagcgaaaaaatgaaatcgaaattctgaaaggtggaatggcctcagctgctaagcaatttgaagttgaattggcacatcgtgatcttgaaattggtaagtgcaagcatgaacttggagtactctcagagaagtatttgcatgataagtctactctcgaggatgagcttagaaagctccatggaataatcaagaatatggaaggtgacctagaaaaaaattcacaggagaaaatgcagctcaagtctcggattaaagagctcgagcaggcagctcacagcttagactattcagcttccgagatagttgagctacaagaagtaataaggaatacacaagcggaattagaaaaggttacagaggataaaattgtgctcaaagaacgcgctaacgaatttgagcaacttttaagggcccttaaggtctcaggtacagaggttgcaaagctaccagaaactatcaagaacctggaagctcagctagaaagagccttagaagagaaatcaatacttcaagaccagatcaagcaggtggagcaggttatgtctgaatctttggagaaacattcacatgagcagtcctctcttgctgctgaccttttgaagttatctgaagcgaacacttcacttggaggcaaattatcctctgtggcggcagagcttgtgcaagtttatgctgataaggaagaagaatctcttgataatgagaagcaaatttctgtcctcaatcaagatattgccgatctgaggagaaagcttgaattgttatcatctgagaaaaccgcagttgatgatgagttggccaaactgctagctgatattatgattcgtgacgaaaagatgaagcgaatggatgaccacctaaatcagcttcagtttgagcatgccaagctgatggcagaatttgacaccgcacacaggtccttgtcagagctgtgtgcgcaggtttctgagctggaagacgaggtacagaagcagaagcttgtaatatccgagactgcagagggaaaacgggaggctatcaggcagctgtgcttctccattgaacactaccgcagcgggtatcagcagctgaggcagctgttgcaaggccacaggaggccgttggtgatggcaacctgataaagtgaacaatgctggtttgccaatgaactgcacagttgcttgtctctgggtctgttctgtttttagccttgttctttcacaacatgtgccgtgcagcatggtattaagaattttgtggtatgtgtgtagaatgcaatgggatgggatattcatgtcgttcatttacactcctatgttttgttcttgttgcctactgttgaatgttatgatatgcttgaaccttctctttttcagtcacgactttatgtggtcaataactgaactgcacaatggaactcccttttcaatct

SEQ ID NO: 142575 - DNA, 553 bp, Zea mays
  Clone ID: MRT4577_61510C.1
tccataatctgaatagccacatagatagtttgtaatggcataattaatagtaactagctgcagttagtaatgcagcaaatatgctaaattgctaatgcaatctagcaatagctactctccctgtctcccgtcgcacagctagcacagcaggcagcgagcgtgtgcggccagggagcagcagccgcgcccagcagcagccgcacgcagggagccgcgcgcagggagatcgcgcgcccagcagcagccgcacgcacgcatggagccgcgcgcagggagagcgcgcgcccagcagcagtcgcacgcgcgcagggagagggaaagcgcgcgcagggagagagagagcgcagggagatttgccgcgcacccagagcagcagccgcgagcgcgcgcatggagagggagagcgcgcgcatggagagggagagcgcagggagatttgcccacgggcgcggcgctgaaatttccgcgcgcacagtgaaagcccaaaacaaaacgcacctaaggcccagtgcaaaccctagcccactgcaaaccctagtctaaggcgtcgccc

SEQ ID NO: 142576 - DNA, 612 bp, Zea mays
  Clone ID: MRT4577_61511C.1
atggaaagagttagggtgcagaagaacattgaagaacttcaggattccaaggaaaaatgctacgaagtatccatggaatgggcaaataaactaaaagatagctttggaaaggtgggagcttattcttcggagcagaaatttattcgtggtgatcctgaaggggttatccagtggataggcgaagaggccgaaacttttgatgagatacttagtgatcgtgaagatttttgtgcttttgccggtgcccgaggggctgcagcaattttagaaaaagccgggtgtgaacatgttaaggccgtagcccaagcagaatctattctcttagttgatgacactagggacctttcggttgaggcctctacactgtgcagtaaattctactccgatgtgtggatgaagggtggtcgtgagatggctgatgaagccattaaaaataatgagaaagaatctcacgacgcccgagaggaggctaagcgagctgaagaagctgttgaacgcgccattattatatgtatcttcggacctgagttaaaaccacaacgtgaagaagcacagaaggtgtacggaggatggcgcggagccgaagctgtttgtagaagagcttcggcatga

SEQ ID NO: 142577 - DNA, 666 bp, Zea mays
  Clone ID: MRT4577_61512C.1
ccggccgagatagtaagtcctcgatcatccctgaaattaccggatggctcccaagatctagaatccttgtgttcctcgccgaggactcaccggaggatctggccgccttccatgtgatagagatgctggccgacaagcccacgtgactccacgtctcctgaagctcctgcaggacaccaaggtcgctgggcgaggcaaatcacactccgagtcggcgactcgtactggtcgaccccgacaaacttgccaagcctctgagcgtctgtgcccgacgataaggtgcgggcggaggaggaaaaccacgtacttctcagatacttcgaccccatcaagctgcaccagatgaagacacgcaccgccatcctccccacggtgctctccgtcaccgacgataaagtctgtgtcctcaactactccagggccgacgacggtgatatggacttcagcgctcccggcgtcccctgcgtggccaagctcgagaaggtcgtcgcagcgcggtcgtactctgcggccatcatgaacatcaacgagcccattttgccggccgcgttgccctcccccgacgctggcgcccggacgccgactactatgctggtaagcgcaagatcgatccatcaccgcgaacccatgaggattccaacatgataccgcgcaacaccgtcgaag

SEQ ID NO: 142578 - DNA, 483 bp, Zea mays
  Clone ID: MRT4577_61513C.1
gaggaaagggctgcgagccactccgattatttttcaaggacaaacatcccatcctcaaaaaaaaggggggggagagaccggttgtacaaacccaaccccaaccactgttcccttttaacggcggcaaccaaacttacaaacggcccttcatgatcttaaaagctccccccggctcaaggatggaccaagaccttcccgagggaggaaaaaaaaacttttgaagtgaaagagtactacaaaaccccccccaactaaaaaagacaaactttttttttttcccctccgggagggaaaaaaaaaaaagaatgacacggctggggaaaaacacaccactctcggagggccccctctgattaaaaaacagatcaggattggggccccctgcacccataacttgttggagggctttccttccacggccagggacccggtgcttgccatggggcgtgtcttgatcccgctcaccatttccaagcccccccg

SEQ ID NO: 142579 - DNA, 160 bp, Zea mays
  Clone ID: MRT4577_61514C.1
agcgtttttcttggcgcagctggcggctccgaacacgcagtcctcgctcggccctatcttcgcgcatgccgccatggacttgtgcgcccggaggtccacctcacacgccaacaacaacagaccgaaggacccgaatcccaagagcgacaaacacctcagg

SEQ ID NO: 142580 - DNA, 278 bp, Zea mays
  Clone ID: MRT4577_61515C.1
ctgatactcttggacacggtacccatgttgctggcactattgcaggctcaacctacggtgttgcgaagaaggcaaacattgtttctgtcaaggtcttccagggagcagagggaactgattccggtgttctcgccggtttcaactgggctgtcaacgatatcacctccaagggtcgcgccggcaaggccgttattaacctttctcttggtggtgacgcatcccaggcttgggtaactgctattgacgctgcgtacaactcaggtgtgctctctgttgtc

SEQ ID NO: 142581 - DNA, 451 bp, Zea mays
  unsure (1)..(451): unsure at all n locations
  Clone ID: MRT4577_61516C.1
acccacccgnccgcaaaaaannccgccgcggcgccggcngggaaggcngcccagccagcggcgaccaccaaggggcggaccaagcccgcaccggcggcgcagacgggacgggacgcacgcggcggcggcncaacagcacggggaggcaanggccgaggcgaacgaggccgaggcagaggcggacggggatangggcagaaccggggctacaagggcgacaacgggaacgagggccagggaggcnanggcggcggacgctanggggacggcgcccgaaccgggggaccgaaggagaaagggagagagacactcggcccccgacccggggcggaggcagacggaggggaaacaggaaaggcgacgccgcggacgacnctgagaggccaccacggagaaactaggagcgccacagcgggaccggccacggctacgagacgaaagcggatggcgc

SEQ ID NO: 142582 - DNA, 168 bp, Zea mays
  unsure (1)..(168): unsure at all n locations
  Clone ID: MRT4577_61517C.1
acgaaaaagaaagcgccccnnncnctttgaggancaggnannggagngggacaggaaaaangncnncaacngggncaacacgagaggaaaangnnnacanggccaagnnggccaagcaagcngaacggnangaggaaanggnggaanncaaggagaaagnnngaaaag

SEQ ID NO: 142583 - DNA, 257 bp, Zea mays
  Clone ID: MRT4577_61518C.1
gaaccacccgtgcgcggacgcgtgggcagacgcgtgggctatctaagacgaaggcagtttaaatgtcattagcaaaggcccacactaagaagcggttaaatttatgttatcgccatgaaaatgttcatttctaacttaaggatcgtttcatatgaaagtgcaagcaatataattctttttttcccacataaaaaataaaaaaaacgtcgaactctaaaatataaaactattctactaaacacaatcatacaaaatca

SEQ ID NO: 142584 - DNA, 1748 bp, Zea mays
  Clone ID: MRT4577_61519C.1
cattgggtacctcgaggccggccggggaataattcaaactctccgagagaaaagcgcaaaaaaaaaaaaaagcaggacggcaatcgcatgcttgcgacgatgaccgccagcaagtgaagaatccagccacctgacctcgtaacttcttcttcttcttcttctttcgtcgttctactcccatcgaagctactactgaggacgggcgcaggcggagaacgagcggatccgctagcaggggaacagccggcgcggaggaagggtttggaggatgacagaagctgcagttattacaaggtactggtgccatggatgcgagaaggtcatcgaggaggccatgggggaggagatcaagtgcccgttttgcggtggtggattcatcgaagagatggccggggaggattccgaggggttgcagttagagcgggagtggggaacgccgccaggggacagcgaggacgacgatgacgacgatatagcccatgagttcgagggctttatcaggaggcacggacgggcatcggctctgcgccgggtgctcgacagcatccaggacgaccttagagccgacagggaaagggacaactccgtcctcatcaacgccttcaaccaagccctcgcctcgcaaggctcggcgctgctggatgccgacgaggcccgagacggccgaggtggatccagcaacagcaacgacgatggcttgctggaagagtatgatgtcctgggggctgggctgagcctactgcttcagcatctggccgagaacgacccgaaccggtacggcacccctccggcgaagagagaggcggtcgaagctctgcccactgtccagatagcggaggccgtcagctgttcggtctgcctcgacgatcttgagctggggtccccggcgaagcaaatgccctgtgggcataggttccactcttcttgcatcctgccatggcttgagctccacagctcttgccccgtgtgccggttcgagctgccgtctgaagagacgaaagatctgaacgagcctagcgatgtgcacagaagaacagagagcacccgagaggaagtcagggccgatgaccctgagaacgacagcgagagcggtaacagcgcgtggccccttgtcccttggttcttcagcgggctgttctcggtacctgaaccgtcgcacactgacagaggcactctcaccaccgatcaacagagtccttccaccaacccaaatgctggaggaaattgatttcgtcatcctttgtgaataatgctcatacatctgagaatagcaaggagccttgtcagtagatggcttattttttttctgtactgataatccttctcggatgaatcgcaaggtacggagtctgtgtctgctctattgtcaggattctagcgatcgtttcgcctctagttaatctcatagctactgagactgtctgtctgcatcctatgcaaaagatcggttgctttctttgttcttggctcttctgactggatgtctttgagctatttctggaatatgtaaactatcatgccttgtatttattcattgtttagttgaaatatatcttcatatcaagtaacaagtaaaaaaacctctgggcggccgttcttgtgggtcctcgctttcgtccgcgtgcttgcttcgtcctcgcttcttctttgtgttgccttttttcttttcactggccggtgtttccttcgttcgtgctgttcccccctggcgttcccctcttttcgccttgctgtctttcctctttctt

SEQ ID NO: 142585 - DNA, 688 bp, Zea mays
  Clone ID: MRT4577_6151C.1
ccggccgggatggaccagatttccttgacatctctgctggctctggtgttggctgtgatgtatcaaagaagggtagtgaaaggtcttcatcattttcagtttctgattcagagcttgatgaggccaaagaggaaaatggaagtattttttatgccctgagccaaaaaattgttgagctagaagatgcgcttcaagaagcaaggaaagaacttgatgctttagaagaaaagcatgcacattgccagaatgatttgagtacgaactcaaaagttgctgaacatgaagaaaaactgcatacttcagatgtggaatccgacaaccttaagaaggatccagaagaaacggattctgctttagagagctcaacagaagtcaacagccaaaaggaagcattggaagctgtgctgtttgagcgcaaaaatgaaatcgaaattctgaaaggtgcaatggcctcagctgctaagcaatttgacgttgaattggaacatcgtgatcttgaaattgataagtgcaagcatgaacttggagtactctcagagaagtatttgcatgataagtctactcttgaggatgagcttaaaaagctccatggagtcatcaagaatatggaaggtgacctagaaaaaattcacaggagaaaatgcagctcaagtctcggattaaagaacttgagcaggcagctcacagc

SEQ ID NO: 142586 - DNA, 974 bp, Zea mays
  Clone ID: MRT4577_61520C.1
gtggtagtcgagacgagcgcggcgcggggcggagcggaggcaaggcaagaggggaaggaaaccccaccggccacgaagcagaagcaggcgagcgtggcagttcaggtccagtctccactctccagtccagtacactccacaccatcaccgccgccgccgccgccgtgacgagggggcagagggcagtgatagagcagagcagagagggctagggcggggagacgaggccgagagatccccaggaccccggtggcgagatgggcattcgcagagctcgccggttcctcttcctggccgccgccgtcttgctgctccacgcgccgccgcccgcgacgtccgccgacctctacgcgctcatctacaagggctgcgccaaccagagcttcccgggcggggtggcgcccccgagcgtcgccgcgctctccaccacgctctcggcgcagtccgcctccgccaagttctacaagacctcctcctcgtcctcggcggcctcctcctccacctccgtcttcggcctcttccagtgccgcggggacctctcggcctccgactgcgccgcctgcgtctcccgcgccatgtcctcctggcccggcgtctgcggcgcctccgtcgcggcgcgggtccagctcgccggctgcctcgcgctctacgaggtgtccggcttcccccaggtctccggcgtccagatgctcttcaagacctgcggcaccggcagcggcggcggcggcggcgacttccagatgcgcagggacaccgccttctccgcgctcgagggcggcgtcgccaccagctccggcggcttcgtcgccaccagctaccaggccgtctacgccatggcgcagcgcgagggcgacctctccacgggggatcgcagccagtgcgtcacccaggccgtgcagcacgtcgaggccgagtgcggaggggcgccctacggcccggtctatctcagcatgtgctacatgagctacagttac

SEQ ID NO: 142587 - DNA, 873 bp, Zea mays
  unsure (1)..(873): unsure at all n locations
  Clone ID: MRT4577_61521C.1
ccggccgggcaatccttatcaccagctactcaattccacaccaatccaccgcctccatcaccatgagcagcattcctcaagagcaatgggcacaggtcattgaaaagaccggcggccccgtcgagtacaagaagatccctgtacagaaacccggcccagatgaggttcttgtcaacatcaaatactctggtgtctgccacaccgatctacacgccgtcaatggtgactggccattgccaaccaaactgcctcttgtcggtggccatgaaggtgccggtgtcgtggttgcacgaggagagcttgtcaaggacgttgagcttggcgaccatgtcggtgtcaaatggctgaacggttcttgcctgtcatgcgacttttgccaacaagcagacgagcccctctgcccgaaaccacttctttctggatacactgtcgacggcaccttccaacaatactgcatcgccaaagctgcccacgttgcccgcattcccaaggagtgtgatctcgctgctattgcccctgtcctctgcgccggtattactgtttacaagggtttgaaagagtctggtgtcaagcctggccaattcgctgccattgtcggtgccggaggtggtcttggttcactcgcctgccaatacgcaaaggccatgggcgtacgaacaattgccattgactctggtgaggagaagaagaagatgtgcactggcgagcttggtgccgaagcattcgtcgactttgccacatcaaagaaccttgtcgncgacgtccaaaaggcaacaccggatggtcttggccctcatgntgtcattcttggtgctgtcaacgagaagccattcccacaggctgctgaatacgtccggncacgcggtaccgtca

SEQ ID NO: 142588 - DNA, 280 bp, Zea mays
  Clone ID: MRT4577_61522C.1
ggaaaaacagcgctcgcctacacaccgtttattgctccagcctttaaatccttgttgcatgcagtgcaatcgtcaaggacaagcgatgtgcaagcgtctcacgttggcgtaaaacaacatgcatatcacacagctgcttcattattcaggtcgaacaaacaggctcacctagccccggggttgccttggcactattgctcgctttcgcgcgcgacggggtgcgacgccgaccacaaggtctgaatgccccgccgttcacagatcgccgactaactagcct

SEQ ID NO: 142589 - DNA, 275 bp, Zea mays
  Clone ID: MRT4577_61523C.1
ccgcatcacctctccctccggcgcgcgcgttcgggtacagcgctagagtcactcaccaccatgcaggcggcggcggctgcaaatggcgcaggctactttcacaagcctcagcagcagccgctggtggcgggggcgccgccctcaccgtcggcggcggccgtggtgtcgccccattgggtcggcatgccgttcgcgccgcctcctggggccacggacatggtgatgcagccgcacacatatggcgccttcgccgacataattcgcgccgactcact

SEQ ID NO: 142590 - DNA, 472 bp, Zea mays
  Clone ID: MRT4577_61524C.1
agtcaaaaacatggaatagcctcacataggaaccattcccaagcgcataaattaaggctagcaacaaacacgtgcaaagagaacgggggtggactgacacaaaaccggggggggggagagcaccttaacaccaccaagtataagaagacggcggaacatgctaacaggggtggctgcccgcctaaggggacccaccaacaaggaggagaattgacccagggaacaaactcgccggaaagggcccggcagcagaacttgtatggggcctttgtttggaccacccaggccgaggggatggaaaaaattaacaggattggggcgaacggaagaggtttgaatcccaagaagaaaccggtcaactgctgaagggagcagggaagtaagcaccaacaccggacgatggctccactgtaatggacaaatataggcatcgctaccctcggaatgggagggcaggctttaaagaagttcc

SEQ ID NO: 142591 - DNA, 395 bp, Zea mays
  Clone ID: MRT4577_61525C.1
ggcctcaaaaaaagaagaaaaacattctccggggaaagatgaaagggtgaaatgggagacaaggtttgtttttctgcaaaaagaacatatcgatcgggggggaactttggctttttttggaacccaatttggagaaccaaccagctttaggggggccaggggacaaccggacaagggttttttctcaagccgagcacaagcgcccgggggtttttttacatttacagacgtcctccaatttgaaaaccccaaacatggaatacttgcagggccgtccaacttttaaaaatcctgcaaaaaaacaaactgtaatgaaaaatgggcaaccaggtcctttttttccttccccgggtccaatccaatggagcccctcgggtgaattaagcgaccgcggg

SEQ ID NO: 142592 - DNA, 455 bp, Zea mays
  Clone ID: MRT4577_61526C.1
tcgtatattgtaatgctgcttatgatatacactagagatgcttaattcggtaggatatctctcatttttgtaataatggtagatttatttttgtaatatctgcgcccgtcccaccgcaagggggtaagccaacttccagctttttttagggtcatcatgttgatatcgcggctgttagtacttgttggattaggtgttagttttgaccatagccaagcttttgattcatcataatctgatcccattaccaatttctcttcctatgtgtacatgttcacccttcaaccaatgctcctggaaatggtctaaacttccattttggacatttgtagcggttgggcaatatatgtagttatcacaggaattctccctgcaagatgatttccatgatataccatcatccatgtcaccggattcagtgaagcagggacattttgatccttctatcttcacct

SEQ ID NO: 142593 - DNA, 417 bp, Zea mays
  Clone ID: MRT4577_61527C.1
ccgacacggagcagcgaacgccacaggcgacggaggcacacacacgcgcaggcgaacagcgccaagaacaagcggcgcggaaccagcgccgacagccgcacccgcacagaagaccgccgcggaggcggcggggggagaggcggccacgcaccggccgccgcacgaccccgaacgaagagaccagggagcgggcaagcaggaccgaaacacccacacaagggagccagggcagggcgacgacgggacagacccgaaggagcaggagcaacaggccgaagccggaccggaggaagaacacgaccgagccacagcaaggggaagcagaaccagaggccggagcgccggcagcagaggcggaaggagccgctgcgccgccagagggagcagagcggcagagagccgacgagaccaaggagg

SEQ ID NO: 142594 - DNA, 2123 bp, Zea mays
  unsure (1)..(2123): unsure at all n locations
  Clone ID: MRT4577_61528C.1
attcccgggggaatggcggcaccctccccgtcctcccggtcctgtgccccggcggcgggtgtgccgctctccgccgcgcccctctggctaccggctggctctgcgctgctcggcgggcggcacggctttcactcgcctggcgctataaggaaaggccaaacgacgggaaagctcttctccggctcgcactccccctgatggttgggtgctgcctcctggtactggaaccttgccgacaccgaccgcggccgtcaaatccgcaagtgccgactgctgctactgcaccggtattgtcattgggtacctcgaggccggccaggcgggcttcttcactcgcctcggtcgcctcataaaggagaaggccaagagcgacgtggagaagctcttctccggcttctccaagacccgcgagaacctctctgtcgtcgacgagctccttacttactggaaccttgccgacaccgaccgcgtcctcgacgacctcgaggaggcgctgctggtctcggacttcgggcccaaaatctcattccggatcgtcgacacgctccgcgaggagatccgcgacggcaagctcaagtctggcgccgagataaaggccgcgctgaaaaggtgcatcctggaactgctgacgagcaagggcggcaactcggagctcaatctcggattcaggaagccggctgtcatcatgatcgtgggagtgaatggcgggggaaagacgacctcgctagggaagcttgcttacaggtttaagaacgaaggtgtcaaggtattgatggcagcaggtgataccttcagagcagcagctcgtgaccagctagaagtttgggctgagagaactggttcagagattgtcattgacaatgacaagaaggcacagcctccagcagttctttcgcaggcagtaaagcgcgggaagcgtgaagggtttgatgtggttctatgtgatacatcaggaagacttcatacaaattatggtttgatggaagagctggtttcttgcaaaaaagtcctagctaaagcgcttcctggtgctccaaatgagattttactggttctcgatggaacgactggcttgaacatgttacagcaagcaagggagttcaatgatgttgtaggagtcactggattcatcctgacaaagctcgatggcactgcgcgcggtggctgtgtggttagcgttgtggatgagcttggcatcccggtgaagttcattggggttggtgaagggatggaagacctgcaaccttttgacgccgaggcatttgttgaagccatcttcccatgattttgggttttggagagataattcatgcttctactgtaaagctttggactctgccgttgctttggctcgttgtgcgagtttttttcttgttgggaactacgatagtggtaggaagcacatggcccgtgtcaagatgaactggaactggagttgaggcaaacaaagtggagcgtccagctttggagccctaagggatggtttggtaatcagagaattagatagggtctatagcggagaaatctccttgttgaggactagtttggtgactagagaaatgcaggggatgagaaatagaggggattcttcatctatgggtcctctacatttccctggtcaataaattagccctgaatggattcttctcccatggatcccttaaaatttcctattcaccaaatcagtcttaaactgttgagttgcaccaggaggattcagagaaagaattgtagaatatgctcgatcctattttttaaaactccagttgtaacaaaattcttggattaactgaatcgatccaaatctgtttcgtttctncaacagaagagtcgtgattcttttattgcagagctggaagaagacaagagtatcgcagggagaatacactacctgttccttgattagtttcatttatatgtataggtcctcttttcgttggtgtcattttagtacaatttggtttaataacacaaggaaatcgtgttgtagacagggtagatcgaatctcgtgtatcgaccttcgtcttcttcgtggtggtagaatgaaaggatatgtataaataagttggtgtatgtttctgttcccgtcaagtctacacaaggctgcttgcctgcttctgcc

SEQ ID NO: 142595 - DNA, 523 bp, Zea mays
  Clone ID: MRT4577_61529C.1
actcagcctagagctcggcctcacgagatcctaaatcccaatcgaggatggcgaccaccgcgactacgcggggctgcacgtggtacgactgcgctgacgatgacccagacgacctcgtctccatggacacccaagaggaagaagagctggtccagggctctggaggctaagcagagcgcactatagccgccgatggaagtgcgtcttcaaggtgatgctcctagggtacgcgtgcttccttgtcgtactccagtttccatcatgcctggactccctggagagctgcgggagcatgcttagttcatgtgaaatttgtctgtaccgaagctcataattgcatattggataaatggctcatagcatgccgacttgctgtgaaagggttactacagaactcccagccagatacaaagaggactgaggtattcttgctatggtggcattttaggaacacatcttttggacatactacatcttgaggtagtatcgcatatgcgacatatcattttttttcccctcccat

SEQ ID NO: 142596 - DNA, 291 bp, Zea mays
  unsure (1)..(291): unsure at all n locations
  Clone ID: MRT4577_6152C.1
ccggattccgggtcgacccacgcgtccggtatttttctgtgttcttagatggacgctgtccttcaatccatgtgaaatctaagatcgacctctctttcttcttcgtttaggccagcctataactactggtgcctgttgcgtgtctttatttagcgttattgtcaccttgactacntatttgacggagctcgcgttcagagccctctttgtcggcagcgatgctgattctgatcttactgttacttcgcgcgtgctatgccctcgcggggctgtggtgccggcttcgcccct

SEQ ID NO: 142597 - DNA, 742 bp, Zea mays
  Clone ID: MRT4577_61530C.1
gtcaagcaagcgcagatgcacaggtacaattgtgggaattagcgactatgaaccgatgcgatggccaaactcaaaaggcgcaacttgcaggtagaatgggatgaacatgggtatggagaaagacctgaaagagttagtctatgggatatcgaaactccagagaacatggttttctcttccccattgaattcgaaaaggcaatgtcttcctagttatggagtttctggcctacatgtgtcatcaatttcaaagccacaaggaagtccttttggtaacttgcagcacatgccagggatcagttcagacattgctttgctgcttctcaatcaatctgcccagaacctcgggagttcaattgcttgtcaacaatcatcattttccagcattattcaaaatgctaagcaaagctatttccctccaacgacattaggtgcttccactgggtggaatgaatctcagcagcagttaaacgcccttggtattcaaaaaggtgatcaagtaagctgtgatgttcagccaggtattgattcaatcactgcaccggagatgaatgttaaaccaagagtcccaagaagcacggattcatactcaagtcagagcatttcggatccaaacagcaagagtgaccctaaaacaaaaacgcgaaggagcaagaagagctcgtctcacaaaaccatttcggatagatctgagattcttcagtaccttctcagatctgtgacaaagcagagcatggttcaga

SEQ ID NO: 142598 - DNA, 928 bp, Zea mays
  unsure (1)..(928): unsure at all n locations
  Clone ID: MRT4577_61531C.1
cgcagcgcccggaatggcggcaattcgccacgaggtcccgttcctgtcccccgccggcgggtgtgccgcctcctccgcccgcgcccactctggctaccgcgctggtctcctgcgctgctcggccgcggccggccaggcgggcttcttcactcgcctcggtcgcctcataaaggagaaggccaagagcgacgtggagaagctcttctccggcttctccaagacccgcgagaacctctctgtcgtcgacgagctccttacttactggaaccttgccgacaccgaccgcgtcctcgacgacctcgaggaggcgctgctggtctcggacttcgggcccaaaatctcattccggatcgtcgacacgctccgcgaggagatccgcgacggcaagctcaagtctggcgccgagataaagccgtttagcggcttacattttacagtgttgatggtcgattgcaggccgcgctgaaaaggtgcatcctggaactgctgacgagcaagggcggcaactcggagctcaatctcggattcaggaagccggctgtcatcatgatcgtgggagtgaatggcgggggaaagacgacctcgctagggaagcttgcttacaggtttaagaacgaaggtgtcaaggtattgatggcagcaggtgataccttcagagcagcagctcgtgaccagctagaagtttgggctgagagaactggttcagagattgtcattgacaatgacaagaaggcacagcctccagcaggcagtaaagcgcgggaagcgtgaagggtttgatgtggttctatgtgatacatcaggaagacttcatacaaattatggtttgatggaagagctggtttcttgcaaaaagtcctagctaaagcgcttcctggtgctccnaatgagattttactggttctcgatggaacgactggcttgaaca

SEQ ID NO: 142599 - DNA, 341 bp, Zea mays
  Clone ID: MRT4577_61532C.1
ggcagaagcaggcaagcagccttgtgtagacttgacgggaacagaaacatacaccaacttatttatatatcctttcattctaccaccacgaagacgaaggtcgatacacgagatttgatctaccctatctacaacacgatttccttgtgtgttattaaaccaaattgtactaaaatgacaccaacgaaaagaggacctatacatataaatgaaactaatcaaggaacaggtagtgtattctccctgcgatactcttgtcttcttccagctctgcaataaaagaatcacgactcttctgttgctgttgctacgttttttctatggtgaagaaccaatccggt

SEQ ID NO: 142600 - DNA, 793 bp, Zea mays
  unsure (1)..(793): unsure at all n locations
  Clone ID: MRT4577_61533C.1
ggccgcttttttttttttttttttatccaagaattttgttacaactgggagttttaaaaaataggatcgagcatattctacaattctttctctgaatcctcctggtgcaactcaacagtttaagactgatttggtgaataggaaattttaagggatccatgggagaagaatccattcagggctaatttattgaccagggaaatgtagaggacccatagatgaagaatcccctctatttctcatcccctgcatttctctagtcaccaaactagtcctcaacaaggagatttctccgctatagaccctatctaattctctgattaccaaaccatcccttagggctccaaagctggacgctccactttgtttgcctcaactccagttccagttcatcttgacacgggccatgtgcttcctaccactatcgtagttcccaacaagaaaaaaactcgcacaacgagccaaagcaacggcagagtccaaagctttacagtagaagcatgaattatctctccaaaacccaaaatcatgggaagatggcttcaacaaatgcctcggcgtcaaaaggttgcaggtcttccatcccttcaccaaccccaatgaacttcaccgggatgccaagctcatccacaacgctaacctgcaacaggccaagcaacaaaaatcaggtcagacagtaacgattgccattgntaggtttgtttacgcaacaaaagtgagcctaccacacagccaccgcgcgcagtgccatcgagctttgtcaggatgaatccagtgactcctacacatcatt

SEQ ID NO: 142601 - DNA, 362 bp, Zea mays
  Clone ID: MRT4577_61534C.1
gggtgtggtttaacaagaaaaaccccggtcccctttatatttttctataaacagtttatcttaaacccaacgacctgataacacaatttttacccaatcacccgttacttcattcactacaccacaatttttataaacccatcttggcccatttccccagcaaaaatacataaattttcattaatcccaatcagcacgttttgttttttcccggtccttgtaacaaccccttttgttttcccccgttcccaaagttgggaccttacttacctcccccttttaaaaacgcccacttgtacctctaatatttttagacccttattgacttttttttccttcaacaacaggaccattttaagggg

SEQ ID NO: 142602 - DNA, 564 bp, Zea mays
  Clone ID: MRT4577_61535C.1
tttttttttttttttttttgaatccttttatataaccccctgtatgtatattcaacctcaaattaaggtcatcgaagtaaatacaaacatcaacactgcctattaacatgtggagtagctggcatgggctttctccatcgcatccctcacaccatatgcgccccaatatccaacaattcaacaggttactccaagagtaggttatgtctccgaggcgtgtcacttagagaacctggacacagttgagggcgttgacgttgacaagggcaccaacagccagaggggcatcagattggcagcagtaggatttggtggagcaaccggcgccaaggatctggacaagacagccgagaccgttgcagcaaacattcgagctctgagcagagcaggcgggctggttgttgccgttgttgctgccgccagtgcgaggctcgacctcgtagttgccgggagcgggagcaccgacggcagcggcggccatggcgaggacggaggcgatcttggcgaactgcattttgaaatggagtctgagttgaaaaagctgggttttgggagtgagtgaaa

SEQ ID NO: 142603 - DNA, 365 bp, Zea mays
  unsure (1)..(365): unsure at all n locations
  Clone ID: MRT4577_61536C.1
gggggggggggtttttaaaaaaatttttttgtttttttgggcgaaatcaaattattaattcacgtcacggtccaactgagttgaagtttctggacagccggctggcttaagcatttttttttttttattcccccggccccnccctcggtgggggggggttgtccacggggcctgaaccaaattaaaagagcccaaataaagggggccgtcgcacttgttcccaaaagattaaatttgagttgcccgcttctattccttgggggctgggcggggctcttttttggtccctaactttttcacctcgacgctgccttctgtgggcttggcgaacttgtgctgcccccccgggttgttttcccccgggt

SEQ ID NO: 142604 - DNA, 394 bp, Zea mays
  unsure (1)..(394): unsure at all n locations
  Clone ID: MRT4577_61537C.1
ccgcgttcgttttttcgttcgcggncgcgtggggccgggccttttcgctgctgcgccgccgnngcgtggtggcggtcgtggcgggctgggcgccgngcccctttcgtcgggggctcgngccccngnggcgtngcgcnnnntgttctcgttcctcgtggtggtggtcgggggttccgggtcgggtctctgggtgttggcccttctccgttggtgagcccttcgcctcggcttggggctcctgggttctcctccgcggttccttcccggctgctgggtctcctgtgtccgttttttctctttcttggcgcccccccttcgnccgcccctttggtgttggtcgctttggtgcttgttcgttgcgttctgtgggttctcctcttcttttttctttttt

SEQ ID NO: 142605 - DNA, 249 bp, Zea mays
  Clone ID: MRT4577_61538C.1
gggcaagaacaagtcctttgtttaatttcaaaaatgggcaatcacagtcctttgccctgaagccaaaacatttagaacatttctcctccaggtttacgaagccccgaaacgaaagccccctttttctttttgtaacacttcaaccccggggagcacgacgggggcttaagcccttttgcccctttttccccccgcgggctgtgtttccttgggcatttttgagacccccttggcgtgtttggcccaaag

SEQ ID NO: 142606 - DNA, 822 bp, Zea mays
  unsure (1)..(822): unsure at all n locations
  Clone ID: MRT4577_61539C.1
agatcggttgattcgtgttaaacaaatcaggcgctctcttccgaaagtccgccgattacgtggcctcgacctcgttgctctccgcagcggcggcaagcatgcagcggcaagaggagtccggcgaggacatcgtgatcgtgggcgccgggctcgccggcctcgccgccgcgctcgggctgcacagaaaaggggtgaggagcctggtgctggagtcgtccccggcgctccgggcctcggggttcgccttcgccacgtggcccaacgccttccgcgcgctcgacgcccttggcgtcggcgacgagatcaggaagctccacctgcacatcgaggggctgcgcgtcatgtcggcgtccacgggtgagatagcaaagaaggtggatttcagggacgagttccgctgcgtcaggcgcgacgtgctgctgcaggtcctggcggcggagctgccgacgggcaccatccgctactcctccaggatcgtctccatcgacgacggcgacgacgacggcgccaagatcctccacctcgccgacggctcgactctccgggcaagggtgctggtcggatgcgacgggatcaactccgtggtggccagatggctggggctcgccaagccgtcgcactccgggcgctccgccacgcggggcctcgcgcgttaccccgacggccacggcttcccgcccaagttcctgcagctctttggcaacggcttccgcttcggcttcgtccctgcaacgacacgnacgtctactggttctacactggtctcctcccagnaacaggatggtgtcgctgagagcggcgcccagatgaagcagtacgtgc

SEQ ID NO: 142607 - DNA, 546 bp, Zea mays
  Clone ID: MRT4577_6153C.1
tttggccgggagttagtagttcaccagagttcacacaaaaatcacaagcaagcagtcgcgtgtgtagctcgcaacaatggcgacgaaccccggcctcttcaccgagtggccgtggaagaagctcggcaacttcaaggtagctcccggcaccggccccgtctcagtaccctgcgtgcgtacgtccatggcacagagcgggggagaaggtgaaggaaaattagcaactcgtcttctgctcaccggcggcgtgccatgccatggcaatcttgggcgcatggtatatggccatgtgcggcacgcagtgtcggaacatgcatgcacgcatggacttgctatacatacatgcatgcaccggcagccgtgagaccatctgtgcatgagtcttatgctcctgtgcatctcatgttccggccgacccatgagcatggaaggaagccaccaaaagttcattaatttgataggtcgcgtgtgcatggctgatcgactctcctacagttcttttgtcttttgtttttacttcctgagaattcatggagtcaattcgcg

SEQ ID NO: 142608 - DNA, 1117 bp, Zea mays
  unsure (1)..(1117): unsure at all n locations
  Clone ID: MRT4577_61540C.1
ccttttgtccgtccgacccccggccgactaaatgggatttgggttcggggactatcatcttgatcttgtctgattgttgctctaacgtaagaagttcacctaaggtttctcaacacactttggaacatacgaggcagctcgttggtaccttcgccatgagctggngaataatcagaaaatgtttgngaaaaacacaaggactatgagttacggttggtaggtcactctcttggaggagcatcagcggcgttgcttgctataatgctacggaagaagtcaaaggaagagcttggtttcagtccagacattatttctgctgttggatttggaacaccgccttgcatatcaaaggaagctgctgaaagttgtgcaagctatgtctctactgttgtgctccaggatgatattatacctaggctcagtgcagcttcgttggcaagactgcgaaatgaaatactcaaaacagattgggntaagtgttctggaaaaggaagacttgaagcatatagtggatatcgtgactaatgctaagcttgttgtttcgtcaattcaagatgtggcgcgtaaacttggtgattatgccaaaattgtatcaccatcgacaaattctggtgttaccaaagatccaactaactcgacagagatggcgacatcgattagtagaaatgatgtgtttgtgcctgaggatctcttccttcctgggaccctgtattacctgcagagggacattgaggatataaatgacgttgaagaagagtcatacacgctctggaaaggtgatccaggggaaaattttcagaggatattgttgtctggtaatttgatatctgatcacagatgcgaaagcatatactacgctctgagagaagtgctcaagacacttcccccaccccggactctggatgaatgatctttcttttcttctgttctctcaggagctttaatctgtagtggctggatgcctgctttccgtagttttctgatggctgttcctttggtcttttcacctatctgtgttggcctgtgaatgttgtacagtataagctgctgtgctaaaaaagcaagaatacgcgccgggcaatgtgatcttgcaagtccgatttgggtgttgtctttt

SEQ ID NO: 142609 - DNA, 311 bp, Zea mays
  unsure (1)..(311): unsure at all n locations
  Clone ID: MRT4577_61541C.1
cggacggtgggcggacgcgtgggatttctctcatggtcttaaggagatcaagtgctaggcttgcggcgagattagttacccatgttgggtactatctatgtacatctgttatatcctacaactatagttgtcctggttgaattgaactcaaaagggtttgtttgagaaaaatagaggaatgtcggattagtggcaccatccttgtaataggcgaataccacggacgcatcatccttcatgctctcaccaacaaaaaattgaaggtcctgggcaactggagactccagtcgtcanggatcagaagatactgc

SEQ ID NO: 142610 - DNA, 333 bp, Zea mays
  Clone ID: MRT4577_61542C.1
tcctattgtacaaaattacactcactggcacacttctacatacctggagcgtgtccatagttctgctctgagtcacaaacaatgtgctacgtcccatccctttcttttaacaacatatccggattcttgtacattcgtcccggatagtatttcatctttatcccgtcctccgttcgacaacaagcctttcctctatcctaggccaaacgtatcattttagaagacttactctcaataggcttatccttgcctattctattgcatcacacctctttttatctgggattcacaaaactttccatcccgtttccttttttgggtaccgtctttatt

SEQ ID NO: 142611 - DNA, 354 bp, Zea mays
  Clone ID: MRT4577_61543C.1
cccacgcgtccgccggcagctaccgatcagacgactaaactatttttcaccttactagctaacaccaggtggcatgtagagcggtctctcctgaaataatgggcgctggctgctgctcccagcagatcggcgcgatcggtcggcctgtcatcgccgctcttgctgttggggtactgggccgagacagaatagccgttattgagctaggcccagacgacttaatctgtaggaccatggctacgatacgcattagggagtgcagcattaccatccgagaagtgctgcatttgagtgcgcttactcatcagccacacgtgatcatcagcgtatcggcaggcaacctgcatctgtatt

SEQ ID NO: 142612 - DNA, 443 bp, Zea mays
  Clone ID: MRT4577_61544C.1
gtagaatcatatatttcgtataaactagcataaaatgtttctgtgtagtacataaaaagtgatttatgagaggcccgattgaagttcatgtcttcagtcagtagcctgtactaggttcatggcgacgtcagaatcaccaggttctataccatgcttctctcgtcctcatctttcaagtcgccattcactggtcaccattccgcctcagagcggtttcaacggcggcgatgtcgtcgaagtccacgctctcacaggcaagtgcgatggcgacatcaccgaccggatcttcttcacatatggcgatggacgccgctgcagaggccggtagcacccgctgctacattgatttgttgtacaccacaagcgtgaggctttggcggctcgcgtgggagagtagatcgacgtcgggcggggttgggtttggcggcggactgcgtttaggc

SEQ ID NO: 142613 - DNA, 354 bp, Zea mays
  Clone ID: MRT4577_61545C.1
aaagcggcgcccatcaaacaccaacattaaaatcggtgctgaagagttgttaccgacgagagacaggcataactaaggtgctggggcggggcccaaatcaccgattaaagctaggtttttgtgtgacttgggaacacaacaccgcggaaccttcgtaaggacgctaagctatctgttcctcgaggaaattacctgtgaccatagaaatatgattaaagatcatatgcttattattatgttgttgttattgtacatcatatagtcgcgtacagttttgaaaggaacattagtcattagtttatattgtatacttgtaaaacttcctcacagggttgttttggttttcatttctac

SEQ ID NO: 142614 - DNA, 168 bp, Zea mays
  Clone ID: MRT4577_61546C.1
ggctatctggctttactgagaactgtaaaagtggatacagaagaaaccggggcggggacacagactggttggccgaaagtggccaaaatctgaagacgtatcacaacatggatgcgatgaatgatcttgataaaggtcaggattgaaccaacccgtgtggacagtatg

SEQ ID NO: 142615 - DNA, 122 bp, Zea mays
  Clone ID: MRT4577_61547C.1
gttcaaagatggctgctgtaatggctttgactgtcctgcgaagtcggataacgcgatggccgcagtgggcctgcgaggggccggccccgtactgcgcggtcagaaggagcgtctttgggttt

SEQ ID NO: 142616 - DNA, 510 bp, Zea mays
  Clone ID: MRT4577_61548C.1
tacaaatacgtggaccattactgccgccctctcaccgcctccgggcccaacgagcaagccagggaaggggagtcgaggcctcgcctatccacgccccccgcaccccccctgcgcgacatgtcaggggaccgcttgcccacggtagagcgccggcgggggatccggcgcctcctgctgcatccccgcggcgaggcctcatcgtcctcgcctccgccgccggcgccggcgccggaggaggggaggcggaaggggttcgccacggcggcgctgcgcggcctgggctgcacgtcggcgtccgcgtcgcaggcgtacgcgcccggggaggccgcggcggcggcggccgtgcggtcgtcggcggactggcaaggtcggcggcgcaggagggggagggacaggaggaaggagcgtggcgggggcggaggaggaggagtaggcttcgtcaccggtgggatcggcgccgaggtgtggtgagcaccccggcataccttcgcgatctaagagacagttttt

SEQ ID NO: 142617 - DNA, 2248 bp, Zea mays
  Clone ID: MRT4577_61549C.1
gccggccggtctcggaacccacacccacaccacacctcacgtctcctcactacccgcgctctcaggcagcgcacctcgctcctcctcccccacagcgctttccattttcgtctatctcccgagaaccctcctgcgcctcccaaagctctcttgttcgttgctccccccccccgtgctggttaatcatccccttcgatttcgatcacatacatataatctctctcagctatcgcggccgcgcgcctgatcgacgtacgaccggtctggtacgtacgtgtgctcgcccgccatggctcgcggcgacggcgggcagctggagctgtccgcgggggtccgcggcaccggcggcgcggcggcggcggcggcggcggaccacgtggcgccgatcagcctcggcaggctcatcctcgccggcatggtcgccggcggcgtgcagtacggctgggcgctgcagctctccctcctcacgccctacgtgcagactctggggctctcacatgccctcacttcattcatgtggctatgcggtcctattgctggcttagtggtccaaccgctggttggcctgtacagcgataggtgcacagcaagatggggaagacgcaggccatttatcctgataggatgcatgctcatctgccttgccgtcattgttgttggcttctcgtccgacatcggagctgctctaggggacacgaaggaacactgcagcctctaccacggccctcgttggcatgctgcgatcgtctacgttctggggttttggctccttgacttctccaacaatactgtgcaaggtccagcgcgtgctatgatggctgatctgtgcggtcatcatgggcctagtgcagccaactcaatcttctgttcttggatggcgctgggaaacatcctaggctattcctctggttccacaaacaactggcacaagtggtttccgttccttttaacaaacgcgtgctgtgaagcctgcgcaaacctgaaaggcgcgtttctggtggctgtggtgttcctagtcatgtgcttgactataaccctgttcttcgccaaggaagtgccctacagaggaaaccagaacctccccacaaaggcaaacggcgaggtcgagactgaaccttccggcccactcgctgtgctcaagggcttcaagaacttgcccacggggatgccgtccgtgctcctcgtaactggactcacctggctctcttggttcccgttcatcctctacgacaccgactggatgggccgtgagatctaccacggcgaccccaagggtagcaacgctcagatctcggcgttcgacgaaggcgtcagagttggctcgttcgggctgctgctcaactcgatcgttctaggattcagctcgttcctgatcgagcccatgtgccggaaggtcgggccgagggtggtgtgggtgacgagcaacttcatggtctgcgtcgccatggcggccaccgcgctgatcagcttctggtcgctcaaggactaccacggatacgtgcaggacgccatcaccgccagcacgagcatcaaggccgtctgcctcgtcctcttcgcgttcctgggtgtccctctcgccatcctgtacagcgtcccgttcgcggtgacggcgcagctggcggccacgaaaggcggcgggcaggggctgtgcaccggcgtgctcaacatctccatcgtcatccctcaggtgatcatcgcgctgggcgcgggcccgtgggacgcgctgttcggcaagggcaacatcccggcgttcggcgtggcgtcggggttcgccctcatcggcggcgtcgtgggcgtgttcctgctgcccaagatctccaagcgccagttccgcgccgtcagcgcgggcggccactgatcgagcccgcccggcgccgcgcgccggagcacggcacggcggcacagcccagccgtgctagagctgtatgttttgaaagttgaaacagaataagaagcgggcgaaacgagaaaaccatgcatgtgtcatgtgtgtgcttttgttgtgtgtggggtggggcaagcgaggcgaggtgtggaggtgaagtgaaggtgagcatatccagcaccagctggtaccaaggtcgggtctctgtgctagtgctattagctagtgtaaggagctggtaggtcagttaaggctggtgcgtcgtgagggctgtcttgtgtgtagctacagcagacggtgttcatcagaaggattattcgtgcagtaaaaaaaaaaaaaaaaaaaaaaaaaaaaaaaaaaaaa

SEQ ID NO: 142618 - DNA, 1295 bp, Zea mays
  Clone ID: MRT4577_6154C.1
atggcccggctggccgaccttcagaagaagatcgacgaagctgctgaggaagtgcgtcatcttactcaagatgatcatgaccgaaggccccaacacagggagcttcgtcaagagggctcattcaacgaagatgaatggtacgatgattttaatcatggtagctttacttttgatgatgcttctcctctggcagcagaattgcaggctatcccatggccacaatcctacaagccacctcagctacccatgtacgatgggcactcggacccaaagcaattcttgatgagctatgaggcaacaatatcctcatatggaggcaacgcagctgtcatggcaaagtccttcgtcatggcagtccgaaatgtggcccagacatggtactcttctctccggccagggacaatcacgtcgtggcagaagctcaaggacatgctggtcaccagtttccaaggctttcagacgaagccagtcacaactcaggccttgtttcagtgcacacaagaccatgaggaataccttcaggcgtatgtccgaaggttcttgcgcctcagagcacaagcgcccacagtgcccaacgaaatcgtcattgaggccatgatcaaggggcttcggccagggcctacggcccagtactttgccaggaagcccccacactctcgggaggcgcttcttcaaaagatggatgagtacatccgggctgacaatgattttcgccaaagaagggaggtggcctacaagttttctgagatgaccaggggcttcagagaaagacttcaccccaggcatgtccgatcaatccacaactccaataccagcgatgatagggccagcaatgctcaacataaccatcatagttctcagacttcgagcatgcaataatctggccgctagctccaaaaggcagaggcgccatgaacttcggagaaaggtttggaaatcatcctagaaaaatttattgcttattttgtggtgaggacaagggccatactacaagaatgtgccatgttaccatccagaagcagaaggaaatagcagaagcagcagcgcaacagagtcagccgaagcaggtcatgcatactgcttcgtatcactcaccttatattccagaatatgtaggcaaccaccctgcagcttctattgcttcggcaagccaatcccaagcgtcctggcagcaacctccaccgccaccgccgattcaaagaggtcagcagccagaagggagtcaacacactaaccttcagtgggatttcagagaggagtccgaagctcgcacagtcaatagcactgtgccatag

SEQ ID NO: 142619 - DNA, 1652 bp, Zea mays
  Clone ID: MRT4577_61550C.1
cacagatagctagcgtacagacaaataatctattattcacctcactagctaacaccagctagcagctcgagcgctctgtcctgcaataatggccgctcgctcctgctgccagcagctggtctcggggggggctctggcaggctggctgactgttgctggccgcagacccgggcagaagatctcgctcccggccggcaatctcccttctggtcccacccaatccacttcgcaagccccgccgcacacttcttccccctgcctccaaaaactcagaaaaccctgaccgccggcggcggccatgcttctccaccaccgcctcctccctcgcctacttcttgttccttccacacatacctccacactcctctgcccctcccgtttgccgcgccgcctctccctctcgccacgcttctacgcgctgccccacctcgcggcaccccagaccgtcgaccactccgacgatgagggggcaccccagggggaggggcagatcaagctcccgctcgaccatctcttcgtgccgcccggggcaacaatggatgcgggggaccaggaggccgtgagcgcacgggtgcttaagggctccaacatcgtgctgggcccatacgcgcgcggcgacgcacaggtggtcaacgcagattttgtaaagagcagcgtgcgtcccgatgactgccctcgggacggccttccggagtttgcactcgttggccggtccaacgtcggcaaatcgtcgctgctcaactcgcttgtccgccgcaagcgccttgcccttacctccaagaagcctgggaagacccaatgtatcaatcatttcaaagtaaatgacagctggtatcttgttgacttgcctggttatggatatgcttctgcaccacaggaagctcgtaccaattgggatgaatttactagaaattactttctcagtcgggagaatttggtatctgtttttcttcttatagatgcaagtatacctgccaagaagattgatcttgactatgctagttggcttggccaaaacaaggttcccatgacccttgtgttcacaaaatgtgacaagcgcaagaagaagaagaacggcggcaggaaacctgaagaaaacgtggaaactttccagggcctaatccgcgaatacttcgaggccgcgcctccttggatcatgacgagcagcgtgaccaaccagggccgcgacgagatactcctgcacatgtctcagcttaggaattattggctcaagcattgagatgcaatgataaccaaaccagggcgaagcaactagaacagcatgcaaagcactgtcgtccattgatgcatggacattcagcagtcggcgcctccgcaatcaggcgttcgcaccaactaatccagccttttgagctgttgactgtccaatatggccccctgtacatgattacccaatcaacactctggggatgcggacaaggtgctaaaatcagctgatcatggtttttttctttatttctattgtgtacacgtacaatcccaaccaacgttttccccttgttcccatctgattataggcttgtgtatactgtggggttaaatgattaataaattctggtgttagctaatcaaaaaaaaaaaaagcaaaaaaaaacaaaatgaataaacacagatacagctactggggcacc

SEQ ID NO: 142620 - DNA, 565 bp, Zea mays
  Clone ID: MRT4577_61551C.1
ggggggtggttttttttttttttttttttttttttttttttttttttttttttttttttttttttttttttttttttttttttttttttccgggggggaatcggtcccataaccattaacgttacatttcgtaacatttcgaaaaccaaaggggggctgttggggtccacaaacattcaggcccacaaaacgtaaatacaaagcgccaaaacaaaaacaaacccttacattgcatgggtaggaacagttttttacatacaaggggcagcaggaacatatttgcctttttaattcaacaacaggtgatcgaaaaaaaaaaataaactttgtgggacccttggaggaaaaactaaagttggaaatttttggctttaaaacatggcaccggtgcactataccattttaaaataaagggcttccctgtatgccatcgaaaattattttcatcccttgggggccactggccccacattacaaattctccaaaactgcaaataagtgcaaactgggggcccttaagcgtgtccaccatactgagtaccttataccaaaaccattgcacgta

SEQ ID NO: 142621 - DNA, 260 bp, Zea mays
  unsure (1)..(260): unsure at all n locations
  Clone ID: MRT4577_61552C.1
cccccccaatantttcccccnngacaaaccgcaaacctgggccgtttttgttgaacctgctcgaggggcacgcgcacgcacagggcagcgagccgtaatcaaacaagggacaaagatgccactcatgaagggaaaacccccagcaaaaaaaggtactcggccccccggcccagctagcacgatcacacctagatgggtgggctaaaaaaggaacccctgagccagccgtccactgctgagcgggaggcccccccggaaag

SEQ ID NO: 142622 - DNA, 379 bp, Zea mays
  unsure (1)..(379): unsure at all n locations
  Clone ID: MRT4577_61553C.1
tttttttttttttttttttttttttanggggggttttctttttttggtatttttttttttttttttttttcacagggggaaaggaaacctttgtttttaattggtttacgaggcaaaggggtttttttacgggggggcgggtttaaaattttttttacaaaaaaccccctaaaaaactttaagggcccccacttaaaaaaccatggggaataacctcttttctgaagaaattttaaaaaaacgggggaccattataaaatagggttgggaacccccctgttaacaaacatttaaacactattttgcttccggggggagggttacaaaaactgggggggggttttttcctcagagggagatttttttaaaagttttgccc

SEQ ID NO: 142623 - DNA, 468 bp, Zea mays
  Clone ID: MRT4577_61554C.1
gggcgggcaaacaattaatcagccaggcaaagggaaatcccgcggcaaacaattaagggataacccagcggacaaaacccctctcaggaaaggaaaataaggggaagccaaacgggggggacctggccgtatttggcaaaaacaaaggcggggaggatcttggcccccttccccggggggggggagcggccccaaaaaagggagccccccaccttttggcaaacggggggggggacccccttgcaaaggacggaaaccccgggggggcccgggcccaaaaatcctttgggggaccggggaaaacccaaactgcccgggggcaaaaaaatgtctaaaaggaagccctaaatgcccataaaaacaaccagggggtgggggaacttggccccaaacccccccaggtgttgaaccaacccggggttgtatgcaacggcaatcccgtgggggccctggaagcagccccggggg

SEQ ID NO: 142624 - DNA, 1082 bp, Zea mays
  Clone ID: MRT4577_61555C.1
gcacgagcccacccttacctttcccaattcagccgaggaccgcaatcgcagggcactgggagcgattaaaaaaggcagcctcccccgcaagggtaaaaacaaacaaccaccgcatcgcggcaggcaaggcatcgcccgccagccaccgagcggagggggaagcaaaagcttgataaaaaggagaggaggacggacacgatggaggcggactccgggaagctcttcgtcggcggcatctcttgggagacggacgaggaccgcctccgcgagtacttcggccgcttcggtgaggtcactgaggccgtcatcatgcgggaccgcagcacgggccgcgctcgagggttcggtttcgtggtcttcgctgacgccacggtcgccgagcgcgtcaccatcgaaaaacacatgatcgacggccgaatggcaatgcatatgaagtgaacaacccagatacatatgggaacagctctatttatggtggcacatcctggaggttcccttcatctgaagttgacgtgccttctttcagtcatgatcttggaaatgttgatccgaatatgaaatcagacatatcagcaaattacatgggaaattattctgttagcaacaatcagccaagcagaggtatcacttcatagtgggagtattactacacattcatatatgacttgggatagatggaccacccattcagtcaggcagccaggtgcgtgcatggcaactgtgaatgggtgatatgtcaggttagttttgtctagctgaccagcggtgtggtttacaacaccaacatgctagaggaggaggaagcggatacagaaacattttctgaggggcttcttttctttgagtcatgtttttagttttgattcctgcgcgtggctagctccttttggtttttgaatgagatgtgtagtggtgattattgcggcgcatattttagagatcgtggttcttccaacataagctggaaaaagaagtctgtatacggatgaacatgtataccaaccaaagggatgctgtattatcttgcccatttgttactacatttagcctgtgtttaaaaaaaaaaaaaaaaaaaaaaaaaa

SEQ ID NO: 142625 - DNA, 2625 bp, Zea mays
  Clone ID: MRT4577_61556C.1
caaactccctgccgggtgggcgccgcacgcctgcacctcttccgctgcgcgaggatccgcgagccgcggcgacacgggggagcccaagcgcccaacctccttcccgcttcgtttgcttgtatgcgctgcctcgtcggttccaccacctcactcactcgcttctcccccttccagccgtcccttcgcagcgcacgcacgtaaaccacaatccagcagctggtacgcccccagcgtcgccgtcgtctccttcccccgcgcaccacacccgcagccagcagccatatcatccatcacctcgcctccagcgcggcgccgacctgcctctccattatttatacgcatttccgcgttccccaccctcctctttctcaatccagccaagcaccggaatcgcagggaaccaggagcgattaaaaaagacagcctccccgcaaaggtaaaaaacaaccaccgcatcgcggcaggcaaggcatcgctcgccagcccccgagcggagggggaagcaaaagatcgataaaaaggagaggaggagacgaggcgtgccatccgaacccaagcaacttcctcccaccaccaggtccctggctccctcccatgcccgcatcgagatcttagcgggacagcgagaggagaggcgacgcggacgcgggcgctccccgatccctcctcgctgcccgtcgccgccgccgccgaccgaccgaccgaccggggccagggggaggaggagggaaggggagtacggacacgatggaagccgactctgggaagctcttcgtcggcggcatctcgtgggagacggacgaggatcgcctccgcgagtacttcggtcgcttcggcgacgtcaccgaggccgttatcatgcgggaccgcaacaccggccgcgcccgtgggttcgggttcgtcgtcttcgccgactctgggatcgccgagcgcgtcaccatggagaagcatatgatcgacggccgcatggtggaagcaaagaaggccgttcccagggacgaccaaagtattgcgagcaagaacaatagcagcatagggtcacctggaccaggacgtactagaaagatctttgttgggggtctggcttcaaatgttaccgaggtcgaattcagaaggtactttgagcaattcggtgtgataaccgatgtggtggtgatgtatgaccacaatacgcagaggcccaggggctttggtttcatcacatatgactcagaagacgcagtggataaggcactgcacaagaacttccatgagctcaatggtaaaatggttgaggtcaagagggctgtaccaaaggagcagtctcctggacctattgcacgttcacctgcaggggggcagaactatgctatgagcagggttcataactttctaaatggttttaaccagggttacaacccgaacccccttggtggttatggcatgcgggtggatgcaaggtatggtctccttgcaggtgcacggaatgggttctcttcgtttggtccaggttatggaatgggcatgagcgttgaaggtggaatgcgtggatattttggtgcaagttctggtttcgtcaatagctccaatgggcggcaaataggttcttactttaatggtagttcaaaccgattaggtagtccaattgggtatgttggccttaacgatgattcaggatcaatactgagttcaatgtctagaaatgtctggggtaatggaaatctgaactacataggcaaccatacaaacatgaattcttttcctcaacctggaagtggtgggggtatttctggtgatgaaattagttggggaagccttacttctgctcatgggatgagcaacatttcaagccttggatcgggaaaccttggccgtggaaccggagataacaactttggcttgccttctggaaactatgttaggagcaactcaactggtacaattggtgagccattttctgcatcagccaatgcatatgaatcgaacaatccaggtgcatatggcagcagctctatttatggtgactcaacctggaggttcaactcatctgaggttgatatgcctccttttggtcatgatcttggaaatgatgatccagatatcaaatcagaaatatcagcaagctatatgggcaactatactgttaataacaatcagacaagcagaggtatcacttcctagggagagtactattatattcatatatgacttgggataggtgaaacacccactactatatcaggctttcaggtgcatgactgtgaattggtgatgtcagattaatatacaggttagttgcttgtttctaggtaaccagaggtgtggtttacaacaccaaaatgctagaggagccgatacaaacattttagtttaatttctacatctattaggccttttgttttttgaatgagatgtgcagtgttgattgcggcacatacttagaagtgttccaacataagctggaattctgtcatacggaaggataaacttgtataccaagggaatgctgtattattatctttgcccatttatggctacattagcttgcttgtttttattctctttaaaaaaaaaaaaaatatactggagagttgcttggcttgttcaaactattgggggtacaaagccatattgagacccagtaat

SEQ ID NO: 142626 - DNA, 765 bp, Zea mays
  unsure (1)..(765): unsure at all n locations
  Clone ID: MRT4577_61557C.1
attggtgagccattttctgcatcagccaatgcatatgaatcgaacaatccaggtgcatatggcagcagctctatttatggtgactcaacctggaggttcaactcatctgaggttgatatgcctccttttggtcatgatcttggaaatgatgatccagatatcaaatcagaaatatcagcaagctatatgggcaactatactgttaataacaatcagacaagcagaggtatcacttcctagggagagtactattatattcatatatgacttgggataggtgaaacacccactactatatcaggctttcaggtgcatgactgtgaattggtgatgtcagattaatatacaggttagttgcttgtttctaggtaaccagaggtgtggtttacaacaccaaaatgctagaggagccgatacaaacattttagtttaatttctacatctattaggccttttgttttttgaatgagatgtgcagtgttgattgcggcacatacttagaagtgttccaacataagctggaattctgtcatacggaaggataaacttgtataccaagggaatgctgtattattatctttgcccatttatggctacattagcttgcttgtttctattctctttaaccatttcatctgtatactagacagttgcttgacttactattcaaactatattcaaactattgggggtacagagccatattgagacctagtaataaagccaccgaaagtatatacnaaaaaaaaaaaaaaaaaagcggcc

SEQ ID NO: 142627 - DNA, 495 bp, Zea mays
  Clone ID: MRT4577_61558C.1
attggggtgatttgtttttttttttgttttccgtttttatcccgggtggggggggggggggctgtaaccccacacactgcgggccgtgcttggagctgctccaccttggtttttttcccggcaagtagaaatggtggtttttggaattggggggggcctcctttggttttaacggtggggacatgttggggatcctggggggggatgtgggggacttgggggggttcccgggggggattcttgggggtctgggggcgggggaccccgggggctaggtatgctttacccggtggtttcttggccggttggtgggggtgtaaaacccggtttacccttgtgttgggggtggccggtgccgccgggggcactggtttttttgccatcctttttttccagttggctgggggggcaggtttttcctgaacctccttgtcaaggagcggttggcccccgggggggtctcctcttggagccgcttgggcttcctgggggggg

SEQ ID NO: 142628 - DNA, 2576 bp, Zea mays
  Clone ID: MRT4577_61559C.1
aaaattctaaaggagcggatacaaccattttgtgaagctttcagattttagtttaatttcaacatctattgggccccggcgttgcctttggttctcacctacccaaccggtacgggcgggccccgcgtcgccgtcggctccttcccccgcgcaccacacccgcagccagctgccatatcatccatcacctcgcctcgaggccggccggggcctctccattatttatgcatttccgcccccacccttacctttcccaattcagccgaggaccgcaatcgcagggcactgggagcgattaaaaaaggcagcctcccccgcaagggtaaaaacaaacaaccaccgcatcgcggcaggcaaggcatcgcccgccagccaccgagcggagggggaagcaaaagcttgataaaaaggagaggaggagacgagacgtgccgtccggacccaagcaacttcctcccaccacctcctccctcccatgcccgcatcgagatcttagcgggacagcgagaggagaggcgacgccgacgcgggcgccccctgatccctcctcgccgccgccgccgaccgaccgaccgggggaggaggaggggaggggaggacggacacgatggaggcggactccgggaagctcttcgtcggcggcatctcttgggagacggacgaggatcgcctccgcgcgtacttcggtcgctttggcgaggtcaccgaggccgttatcatgcgggaccgcaacaccggccgcgcccgtgggttcgggttcgtcgtcttcgccgattccgggatcgccgaacgcgtcaccctcgataagcacatgatcgacgggcgcatggtggaagcaaagaaggccgttcctagggacgaccagagtattgcgagcaagaacaacagcagcatagggtcacctggaccaggacgcactagaaagatctttgttggaggtctggcctcaaatgttaccgaggtcgacttcaggaggtattttgagcaattcggtgtcataaccgatgtggttgtgatgtatgaccacaacacgcagaggccgaggggctttggtttcatcacatatgattcagaagacgcagtggacaaagcactgcacaagagcttccatgagctcaatggtaaaatggttgaggtcaagagggctgttccaaaggagcagtctcctggacctattgcacgttcacctgcgggagggcagaactatgctatgagcagggttcataacttcctaaatggcttcaaccagggttacaacccgaaccccctaggtggttatggcatgagggtggatggaaggtatggtctcctttcaggtgcacggaatgggttctcttcttttggtccaggttatgggatgggcatgaacgttgaaggtggaatgagtggatattttggtgcaagttctggtttcgtcaatagctccaatgggcggcaaataggttcttactttaatggtagttcaaacagattaggtagtccaattgggtatgttggccttaatgatgattcaggatcaatactgagttcaatgtctagaaatgtttggggtaatggaaatctgaactacataggcaaccatacaaacatgaattcttttcctccacctggaagtggtgggggtatttctggtgatgaaattagttggggaagccttacttctgctcatgggatgggcaacatttcaagccttggatcgggaaaccttggccgtggaaccggagataacaactttggcttgccttctggaaactatgttaggagcaactcaactggtacaattggtgagccattttctgcatcagccaatgcatatgaatcgaacaatccaggtgcatatggcagcagctctatttatggtgactcaacctggaggttcaactcatctgaggttgatatgcctccttttggtcatgatcttggaaatgttgatccagatattaaatcagaaatatcagcaagctatatgggcaactatactgttaataacaatcagacaagcagaggtatcacttcctaggaagagtattattatattcatacatgacttgggataggtgaaatacccactactatatcaggctttcaggtgcatgactgtgaattggtgatgtcagattaatatacaggttagttgcttgtttctagttaaggtaaccagaggtgtggtttacaacaccaaaaatgctagaggagcggatacaaacattttgtgaagctttcagattttagtttaatttctacatctattaggccttcgttttttaaatgagatgtgcagtgttgattgcggcacaaacttagaagtgttccaacataagctggaattctgtcatacggaaggataaacttgtataccaaagaaatgctgtattatctttgcccatttatggctacattagcttgcatgtttttattctcttcaaccattccatatgtataatagacagttgcttggcttactattcaaactattgggggtgcaaagccatattgagacccagtaataaagccaccgaaagtatatacatgtactatctctcccttttgtgccattcgaatgcttttgcggaatt

SEQ ID NO: 142629 - DNA, 202 bp, Zea mays
  Clone ID: MRT4577_6155C.1
cttttataagcccatgttttgacgagtgttgttttataatcatacaagaccactatcacctaaatgtacatctcaagcctaacctttccactcctatattttgacaccgcaacccataacggtgatagcgtggcatacttttccatgtgaaccaaacaatagaatcctgagggttggtttcccaggatccactatgggatgg

SEQ ID NO: 142630 - DNA, 4313 bp, Zea mays
  Clone ID: MRT4577_61560C.1
aacacagcaaacataggttcagtagaaaagtacaaacacacaagtgaactctaggttctagggtagattaatgttggggacttgttctcaaatgctatgaattaagaacaaggcaacacagaaagaagttaatggttaatgcccttcgtcctccgaagcattatttcccttaggatataacgatcttcggacaaaggtcatgaaggacataccttcatcatcacaatttacattgatgaaaggagaagtatatgaaacatgagaaattacatgaataatcatataacattatttatatgtccttattatataattatggatgaataagaacaacattgaattacatttataccttcggcttgacagaaggaaaaagtacaagtgtgacgcatgagcgagtacaagtcagcgtgaacagtacgggcgtactgttcatctatttataggcacagggcacaacctgtgtgagattacattcatacccttcatgtttactattgacttaataacaatctatcgaggactagatagccttttcctccttaagtcggttcctttttctgctgctgagccgaagctcccttgcgcgcagcttcggcgttggttcaaccttcgttccgactttgctttccatattgtgtacagcttcatcccgagtctgaaggttcctgtacatatattacgcttgggaaacattgttaatcatgtttttgaggaccttcggaatacgaaggcccccaacagtagcccctcgcagtattaatttgttataacaacgaattcagactgcgatgtgaacgaaggccttaagccgaaggtccaaaaaaacaccttccctttgctagaatagcaacaatcaatgtcagttggggccctccaagttgcagcgtgctaggcgtataaatatgaactcacaccggcaacatttgatacgctgtttctgtcatttgcattattttctcaaacttttagctcttgcttgctagcgctcgctagattttcaagattttttagctttagttaaaagacgcgatttcaccatgtctgggaaaaaatgactgagaaggtgaagctgactgaggagacgaagctgtttgaggagaagaaggttgcagatccttatattgctagatttattgagtccatggcaaaaacaaacacagagaagattactaaagagatactggaaggtttatctgaagatactggtgacagcgataactatgatgtggaaagtggggatgaagattctgaagatcggccctggcgaccaagccatgctgtcttcggaaagtcgaccattaaacagagtcatcttgagaacatgagaggaagatactttcgagacatgtctatcgtgagggctggcggagacaagaacatccctgctcctgaggaaaacgaagttgttatataccaaagcttttttaaagctggacttcggtttcctttgagcaagtttgtagttgaagtgctgaagatctaccagatcttccttcatcagatcacccctgaagctataatgaggatggggatttttgtctgggctataaggagtcaggggctagagccaagcgcgaagtgattctgcagtatgcacgagctcttatatgagacgaaggctactggcaaagaacagtaccacaacaacttcggttgttatggatttattgcttgccccaacgcaagccacccagtgccaacatttcggaagagatggcccggagcttggatggaagagtggttttatgtgaagaatgatttaaaggcaatggaagacattaaagaaatcatccagcgccctatctggtcccgcttcggcctccgaaggtcgaaagtggaaattgatgacgctgtcgaagcgtgtcagagggctttcaacactgtttgctccttcattggcacaagagatttgattcaagaacatatagccttcagggtatggccgcttgtggaaaactgggaaataccgaaggagaccactgccgactctagtgagggtggtctgatccgactgaagtataccttcagatttggggagaagtttgaagagccgaacgatgactggctgaagtgtattgaagctactagcgacgagctacttggggtatactccaaggccgaggataatgctttatctgcagcttttggggtcggaagaagaaaagattgaacagggtatttgatgctattggcttcgtataccctgattatggcctcccactgcgagggcaaggaaaaaagagaaaagttgctgcttcggtcattatagctgagccgaagggcaagaagataaaggttctaactcaccggtcgtgttacattgaaccgaccgtgatacctgaatttggcaaagggacctcttcagctgccgaagcaaaagaaactgttccaattgtgcagagcactgaagagccgactatggtgccgatgatgcctacagttgagtcagccaaagctaaagatgataaggccgaagggccacagattgaagaaataatgaaaatatcagaaagtctgagcccttcaatagaggcaaagctgccgaaggtgcaaaaggcttctaccgtgactcccaggaggagaaggatggcgaacatgctagatgttgtgctagagactacaaaggccttgagccctgctcctaaaaagaaaattgctgaagctgccaaagtgcaagccgaagtcgaaactggacaagtagaagtcgaagctacgaaaactcgggccgaagccgaagctaccaaaactcaggctgaagctgaagctgggccttcagcgcccgcctcggcaaagcctaccacgcctaaggaagagatgacagaacaaattgctcctaaaaagatcgagacttctgctcccgaagctttgattgaagatattgactacatcattcgacacgcttcggggaagaagctatccgaagaagaaattctggaagccaggcactatgcgcgaaagttgaaatatccgaaaggaaccttggtttttaacggaagcaatgaagatgatttcttatgttgtctcccggacaacaaagaaatatctgtttgtcgggagataggcagaagcatgggattcacaaagctggaagatggcctttcaattttgtcgaaggatgatcttgccgacagcctagcctacaacagtataaaggtataaaggttaactttgaatttgagaatgaagtatttatttgtcatactcaattccttcctcctcttgcagggcctaattcttagtaatgcccttagggcgtagaagaatattgaagacgaaggctatacaatggctctgaataaccttcgttcagacgtgatcgaattgagaaacgaaggtcttgaaaaagataaaatcttaatttcattggtaaacaatgtgaaggaagacgaagctagtttcaaagcttaggccgaagcccaaaagactgaaattgaagaccttcggaaacagctggccgaagctaaggaaaactgcgcactcacgcaagctaatcaagaaattagcgaatattggaaaaatcatctggagaaaaatgttgaagaacttcgcgcatctagggaaaggtgctttgaaaaatccttggattgtgtgaagaaaataaaaggtagcttcgccaaagtgggtgcctattctgctaaagaaaacatcatacgaggcaaccccgaaggcgttgttgagtggataagtggagaagctgagaccttcaaagaaattttaagtgatcgcggggatgtttgcgcgttttccggtgcgcggggaatttcagccatcttggagaaggctggatgcgaccatatcaaaaccttggcctagaccaaagctgccttctccatagatgatacgaaggatccttcagtcgaagcaaccatgatgggcggaaaattctataatgatgtctaggtgaatggtggccgagagatggcccatgaaattataaagaaaagtgaaaaagacacccaagatgcccgaacagaagcaagacgagctgaggaagctgccgagcgtgaaaagcgtatagctgaactatctctgccgccggagccgttcgatcccctagctgatccaaaaatgaaggaagcgctggagatcataaacatggttgaatctattgttgacgaagtcgttaacaaattgctgaacgaagttgcagagaaagttcttaaagaggaatagattgtgttgtaataaaaattttgaaaagtttaatgtatataacagatgaaggaagattaggtttctattgtaacaaaactatgatatttgatgtgtgtaactttgaatcaaatatgtaaattattgcattttatttc

SEQ ID NO: 142631 - DNA, 2696 bp, Zea mays
  Clone ID: MRT4577_61561C.1
ccggccgggatgacataaattactcctaatatttagctatcgatgaatctcccaatgtacttaaaaaaaaaaaaaaaaaaaaaaaaaaaattcagatttcatcctcggcgtcgtctcctgtcctctccacgccaagcaacctccccaccccgccccaccctccatgctcgcctcgagatcttagcgggcagctccggagagcgccgacgagccccctgatccctcctcgccgccgccgccaaccgaccgggggaggagaggaggggaggggagcgatggagaccgccgactactccgggaagctcttcgtcggcggcatctcatgggagacggacgaggaccgcctccgcgagtacttcggccgcttcggtgaggtcactgaggccgtcatcatgcgggaccgcagcacgggccgcgctcgagggttcggtttcgtggtcttcgctgacgccacggtcgccgagcgcgtcaccatcgaaaaacacatgatcgacggccgaatggtggaggccaagaaggctgttcccagggatgaccacagtattgtgagcaagagcaacacaagcagcatagggtcacctgggccgggccgtaccagaaagatctttgttggaggtctgccctcaaatgttacagaagctgacttcagggggtattttgagcagttcggtgtcataactgatgtggttgtgatgtatgatcacaacacacagagaccgaggggctttggattcatcacctatgattcagaagatgctgtggacaaagccctgcacaagagctttcatgagctaaatggtaaaatggttgaggtcaagaaggctgttccaaaggagcagtctcctggacctgttgcacgctcacctgcaggagtggggcagaactatgctatgaacagggttcatagcttcttgaatgacttcaaccagggttacaatccgaaccctataggaggttatggcatgagggtggatggaaggtttggccagctttcaggtgcacgaaatgggctctcttcttttggcccaggttatgggatgggtatgaacgttgaaggtgggatgagtggaacttttggtgcaaactctggtttcatcagtaactccaatgggaggcaaatgggttcatacttcaatggaagttcgaatagattgagtagttctattgggtatcttggttatgactcaggatcgatgttgagttccatgtctaggaattttaatgcaggtgtaaactacccgatcaatcctacaaacatgagtgcttttgctgcccttggaaatgggggtggcgtcaattatatgggtctcccttctattgcccctgagttggcccagttgggcaacatttcaagccttgggtcagggaactttagccgtggagctggagttaataacttaagtttaccttctggctcctatgggaggagcaattcaactggtacaattggtgagcctttttctgcatcaggcaatgcatatgaagtgaacaacccagatacatatgggaacagctctatttatggtggcacatcctggaggttcccttcatctgaagttgacgtgccttctttcagtcatgatcttggaaatgttgatccgaatatgaaatcagacatatcagcaaattacatgggaaattattctgttagcaacaatcagccaagcagaggtatcacttcatagtgggagtattactacacattcatatatgacttgggatagatgaagcacccattcagtcaggcagccaggtgcgtgcatggcaactgtgaatgggtgatatgtcaggttagttttgtctagctgaccagcggtgtggtttacaacaccaacatgctagaggaggaggaagcggatacagaaacattttctgaggggcttcttttctttgagtcatgtttttagttttgattcctgcgcgtggctagctccttttggtttttgaatgagatgtgtagtggtgattattgcggcgcatattttagagatcgtggttcttccaacataagctggaaaaagaagtctgtatacggatgaacatgtataccaaccaaagggatgctgtattatcttgcccatttgttactacattagcctgtgttttatatcgtttgaacttttgcatgatccagatatcaaatcagaaatatcagcaagctatatgggcaactatactgttaataacaatcagacaagcagaggtatcacttcctagggagagtactattatattcatatatgacttgggataggtgaaacacccactactatatcaggctttcaggtgcatgactgtgaattggtgatgtcagattaatatacaggttagttgcttgtttctaggtaaccagaggtgtggtttacaacaccaaaatgctagaggagccgatacaaacattttagtttaatttctacatctattaggccttttgttttttgaatgagatgtgcagtgttgattgcggcacatacttagaagtgttccaacataagctggaattctgtcatacggaaggataaacttgtataccaagggaatgctgtattattatctttgcccatttatggctacattagcttgcttgtttctattctctttaaccatttcatctgtatactagacagttgcttgacttactattcaaactatattcaaactattgggggtacagagccatattgagacctagtaat

SEQ ID NO: 142632 - DNA, 387 bp, Zea mays
  Clone ID: MRT4577_61562C.1
gggtcgagcacgcgtccgagcgcaatctggctcgttcttgtgatctatctagccgtttcttgagtcagtgctggaaagtcaaactgttggaggaaacctcaacggggtgcttcaacaaacgcgaaagtgtcgctgtcatttagcgcgtcctgaatggatttgacctgatgggcctgatggctgttgtccttgatttgagctcgaaggatgatgaaatggggggctcaacatcagcactcccgcggattcctactacgacgtaccgtcatattgcactgacggtgtacccaagagcaagttcaagatcaaggctggcaagacattaactgctcggaaatggtaggctgcatttagtcgcaatggctgtcttgatattgcctcagtcct

SEQ ID NO: 142633 - DNA, 381 bp, Zea mays
  Clone ID: MRT4577_61563C.1
atttactggaccgacgagctcatctttcggcggccggcctccttgttgttttttttcttgccgcaagccaactctacattcttgactgaaaaaggaaacgcattaacttccagcaccacccttacacaggaacatcaccgcccgcgtagaattccatcaacgatttacatgcaatctcaggagagaatatgaagcacgcagatcacggtcggatgagccacatgtcatcatatgataccagcacggccactacgtgctaagggactgtaccaccaacagatgccatagactcctaccaaaagaaagcgctctgcctggagcatattctcgagagcacgctgtcagaacactgaggaacaccgctcacatgcactggatcag

SEQ ID NO: 142634 - DNA, 370 bp, Zea mays
  Clone ID: MRT4577_61564C.1
ggcggtgcgcagagaccatccaggccatcctctactacgggctataccttccaccgcaggaaatcgccaagtcatgcgcgaaggcgttcaacgttacccgggggaccaagagccggggaagagcacttttacggtgcaaaggttcaccccaagacactcagtcttaagcacaccggacccgtggagctatccatggccaacgccggtccctacaccagggcttttgatacatttatttgaaccggggatacccctttgatggatggattacacgaagaattcgggctctatgccaagggcatggctggcaacaaggtcatagagtaggtgggctcccccagggaggccacctccaaggcaggtgaaggac

SEQ ID NO: 142635 - DNA, 361 bp, Zea mays
  Clone ID: MRT4577_61565C.1
tcgacgcccgcatccgtcgacaaatgggttatccgccggcctcttcattccgtcgctgctgcttgctcacactccactcacgactcgccgacgcaccagctcccatgagttgtccattgcctccagcaccctctcatctgtctttagcctcctctctagacactcacatctctgcgatctgggatggtctactccctaggtctaccatcctcgttgctcaacacaccactgatgactccacggtttacaagttacatccatctggcaccaatcagccaacgttttagtcctcagcgatatcattgcctttctcaattttgactatgcattgctgcgttcttaactacttctacgaccggtt

SEQ ID NO: 142636 - DNA, 183 bp, Zea mays
  Clone ID: MRT4577_61566C.1
aggtaaattcttgatgtctacaatttgtaaatataactgcaaaggatagagatgttcaagtcttaatttagtacagacaccttggcagaagaattgcttgcttcagagtttacgaaattatcatatcagttatgtatccagaaacagctgtttataatagtcatcactcatgagtatagtatg

SEQ ID NO: 142637 - DNA, 455 bp, Zea mays
  Clone ID: MRT4577_61567C.1
gggctggccggcgcctacgaccaccaaggttcctgcagggtgacggcaaagaccttctgcaccgagtgccggagtgtcaaccctatgctcaacaggttgtacaccccgtggccggaagggggagcagtaaccagtctcaagagtgattatgccgactatggtggcaaacatcgtcgactttcgcctcatgcggctcggtgttaggcggacagtctctacgcgtgcttccacatcctgtacatggagctcgctagcttgctcggggacatggccagccttctcatggaagtgaacaaccacgggtttaactgccttcgttctttgaacgaagataaaccttacgtgatcgcggatttggaccccatagtaccggcgatgactgaactaaagacatcaaacgaaaccgggcgttcaatgatacttaagcccaattaggacaggttgatcgactgatg

SEQ ID NO: 142638 - DNA, 303 bp, Zea mays
  Clone ID: MRT4577_61568C.1
tttcaagagaaagggcacatgttattagatacagaaattatacatatacgtaggtataaacgagtagtcgacacgatacactagctagaaccgtctcacatgatacgcgactatgaacaaacacatcacggacaagcttgcttgcattggattgcatcgatccctcatcatctgtcagcacagcacctttttttcatcagctggcaaccgatatcatcgtccatggaggatgatagatacatcgtctatcggtcggtcagtagtaggggcggcgcgcgcaagtgagcgtccgcaccaggcgcc

SEQ ID NO: 142639 - DNA, 460 bp, Zea mays
  unsure (1)..(460): unsure at all n locations
  Clone ID: MRT4577_61569C.1
gaagctccctcctgtgctctcatgatccgacgatgatggtcaccggatacctcgagcggctctcctcccttcgatgaacgtggcctttactattacgtcccactggatgtatcatcatgtcgagggacatgagtactgtccaggctgaggtgcgtgaaccaactccgcgtgcggacacagcgctgcgccatatacgtctatgataggctggagaacgacctagcgtatagacactatttatacaccactgtcatcaagcatctgcgaacgtggatgtatgatagcgatgcatgcatcgnggggtatcttactgtgtgaaggggtgccactaactacgacatgcaataacaatatagggtctttggtatctggcgtcagttgaaggaaggtaccttctgagaaaaatacaccaactcctggtactggaaaataaccaccgttggcaccggcgggtactttg

SEQ ID NO: 142640 - DNA, 267 bp, Zea mays
  Clone ID: MRT4577_6156C.1
tgacacgtgggccgacatataggaataactatggtggaaaggctgaccgcggatcaaacgccaccgacaggttgctggcccactggtatcagagtaaacgtacgactgtacaacaaagaagcactgaatgtcaaactgttgtttagacgagcgtgacgtactgcctttttttccaatgtttgacggcataatgagggagagcacgtgtatgacatgacgtgattggtcaaaagggagctcgaaccccacctgttatggagacacata

SEQ ID NO: 142641 - DNA, 542 bp, Zea mays
  Clone ID: MRT4577_61570C.1
gtacgaccacacgtccagacacgcagactgagagacactgtggacaactttttcccttttgcgaccagccaaggacaagagggcctcgaggatataccccgttgggatatactgtgggcgaaccgcgagctaacaggagtcggagctgtcccagctggcgcagggaggggaggtcgagtgtctgataagctgctaccaacctgagccacaaggcctttggctggtcctaacctatggaccccggactggggaagaaatacgaggatggtggacgcacggggtggttggagccggctccagacttagctgggaaccgtagagagcagagactattgaacacgcgatactacccgacagatgcctgagatacaatacagaaccacagcgatgtggcatgtgccatggtcggtgtgagagtgtgactctctgaacacaataaagacaccaacgccatattctcacttgaaatggatgaaaaggacatgaacatcatcactgaagtgtcgaagaggggcagaatatctgatcgatattattgggga

SEQ ID NO: 142642 - DNA, 723 bp, Zea mays
  unsure (1)..(723): unsure at all n locations
  Clone ID: MRT4577_61571C.1
gggtacctcgaggccggccgggaacgacatcgcggcgatagagacaagggcgtgaacgcggtgaccaacttcgacctgaggtccttcggcacgtggctgaagcccagcgctccgccggccgccttcaaccgggaggcgctcgtggcgcaggcagcgccggccgagcagctgcagctccaccaccacccggcagagacggcccagatgctcccgcgaggcaacccgttcctgctggaccacatgagcagtagcggcggcggcggcggccaggaggcctccatgtccacggtgtctcccggcggcatgaggaggcgaggctcctccaccgcgctcagcctcctgctcaagtcgtccatgttccggcagctggtcgagaagaactccgacgccgaggagggcgccggggacggggaggcggctgctgctggtggtagtggtggtcatccagggccaggagacgcctacgagtaccacaactttttccagggagaggcgcctccggacatgtgcgacctcttctcgtcaggcggcggaggcggcggccacgcgcgggttgctgggttccatggagacatcgccgcgtgctacgacggcgaggggctggatggctggagtgggtttggcaacatgccttctctgcaatagttgccttaattttgtgtaatgaaaattttcaaatttccagctgctagtttccctttaaaaaanaaaaaaaaagcggcc

SEQ ID NO: 142643 - DNA, 294 bp, Zea mays
  Clone ID: MRT4577_61572C.1
acccacgcctcctcgaaggcaggcagtcctgccagagcaccggtcgactcaccgaacgcacgcagtcctgcagctcctgccaaggcactcgaatctgctgccacgagaactgcccccgctaatgcacctcaagccgccttcatctccgccgttgctgctgctccatcgtcgtcgtcatctatgaaatcaggtccacctgccgcacctatcagcgccgcctctacaccgtcttcttccatcgacgaagagtttagcccttccccgtcggcatccaatcgcccaagttgcctcccc

SEQ ID NO: 142644 - DNA, 504 bp, Zea mays
  Clone ID: MRT4577_61573C.1
tttctttagcaggggtaacaacgcagagtacgcggggtttctagtgcaattgattattcgatttgaaaaaaaaaaaaaaaaaaaaaaaaaaaaaaaaaaaaaaaaaaaaaaaaaaaaaaaaaaaaaaaaaaaaaaaaaaaaaaaaaaaaaaaaaaaaaaaaaaaaaagttcctttgcgttgttcccggggtttaagggggattttcagcacactgggggccgtttttgggggatccgggctgggtcccaagcttggggtaaccatgggcataggtgtttcctgggggaaattgttttccgctcacatttccacacaaaatacgagccggggggttaaagggtaaagccgggggggcctaaggggggggcgaacccacattaattggggggggcttcctggccgcttttcagggggggaaacttgtgggggccggtgtttttttggtttggcccacccccggggggggggggtttgggtttggggggcttttcccttttctttgt

SEQ ID NO: 142645 - DNA, 236 bp, Zea mays
  Clone ID: MRT4577_61574C.1
gggcattttggcgaaaaaatggaaaaagttgtttccggggagaaattggaatccgctcaaaattccacaaaacatacggcccgcaagcataaattgaaaagcctgggctgcctagggagggggttaattcacattaattgggtggggctcaaggccccttttccagtgggaaaacctgtcgggcccgctgcattaagaaatcgcccaacgcgcggaaaaagggggtttgcgaattg

SEQ ID NO: 142646 - DNA, 287 bp, Zea mays
  Clone ID: MRT4577_61575C.1
accggttccagttcgacctagacccacgcgtgcggctcacactaagcgtcgctccttcacctcaaatcggcacccatggttaccaggatatgataccttcttgggcttcttgctctcgccagtagcctcgcgcactcgccgactgacgaccctgccttgaacgcgctggccagatgatcggcacaaggaatgcgaagcagtactccaacgtccttgacaagcccatctgcccaggcatgcaggatgccacatggagtgcatgtgcatcgtttgacatcagccaattt

SEQ ID NO: 142647 - DNA, 197 bp, Zea mays
  Clone ID: MRT4577_61576C.1
caaaacaacaaaactagcaaaccccgcgcctttattaaaacctaacgccgcccctaacaaaaccactactaccttaccctattctaccatttccaccatcactatctatcccaaaaattaattatcctatattaccatttccaaaacacactcctcacaactacaatacatcttcttcacccaaccaccacaacttt

SEQ ID NO: 142648 - DNA, 337 bp, Zea mays
  Clone ID: MRT4577_61577C.1
cttaaaatccacccaacccttccattattcctgaaaaccaacattttcttttaacggtccaattcctgccaaaaggagggaccggttgcctttcctgattttccttaggcggctttgctatttggtgaattggggaacctcctaatccaggcttgttgcctacaattaattccttggttgacgttttgccaaaattggttggtattgggcacgataatttctggaaataaactttaaacagcccttagtattcttttaatattaaaaaaagccagccccttctcgtcagggttgaaatggttgcagttttgatgcttttgtagtgttttaatagctc

SEQ ID NO: 142649 - DNA, 288 bp, Zea mays
  Clone ID: MRT4577_61578C.1
gtccccacacaacaagctttcagacaacacacacgtaaagccatctgtcactctgtaaattattttgtacattctctactcttaagtgtttcccagtcagttcctttaacaaacatgagcttccatgatgccaaaggagttcactgccacctgggaacagatagggtgtcgccctgtgagaggatgaacgaggccagctgagggctcccaagtgcacttagacatcagcagttccaggagcacaatctgagaaggacggcactgtggcatcaggacgaggctcagacc

SEQ ID NO: 142650 - DNA, 434 bp, Zea mays
  Clone ID: MRT4577_61579C.1
gtcgtgaacaagtggtgcatccaagcttggccacatccttctgggcatacatcacacaaccttatgccaggaccccaatggaggaggagcagccttagacatcaacctatagtacttttgatggtaattgagccactcctttttcattggataatttgggcacccaagaacaccaagtataacttctccatcttcaatcaaggctagagcaatagcatattggtcccctctcacaaacccaagggtgccgtcgacaggatcaagcacccaaaatcttcctttcgggcctccagtagagctgcatttccgtatggcttgaataacatcatgagctctgagctctttctcaggggatctcagcccatagtttggagcttcaaccaggcagccgttgacagcctcaacaacagattcaagcaaagctcgagccgaat

SEQ ID NO: 142651 - DNA, 450 bp, Zea mays
  Clone ID: MRT4577_6157C.1
aattcggcacgagggtctttttttttttttttttttttttttttttttttttttttttctaaaactgaacttgtgcgctctgaccgatgctgttgacaaagtgagccttaatgccagtgctgggacagaagatgtattaagataagtggggaaacagcctatagatcatagttctgagcgggaaaggcgcacgggtcaacgcgtgcttccctcactaagatccgagcctcgacaaaatgcccttgtttcccctggagccgcccataccgggttcaatgtggggatacacaaatcccccttacttagccgtactaacgtacatggaagggggggaaacaaccaacacgccctaaaattctttgtggtttcgaccgggttggaggatatggagaccagggcccttgttacaacataaccggcggtttttctcttgacacactcggagagcct

SEQ ID NO: 142652 - DNA, 190 bp, Zea mays
  Clone ID: MRT4577_61580C.1
cctgcaggccgactctggaggatgctctcggggaattccgcttcccgattggcctgatatagagacgcataaatgctcatctttgaagagcaattatgcgttctcatatcttgcctatgctgaagccgaatgacccgagagcggcctttctcggggaacttcgcttcacgttttgcctaattagagacgc

SEQ ID NO: 142653 - DNA, 278 bp, Zea mays
  Clone ID: MRT4577_61581C.1
ctgttcttcttgggttcggtgatctttttttggtttggagtctcccccgaaacaaattttacttttttggggagcgaaaagaatacgttttcaacaagtacttttctaacacgcacgtggttgggccggggtcagacacgctcacaaaccattgcgcgctgaccaccgggtcacgccacatcctgaccaaaaaaaagcgttcagggctagaggaggacggccccgtggtcaacatcggcctttgcccgaacaaccgcgaggtggtgctggcccccccc

SEQ ID NO: 142654 - DNA, 287 bp, Zea mays
  Clone ID: MRT4577_61582C.1
tttcactgctccagcgaaggcacagccgccaccgttgtcttgatctcccatcttgcatcttctatcgtagcgccggcgctccatacttccgctccctccctgtagtcgcgctcggcacgcggtgtgacggcgggcagtggcggcactcaggagcgaggctctcagcgacggcatcaggggggggcgcctcccgcttctctccagtcgcctctcgccctcgccgccggttctccgcacaccaagccggtgaccctccattatagggtgtgagactagcaaaactcgaa

SEQ ID NO: 142655 - DNA, 152 bp, Zea mays
  Clone ID: MRT4577_61583C.1
agcgcttgagggggactggcctggcgtgcactccgcacctcggggacattattgcgcgtggaacggctgcttttggaagactattgcccagaagaaaagatgtttggttttcacaagccaaagatgtaccgaagtatagagggctgctgtat

SEQ ID NO: 142656 - DNA, 713 bp, Zea mays
  Clone ID: MRT4577_61584C.1
aaatggtgatcgggctccccacggacgtgaagcacgtggcccacatcggatgggacggcagcaccagcaccaccagcagcctccgggcctggaaccgcgccgcgcccactccaccggcctcctcgtcgtcgtccgcgcccgccgccgcggcgcccaaggagcaggagcagtacccgctgcccctgccggcgctgtccatgcagcagttcgagctcgccatggccgcccaggccggcggaggcggaggcggggctgcccaccggcgtcacagctagcgtgaggcagagagttggtgggggtcgtcgtcgtcagtcagactcagacagcaggcgtcagtcacaggccgtcgtccgtttctgccgccccactgtgtctcccatgtggagtggagagaaaaagaagggtgggggccggcgggcggacggacggacggcgcgagcgcctggcggcgctgtccgcctgtcctctacctcccgtccgtccgtccgtccgtgctggtcgtcggagttggtgcgtgcttcgtttgcttgtgctttggcgccatcgctgcggaactgcggtgcgctgtacgtagccatttttcaacgaggggggcggggttctccttgttcgcctgctacttgtgtcacttttactgccgttacaaaatattaattgttacacgctgctccaaaaaaaaaaaaaaaaaaaaaactcgaggaggggcgccggtc

SEQ ID NO: 142657 - DNA, 217 bp, Zea mays
  Clone ID: MRT4577_61585C.1
cttgttcgtcgccagtactgagcaggtgatgttattagccgaccccgatagtaaatgcgaacgagttgtccttgaggactcagatcgtggatattgttgtccacgtcccagatagcatagtacgacagggcagcagaggagaacttctttggtgttttgttgtttaaccggcaggatcttatctctccagagatggtgaaggtctccttggagtaga

SEQ ID NO: 142658 - DNA, 154 bp, Zea mays
  Clone ID: MRT4577_61586C.1
taacaatagtgaagtgaagtggatggagaaaactgcaaaccagcatcatggcagccaaaagttacgatgtcactaagacgggtttcggtgacatcaacagtaaatccagatccttcgtgggaatgaccacacacgatgtacaagattttgagct

SEQ ID NO: 142659 - DNA, 1336 bp, Zea mays
  Clone ID: MRT4577_61587C.1
cattgggtacctcgaggccggccgggacctcgcgcgcgcgcggttggccgcgcctgcgcgccctcggcatcgcccccgacggggggcgttggcgttgcctcccccactttgcacccatttcagagcccgcccgacacttgtcaccgcgcgccgcacctccccggcctccacctcctcttcgtccggcgacgtcttgccgcagcgggtcacccggaagcgtcggtccgcccgccgcgggccccggagcaccgcccgtaggccgtcggcgcctccacctatgaatgaactggacttgaatacagctgctcttgatccggatcattatgctacaggattgagagttcttcttcagaaggagctccgaaatagcgatgtaagccagcttgggagaattgttctcccaaagaaggaggcggagtcttacctccctattctgatggcaaaggatggaaagagtttatgcatgcatgacttgctaaattcacaactgtggaccttcaagtatagatattggttcaacaacaaaagcaggatgtatgtgcttgaaaataccggagattatgtaaaagctcatgaccttcagcaaggagacttcatcgtgatctacaaggacgacgagaacaaccgctttgtcataggagcaaagaaggcaggagatgagcagaccgccactgtacctcaagtccatgaacacatgcacatctctgccgcactgccagctccacaagcgttccatgactatgcaggccccgtcgcagcagaagctggtatgctcgcgatcgtgccacagggtgacgagatattcgacggcatactgaactccctgccggagataccagtggcgaacgtgaggtactccgacttcttcgacccgttcggtgactccatggacatggcaaatccgctgagctcctccaataacccctcggtcaacctggctacgcacttccatgacgagaggatcgggagctgctcgtttccctacccaaaatccgggcctcagatgtgagatcctggcagaaaaactgccgcggtcaaaaccatcatcccctgcgtggaactcagagatcccctggttgacgccattgctgtacatccaaataaatggcgtcctcattttgtatgttcagtagtatatgattgggtacgcgtgttgtttatgtgtaaaagggtaactctgcaaaactgaactgagcgttacatcagatgcaacgctgtgacgactgacgaggaggcaggctctggtgtttcctgtcccaaaaaaaaaaaaaataaaaaaagaaaaaaaaaaaaaaaaaaaaaaaaaaaaaaaaaaaaaaaaaaaaaaaaaaaaaaa

SEQ ID NO: 142660 - DNA, 783 bp, Zea mays
  Clone ID: MRT4577_61588C.1
ccggccgggccggacgctccgccttccatgtagacgacgatgacctgcatgcatctctttgtctttgtcgcgatccatgccctgccttccttggagacgcgccgatccgcgcatcccacaaccaccgaccaacctacgtcctaatcctccgctgctcgggtataaaaatgatgatgcctctgaaggaaagccataccaggttcttgcattcctgtcagatcccactgaaacaggtctgaagagaagcgctcgacgtggtgcaggtctgtcatattctgtggtgtagttcaaggtgagccaatccccttagacctatcctttgtgtgaaatgttgcttagttatcatggtggttccaagagcctaatagaaacagttactggattcatctgttttctttgtgatagattcatagttttctatgtttttttgtcaaatgtgagtaactgaaacacactaatcacactagagaaattcagtaactgattcagactcatgcatcatcttattttgatgtatttgtgaaaagataaatatgaaaaatagtaccaatgattatttcatattgagataattgggatgacaattggtccatcatcacatcttatcgtttcgagttaggctcttgttaaaatgatgattaggctcttgttcagttaagtaggtctcagttctcttaaaatgatgatgttaggctcttgttagtaggtggagatgttatggccactgttgcagcgaatcatttttttaagtgatgcaaaagtaaattcaaggataatgttgtg

SEQ ID NO: 142661 - DNA, 197 bp, Zea mays
  Clone ID: MRT4577_61589C.1
ttttgggtgcccccccaaaggggagacccgggttacctttccaattggggggccaaataaccaataggggggacccggggtggggggaaccccaccccaaccctttttggcaacaatttttaattttaaaacatgggcggttgggaaaacttcccccacgggttcgcccacgcgttcccccacgcttccggggaccg

SEQ ID NO: 142662 - DNA, 236 bp, Zea mays
  unsure (1)..(236): unsure at all n locations
  Clone ID: MRT4577_6158C.1
gggggggttgggggggttttttttaatttttttttttgggggggtaaacgccccccaaaagggacaaaattctcaaaagctttaaatttttgccgttactgatagcaaacaaaggcacacccgaaaggggcgctcgactttgaccctccccaaacaacggggaacgcccgggccaacccnnttttnnnacaaaaacanaaacaaccccaaacaaaaccccnggggggagggaaaag

SEQ ID NO: 142663 - DNA, 918 bp, Zea mays
  Clone ID: MRT4577_61590C.1
ctagttgtcgccaccagagtgggagtctccggcaaagacatccttcaggtccccctcgggtgactcatacccaaggtcccgttcagccgtggccacctcaccgtcgtcgaccttttctttgccagatcggcgacgaggtggggagccgtccttggaagactgctcacgccgctcgctgacacgtttcgcgaggtcaatgatatcgcagcactccgcggcgctattgcgaccgttggggtgcacagggcatgagccgctgttacccctctgcagccgtgggcgtttgttgcggtcgccccgacccccggtcgcggctgcaacaactagagtggtggaccgcgacttctggtagtcgcggtccttcttctttttcttcctaccgtcccgagggacggcacccgagccacccgactgggcagccccggtttgtggggccgagtgccatgcacggccctcggcgactctggcgcatttgtcggccagagcgaaaagtgtggggacggtctccacgtcatgcgtggccaacttctccaacattttctcatcacgtacacccttggtgaagcgggagatgaacgtcgggagagtctccccgggctcctgccttaccgcgtggaggtgggcctccacaccgtgctgctggtaagcgctggcgaagttcgcaacgaaccgcgcgtagagctcttcccaggagtagattgacccaggggcgaggttcatgagccaagtccgggcaggtctagacaaggcgacatgaaaatatgtcgccatcacagcggtgtttccacctgctgcgtcatacttttccggcaggtgtggccgaaacttggatgaccatgacggggcatggagatgatccgcgagagcagcgtagcccacgcctgccaaggggacacctgcttgggaccggatgcccat

SEQ ID NO: 142664 - DNA, 1053 bp, Zea mays
  Clone ID: MRT4577_61591C.1
atggcgcattctacctcgaccaggtcaagatcacggtcatcccggcgccaacatgaggtgtcggcgtctgtgcgctcacccttagtaaggggcgcacagaccaacgacctccgtgctgagctcaaccgcaggcgtgcgggagaggacgcccggatctctttggaaagggcgcacgagtgccgccaaaacattgagggccgcaacctcgatcaagacttcgctgtggtagcaccgcaggccccaatgggcacccggtcccaagcgggtgtccccttggccgacgtgggctgcgccactctcgtggaccatctccgcgcggcgtcatggccacccaagttccggccgcacctgccggaaaagtacgacgaaacatcaaatccgtcggagttcctgcaggtgtatgtcaccgctatcacagcagccggtgggaacaccgctgtgatggcaacatatcttcatgtcgccttgtctggtcctgcccggacctggctcatgaacctcgccccaggatcaatctactcctgggaagagctctgcgcgcagttcgttgtgaacttcgccagcgcttaccagcagcacggtgtggaggcccacctccacgcagtgaggaaggagcccagggagactctccggacgttcatctcccgcttcaccaaggtgcgaggtactataccacacatttccgatgcttccatcatcacggccttccgacaggaagtacgtgataagaaaatgttggagaagttggccacacatgacgtggagactgtccccacactcttcgctctggctgacaaatgcgccagagccgccgagggccgtgcatggcactcggccccacaagccggggctacccagtcaggtggctcgggtgccgtcccccgggatgatgggaacccagggtcgggacctagtcctacggcaagtaccaaaccaagaagggctctgcaactctccctcagctggaaaggacccttcaaggtgacgggaatacgccgacccgaaggtgactatcttgctatgactgaaggagtacctcttcctggccactag

SEQ ID NO: 142665 - DNA, 235 bp, Zea mays
  Clone ID: MRT4577_61592C.1
gggacgtccatctcgcatgagccgagggccgaggggcagagtgggcccaagggaatccaatcttttttcccccaacaactctaaccatgcagcccatctttcccacccctgcgggggggggggaccgaaacccaaccaaccgaaagaatcctcctaccgagaaaaaaaccaaactgacagacatcaaatcgagatgagttatcctcaacaactctgccgccctttccgcgctatt

SEQ ID NO: 142666 - DNA, 311 bp, Zea mays
  Clone ID: MRT4577_61593C.1
acaactgctgatgtcaacgacacccaaccatgttcaatgggactgcacataagcgccaggggcgctcatgatgtggggggccttagggcagggggcctaagaaccccaacgagtccatgtgacgcacgcagcaccaccggtcatgctacggcggaacagtaattgttgtctacaagagcagatgaacctggccgaacattaagtatgggattccagcgacacgaaactaggatcccatctgatgcacgttatcaaactgaacaaaccacagaaatggaaagagcagtgacgtgagcagcaagacacggtaa

SEQ ID NO: 142667 - DNA, 424 bp, Zea mays
  Clone ID: MRT4577_61594C.1
caaaaaacaggcccccaatcccaaacacccgaaaaaaaaaaaattttgggggggccgggaacaacaaaagccccaaaaacaactttaagggggggcattacccaacaaacggggggaaacccaagacccaaaatttgggaacccgacctttttaacagcaaaatccttcgggggccccaaagccaggcttatatagccccaaaaagccccagcttggttcccaaactaaactttttggctttcttgggccccccaaaaaaaggacctggggctgcaacagggcctgttggttttttggggcccggggccaacctttcctccctcaaagaaattttcctttaacgggtggccttgcttttggcaccctgggcctaaaacggaaaaaaaagggtttttttttgggccttttaagcctgggactggg

SEQ ID NO: 142668 - DNA, 379 bp, Zea mays
  unsure (1)..(379): unsure at all n locations
  Clone ID: MRT4577_61595C.1
tccgggtcgacgcngcgttcgtgtnnccaagcccggcgcagcggcggcggcttccatggcacccgctaacaacaagaggatcggcaatgttaagaagggtggtaccaaaaagaccgtctatcccttctataaaaaggactggtatgacatcaaggccccatcggtcttcagtgtgcgcaacattgggaagactctcctgtacattacacagggtaccaagattgcctctgatggtctgaagcacaaaatctttgaggtttgtctagcttgtcattacgacgactaggatcaggcttacacgaataataggctccgtgatgaatatgtgcattgcatgaatgtgctcacaaactttctggtgcatgaattttaccaccta

SEQ ID NO: 142669 - DNA, 533 bp, Zea mays
  Clone ID: MRT4577_61596C.1
ataaagagaatatagtgttattataataattagaaattataagcatatattaaagtagaaacactatagtttaaaccatctaatataggagcagggtatatacctaatactactgtaaacacaactaaggttaataaaatagtgaattctcttttattaacatcagatatactatttaagaagtatttagataaagatcctccaaacactatacggttaaacataaacatagtgtaggcagcagaaaatactattgaagaactcgctaatgcacctaatataggcattctttcaaatccaccgtataaacacataaattcacctatgaaatttagagttaaaggagtaccagcattacctaaacataaaataaagaatagtacggagaataaaggcattatctgagctatacctctgtagtaagtaattaatctagtatgagatctgtcatacagaacaccacccacacaaatgaaaagtccagatgacacgaaaccatgtcctagacctaaagctatagcaccttcaatacc

SEQ ID NO: 142670 - DNA, 228 bp, Zea mays
  Clone ID: MRT4577_61597C.1
actcagccaatgaagtttgcatctctgcctaactgaggtcacccaccgataaactgagagacttgctgcgcaaatgatcctcctaaaagcaacctgcacctctatctgatgattgaactcataggctcagaataattacataactttgtaactgttagcactttaccgttaaacaatgtcattgtcaccatccatatgttgattgtttgctcgcttgaatgtattaag

SEQ ID NO: 142671 - DNA, 253 bp, Zea mays
  Clone ID: MRT4577_61598C.1
ggacactatacgaggagtgccagatgatataatgtagtgcttttgccctgaaaggattttccctccagctgtggggataggatacaaaattaatagtgattacggttagtatatcctgagtgccctgatggtttgtgttgataatattgttccagtccttgtttctgtccaaaagaacttcatttctatgtatttcactgcctgctttatgtcattgactagatgttttgtcatctcagcatttgaaatgcta

SEQ ID NO: 142672 - DNA, 295 bp, Zea mays
  Clone ID: MRT4577_61599C.1
cagccaacgacagccttttatggaaaacattttacatgaaaaatttcgtccgaaatcacgtcccacaagccgaggacctgagtaattaagccacgtctcgacgcggttaagggcacaacaggggccatagctactgtttgtttttgccaagaaaacccccaaaccactttttattacatacgactgaagcatggcattggtaagagcatggttcccccaagagcagaggatctgatccagggttagcgccagcctttggtttttggcctctaatgcccgggtcctgttgtttttt

SEQ ID NO: 142673 - DNA, 1908 bp, Zea mays
  Clone ID: MRT4577_6159C.1
aattcggcacgagggtctggtgtcggggaccgcccccctcctgcccggcacccgctgcggctggctctcccgatgaggccgccggaggtagcggtggcggcgcttcttctcgtggcggctgcggccgtggccgcggccgcggcggagtcggcaacgccgttaccggcggcgctgcggttgcagcgcgcggttccgcaccagggggtgcccctggaggaactcaggcggcgggacgccgcgcggcaccgggtttcgaggaggaggctgctcgggggcgtagctggcgtggtggacttccccgtcgagggctccgccaatccgtacatggtcgggctttattttacccgggtgaaattaggaaacccggcaaaggaattcttcgtccagattgacactgggagtgatatattgtgggtcacttgcagtccttgcactggttgcccgacatcaagtggactcaatatccagctagagtccttcaaccctgactcttcatcaacagcatccagaataacatgctctgatgacagatgtacagctggcttccaaacaggggaagcaatctgtcaaacctcaaattcccaaagcagcccttgtgggtacactttcacctatggtgatgggagtggcacatcagggtactatgtgtctgacacgatgtttttcgaaactgtcatgggaaacgagcagaccgccaattcgtctgcctctattgttttcggatgtagcaactcacagtcaggagacctgacaaaggcagatagggcagttgatggaatttttgggttcggacagcatcaactgtctgtaatttcgcaacttaactctcttggggtgtcccctaaggtgttctctcattgcctgaaaggttcggataatggtggtggcattcttgtgcttggtgaaattgtggagccaggattagtgtatactccacttgttccatcacagcctcattacaacttaaatctggaaagcattgctgtcaatggtcaaaagctgcccattgattcctccttgtttacaacatcaaatacacaaggaacaatcgtggattcaggaacaacattggcataccttgcagatggagcctacgatccatttgttagtgcgatagctgctgcagtctctccatctgtgcgttctctagtcagcaaaggaagccaatgctttatcacttccagcagcgttgactcatcgtttccaaccgtaaccctttattttatgggtggtgttgcgatgtcggtgaagccagagaactatcttttacagcaggcttctgttgacaacagtgtattgtggtgcattggttggcaaaggaaccagggccaagaaataactatactcggagatcttgttttaaaggataagatattcgtgtatgacttggcaaacatgcgcatgggctgggcggactacgattgttcaatgtcggtgaacgtgacgacgtcatcagggaagaaccagtacgtgaacactgggcagttcgacgtgaacggctccgcacggcgcgcatcttacaagagcttgataccagccgggatcgtcaccatgcttgtgcatatgctcattttcggcactggctcacgtagatagcaggcgagccagctgacatcgtgatttgattattattgccacggcgtattcagaggtagagacgtcgccatccctgctgcgctagtcggttagtcgtatggacgaagagttggcatggcctgagcattcttactgtacatacagaaaatgaaaggtctattgttcatgtagtacggcctcctttttttctcaaattgcagcccggttcttcttccgtctctctgtttggtcgtgctctcaaaaaaaaaaaaaaaaaaaaaaaaaaaaaataaaaaaaaaaaaagggcggcagctcgcgatctagaactagtc

SEQ ID NO: 142674 - DNA, 1279 bp, Zea mays
  Clone ID: MRT4577_615C.1
cttggttggagggaactatggcctgctcaacacgactacgtttgaaccgaaccctgactactacaagtggactagccatgcataagtttctctctctcttctctcacaaagctgggatactgagtgataagagagggagaaattgtgtgctcaatcccgccatgaaaacctagcatctttctgctttagggggtttttggttagggggactaaagattagtctctagtttttagtctcatttagtccattttttgccaaacactatgactaaaatatagactaaaatgatttagtctttagtccttcacatatgtgctaaaagagattaaatcatattaatttcacttttacccctcatttagttcaattgtactaatagtaggagaatgttaaaggtcattttagtcttcttacgagtcatttagtatattcttactatttttatcccatagaatcaaaaatgttagggactaaactttagtcccctaactaaactttagtccctagactaaagaaaccaaacatgaccttaattttctctgtagcgctctactgtggcaccgcctcatgggcaccaaggtcctctctgcgacgttcaacggcacgaacaagatccgcgcctacgcacactgcgcgaagagatcgggaagggtcctctgctcctgatcaaccttgacggcaacagcacgaaccgcatccacgtcacgagccaaggcgcacaggcacagagtgcgcggagggagagagcggggggacgcctggtcgcttccctttccctgcgcttggcggagcagccgagctgctcgcaacaagagaggagtaccacctcgctcccaaggacggcgatctgcagagccagcaggtgctgctgaacggccatgttctggcaactgacgccgacggggacatcccagagctggagcccgtgcgggtggatggaacgcagccggtaaccgtggtccgtgggcccttactcgatcgtgttcgctcacatccccggcttctacgctcctgcctgtagctagaatttttacaccccagccttttccttcctggtgtgtatcataggttcggataaatccgggcgaacggcgaagcttgttcgcctgtccgtgcgtgaagtaaagctgcgaggctgaaaggtgtgcgatttgtcattgtttgggaaacaagtgttcggataatgtgtgagcaaaggggaggaaagtggagatgaaaataataaaaggaaaaaaaaggtttcgaaaaaaaaaaaaaaaaaaaaaaagaaatttaaaa

SEQ ID NO: 142675 - DNA, 439 bp, Zea mays
  unsure (1)..(439): unsure at all n locations
  Clone ID: MRT4577_61600C.1
cagggggcgncggaggccgacgaggaccagcnccncaagagcccccncgcggaggncagcgaggccgagcgggacaacgaagngcngagganacccggnngcnncaagnnaaacccctggganctgcnagggggncnnnnganncancaccangagaggngaaaaagcaanaaaggaagnngncanngcnggnccanccccgaaaaagcaagcanccccaggcacaagaagcnnnngcagcgcnggcgaaagcacaacagcnccngcnnganccacaggaaagaggcnacanncnngaccaagnnaccgcngcaaaagaagaanngagggcaaaacggaaaaaggagccgaagaaagacagngcgnccaagaaaaaancncnngnaggggaggngaaaaangaagagcagnnngaacganncggaggannncagcagca

SEQ ID NO: 142676 - DNA, 2451 bp, Zea mays
  unsure (1)..(2451): unsure at all n locations
  Clone ID: MRT4577_61601C.1
tcgagggccggcnncgggccgggatttaaaaaaaaaaaaaaaaaaaaaaaaaaaaaaaaaaaaaaaaaaaaaaaaaaaaaaaaccccccccttcattttttcttcttcctccgtctcttggatcgcctggccggccgtccgggttgtcccccctctactaaacctcaagagcaactctggatagctgcttatcggagcctaaagctagaggttgaaccagtcgacccatcaactaggggggccatggggatctcctcagctcttccatgctcctccctcctcatggggggggccctgctcctcgcctccgttgtcgtccaagcgcaaacacacaagaagggcggagctgttgtcatcatcctgacaatgggcgcgcgtcgtggtctccggcgaggccaagccgccgtcgccgccgtcttctccgcatgtcccttcctcgccctcgccgtcctcctcgccttgccggagctcgcagccggcgacacccactactacacgttcaacgtccaaatgaccaacgtgacacggctgtgcgtgactaagagcatcccgacggtgaacggggagttcccggggccgaagctggtcgtgcgggaaggcgaccgcctcgtggtcaaggttcacaaccacatcaactacaatgtctcgttccactggcacggcgtccggcagctgcgcaacgggtgggcggacgggccgtcgtacatcacgcagtgcccgatccagggcgggcagagctacgtgtacgacttcaccgtcacggggcagcgcggcacgctgtggtggcacgcgcacttctcctggctgcgcgtgcacctctacggcccgctcgtcatcctccccaagcgcggcgagggctacccgttcccgcgcccctacaaggaggtgcccgtcctcttcggcgaatggttcaacgcggacacggaggccgtcatcaaccaggccctgcaaacaggcgccggcccaaacgtctccgatgcctacaccttcaatgggcttccaggcccgacatataactgctcgtctaaagacacgtacaagctgagggtgaagcccgggaggacgtacatgctccggctcatcaactccgccctcaacgacgagctcttcttcggcatcgccaaccacacgctcaccgtcgtcgaggcggacgccagctacgtcaagccattcaccgtcagcacgctcgtcatttcaccggggcagaccatgaacgtgctcctcacgacggcccccagccccgcctccccggcctacgccatggcgatcgcgccctacaccaacacgcagggcacgttcgacaacaccaccgccgcggccgtcctcgagtacgccccgacgacgaccaggaacaacaccctgcctcccctaccggccctgccgctgtacaacgacaccggcgcggtgtccaacttctcgcgcaatttccgcagcctgaacagcgcgcgctacccggcgcgcgtgccggtggcggtggaccggcacctgctgttcaccgtggggctcggcacggacccgtgcccgtacaccaaccagacgtgccagggccccaacggcaccaagttcgcggcgtccgtcaacaacaactccttcttccgcccccggaccgcgctcctcgaggcgcactaccggcgccgctacgccggcgtgctcctggccgacttccccacggccccgccgcacccgttcaactacacgggcaccccgcccaacaacacgttcgtgcagcacggcacgcgggtggtgccgctccgcttcaacgcctccgtggagctggtgctgcagggcaccagcatccagggcgccgagagccacccgctgcacctgcacggctacaacttcttcgtggtcggccaagggttcggcaacttcgacccggtgaacgacccgcccgggtacaacctcgccgaccccgtagagcgcaacaccatcagcgtgcccaccgccggctgggtcgccgtccggttcctcgccgacaacccgggcgtgtggctgatgcattgccacttcgacgtgcacttgagctggggcctgtccatggcgtggcttgtcaacgacggcccgctgccgaacgagaagatgttgcccccgccatccgacctcccaaaatgctgatgacgactggtcgtttatcacccgatcgaggggtagatgggcatttaggaaggttctcctgcttcctgcacgtctgcctacttcctttccttacgatgtttggaactatttggtttggactatttaattaccgtgtgccgatttttggcgagtgcttggatttcgcgatcctcgctgaatccccttttgaaacatgttaatctgtatctatgtaacgacaacgtttgttctgcggttacttgttctttttttaccccctttctgaacattcagcacgcattggtgtattcacatggtcaaatacaatgtaacaatgatgtctgtatgttatgactc

SEQ ID NO: 142677 - DNA, 485 bp, Zea mays
  Clone ID: MRT4577_61602C.1
gtcgacccagcgtccggttaagtggcagaagatgatatataatctctacagctttctagatttaaaaaccatagtatgcatatggctgggagttggcccttgaggcgcgcgttgatcctgagaggaatgattacaaagtaatgaatatgcggtatgaggtggatcgcctgtaatcaaaaaggactgatgagcatgaaaagggtctcaatcgctgattgtacgtgctgtggagtactatgtatgctgggtgcgacatcagaataggatacaaacaccggtcgacgccatttatcggaaacatgtacgggttggatccttcgcaagtcctgagtccatgagccttgtccaaatcttgaatataccagtgatcgaagaccttgtgggtgaatctgtggttgtggggatcacgctgaaggaccagatagtgtgcagctactctgcgctgagcacactttacttaccatgggaccagctatgaggactgt

SEQ ID NO: 142678 - DNA, 281 bp, Zea mays
  Clone ID: MRT4577_61603C.1
acccaggcgtacgagcgctcctaatcaccaactaacaatatcttcttcatctcactaacaccgcgctatcagggttcgggtctaatccaacaatgggcggccgctcctccttcaaacaactactcgcccccgctctacagacaattaccctcctgatcctctcagaagacgccgaaaccgcgtaatctactgaaagctactacaatttgactctcaaagtgctgccatcgccactttacaactattttcccagcgaattctacctcccctgcctgctacaa

SEQ ID NO: 142679 - DNA, 338 bp, Zea mays
  unsure (1)..(338): unsure at all n locations
  Clone ID: MRT4577_61604C.1
ggttgttttattatgattttggggcgtttattaccccccncngagaagnnnaacacatgttttttttttttcaaccaaaccacacaaacaaccatatccagtagcaaataaagcgcatacctaccaaaacctacacatgcagcacacttactgccagtgtcggcgggtatttcaagaacacggtccttgatcaaacgaaccaccttgaaacaaacttggtagaatgaaaggaaaccatattcacacacacgctaacgcaacgctactgatcgcacgcccaaggcccggccggtcttaacgtacgacagacacgcacacgctgagaccataggagctgg

SEQ ID NO: 142680 - DNA, 691 bp, Zea mays
  unsure (1)..(691): unsure at all n locations
  Clone ID: MRT4577_61605C.1
ggaccctcgggcctgccggggtccgagggcggggtcaaatccacagctgtaccagctaccgctctgccgggctaccgccgagcccacctccaggccgccgccgccaacgccaccgccgccgctccctcggactcgcccaaggcctcggggtccacgaccacgactgagggcgacgagtcggtacactccgccggctcgcctccttccctccccacgttcccgcagcagcagcagcaggtgacgccgccgctccccgagatggcgagcctggacttcacggaggcgccgtgggacgagtccgcctccttgcacctcaacacgtacccgtcctgggacatcgactgggactccatcctctcgtgatcaatcaacccaacaagcaaatgcctagtcacgcgctgtaatttttgtcagtggatttaattaactaaccgtagctgcttcggatccgatggaatattagacatcggccgtagcgactacgggtagggtttaaggagttcgtcggacgtagaggagggtttaggctcaagcttttccatctagtcaacatggagcagtattactgttaagattattcaagcgtcgtgtgcctcctggttgcttgtccggtntgttttttctctcccggcaggaccagttgaggggntgtagtgtatggagtgtcatgtaactaccgntggttactact

SEQ ID NO: 142681 - DNA, 771 bp, Zea mays
  Clone ID: MRT4577_61606C.1
attgggtacctcgaggccggccggggcgtacacttgcgctggttagcgtacgtgaagtccgcagagggtccatcatcactgctgccgttgaagacaagaccgctggccacacagaatgcccaaggtgctcgaccacagctacgatggcctgcatatccggggtgctgggagctgtccgaaccaatacatcccctatctccaagcctgcctgctgtactttgccatgttcccccgcggcaatcatgtcaagaggggatccctgatcaggcgatggcaggcggaaggcctagagttcggaggcagcaatcaagctgccgaaaacctcaaggccctcgtagaccggaacttcgtttggcccctccatgcgagcctgaatgagcacgccaagacattccagcctcctggagtggtgctcaactacatctcccgcaggtctcaagaggaggaattcatcctcaggtcttgtccaagtggggaacttaatcccaattacagccgccggctttgtctacatcctgccgaggaagaagaaggtgaaccccaacccttggtcatcaccaacggttctgtaccaccacgcctgcgaactctggctgtgtcctgggggcagcaacaggccagcaggattgctgaatgcgagcagctccgagtgctggatctggcgtcatacaacggtctacagccagaccagctagaggagatatgcaagaaactgaagcttctcaatatctgagccctctgccagatatcatcactcaagttccaagctca

SEQ ID NO: 142682 - DNA, 253 bp, Zea mays
  Clone ID: MRT4577_61607C.1
ctctagagccttcgcgcctcggtggcagtcatcggatcggggcctgcgcaagtagaagtacgcagcgagccttggcactagcatgccttcagtctatgtcgaggtccaggtgggcggcgccggctagtagaggccgaagcagcagcatcagcatccccttggggttcgtcaggtttgggcgggcagcgtggaccgcggattcaagctcatccgctgcgccatcgatcagttcccctgcgtggccgttggcacg

SEQ ID NO: 142683 - DNA, 315 bp, Zea mays
  Clone ID: MRT4577_61608C.1
ggtgaggacagcacagccacggtttttccaatttatggccaggacggaaatgagcaccaattatgggaccctcggctgtttacaaatgcggtgcatgatttatatcggtggaaatgggagtggctaataacaagtctgttttccgtgcctgcgctgttttggcgcgctggctggtgcgggcccgaaggaatccctgttaccacctggaacacattcgggccatactttacgggggttccaagacgacggggagcagccctgactttaacctgtgtccacccgcccactcaaagttgtccagatgcacccacacaa

SEQ ID NO: 142684 - DNA, 732 bp, Zea mays
  Clone ID: MRT4577_61609C.1
gaatctacaaattccagggcctatgtggaattacttatacacaacagggcccgcgggtttatatcaatagaggtcaggggttcttttgaatatttgcacagtcgaaggggtatggagcgattatagccgcacgatcagaggcgcacggtgtagattaaatctgtctttgaatgaatcggtacggaacgcaagcccttggatctaagatcgacgcaccagatttaatatggctgcgattaaatccctgctctccatctgggatccaacggtccccgccatccattctgaaacgttactcgggatctaatcccagcccttgattcaaggatcaacggtgatggcaccatctcctccccagcgccggcccaacgcaacggccgttaatcactaaatccatggcccagggatcgtcttctaccttggctgctactgtttcttagtacgtacgcgatatcggcctgcgacatctaccgtagattcctcgcggtgagaggagggccttaccgtttgaaggcggagccgaccaacgacagaacgcggtgcgcagcgaggcacaggtccaagcgattcgacaccacttcgagcacgccctggtctgcgacccagccggacgacggcgtccgcgcagtcctcaacgcccggcgaggaggcccagtccgctccacgccgcatgcacagggaagtccctagacgtccagtgcgcgacaccgttgaacaccccccgttctctct

SEQ ID NO: 142685 - DNA, 655 bp, Zea mays
  unsure (1)..(655): unsure at all n locations
  Clone ID: MRT4577_6160C.1
gagcacgaccaaacagagcgacggaagaagaaccgggctgnnnnnnnnnnnnnnnnnnnnnnnngtactacatgaacaatagacctttcattttctgtatgtacagtaagaatgctcaggccatgccaactcttcgtccatacgactaaccgactagcgcagcagggatggcgacgtctctacctctgaatacgccgaggcaataataatcaaatcacgatgtcagctggctcgcctgctatctacgtgagccagtgccgaaaatgagcatatgcacaagcatggtgacgatcccggctggtatcaagctcttgtaagatgcgcgccgtgcggagccgttcacgtcgaactgtccagtgttcacgtactggttcttccctgatgacgtggtcacgttcaccgacattgaacctgccaagagatagcgttagtcacaaagaaatggggccaatggagtgacaaggaaatnnnnntgacagatgacggtaacgaagaactaaggaacatccagattgcttaagaagaatcaggggcttacaatcgtagtccgcccagcccatgcgcatgtttgccaagtcatacacgaatatcttatcctttaaancaagatctgagacaagaggaccacacagttagcaccaaacaataaacgtcg

SEQ ID NO: 142686 - DNA, 296 bp, Zea mays
  Clone ID: MRT4577_61610C.1
gtgcaggaatgtctctgagctgttcacgttgatgcttcttggttggcaagacttgggtgtagacatgaaaccatcttactaaaagcgtcttaaaatgactaattccagaatacaagcgtattccgttttcttcctgcatgatccctgggccctcccgcaggctgagcaagtctgtaaactgattctgggagaaaccaagctgctggccgtgagatgtccttgggtacatccaggagtcttcattgcttctgtcattaccccgtctcctctgccattttctacagcttgctgagttg

SEQ ID NO: 142687 - DNA, 455 bp, Zea mays
  Clone ID: MRT4577_61611C.1
gtatcccaggatcttgcccaatcaggtccaggaatagatatcattaccataagtatcaagtccttaagggttacaaaaagattatagacatctggttgaatagtaaggaaaccctatgctagagatactggtacagcaaggggctgctgcaacatattgaaaaacagggtatttacctggatcattcatgaacattttttacacggatgaagatcatgggcagaaaaggtgcaccttgcctagaccacaattgtgaataacatgcatcccgggttgcctattgacacccacaatgtgaactgctaggtgacttacccggaattatgatgtcgcaccgttcactaccgagcccacatgggccagggttccatgaaaaatgagccaccagatctagttgaatgccttgaagatatccaatccgaggagtacatgattttgtggccttttaccaaaag

SEQ ID NO: 142688 - DNA, 552 bp, Zea mays
  unsure (1)..(552): unsure at all n locations
  Clone ID: MRT4577_61612C.1
tntttttttttttttttttttttttttttttttttttttttttttttttttttttttttttttttttttggaccaaaccctagaagcaaaaagcaacaaggggggcaacagaagcgggaagcggaaaacccgcccaaaaaggcgccccaacccggacaccggcccatagacagggccccggacaaaggaaggaccacacaaaaagccagccccactaaaaaaaggaaccaggcaatcctcccccgaaaacaaccaacaaaacaacacctaccaggacgcgggtggatccggggcggacggggggagcggaacaggggggggaggaacagcagcagcagcagcagcaacaggagccggggagtccaaagaaccggacaaggcatccgaaccagggagggtcacaacaacaccccagaaaacttcctccaacaagaaggcctggaccaagttcaggggtagctccaagaaccggagaccgaccacgggctgcaaaacctacacttggtccaaaccgggagcgggggaccacccccgaaatgcggaccagaaccc

SEQ ID NO: 142689 - DNA, 513 bp, Zea mays
  Clone ID: MRT4577_61613C.1
atatatatcccacacacgagggggacggggtaagggggggggccccccccctttctataaaaaaaaaaaaacccccccccccccaaacatgaaacaaaaccgggcgtaggcctggccccccccggcaaataacccaaaaaaggacaaggggggggggaaaaaatggggccggaaaaaagcaaaccccccccacccaataggggggggggggcggggcccaacggggggggttttgttaaacacaacactgtgactgggaaaaaaattttttggggggggaagaacaactcaaaaccacacaaaggggaagggctttttcggggagaagggtgaacaggtgcaaaaaaaaagtgtcagggggggcaaaaagggggggggggggggaacttggggggggaaaggaaaattaaagagagggggcaggccccggggcagatctgggtctgatatacgagaaaaaatcacttccagaaacaaaaagagaaatacccgggtctggctttaacagggggg

SEQ ID NO: 142690 - DNA, 647 bp, Zea mays
  Clone ID: MRT4577_61614C.1
acagcgcgcctgccgaggcggaccgcaaggcgtccaacgacgcgaggagaggccccgcgcatcatggcgccaccggcgcgcaggcgaaatcggcgtacccgtacgcagccgaagccgccgacggcgacggggcgctgaagcagcagcccgaggcgccgaacggcagggtcgctgccgccgatggccatggagcaccagcacgcgccgcgccgcgccacgactacgaacgcgcacagccgcctgcccgcaaggaggacgccgcggattcctactacccggctgcgaccgctgcagcctatcgcgaaaggtattagtgagtgccatccatcggtccgtgctggagcgcgcaacgcgcgcgctgcgcatggagttgggcaaacagttagccaccgtaaacaagcagagagagtggctgtttttagcttcggtacgcttgttttcgattttcgtcagtccttcaggggcacttggagtggagggcagtaggagttgaggatgcagagtgggtgtggatcatcagggcctcctccgtattgctggctgccctgtccattgaacgggtgaacaaggtcggggcctcggggggagactttagttaacaggatgtctctcgcttttttatctgctttgtgtagttgtcttgtccg

SEQ ID NO: 142691 - DNA, 274 bp, Zea mays
  Clone ID: MRT4577_61615C.1
cagaagatgtcaattacgacatacgggtgcacatggatgaaatatacgatgaacaggttctggatcttctatatgaggacagatcaagcacaaaattagatataagggcttccatgaacaatggtctatccaaccgtccagatgcaaagatctgcacagtgcagagccctgctgatgttatcaatgtgatgcagtatcgttaatagcaccgggcttccggaacaacagcagtgtgccataggagcagtctgtcggactgcatctaaactggcca

SEQ ID NO: 142692 - DNA, 252 bp, Zea mays
  Clone ID: MRT4577_61616C.1
tcgccgggacacgcacgcatctgtattgagtccccgtagcgtctcgcctgttcagtttccgtctcttcccgcagctcggtttgccgaccagattccaccgttccatggtaaccacgcgaatcccgtgtctggttgcggcgattgccgtcgagcagtccaacgcggagcaccatcaagcggtggagatggaggttatcgtggagcagcagcacttcaggtcggccccgcggctgaggtacgtggacttcgtcc

SEQ ID NO: 142693 - DNA, 1816 bp, Zea mays
  Clone ID: MRT4577_61617C.1
catgtgattagttataccctcaaccattccttccattcatctcaggcggttcaagtatattgagcagcttcagcgctacaaaaagctatcataccgagtggttttcccactggagcttaaacttcttaatacagttgataattcggacttggagtactccctttttgctgtggtagttcatgttggaagtgggtcaaaccatggccactatatcagtttggttaagagccacaatccccaatcgcaacagtttcactgcgccacagtacaaatcctgtctcgcaccgccccagccggccagaacagcgacaggcccctcgcgccgatcgccgggcaatgggagctgggcgggggcggtgatgggcgcggcgggctccaggttggagaaggcgctgggcgagcagttccccgagggcgagcgctacttcggcctcgagaacttcggaaacacctgctactgcaacagcgtgctgcaggcactttatttttgtgttcctttccgtgatcaattgctggagtactatgcaaacaataaaaacaccggagatgttgaagagaacatgctaacctgcctggctgatctgttctctcagatcagtagccagaagaagaaaacaggggttattgctcctaagcgttttatacaacgattgaagaaacaaaatgagattttccgcagctatatgcatcaggatgctcatgagtttctgaattttttactgaatgagctagttgacattctagagaaagaacataatgctgcaagagagtctcttcaaaatctctcactccaaaagaattcaaatggccctattgatggccaacccaatggtagtcacaaagaattagctgtcacatgggttcataaatgcttccagggaatattgactaatgaaacaaggtgtctgagatgtgaaactgtgactgatagagatgaaacattttttgacctgagcctggacatcgaacagaatagttcactcaccagctgtcttaagaacttcagctcaacagagactttgaatgcagaggacaagttcttctgtgacaaatgctgcagtttgcaggaagcacaaaaaaggatgaaaataaaaaaaccaccaaacattctagtaattcatctcaagcggttcaagtatattgagcagcttcagcgctacaaaaaactatcatacagagtggttttcccactggagcttaaacttcttaatacagttgataattcggacttggaatactcccttttcgctgtggtagttcatgttggaagtgggccaaaccatggccactatatcagtttggttaagagccacaatcattggttattctttgatgacgagaacgttgagatgactgatgagtccatggtacaggcattctttggctcaccgcaggagttcagtggtaatactgataatggctacatactcttctatgaaagccttgctgaaagaagttgatgtccttctcataccatgtgattagttatacactttcctttcccttccatttctgctggggatatatagaatattcagtgaaaaccagaataagctgaatgagaggccttcagcttcagttggtatggtacgatcaacgcttggcaataaaacaagttacctggaggggctataggctgactagtttgtagttcctactttatctgtttttatgcatatacaggttgtatcaattcctgaataatgtttgttgaagacctttattatcatgtaaagagattctatctaggaagccttttttggattcgagtaaaaaaattgtttcttaaataaatagctcatgccgatcttcattc

SEQ ID NO: 142694 - DNA, 603 bp, Zea mays
  Clone ID: MRT4577_61618C.1
cgtgcagcgtgcacgcttggacgatgccgctccagcatggccctcgacttcgaatggccgcagcctccggcgcggctcgtcgtccccgcagtcgtctccccggccgacctacaagcctcccgtgcggcggcagcaggacaaggacgacggcgctggttcttgtagccgcaacgacaagagaaggggcgaagacgacggcggcagtggccacggccacggcggcggacgtggtgagggcgttctacgacggcgtgaaccgtcggggtcacctggcacctggagtggagggggaagccgtttcctttcagcaggggatgcagcttctaccgcttgctcgccggctcggagtcggagtcggagcagcagccgctgcagattgtgtatggccgagactgcgtggagcctgccgccaagcctggggatttggcactggtgatcatcaggggagtgacatggatccttgaacgatttccaagccttgcaagcaggttctgatgaccttttatgagcacaaccgcgaaggcgccaactgaggcaatagctacaggctaggctacgcagcttgttcaaaatgtccggtgagagcaagcgtgtataatgttg

SEQ ID NO: 142695 - DNA, 198 bp, Zea mays
  unsure (1)..(198): unsure at all n locations
  Clone ID: MRT4577_61619C.1
gcgncgcctaagaagacccgtgccatcgccgcgtctgacaaagcccagctctctctggagaccgagaggggaaaagaagccgggagaagtacttccccatgaaggaatatgctttcaaggcctaagcttggttggtgaaccgcaaaaaaaaaaaaaaaccaggaagaagaaaggagagggaacccaaggtttttattt

SEQ ID NO: 142696 - DNA, 407 bp, Zea mays
  Clone ID: MRT4577_6161C.1
attcggctcgaggctagctagcgggagagtttggttccacaaacgaagggccaggaggacaaggggcctggcgcaagagctgaggcttcgccacacaaaccccagaccacaagcctgcccttgcgcaccgcgaggtcatgctactacgctgtccgatccaacactgataagctggcgagaggaaaccgcgacaagatgcagcaattcatgaccattaccggagccagagagaaaggtgcccttcaaccactgaaagctaatgattggcacttgcaaggagctcttgacttgtactatagcgcacctcaggttactgtcggcaaaactcggcatcttgaaggaactgtcaccagatgtaaagaacccgatgctctatgagaaatgtggaagggagaattttaaatttt

SEQ ID NO: 142697 - DNA, 263 bp, Zea mays
  unsure (1)..(263): unsure at all n locations
  Clone ID: MRT4577_61620C.1
tttttaaacctntgagtggtcaccaccaacaaaaggaaaaggaaaccagactacattgatggtgcggttgtgccttttacaagctatagatcataaatttgtataccttacagtagaaggcgtgaccaacagtgtatatatggaacgtggtaaaagtatccggccagagcgaccgatgaagagcccgagcaagctgattcctgcgcctctgctgcatcagcaaacccttcagcctagaattagaaagatctaatcatatgatt

SEQ ID NO: 142698 - DNA, 181 bp, Zea mays
  Clone ID: MRT4577_61621C.1
ccttttcttcaccgacgccagccttgccgaggggggggtgatctgaccacagctggagaacgccaaacagagaggccccagtgcacacaccgacagcggcaaccaaccacggaccaagaggccaaacagcgggcaggccaacgacgaccagaacggccgcaagaaactcacggatgcagct

SEQ ID NO: 142699 - DNA, 267 bp, Zea mays
  Clone ID: MRT4577_61622C.1
aaaaaaaaaaaaaaaaaaaaaaaaaaaaaaaaataaaaaaaaaaaaaaaagaggggcggcccgttttgggggacccattttaagttccccttctttgaaagggaatatcttttttatagggcaacctaaattaaatcaacgggcctttttttaacaccgcgttaaaaaaaaaaaccttggggaaacccaattaattcccctgcaaaaccaccttctttaaacaagctgttttaaaagaaaaaaggcccgcacaaaatcgccctacca

SEQ ID NO: 142700 - DNA, 827 bp, Zea mays
  Clone ID: MRT4577_61623C.1
ccgcgaacgaatgccttgtgtttggaatcggaaatcgggtgataacaatagcaatgacaaaagggtgtggtggttcaactgaaatcatggcgctacgacatgcatgctttattaggtttgccacaaccagactaaaaggagacaggctactgaaactgaatcatcatcatcatcatcatcgtcactagggtaaggtagaagtggcggaggcgatctccatctgcgtctcgatcgtcctctgagctggagccgggctagtcgcagcagcagcagaggcagtcgaggcagcactcgcaggtctcgtagcagcagaagcagcacagcgccgtgaagatgcaggcatagaggcagcccttctcctcgtgcctcttctggcagtgctcgtagtaggacatgtcctgcggccgcggcggcggcgcgttgtacatcctggctggctggctggctggcttccccttcctcttcttcttcaggtacgttcacggagcagcagatgtttcaccgacctctgcttctgcttcacttctcttccctgaccctgcctgccttgtgcactgcaatggatgcagaggcgaggccgtatttattgactgcttgcgggcttgacatggtcagatgatatctcccaagagatatagagccgttgtcgtcacctcgtatggatgaatgttttgcttagtgactaagagatgagagaaaagactcactcatgactcatgaggctgcgtagagctagaatagactatctccagcactctctatctcaccacctattttaaactctactctataagcagcgtaatctacaatacaaaacagtattttac

SEQ ID NO: 142701 - DNA, 1915 bp, Zea mays
  Clone ID: MRT4577_61624C.1
agcgcggcgcagagaaaaatggcggcttcggctctccacctccaccgccggcgggtgtgaccgtgtgaagcttcagcagaggcagctgcgctcgtggcaacaacatctgtggagagagctttctcagctatgaatatcattaaaactgagttacagaataagacaggagacgaatggcttaaccatcgtatggtgtgttatattgagagggaaatatttacaagcattgatgatgcaagatattgattattttcaaggcatgagaacccgcagggtgaatctacctcgtactagtggttctggagcaagaagcactgatgttgatgttgacatgatacatttggaaggagctacatcataacttgatgctctggaaccttacatgagcaagaggacagttgaacttcactggggtaagcaccatcaagattacgtggatgacttgaataagcagctggctaccagccctctgtatggatacacgctggaggatctgataaaagaagcctacaacaatggcaatccattaccagaatataacaatgcagcacaggtctggaacaatcacttcttctgggaatcaatgcaactagaaggtggtggcttacctgagggaggtgtgctgcagcagattgaaaaggattttggctcgtttactaattttagggaagagtttatccgctcagccttacaactattggggtctggttgggtttggcttgtcttgaagagaaatgagacaaagctttcagtggttcatacacaaaatgctatcttcccacttgcttttggtgatatcatatgtttactagtctccttttttcccttcatgtgttttctacaatgtttagaatacaaactttgcaatgacatcccatattttctaattgcagtcaatcatcaatctagacttatgagagcatgcttactacttagactacaaggcatcctttggatacgtcgggtcaaatcctgctggaggaaccagagacatgcttatcactcgaatgccatacacgcaaagataagctgcatgcttggttttcaccactgcccttggatattgctacagggaaaccactagtcagcatccaatctgaagatgtgcagcaatgcagctttagaagctctgggagctggtaggtagcgatccaacttgggcttcgaagccatggcgctttcgctagatggctatgcccgtggcacgatctggagcagcagaccagacgctactggtgacagatgattcagacatgaaaagattaaattgtgcccggccctatgacactcgaacagggttccccaggaccctgaattctgctgtcatcacagacaaaacgaaggacacgaagaatagattgtgtcggatcggtagcagcagtgacaggtaaactacgcgaacgaatgccttgtgtttggaatcggaaatcgggtgataacaatagcaatgacaaaagggtgtggtggttcaactgaaatcatggcgctacgacatgcatgctttattaggtttgccacaaccagactaaaaggagacaggctactgaaactgaatcatcatcatcatcatcatcgtcactagggtaaggtagaagtggcggaggcgatctccatctgcgtctcgatcgtcctctgagctggagccgggctagtcgcagcagcagcagaggcagtcgaggcagcactcgcaggtctcgtagcagcagaagcagcacagcgccgtgaagatgctgccacaccacacacgtacgggttgagcaacacagcaggagttagttcggcagaaagaaaagaaaagaagtgtaggcatctgatggagttctgtctgagacgcacggagccctgactcaccaggcatagaggcagcccttctcctcgtgcctcttctggcagtgctcgtagtaggacatgtcct

SEQ ID NO: 142702 - DNA, 244 bp, Zea mays
  Clone ID: MRT4577_61625C.1
cttttatcatagaaagcacaatattggggggacaatggcagcgaaaggattgttcttccttatgctccttggtctttctgcaagagctgctatccgaaccatttttccacaatgctcacaagctcctattagctttctttctttcctcatacctttcaacagcggggtcttcaatatgtggaaaacccaatttcttcaaccctacaggatccaacaagtaatttgaagagacatcttaccttta

SEQ ID NO: 142703 - DNA, 523 bp, Zea mays
  Clone ID: MRT4577_61626C.1
gataaaagaaaggagcgactgaatttttgacaaattccaatattgaaagtgctggatgggaacaccatggatcaacaaagtcgggaatccccactcacttttcatgcagacagtcgataccaagatcaaaggtggaacagcggtgtgtataacatggtcatcactagcaggctaaactgtctggtcaaatgcttggtacgaggaacgccacctcattagccaggcccgctcatctgggacaaacggacttggtgctgtgctagcagccttgaacggactttggcgtgggctagcagccaaacaaggtgttgccaccgcctcttgtcttgattgaggctacagcatgcggttggtgctggaacgcttgcttgtcggtgttctggttgtgcagatgcggctcaggggctcgatatcacggaacgcagcgccagctgtccacagcatgatctgcattatcagctgcggcccgagctgatgattccactagctgcatggccggatggactgactgttcttcatctgt

SEQ ID NO: 142704 - DNA, 774 bp, Zea mays
  Clone ID: MRT4577_61627C.1
acaagactgtggctgcctctcctcgctccatctgccctgtctctcttcctcctcgctccctccgcctcgtccctctgcagatcacttcgtcgggttctcatccccttcttgctccctccgcatcgtccctcttcaagtccacgcgctcctcccgtccgcgcctgcgagtatctcttctcagaatctccagatcggggcctccggcagtcgctcgtgccaacgctgtcgctgcctgtccgctccttcaccagacgccagcatgcaacacacttctagaatcgaataagcggtgggaaagagaaaaaaaggaggacgctctcggctctcccacgccgtgaaggtcaacaaaggtgggggagggctagccctccggcgttgtcgttggcgcttgtgcctggtggcggcaggcacagccccgcgggcagtaaggcaagatcaggagtgggggagtcttcaaccatccatcgcaccaccgtcaaaggggtccgcgccgcctacatccggtagaccatggcagtcagtcttcaaccagccactgtgccaccgtcaaaggcaaaacagacgatcagtcttcagtgtgcaatcatacacacctattttcctctaatttattttctttttttgggattctactgaaaaaggaattcttttgcaaacaatcccgcaaggcagagcaaggtcgtcagtcttcaagggcctaaatcggattgaagtgatacatttggtttcttttttttggtccattgaatatatatggtactgcatgtttactat

SEQ ID NO: 142705 - DNA, 659 bp, Zea mays
  Clone ID: MRT4577_61628C.1
cataatatcaaactccatttaacgataaaaccagatcatccacagcaaataagaaaaagacaagtccattaattaaaataaacacatgatccagatctctcaaatattttcaagctcaattacaaaccaagatgcaacaatgaagttttataaagaaagaaatcaaatcaggatctggacttgaatggaatggctctgatgacaagttggtggtaaagagccgcaagagctgctccaatgaatggtccgacccagaatatccaggggtcgtcccaagcgtggtccttgttgtagatgattgcagctccaagactcctagctgggttaattcctgttccggtgattggaatcgtcgccaagtgaaccaagaacacagcgaatccgattgggagtggtgccaaaatcggaacgtgggagtcacgagcgcttctcttggcgtcagtggcggagaagaccgtgtagacaaggacgaaggttccgattatctcagcacccaaaccagagcccttagtgtagccgtgagcgactgtgttggctcctccgccgagagtttggtaaggatttggctggaagcctttgacaactccggcgccgcagatggctccgagacattgcatcacgatgtaaaagacgctctcgtcaatgacagcttacgagcc

SEQ ID NO: 142706 - DNA, 291 bp, Zea mays
  Clone ID: MRT4577_61629C.1
aaaggaaaaaaaaccccccctccatttaaaaaaaaattaagggggccgagtacaaaaaaaccgggagtgggaaaatggttcaccatgcccttttaaaaacgagttgaatttttaaaccccccaagttttagcgtaaaaacttaaaacaaaaatttttacaatcacataccctgcccacagtttaatcacataaacaggttgggccccaaaaccttaaacggggtttttaattttctgggggggggccttaccttgcggacaaaagggggaactttatctcactgtttgaaa

SEQ ID NO: 142707 - DNA, 455 bp, Zea mays
  unsure (1)..(455): unsure at all n locations
  Clone ID: MRT4577_6162C.1
acggccgggtcatatgcagaagagaagaaaagcagnccttattataaaagtggcgcaacgaagccgaatgggagccgccgggcgcgtacacagcagcccacacgtaatcctttccccctccctttcacacttaaccctctcaactcccaactccttcgcaaattcgggtctcgaggaggcgttatatacgccgtgccgtagaattatcgtctcttccgaggggctcgtcgcgagaaggagccgcaaaactttgctacggccacaccgagcagcagagcagccgcgccacgacgcgctcggtcctgctccccgcgtctggtgtcggggaccgcccccctcctgcccggcacccgctgcggctggctctcccgatgaggccgccggaggtagcggaggcggcgcttcttctcgtggcggctgcggccgtggccgcggccgcggcggagtcggcagcg

SEQ ID NO: 142708 - DNA, 672 bp, Zea mays
  Clone ID: MRT4577_61630C.1
ggccgcttttttttttttttttttgcaaggacacaatcattaatttgtcacccgtgttcctttttatctcgaacaaggagagttgcatatcattgtataaatgagagagaacaaaaccccacttcgtctcactttagtagaacgaagggactgcaactgcaattgaggtttagaaaaaaaatacaatcaccggtaataaaaagaacacaaccagagaaaggttacttaaactaacccctcaaccctaccaagacctaggttctggagtttacggctccagcaaattcccgaagttccagatcctccaagaagaggcaccttgaattttggactgatggaagagctcactcaaagacacaaatgtttcttttgtcctcataaggtccagcctcctagaatgacagcgctgttgaaaccctttctttgagatacatcactcaccctagtgtttcatgctgtgagttgtgactaatagccatgactgtcattgaaaggtctcatcggaaatcagctggtgccacttctcatggattgtgatcggaaagaccaaggctgccaaggtgctttgccccagtcatgacccaacagccttgtaaattgaccatggcttttggtatttaaaatatcatttactgttgacttaatatcttttttccatatgtttatatgtga

SEQ ID NO: 142709 - DNA, 371 bp, Zea mays
  Clone ID: MRT4577_61631C.1
atcttcaaaaaaactcatccacgccttgcagtcgccacgcccgcgctttgccttgcagttgcgcgcaactacagcgtcgctacgtcgcgcccctagaggcctcgtcgtcctgctgcgaaggttgtctgcattgcaaccacttctcaggagaagatgaagtcgtggaaggagacttccaggagttccaagattacgacgagttctaggcgtgggttagcggcaacccccagtcggctgcctatgaaggccgcgtgtatctacgtttcatttttcgcactttgattattgtaaagactatgtggatgtctcagacataagatgtaatcgactattattacccttttatgttattatttgagcactgtgtgatg

SEQ ID NO: 142710 - DNA, 485 bp, Zea mays
  Clone ID: MRT4577_61632C.1
aaagaacaaaaaagggaaatcgctttggtttcattcaactacaaggccttaaagcgctctttggtaaataaaaaacagggggggggataaacccaggggggggctcaggggcgggggccccaccttcagtgggggcaaaaatgggacggaaacccaaaaacctttattcattagggtaacttaaattggcacgatttttcacattccaaaacgacgggattattcaggatctgaaaaagaggcttttgcagcttggagcatttccacaattaggggctaaacatccttcctgtcttgcccctggcttgggaaggggattttaaacttaaaaacacttccataaaaaccagccttaaaattaaaaccaagggtggccacgtccagcatataagcaaaacccaccttgacaggaggggaggggtgcacaaagagctttgtatcattggcccccacccctccccggacccgggggcggacccgtgggt

SEQ ID NO: 142711 - DNA, 475 bp, Zea mays
  Clone ID: MRT4577_61633C.1
tacaccggaggttgcgacagaacatgcaccagtcaaaaagtgacaaggccctctcggaggcccaggactgcataggatcttcattatgatccagcgtgacagccgacctaggcccctcgttgccgatatcatctaccagttttgagaagaacgaattctacctcgaagactagaaacttgtgaacagatgacagtatacttgctggagcacatcactatcccgatggtctctctcatggccctatctctctccagctcgcgaactacctctgctgtgttgccgtgatcgtccgtgtgcatgacgagggacatgagcaggctccctgctggatctgttggatcattggagtctcctaccctgctgtcttgcatgatcccgcaccatccgagcctgacctttgctgatgacattggaaggacatgctagtcatggacaaggacacctatgagagcgatattaaagagattgacctgt

SEQ ID NO: 142712 - DNA, 127 bp, Zea mays
  Clone ID: MRT4577_61634C.1
aaagctggtgaccaaaaagacgaacctcttcctttctgctttattggatcacacttttcaacattgccagagaactctataagcagaatggaagatgtatcgacttatcatggatcaccagcttcta

SEQ ID NO: 142713 - DNA, 833 bp, Zea mays
  unsure (1)..(833): unsure at all n locations
  Clone ID: MRT4577_61635C.1
catttcaccaatcggcacagcacgctcccacagctgcctccatccgtccccttctcctccaactcctccgccgccgctcctgctagggttaaggtaacgtgcgcgcgaggcgaccgatgtcgacgggagcgggagcggaaccggagatggacgacggttacggctttgacacggtcttcaacgtggaggctttctccgacaggacgctgcaggtagaggtcgtcggccgcgacgaccacgcgcctgggtccggccgcaagcgccgccgcgaggaggacaaagaatatgatggagaacatattgactcgttttgtactgtgatgagtacaccagttttacgagtggagaccatatatgtgagctcggcgattcttgctgcaaaaagtagtttctttcgcaagcttttctcaaatggcatgaaagaatctggtcagagagaggcaacagttagacttgctgattcagaggaaaaggccttcatggagcttttacgcttcatgtacatggggaaagttgacaccaacaactgagcccactcatctggttgacatcttgatggctgctgacaaatttgaggccatttcttgcatgaagctttgtgtgccagctgtcctaacagaggcagtcatgaaattccttgctgaacggtacaaggaattcctgtcaacagagtcccaagatgaactgatgaggatccctggtggctgngattgaagccatcctaagaaggaatagctttgggtttgcatctggagtagctgtctatgacttcgtgcttaggtggacctgttatcagtgcccaaattcagaagaaatacggaagttctcgagta

SEQ ID NO: 142714 - DNA, 458 bp, Zea mays
  Clone ID: MRT4577_61636C.1
tcgggttgcgacccgttttgatggcttcaagcagccaaccgtacccgacctcagcgaccgattgcagagctcccaaccaagacaatcaaacggaggaacggccgacgcaacaagcaccggcgcggccacgtcaagtacatacgctggtccaactgccccaagagctggccaaaggataaggctatcaaccgggtcttggcgaggaacattgtcgagcaggctgctgtgaaggacgtacaagaagcttgcgtgcctgataggatatcgtctgcccaaataggcgacaagacaatcactgtggataaagcacaagccatgcacaccttgtcattagccgctctccctggaacatgaggaaccacgagcccacacaaggctttaggcaccgagatgaggggccagggccaggaaaaaggctctcccgcacccagaagccggtgtcaaaataaactcaccct

SEQ ID NO: 142715 - DNA, 221 bp, Zea mays
  Clone ID: MRT4577_61637C.1
cccgggcagaaaaacacaattttactgaacagttttgttccatcacacagccttgatggcccccgtttagggttttgcccgcctagtaaataacaaaaccccccccatccataaaattggttcaacattgtgcccagttttgtcagaaacaagtgcccaatagacatcacgattcacgaggttcagttaaagtcggcttggtttaattttggaaccgccta

SEQ ID NO: 142716 - DNA, 841 bp, Zea mays
  Clone ID: MRT4577_61638C.1
ccggccgggatttctaggtcttgggttcgactgctgcctgcgcagtactacgagctagcaggctagcagcaccaggaccaggagcctcttcccacacttccgctctccctctctctctttcctctcgagaatggttgtgtaggcgggcgcaggagggaggagagagaggggagctagctagggttttgcgtcgccgccttctgttacccttaggctctgaacccctccggtccggtgcggcggcggattaggctccgatggggaagtctccggcgaagtggatcaagtccgtgctcttcgggaaaaggtcgtcgtcgaggtccggctccaccaaggccaaggatttatcgaagggtacgactaacaaagcagcagctgctgctgctgctgctgccgggaaggagcccgcgttctctgagagctctccggtcatctcggagcctgtgcttgttagcgcccacaacaatgagaccgcgcgggaggccgctaagggtgagaattccagcgtgcaagaagtgccagtgactgatgtcagtcaagacttggagaagcagggcactgttgggtctgatacgtctaatgatgctgagaggttgagggaagagcaagcggccgtgaaggcacaagctgccttccgtggttatctggcacgccgagcattccgtgccctgaaagggatcataagactacaggcactgattcggggacatcttgtaaggaggcaagctgtttcaactctccgtgccacatggttgattgtgaagtttcaagcccttgtccgtggaaggaacgttagactttctaatgttttcatttaagcaactacgggactttcccaaca

SEQ ID NO: 142717 - DNA, 321 bp, Zea mays
  Clone ID: MRT4577_61639C.1
gggaaccccgggttcccatcatggggtcttacaaaggttctttcttttttttttcaaatttcaaacgtggaaatgcccaatccgggcttgctttgtttgtaaagccccttgggccaggattttcagatttaagggctcaaatttgctttactgacatgactgaagcttgttttgggaaaatctactttgggctttggccctcgaaactaaataagcaagagggtggggttttttcaaccccccaggttttttttttttctggatcatccatagtataaatcttgggacccagtttggtttttttgtttcctgggcgatgcc

SEQ ID NO: 142718 - DNA, 849 bp, Zea mays
  Clone ID: MRT4577_6163C.1
aaaacggcctccgcacacagcctgcgccgccgccgccgccgccgccgtccgctctaccccaggtaaggaagggaggagcggcgatgtcgcaccgcaagttcgagcacccgaggcacggttccctcggcttcctccccaggaagcgctgctctcgccaccgcggaaaggtgaagtccttccccaaggatgaccaacagaagccttgccacctcactgccttcctgggctacaaggctggaatgacccacattgttcgtgaggtcgagaagcccggatccaagctccacaagaaggaaacctgtgaggctgttaccatcattgagacccctcctctggtcattgttggtcttgtggcctatgtgaagacccctcgtggccttcgcactctcaactctgtctgggctcagcaccttagcgaagatgtgaggagaaggttctacaagaactggtgcaagagcaagaagaaggcgttcacaaagtatgccctcaagtatgacagtgatgcaggcaagaaggaaatccagttgcagcttgagaaaatgaagaagtacgccactattgtccgtgttattgcccatactcagattaggaagatgaagggcttgaaacagaagaaggctcacctcatggagatccagattaatggtggcaccatcgcagacaaggttgactatggctacaagttctttgagaaggaagtcccagttgaagcggtcttccagaaagatgaaatggttgacatcattggtgtcaccaagggtaaggggtacgaaggtgtcgtcactcgctggggtgtgacccgccttccccgcaagaccccacaggggtctccgaaagttgcctgtatcg

SEQ ID NO: 142719 - DNA, 1118 bp, Zea mays
  Clone ID: MRT4577_61640C.1
ccgccactcatccacaacttttttctttaaaaagaaaaacaaaagcatacacggcggcgggactttgtctgttctgcttcgctcgcgggcgctcatctccactcctccgatggcgccgccacccaccagcccctcattcctccgcccgccgccgctgccacaccacccgcaccctcgcctccttttgcgacctccctccgcctctttccgcgtcgccgaaatactcggcggtcggggcctctgcaatggtgaggtcggcgtccgcaaagaactcgcatccggctccaccacctcctcgcccgcgccctctcctcctccttcgacagattctcctccgcccgcggttgatccggacgcgttcgagaaggagatgatgggcctcacaggcggcttccctggcggtgaggtcggcctcaaggacttcgtagccaagaacccgcctcctcccaagaaatcagaatcccagccccaagccacgctctccgcgccgccgcggccgccggagctgccgctgttcttgcccggcatggtggtgctggtcaagaaccccaacaacgcctaccacatgtactgcggtatcgtgcagcgcgtcagcgacggcaaggtcgcggtgctcttcgagggaggagtgtgggacaggctcatcaccttcaacctcgacgagctcgagggcagggagaagggaccccctatggccaaccccaagtccgtggtgctagaggatcttgtcgcggagctcgaggatgacgatgatgataaggaggacgaagcggccaagaagaaggaaccggagggcgcggcggcggcggcgacatgaccaggcttcttgttcctgttatacacatcctctgtatgtatgcatgtatacagctcaaataaaatatttggagctaattaaaaaggaacgataatataactcttattatgaagtaaaaaaaaaaaaaaaaaaggtgcctaggggcatggaagaattgccatacgtttgatcacatgtgacctggatggcttctcttggattattaacttctaattatgataacaatgaggatgccacaagactttcagttcaaaaaaaaaaaaaaaaaaaaaaaataaaaaaaaaaaaaaaaaaaaaaaaa

SEQ ID NO: 142720 - DNA, 378 bp, Zea mays
  Clone ID: MRT4577_61641C.1
gagaaggaaaaaaaattagttttccccacaatttttaaaatgaagggggggggccgggcgagaaccccctggggggggaacaaaaaaaagggggcccccccccacaatcctggggccaaaactaagaaaacggaccccaatcgaacagccaagggccggggggtttaaaaaaaaagaacgaaaggcccttgacaccaaacaaggggtgaggccaaacccagggggcccccaaaaaacgcttggggggaccccggaaatggggaaaggccccgggccgaaaaccacctttcccgaaaggggggttaaaaaaagggggttgccccaccccggggggcccccccgaaattcaaaacgggatcccgtgagggtcccaatttt

SEQ ID NO: 142721 - DNA, 353 bp, Zea mays
  Clone ID: MRT4577_61642C.1
ggcggttatcacagtgcctgctcactccaacgtgtctcttaggagaggtgcgaaggattctggccgcattgctgggctggaggttctgcgtatgataaacgagccttccgacgcataactagcatatggctttgtgaaacacaacaatgaatcaattgtgtgcttttgacctaggaggtggcaccttcgatggttcaaatcttgaagtactcgatagcgttctcgaggcgctgtctacatcatgtgacactcagctaggcggctatgtctttgaccagagaatggtcgatgaggctcgctgggaacttgacgaatgatgagggtcttgattttctaaaagataagcacgcact

SEQ ID NO: 142722 - DNA, 297 bp, Zea mays
  Clone ID: MRT4577_61643C.1
acgcccgcggccagcacttgcacctacccggtttactacctcatatcgtacggcttatcactatgtctagccttctatcggatctgtgcccaacgctggattataagttccctaaactatctacttcagtcatatattgactacctattgtgcatatcatcaacaacaacgtatttaactttcatcgaagtctacttattgtttttcgacttaacctattacacattaacttcattgatagttctttttaactacctgtataagatctaatgtatgaattactatctaatgaccctt

SEQ ID NO: 142723 - DNA, 275 bp, Zea mays
  Clone ID: MRT4577_61644C.1
acagagaggcctgcgaataatgttccctgcttcgctgagacaggatctggtccatctgggctgctacaagcatgccgacactgcgagagatggataaagagggccctgtcgtcgctgagggcagctgtacatcctgatccctagcccgagccacaacactcttcgcacatggagctgtgcatgtactaggctgatgcatacgcgaagctgcctgtgctaccgtcgcgtctgcacaagttcgtcagctacaagtccgcgttcgcgcacttaggcgc

SEQ ID NO: 142724 - DNA, 612 bp, Zea mays
  Clone ID: MRT4577_61645C.1
cctccctccccattcccacccacccggcatctcggcagtaactctcccgccctccctcccacgcggcgcgcccgctcgccgcgcgcgcgaatctcgatcgccactggtgtaccgttgaaggaagaagagaatcatcctatttgtcatggccggaactgactcctcggtctcatcgagacaaagcagcgtcaactcattagcaaaggacctagaacttcctttggagcaagggtgcctcaccatcgttgtacttggggcttctggagaccttgccaagaagaaaacgttcccggcactctaccacctttttgagcaggggttcttacaatctggtgaagtgcatatagttgggtatgcgagaacaaatctttctgatgatgggttgagagggcgcatccgtgcatacctcaaaggagcctcagaggaacatgtttcagaattcttgcaattgataaaatatgtcagtggttcctatgacagcggagaaagttttgaaaaactgaacaaggaaatatcagattatgagatgtccaacaactcgggaatctcccgcaggctattttatttggcattgcctccatctgtttacccttcactgggcaaaatgatccg

SEQ ID NO: 142725 - DNA, 369 bp, Zea mays
  Clone ID: MRT4577_61646C.1
aattcggccaaggctacatgaagcctcttgcggcccctctgatcccgcgctgttgtagtggctcttgaccctgggacattgaacaatgtacatacaggaccctaaggagcagatattacgccttgacatctttgtgttcggccaatctggcgctggtaacaattgcgctaacctccactacaccgagcgtgctgagctcattgactctgttctgtatgttgcgaggaaggaagctgagaactgagactgattggaaggattccaagtacgccactcctttggtggccgtactggatctgggatgagcacgctgatgatctcaaatatcagggaatagtaccctgaccagatgatgcctacattctcagt

SEQ ID NO: 142726 - DNA, 867 bp, Zea mays
  Clone ID: MRT4577_61647C.1
tcggccggggttccgctcccgtccccaactcctgcgtcggctgggctctcgccaccgcagcaccgcgccgaccacgcctcccgccgccgcagagctccagctctcactcactgctctcgcaggcgtcctcttccttccgcagttccgcttctgctggagacggtatccgtctggacctggaggactggactgggctctcctttcgctggtcatatggtgccatcggaaccacagactgtagttgagaacaaccattccacaagtgtgggtgccgaagagcttgttttgacaaaagatgaaagcacatctactaccactgtcgtccaaggtgcaggctccttaatgtcaccaaaaggtgttcaagaggaagctagctttatgggtaagggtaaaggtggagaacaacagttgggctaccatcccaatgtgtatgcttctcagccacacacacccttttctggaggatactcgaaccatttggatcaatgggagggatacccatacgctgtgacgtatggagcttattcccctttgtcagccattggagataggcagacatatttctctttgatctgccccttgtcaagcccttgctaccagccacctgcttctccaaacatgacatattcaagtcctggtactggaatatctcaatttgatcctatccaccagtattacagtcctgacgaagttcattactcagtgactcctagcttctatcagccttttggttctttaaacggaggtaagaatccattttgttgatacctttgtggctgtttatagtatatatgaaatttgatttcttttactgtataattcccattccattttggaaatttgttgcagttccaatgcaaccgagta

SEQ ID NO: 142727 - DNA, 200 bp, Zea mays
  Clone ID: MRT4577_61648C.1
gaaggctggggagcaccgggaggataaggagggggaatgttttgtccagtttggacatggtggtagcctgactcctttcagtattaccgttaaggttaggacatgcggagaaagaaagagatttggatttggatctcattgatcatgagatcgcatagccggactagtggataaagtgttccccttttgtgtttagtttg

SEQ ID NO: 142728 - DNA, 586 bp, Zea mays
  Clone ID: MRT4577_61649C.1
attccacaagaaaaaaatactgctgcatattctttcactctgacaagtaaacacagttacaaaacattttcgttatctaacattatttcctccgcaaagcaacaatggaaatgccgggtgggtccaagttgaaggcacgagcagtctagcacaaatctacaatacaatacacaaaattgctccccaactgacagacaaagaagtgggagtaaacgacctagatgtttaggtgacagtgtagagttgtagactgcatcagcaaaatcatactatcatgctgggctgccgtcttcatgtaacaagaatacaacggcagcagccaacaacactagaaatgccataaaaatatatttccggtttagcagcgatggctctatggtgcacactgtctcatgaatgtcctcccgtatggaatcatcctctgaagtggaaacatcagcactctgattcttagattcatcattgtcaattggatctgatggtttctccaccacagtttgtgatggcaaagaatctggacatatttcctcagcctttgagttgactggaattcagtatgattggaagtacccttttgctcatttta

SEQ ID NO: 142729 - DNA, 477 bp, Zea mays
  Clone ID: MRT4577_6164C.1
caatccccaaggaccttaaccggtcatggggaagatcccatttcaagtggacggtatctgatgcaggagctgatgggcacaggactatcagcgcagagtgtgccggaatggaagatgacatatgggaaggccggaacatatgggcagaagtcgaggctttcgatccaggagcagagacaaagccttccaatattcaggctgaaaaaggagctgatcagtgctgttaatgacaaccaagttttggtggttatcggtgagactggctctgggaaaacaacccaggttacacaataccttgctgaggcagggtatactacaaggggaaagattgcatgtactcaacctcgcagggttgctgcagagtcaattgcaaagcgagtagcagaggaggttggctgtcgagtgggtgaggaagttggttattctatacgctttgatgactgcacagggcctgaaaccgtcatcaagtacatgaca

SEQ ID NO: 142730 - DNA, 2591 bp, Zea mays
  unsure (1)..(2591): unsure at all n locations
  Clone ID: MRT4577_61650C.1
ccggccgggacccctccttccatcctcgcccgcgcgctccacacgtccccgccgtcgcgctcgccttccatcctcctccccaccccctccttccatcctcgctcgcgcgctccgcatgtccccgccgtcgcgctcgcctccctcctctttgttgcctccgcgtcggcctccaccccgctctccgacacgcttgccgtcgtcttggatttctggtgcactctcttctctacgacgcgagcaagggcggcgcttgccatggcatcgacgggaaccaggcatcactctccctatctcttgggtacgcgtttatttcatctctagggtctagagtttagtagcaccgccgccaacatccccgccgttgcgacaagcaccgaccgctcgcttccccctccctcctctcgtcggcgccaacgagccgcatgccgtgtgtcgtgtgggtcggctacccgggtatcggcgccagcgagccctcgccccccatccccctgccaatctcggcgtcggcacgccgctcgccatccccgcaggccacgcccatgccccccgcctccatagtccctgtcatcggcgacctcagatccaacaggttggtctgcttgcgccgtgatcgcggaagctaccgcgccttcgtctccgtggatgaggtcctggatttgtgtgtcactagcgcggaatgtgagccgcggttggttaacgatgccgacttgtgtgtgtgtgtgtgtgtgtgtgtgtgtgtgtgtgtgtgtgtccgttcgtggcctcccagnagtccccagtctcccacccacactccccgcccgcggagcgctccactgactccgccgtgactttctcttctctccttccatcgccctccgcctccctctccggcccgccctcgtctgtccaccccattttaggtttaaaggtccaccctcctgcttccccccctacccctaaaaccgcctcctctctcctgctgccacgaggtacggcccagctcttcctcaaagcgggcgaaatccacgccgcgcggcggcggcggcagaggaggaggggggatgatggggtgcctcttcgcctgcttccgcgcgtccggcggcgatggcgaggtgaagggcaccggcggccagctcgcgcatccgtcccagccccccgcgacgacgacgacgaccagccaccaggtccaggatggcgcgggcaggagggccaggccgccgtcgaggaacgcgctctccgccgtgttccagcgagaagatgagggatcaaggacggcgcaagtggcgagctcgtgggcggacgagagtggcgagaggaaggagatggatcaggagcttgtgcatcaggccattatccaaagaagctgtggtgcgttgctgcaaactacaaataacattcaaggagtgctcatcaaatatgctgattcagttcatcagaaggaaacacattcaggatgtcttcctgttatgtctgatgatctacatttcatggaagcgccaaaggttgagaactgtgaaactcctcacaaggtctcatcagagcactgtacattacagatgcaacgagttcttcaaaaacaaatgatgagttgcgtacttccgctacttccttaaaaaataacgtggaagagtcaacaaatgagaacgatactgaggcctgtgtgcagggtgaagaacaacaacaagctctggatcttgctgaggattttgaagaatgtggggtttcaaaagaagatttcttcccccctgaaaaattagaggatccaaagtgtgcaaagaatgaccatgtggtctccatggaaatttcaatatccgatgaatgttcccttttccagagctctgagggttctgtaccatcttcttacaagataagagagagcatgaacacaacatctgtggagaagtccccgaaaactgaggcaactatccatgccaccagaaagaagttaccgaagagcgataattcagaactggagctcccaagcttagcccaatggttgaagcccccaaatcctaagaaggcattcagagatgaggccatggcaggagacaggtctcattcgggcaagagttcagatgaggataggcctattattggaatggttgcagcacattggaaagataaggtgccactgccagcaaattttacctctaaattgcgggatggaaatggcattcccaattcaacaaataagtacaaagaagaccaaaaggtgagttggcatgcaacgccatttgaggagaggctcgagaaggctttatccgaagagaagttgctgtctgaaaggagctgttcgagtggaaagacgtctcagtttttaggagtggaaggcgaggagagtgacatggccgaatctaaccgtctgtacgccactgcttatgcatgccaattcagttctgctagccatgagccacagaagctttcagtataatggttctctggccatcaccttcctgattgatggcatttgcacagccctgtttcccctctgtccttttagtaggtagtatctggatgtgatgtttcagcttgtgcttaactcaatcagttaagatataatattactgctgccactagtccacagatattgttgttagcttcaacaaacc

SEQ ID NO: 142731 - DNA, 348 bp, Zea mays
  Clone ID: MRT4577_61651C.1
gatctctcgggagtctttgtggtggtgcctacacgctagaggagacctactcaagcacttagcgggacagctcatgaataccgcggggccctccctttgactagtgaccacacagacaactaacccaccttggcgagtccagagattacaaagagaatactgcccgaggactcacttgttacacattctacaaaggtcaaagactcttacagagctcgcctaggctagcctctaccattcgtgtgctgcctggcacagtgcatagactccgtgaactgtcgctggagaccgactctgcatagacccgtgcacccgagtaggactcggacgatgtcacgaacacaccgg

SEQ ID NO: 142732 - DNA, 385 bp, Zea mays
  Clone ID: MRT4577_61652C.1
acaaaacattttcgttatctaacattatttcctccgcaaagcaacaatggaaatggcactgtgatgacatcatcacgaaacccgggtgggtccaagttgaaggcacgagcgactagcacaaatctacaatacaatacacaaaattgctccccaactgacagacaaagaagtgggagtaaacgacctaaatgtttaggtgacagtgtagagttgtagactgcatcagcaaaatcagactatcatgctgggctgccgtcttcatgtaacaagaatacaacggcagcagccaacaacactagaaatgccataaaaatatatttccggtttagcagtgatggctctatggtgcgcactgtctcatgaatgtccttccgtatggaatcat

SEQ ID NO: 142733 - DNA, 155 bp, Zea mays
  Clone ID: MRT4577_61653C.1
gccacgcgttcgaacacgcgtcaggctgtatgcaaaaggggacaccctttgggcacgggggaggaaggacctatattgttttgcacgttacaaccgacgagatcatggggattctcgcctgcttctagctatgagagagcggagatttttaggca

SEQ ID NO: 142734 - DNA, 550 bp, Zea mays
  Clone ID: MRT4577_61654C.1
gctcatcttcctcgcagctgtagtctcgcttctggccgcgcggccggcttctgctggcggtggagctgcggcggcggcgaaaatctcgcctgaacagtccgagacccgacctgcgcaccaggacagcgtcgaactacgccaacaagtacaaggagatggacgcgcccgaggtgctagagatgcaggcggactccttcaagaaccgcgtcgaacggcagctgcagtgtcgactacgaggacgaccccaccgactggtcatccaatgcgttgttgacgatgaacctctgcaagatctactacctggacgccggcgacaaccatcgtcgtctgcaagcgcgacatgggtttcctagataacgattccatccgcgccacgatgagaatggtggcgaaggacacgcagaatttataccacgacttctggaaggccgcctccaagaaccctatgtacgaacactagaggtacgttcatggagatgtccacagatctgcctgcacgtctctcccatatgtatactcttaccaaccatgtacatcagatgtgtactgt

SEQ ID NO: 142735 - DNA, 472 bp, Zea mays
  Clone ID: MRT4577_61655C.1
ccgggaccaccttattctcgtccttccattctctcataccttaggattgagcccgtctcggcccgccccctcgttgcacttgcatgggcaacacttcaaattgcaggataaccgacactctaccgccgtgaaggaacccctaaccggcgagaatggctatgacgacgaaatgtgactcgaactcggatgtggatacgatagctacggacttcatcgaggtgcagcaccaggttagggcactcctaaagagcaccctcctgctgcacccttctacctacacgagcccatagtccaccaacgttatactatatacctatgcttgtctctgcatcgcctaccatccctaaatcccatacctggtgctggttgtactcttggatatctgcgagagatggagtaccatggcttcactgcttcgaatacaatgctaccgtgcacatgatgaaatgtgtaattttgtggcaatattatt

SEQ ID NO: 142736 - DNA, 3304 bp, Zea mays
  unsure (1)..(3304): unsure at all n locations
  Clone ID: MRT4577_61656C.1
ccacgcgtccgccgcctcccagatccgcctggccgtcctcctcgtccgccactgcggcggtgctccctccccgccccccccgtgttaccgtcgagaggatcgtcgaggacttcgccatggacctcgccatcaatcccttctcctccggtacccgcctccgggacatgatacgtgcgatacgcgcgtgcaagacggcagcagaggagcgcgccgtggtgcggcgggagtgcgcggcgatacgggccgctatcagcgagggcgaccaggactaccggcatcggaacatggccaagctcatgttcatccacatgctcgtggaaaacctcaggagactacaattaatgcttctttcacaaatttagcaactactgcattaacagatttcgtcttccaggcagccgtgccaaagttcatccagttgcgtttggacccagctagcagcagcactcttcctgccagtggaaatgtgtcagtcacacaaagcctcagtgtcactaacaaccagcatgggcagaaaccacttgcaatgcgtatccggatgtcttacaaagtgaatggtgaagacaggctggagcaagggcaaatcagcaactttccttctgggttgtagtgccacctgtgtctatggggttggggttgctctttcagcgtgctacaggcaaggcgtttgtattcttgttcttgaacattttcacttctgcttgcctgctaatgagttgtgtacactggtagttggttttggtcgcccattctctttttatatatagtgtacagtagatggcagcgattaatgatatatcctaccaaaattttcaatcttaggctatctccagcagcctccttgttcttctcacttcttatttcaaactccactcttgtaaacagtatcgcctacactacagttcatatgctcgtgcatacgacatcggtggcatcacggatccattcttacatatccgagtgcttaaactcatgcgaatactgggtcaaggagatgcagattgcagcgagtatatcaatgacattcttgctcaggtttcaacgaaaaccgagtcaaataagaatgctggaaatgctattttatatgaatgtgtggagacaataatgagcattgaagctacaagtggtttacgtgtgttggcaattaatattttgggtcgttttttgtccaaccgcgataacaacataagatatgttgccctaaacatgcttatgaaggccattgccgtagacacacaagcggtgcagaggcacagggcaacaattttagagtgtgtcaaggatgcagatgtctctattcgtaaaagggccctggaacttgtttatctacttgtcaatgatacaaatgtaaagccattgactaaggaacttgttgattaccttgaagtgagtgatcaagatttcaaggaagacctcactgctaaaatatgctcaatagttgaaaagttttccctggacaggctatggtacttagaccagatgttcagagttttgtctctggctggtaattatgtaaaggatgatgtatggcatgctcttatagttctaatgagtaatgcatctgaacttcaaggatattcaatcaggtcattatataaagcattgcaagcatctagtgaacaggaaagtttagttagggtggctgtttggtgcattggtgaatatggagaaatgctggtcaccgatcacggtaactgaatctgatgctgtggatgccgtatagattgctcttcagcgttactcggcggatgttactaccagggctatgtgtcttgtctctcttttgaagctttcttcccggtttccaccaacatcagagagaataaaagaaatagttgcgcaaaataaagggaatactgtgcttgaattgcagcaaagatctattgaattcagttccattatacaaagacatcagtcgataaaatcatctttgcttgaacgtatgcctgcattggatgaagcaaattatttggtgaagagagctgcttctacacaggctgcagtttcatctgtaaattctgctcctgcagtcacttctggaggcccacttaagcttccaaatggcgtagcaaagccaccaccagctcctttagctgatttgcttgatttgggttctgatgatgctccagtgactacttcggcccctactacatcacctaatgattttctacaggatctgttgggcatcggtttgactgattcgtctcctataggcggagctccgtctacaagcactgacattctgatggatcttctatctattggttcatcttctgtacaaaatggcccaccaacgtcaaactttcaccaacggcaaactttagccttcctggcatagagactaaatctccccctgttacacctcaagttgtggatcttcttgatggtttgtcctcaagcacatctcttcctgatgagaatgcagcttacccgacaatcacagcattccagagtgcaaccttgaggatcacattcagtttcaaaaagcaacctggaaaacctcaggagactacaattaatgcttctttcacaaatttagcaaccactacattcacagatttcgtcttccaggcaggtgccaaagttcatccagttgcgtttggacccagctagcagcagcactcttcctgccagtggaaatgtgtcagtcacacaaagcctcagtgtcactaacaaccaacatgggcagaaaccacttgcaatgcgtatccggatgtcttacaaagtgaatggtgaagacaggctggagcaagggcaaatcagcaactttccttctgggttgtagtgccacctgtgtctatggggttggggttgctctttcagcgtgctacaggcaaggcgtttgtattcttgttcttgaacattttcacttctgcttgcctgctaatgagtttgtacactggtagttggttttggtcgcccattctctctttatatatagtgcgattaatgatatatcctcagttttgccctaccaaaattttcaaccttaggctatttcccgcagcctccctgttcttctcacttcttatttcaaactccactcaaacagtatcgcctacagtacaaaacagtgttttgcacgctcgtgagatggccttatgctcccatacacagaaggaatgtgttgtatcgcgattttcctgatgtaattatttatttttctaatcaagctcgtacaggcttattgtgcacagacaaattaattgtttttcatgtgcgttcctttaggttcagacatatttggaataccagactcccccaattcttgccaaaaaataggcagttatcaaattnaaaaata

SEQ ID NO: 142737 - DNA, 808 bp, Zea mays
  Clone ID: MRT4577_61657C.1
gccggccgggctgggaaataggggcctcttcgcaaatcccaccagcaccaccgccttcgcctccgactgcctcccagatccgctcgcccggccgccgccgtcttcctggtccgcctctgcggcagtgagattcctcgccgccccgccctggattccgtcgagaggatcgtcgaggacttcgcgatggacctcgccatcaaccccttctcctccggcacccgccttcgggacatgatacgtgcgatacgcgcgtgcaagacggcagcggaggagcgtgccgtggtgcggcgggagtgcgcggcgatacgggccgccatcagcgagggcgaccaggactaccggcatcggaacatggccaagcttatgttcatccacatgctcggttaccccacacacttcgggcagatggagtgcctcaagcttattgctgcggcgggcttccccgagaagcgcatcggctatctaggactcatgcttctgctcgacgagcggcaggaggtcctcatgctcgtcaccaactctctcaagcaagatcttaaccactcaaaccagttcattgttgggcttgcgctctgtgcccttggcaacatatgttctgctgaaatggcacgcgatctggctcctgaagtggagagactgttgcaaaatagggaccctaatacaaagaagaaggctgctttatgctctataaggattgtgcgaaagttcagacttggcaggaaattcatgagtgctgctgcagcattactgaaggaaaacatcatggtggtctgatatctgccgttcagctttgcatgggactatgtaa

SEQ ID NO: 142738 - DNA, 2334 bp, Zea mays
  unsure (1)..(2334): unsure at all n locations
  Clone ID: MRT4577_61658C.1
cattgggtacctcgaggccggccggggcaaatcccaccaccaccatcaccgcctcccagatccgcctggccgtcctccttctcgtccgccactgcggcggtgatccctcgccgccccgcccttgataccgtcgagaggatcgtcgaggacctcgccatggacctcgccatcaatcccttctcctccggtacccgcctccgggacatgatacgtgcgatacgcgcgtgcaagacggcagcagaggagcgcgccgtggtgcggcgggagtgcgcggcgatacgggccgctatcagcgagggtgaccaggactaccggcatcggaacatggccaagctcatgttcatccacatgctcggctaccccacacacttcggccagatggagtgcctcaaacttattgctgccgcaggcttccccgagaagcgcatcggctatctaggactcatgctgctgctcgacgagcggcaggaggtcctcatgctcgtcaccaactctctcaagcaagatcttaaccactcaaaccagttcattgttgggcttgcactctgtgcccttggcaatatatgttctgctgaaatggcgcgtgatcttgctcctgaagtggagcggctgttacaaaatagggaccctaatacaaagaagaaggccgctttatgctctgtaaggattgtacgaaaagttccagacttggcagaaattttcatgagtgccgccacatcattactgaaggaaaaacatcacggtgttctgatatctgctgttcagctttgcatggagctatgtaatgccagcaatgaagcattggagtacttgaggagaattgccttgaagactggtcggaatactgaagatgtatccaacagttcatatgctcctgaatagttgcgcaaaataaagggaatactgtgcttgaattgcagcaaagatctattgaattcagttccattatacaaagacatcagtcgataaaatcatctttgcttgaacgtatgcctgcattggatgaagcaaattatttggtgaagagagctgcttctacacaggctgcagtttcatctgtaaattctgctcctgcagtcacttctggaggcccacttaagcttccaaatggcgtagcaaagccaccaccagctcctttagctgatttgcttgatttgggttctgatgatgctccagtgactacttcggcccctactacatcacctaatgattttctacaggatctgttgggcatcggtttgactgattcgtctcctataggtggagctccgtctacaagcactgacattctgatggatcttctatctattggttcatcttctgtacaaaatggcccaccaacggcaaactttagccttcctggcatagagactaaatctccccctgttacacctcaagttgtggatcttcttgatggtttgtcctcaagcacatctcttcctggtgagctcctgatgcttgattatccaatataaggaaaagttgcaaatacccctaaaagtcactgagtttgatttctcttccatatcaaactcaaggtgactccaaaggagcttttgcattagtaaccttcccataatcaatgaatttacttttactcaatttgcctgntcgccagatgagaacgcagctcaccccgggatcacagcattccagagtgcaactttgaggatcacattcagtttcaaaaaacaacctggaaaacctcaggagactgcaattagtgcttctttcacaaatttagcaaccactacattcacagatttcgtcttccaggcagctgtgccaaagttcatccagttgcgtttggacccagcgagcagcagcactcttcctgccagtggaaatgggtcagttacacaaagcctcagtgtcaccaacaaccagcatggccagaaaccacttgcaatgcgtatccggatgtcttacaaagtgaatggtgaggacaggctggaacaagggcaaatcagcaactttcctgctgggttgtagggccacctgtgtctatagggtttgggttgctctttcagacttatgcttgcctgctagtgagttgtgtacactggtagttggtttttggccgtccattatctctttatatatatagtgtacagtagatggcagcgattaatgatatatcctcagttttgccgaaatgtatttttatcttggtgcatatcggacttcagggtaaccaaaattttcacccttttccccgcgtaccaagcaccaaaggaatgtgttgtaccatgatattccccaatgtaattatttatttttctaatcattgtacaagcttattgtgcagacaaattatttatatttcatgtgcgt

SEQ ID NO: 142739 - DNA, 328 bp, Zea mays
  Clone ID: MRT4577_61659C.1
attcggctcgagggaggatccagacgcccgtattaccgcaggcgggccatgaggtggtccggcaggtactagactagcccccagtccgactgacgccacacaccacttgagtggactcaccgataacaccaccacgccaccacactgaactagagtccacactcttaacttgaatcgttggctcgacaccattgctaatatttgctgacacggggaaaccatactattaggtcctaaacagagcggactgaccaatcctgtggaactactactcgctgtgaccgaggataaagtacgtctgctgctccgcctgcagacccctaaaatg

SEQ ID NO: 142740 - DNA, 491 bp, Zea mays
  Clone ID: MRT4577_6165C.1
agtccggtagcagttggatgcttcatcacaagccaagttgttaatgcaatgcccaatatattttttttcgggcccagtgtgaccttttatgaaaagtcaggcatacaattcagaagtgtcatcgttggtgcacagaaaattttgttcagatgcagcgaccatttatccatggaaagaaaagagaaattcgaaataaaaaggaaaaacgaaaccttaacggacggcgtggatgggatggtgcaatacaacggacggctgtacgtcgcaccctcgtccacccttcttcaggaaatcatggtggccgtccacgaggaggggcacgaatgcgtgcaacgtaccctgcaccggctgcagcgtgaaagggaattagggttacacctagattcctaattgattttggtggttgaattgcctaacacaaataattggactaactagtttgctctagtctataagttctacaggtgccaaaggttcacaataagccagtg

SEQ ID NO: 142741 - DNA, 456 bp, Zea mays
  Clone ID: MRT4577_61660C.1
aaaaacaaaaccggggtcttttttttttccttttttttttttttggttccgacataaaaaaaaaaacccctggttcccagagttacaggcataaatcaccggaaaaaaaaataacggacccattcataactgccggaccccaaagccagagttgtcctatgcacaaacccttgggaagggaaaaaactaccgggccgatcaatccatccggggtcgttgcactgaacctcaaaggccaccccggttgggggggggccacggtctccccccccttgccgaactggtcgaacccgttggccccgaacacggacggggcctctttgagggaggaaagggagcaaaaggttttttccatgccctgggggaactaaacccgtttttcccggcactcctggttgaaaaacgccacctcccccctgaaaataaagagggtcggggccggccccaaggcggggg

SEQ ID NO: 142742 - DNA, 453 bp, Zea mays
  Clone ID: MRT4577_61661C.1
accgcacatgtctagattgggagcccggacaagaaccggggtgacggcgcgggtggcaaggatgaggatgtgcggacctgcgtcattggcatgcaggcgctcttgcatgccatgagtggggatggggccagggccagaacggccgttgtgctgacggcgatgacagctgccacggtgcccgcacgggcgctggacgcgacgaagctgcaggccggtaccaccgtgccgatggacatgctctccgctgagcaatgaacaccggcgctaaccactacatataccagcaactcgaggtctgtgggatacggttcgatgcgaacggacaacgcatacgagcggtgccagcgtgagcccgcagaccttgtgtataaccgaactgggatcagatgctaccgggcagggagtatcatgacagttcgaccagagcgggacaattagatgtaggcatggcga

SEQ ID NO: 142743 - DNA, 433 bp, Zea mays
  Clone ID: MRT4577_61662C.1
cttcatttacaactcaaactatgagctgctaattgagcatacgttccggcacaaagctacattgcactaggggctgtaccaatacctgttgcacacagcctgtgtagccgtgagtctcaactgatgcagacaaactaccataccgcgatgaaatgcagcacacaatgacgctactggatgagctgcccatacacatcataagatgtccccatactgaccaactgacccctctaagccgaatgctttacacgtcaccatctgacggtaaatggggggagcatgagcatcactacctgttgttcatggtcacacgacgttaacgtgcatacggacccatatgaagtcactgacgtgacagacatgaaccgcatacgagctgaaggagctcatgccaaaagctaactctcattaggacacggacgaagatctccca

SEQ ID NO: 142744 - DNA, 1183 bp, Zea mays
  Clone ID: MRT4577_61663C.1
ccgcgcctgtcttaagacgtccaaaccttccgctgcctgttccgaaacggaagtgggaggatcaggtcaatggtgttgtgccctgggagtcctccgtaagcacgctgcagaagaagtctgaggcgcatgctgcgaagcagatgaaagtggagaagcaggtgaaggtggaggagacgggggtggacccgaaggtgctgaagagcgcctttcttaagatggtgaaactgatgaatgagaatgaagcggataagaagaattactgggccaatgggaagctttcccagctgaagtgccctgtatgtcaaagggattctgtagatttgcatgcactcctcaatcatgcatactatgcaaagaatcaggagcatcgtgctgatcacttagggtttcacaaagccttatgtgttcttatgggttggaattattccgtagcccctgttcacaaaaccgcttaccaagcattatcaactgtcgacgctgaagccaatcaaggagaccttatcttatggccaccaacagttataattgagaacacatacaagtcaaagaatgatggagaaaaggatgtcatgagtgataaagaggtggagagcaagcttagagaaatgggctttgccggtgtcaatgtgcagccgctccctgggaaggacgggcagaggtcggtgcaagctaagttctccgccagcctcgatggtctgaacaacgcgtcacggctcgccgagttgttcgagcgccaaggccacgggcgagcagcctgggctcgcgtccggagcgccgtccccacaggcggtgggggcgataacaaccccatgctggtcaaggtggatggcaagggagagcggacatgggtcctctacggttaccttgccacggcatgggacttgaatgtcctggaccctgagtcgaagcagaacgccactgtgaagagcaggaaggaactggatttagattaggacccacctgaatacctgatcctgctagagttgtgcatgttacctgacgagttatgaatccatggacagtgtgattcgagtgtttgtgttcacggcacagcatttaagttcgagaagaaattctttgctgaggaatcagcttcgtggataccgctgtgcaaataatgaccctctatatgtcagttattcgtagtgtattaatctactttggtaaaaaaaaaaaaaaaaaa

SEQ ID NO: 142745 - DNA, 342 bp, Zea mays
  Clone ID: MRT4577_61664C.1
cggtccggcaacccgggtcgccccgcgtccgcctcagtccctcacacactcactatacactgctctgctgcagcaaggaaggaagaactagcgcctccctagctctcgttgtcagcaatggccaccaccgccgcgtccagcctcctcaagtcgaccttcacgggctcccggctcccttcggccacgcgcaccaccaccccttcgaacgtggccgaggccaccccgcgcgccgggggtggccccattcgaacgtacatatcctcctaccccaccccgacctacgaccttacgtccttccgaattaatcacattaaggagaccatacctgacccaacagatgac

SEQ ID NO: 142746 - DNA, 268 bp, Zea mays
  Clone ID: MRT4577_61665C.1
ccaatacaagtgactcaatgcttaaatcattgacatagaatcatattatcttccatggcaacacacgctacagaggacgaacctcgcccgaaatacgccaaggaaatcgcctaacagtgtccgtgtgccccgaaacaggatgactgatagttgcacatcctacaaacaatatcgagcaaccagtaaacgtatacagacagtactgaacagtgtgtgaccgagccatacatccacatgggactccattactgatggcgctctcacacac

SEQ ID NO: 142747 - DNA, 326 bp, Zea mays
  Clone ID: MRT4577_61666C.1
cgagaagatctgcaaccagagagtgagaccgggtcctaccgaaattggtagagcaacaaccgacccttaatttcttcttctttcattgcaaagaaccattaaccacattattcccaatacccacaatgggccgcttcttggcttccaaagggccggggtgaacattataaacaccccccccaaccctctttttttgcacaaacccgttgaaaacctttccccggcactttaccgtccgcaccggcaccgcgcggcagggacaatcaccgtcaccgcgatcccgttcccaacggcggaagccggcctgtctgagggcagcgagaggc

SEQ ID NO: 142748 - DNA, 452 bp, Zea mays
  Clone ID: MRT4577_61667C.1
aagggggtccagggcacaaaccccccacggggtcaggagctttgtttttcattggggtatattttacaaggtacaacaacccgggaccccacaggcaatggagccccccgcccaggagagataccacgggccctactcatgggcacgggacaccccttggggggcccctatttgaactagccggtgaacggggggtacaccttgagcgcccccatgacctcggcgaaggacccccctgggggggggacggacacaagggggcccccagcgctgagcatttgggggcaaatccagggggggctccacctgggcacggggcgctgaacaaagtacattttgatggggaagtaaacggggagcggccaaaaggaaacgggcccaagcaggccaacaacctctccaaaaaagggagcaacatgggggcgacgggggggaggcacacaaaccccggg

SEQ ID NO: 142749 - DNA, 209 bp, Zea mays
  Clone ID: MRT4577_61668C.1
gacacgtgtgctacgatgccgcaaatttggagtctgtcaatgatggtgagagctgtagcatggaaagaggtactcgacgatagtgtcggctgcgtcggagaggcttcagcatggtcgcgaatgacgggattactcatcgctgtatcgcctaggtctcgctgagatgatatcacacgactgatgctatatcactctgatttcacattcgg

SEQ ID NO: 142750 - DNA, 194 bp, Zea mays
  Clone ID: MRT4577_61669C.1
agggcgcgaacgaaggtatccgcttctccgtgctgccatggaccacgctgcagcaccatcctgccccttagggagccatttagcatccacccaataatgagaggtgctcacggcaccgccgggcgtcttcttctcgcacaccagcaggtgaggatgagacctgacctgtgctgctggaacaccgacaagacgct

SEQ ID NO: 142751 - DNA, 246 bp, Zea mays
  Clone ID: MRT4577_6166C.1
gactactataggacgattggggatcatcgatgccggccgggggcacaaattttcctgacacttgttcgcctttgccccttctgtctcccttcgtacgagaagaccaagaacggcccagatttagcgtatcgaatatggtgctggaatatgattaggaagtactaaatcacccggtagagattgaaaagataacacacaagaaaagtaggctagtccagtccccccactcctgcttcttgaatgaaa

SEQ ID NO: 142752 - DNA, 295 bp, Zea mays
  Clone ID: MRT4577_61670C.1
cgacacccgttccctatccggatgctatccctgttgacggcacttgactgccgcacgacggtgctctacttacccggggctaccgggtgactactatccaactggatgatgatagtagacatgcatcctgacttcaccctattattgctgccccgctacactcggatcgtgctcctactatggagtccatgtggagggaaatgctgaaaatcctttattctgtcttaggcagtatccaggacctggcgcaaaagtcggatccaggtcaactaaatatatggggcattgatcattg

SEQ ID NO: 142753 - DNA, 405 bp, Zea mays
  Clone ID: MRT4577_61671C.1
gtcatctctttttttgtttttgttgaaattgatcatcacaggcaggagcgcgagtatcgccgggggctatggggcagaggcccaacgaagaacccaaagcgggaagccaagggacacaccctacaaaagaaacaaaagcggcccggcagccaacaacaaaggaccgcacacaacaaactcaaaacggcaaatgacaaaggcgaaaaagaaaaggagacgctcggtcgctcacgaggcgcccccaaagggacaagcaggctgcggataatcgggcagggccggggctgatgaatccagaccccagggggggggcagcggggacatcgctgccggcgctagctgcgactgtagcgggggcatccgccagcgcaagaagggcagcctcaaccggcagcacgtcgagca

SEQ ID NO: 142754 - DNA, 373 bp, Zea mays
  Clone ID: MRT4577_61672C.1
acgctatcctcactgatatcccctggttggacaacctcggtcgccagactcgttccaaggctgacactcccattgagaacatgattggccatctctccaagttggccatcgagcacgagcatgaccgtgctactggcgcatcccgcttcgtcatcggcactcgtgcccctgaggaagaggatgatgagtaaatgtattaatacccatttttcatttgccatacatctatgatttttggtcccgactcgagggactaagtcatgaggatacggagaacgaactgaatgtggtggagtcaatattcttccattctttttacacctttttacttcacttctacgactcatctttctttttctcttttaattttttt

SEQ ID NO: 142755 - DNA, 755 bp, Zea mays
  Clone ID: MRT4577_61673C.1
accatccccgcgccctggctgggcctccacctccacggcaacggatagatccccgacgagtccaaacccaagcagcgacgccaaaacatgcccttgaaattccacgaaatcaagcctcctccccctcccgctgcacgcatctccagggtccggatccatgggctgcttcctcgcctgcttcggcggcgacgccggccggcgccgccgacgccagaagtcgcggaggcagtctcccgcgaggactccgccgcggtcgattcatgttgcggtggcccgcgaggcggcggatgtggtggtgaaggaggtgtcgccgccgttgcgcggggcaaagccctcaacgctggcggaggccgtggaggcgccgcacgatgaggtcgccgaggatgcggatgtggcggcgaaggacgcgtcgctgccgtcccatgaggtgaaggcttcaacgccgccgccggctgtggcggctgcggatgaggcggtcacagacgctagccccgtcgacgagctcagggatttgactgagcaaaaggtgttagagaagcaagccgcaccatcactctccccagtcaaatgttctcctattgtggcagcagttgtttccccacatgattcagtgaagtgttctccagttgtggcaggaggtgtttcagctctggattcagaactcagggaggtgagtgagcatggaagtcggagcagtggcaagaagaaagtaacgttcgacatgaatatcagaacatatgaaaagcagtaccact

SEQ ID NO: 142756 - DNA, 116 bp, Zea mays
  Clone ID: MRT4577_61674C.1
ccttgatcacactagtattgttactgacggcgggtgctggacagactgacgggtgtgccaagatcttatctaacatcaaaccaatcattatttttcacctatttcatagatttttt

SEQ ID NO: 142757 - DNA, 1766 bp, Zea mays
  Clone ID: MRT4577_61675C.1
ggaagacgtgttctccgggcaggcggtgggccaatcccgcgttcccctgtccacggtgcacaggcgatccgacgaccgggtggagccaccgtcccggtggctgaacctgtgcggcggcgaggcccggccgtacgccgggcgggtgcacgtgcgcgtgtgcctggagggcgggtaccacgtgctggacgaggcggcgaacgtggccagcgacgtgcgcgcggcgtcgaagcagctgtcgaagccgccggtggggatgctggaggtgggcgtccgcggcgcggccaacctggtgccgatgaagatcgccaaggacggcgcgagcgggtcgacggacgcgtacgtggtgctcaagtacgggcccaagtgggcgcgcacgcgcaccatcctggaccagttcaaccctcggtggaacgagcagtacgcgtgggacgtgttcgacccctgcaccgtgctcaccatcgccgtcttcgacaacgtccggtacaaggccgccgcagccgacgatccggggaagctgcccagggactcccgcatcgggaagctccggatccggctgtcgacgctggacaccaaccgggtgtacgccaacaccttcgcgctgacggcggtgcacccggtgggcgtgcgcaagatgggcgagctggagctggcgatccggttcacctgcccgtcgtggctgacgctgatgcaggcgtacggcagcccgctgctgccgcggatgcactacgtgaagccgctgggcgcggcgcagcaggacgtgctgcggcacacggcgatgcgcacagtgtcggggcggctggcgcggtcggagccgccgctggggccggaggtggtgcagtacctgctggacacggacacgcagtcgtggagcatgcggcggagcaaggccaactggttccgcgtggtggggtgcctgtcccacgtggcgacggcggtgcggtgggcgcaccgggtccgcacctgggcgcacccgccgacgaccgtgctggtgcacctgctgctggtggccgtggtgctgtgcccggagatgatcctgcccaccgtgtgcctgtacctgttcctggtgctgctgtggcggtaccgcgcgcgggcgcggcagccggcgggcatggacccgcggctgtcccacgtggacagcgtgagccctgacgagctggacgaggagttcgacgggctcccatcggggcgccccgccgacgtggtccggatgcggtacgaccggctgcgcgccgtggccgcgcgcgcgcagacgctgctgggggacgtggcggcgcagggggagcgcgtggaggcgctgctgtcgtggcgggacccgcgcgcgacggcggtgttcgcggtggtgtgcctgctggcggcgctggtgctgtacgcggtgccgttcaaggtgctgctgctggggatggggttctactacctccgccaccccaggttccgcggcgacatgccctccgccggcttcaacttcttccgccgcctgccgtcgctctccgaccgggtcttctagactctctctctctctctctctctctctctctctctctctctctctcgcatgctcagatcgcggtctctgcctctgctactgatctctgatcagtctagttcgtttcttgatcgtttcatcttcacttctccgtgtaatctgcctttgtcaggttgccttgttttttttatcggttgcagtcagcagcaagcctcggttgatgaggcttgttggcaacatcaataacagcagcaataataatatctattgtattcgttcgttc

SEQ ID NO: 142758 - DNA, 301 bp, Zea mays
  Clone ID: MRT4577_61676C.1
ccgagcacaccgcctcctcctcttatttgagcacattgttacctgctcttgctaggagtcactctagcacgccccctcctctagcctaaagtccctctatcacacccacgccttatctacccttaacacgccgacacctcatcaggtgagggattcttatctagacatagctgatgtctgcacccaactactggactttcaagacgaaaagctctttctgatcaaccacgaaaagatggatgcatataacaacctcatatcattgaaacacgttccatgaccgattactaaaagactaaac

SEQ ID NO: 142759 - DNA, 336 bp, Zea mays
  unsure (1)..(336): unsure at all n locations
  Clone ID: MRT4577_61677C.1
cttccgaacgccaagaangaccaaccaaatgggtggttaagagacagaaagccggcctgcaccaaccgagacggcgaaggcctgacagaaaaaaccccggcgcaggaggcacggagaaatgggcagcacaaggacccaccgaggccactgctgctgcccaaaccaagggacgggacccgcatcaatgggaacgataggaccacaaaggcacctgcaaaagtcaacggagcgagaaggcgccagcaggagcagtcacgcccacctagagaggaccgaaggcacccgcgaccaacagaaacccaggaaagcaagagggcccccccgaggccaaaggag

SEQ ID NO: 142760 - DNA, 594 bp, Zea mays
  unsure (1)..(594): unsure at all n locations
  Clone ID: MRT4577_61678C.1
attacatatgaatggaatacagacacatgtatggtgatgcttctatttctctttgaaactgaaacttcaggtgtgcctatctaaaggtttaggcgtccccattggattcaaaggcttctgtatatctatcgagcacgtttatagatttactgatcagattgataacatcacacacacacgaagttcatcttcaacatgcttagtattattatgcatctgatggtatggtattgtctctgatagatccatttgctgaggctaatgctgaggagtctggtgttggtcttggaacgaaggattatgtgcatatgcgcatctaagagcgcaacgatagaaagagtctgactacagtccagggtctgaacaaagaattcagctataacaagaacctcattgatctgaagaaggaattctgctgcaatggtactgaagttcaggacccagagctaggcctggtcattcagctccaaagtgaccagcgcaagaatggcctcctataaaactactatatctatggacaatgttttgcatccccttgtaacacagtttttttgcanacattgagttgaaattgagacagaatgaggaagatcc

SEQ ID NO: 142761 - DNA, 749 bp, Zea mays
  Clone ID: MRT4577_61679C.1
gggtacctcgaggccggccggggatcgaatcgaacgccgacccgagtaaggcgatcgcgcggcggctgaccttccccgccgcccaccgtcgaagacatggacaccgagtaccgcgccttgcagcaggggagcccctcgccgtggcgcacggcggacggcgtgtcgtcgtggggacccgcgcagcaccagaagcgacagcgatgccagggttcttcaagcgatcaagctggttccagctcaagtagttctctgcaaatttcagaacctgaaccacaacaaaaccaagaagaagattactatgtggaggatgattgtgatgcctatgatgaagatgattatgactttgatgaagctgaatttaacctgcaccttgctgataaatttgatgatttggatcttcctccaggcgtggaggctaatgtaccatggctgcaaaaaatgccacccaaggaagtagtcaagcagccacctatatcaattactgcagacgagaatgctaataaatatgacaagttcaaacagtttgatactgttcagacattctctgaccatcactatgctaagaattctcatgaagagccaaccagagcctggtcaaagagagttcaacatgactggaaacttttggagaatgatctaccagcatatatttacgtccgggttgctgaagatagaatggatcttctttagggctgccattattgggcccaaggggacaccctaccatgatgggcttttcttctttgatg

SEQ ID NO: 142762 - DNA, 275 bp, Zea mays
  Clone ID: MRT4577_6167C.1
aatggcttccatcgattctgtccttcagggtgtttccgtttctggcaaggttgacgacatccaccgcaagatcctcacacccgaggccctcgcctttcttgcactgctgcaccgttcttttaatgagcgacgcaagaatctccttgagcgccgcaaggctcgccaggccgagcttgatcgaggagttctccctgactttcttcctgagactaagcacattcgcgagaaccctacatggaagggtgcgctcccgccccgggcctggtggaccgtcg

SEQ ID NO: 142763 - DNA, 378 bp, Zea mays
  Clone ID: MRT4577_61680C.1
aaagaagttatctacaacttttatatataacactttcacaaaaaccatgatttgattcattaacaatctgcattactgaactgggctcatagtccaaacagaaaatcttccaagttagttcctatttagcttaaccacctttaaccaacatattcacaccactcttggtaatcacaagagcattatcaacacaaacatctaaccattcattcatcaaacacctagcatgcattgcacgactgtcctttttacgaaaaacctggagttccttcttctcacacaagcacacacatatacccatatcatcgcattagcataacaccagcaaaaataattttattatacacctaacacaacttccacgataattatttaacc

SEQ ID NO: 142764 - DNA, 714 bp, Zea mays
  Clone ID: MRT4577_61681C.1
gaccaaacaatatgagtcgtgaaatgttgcatcatgttgagctccaaatattctttgaattgttgcacatgtttgatttggtttgaatttgaaacttgatttgaatttgaattgaaaaccctagagaaaataaatagaaaagcaattagaaattccctggaaaatagaaaagctaattcagcccaagtcggcccatcaggcccagctcagcgcgcgcgcgcccatgtgccctcggtgcctgacaggcgggtcccacctgtcagcgccaactcgcgcgccctttctctctctctcgcagctctgtggggccgacctgtcggcgccgtttcctttcgcacgaacactctctctacctcgcggaccccacctgtcagccccctccgcttccctaacctctcgcccacgtcccccgccgtggacacgcccacgaccgcgcgttctctggccactttctcacgcccttgcccttttagaagcccgcacaccgcttgcccactcgccccgctcatttgcgccctcaaccgagctctctcgccctgcgcacgcgaccagccgagctccaccgccgctcaccagggaccgccgccgttccacgaccatcattgcgcccgcgtcgcgtccgttccctcggtaagctctgctgcatcacccgcagctcgggacgccctttgattcgtccctttctcctctggtgtgcccggtttgctctcaccg

SEQ ID NO: 142765 - DNA, 1673 bp, Zea mays
  Clone ID: MRT4577_61682C.1
ggggcgaccacgcgtccgcgaccgaccaccccgcgctcccgccccacgcacgccctcgcgctcaccggcgccccgcccctcccccacgctggccgcacccgcaatggggtgcgcggcgtcggccgccaacggggccgggccccggcggcgggggtgggcgcgggcgcggatgcggcggtacagcgaggcgtccacctcgggtctgccgccgccgccgccgccgccgcaggaggcggcggagtcgtcgtccgggggcaggaggcgagggcgcaaggtggcgccggagcccaaggagccggcggaggaggggaccgccgcgctgccgccgatgcccggctcgcccagcttcaggtactactgccagaagaagacggcggccgtcgacaggatcgtggccgacgccgacgccgccgacgccgatgactccgtcagggtcagagcgacggcgcgtcagctgagcaacaggtgcgaaatcacggcgaccaaggcacacgattctaccgaggttgctcaacctaaagagggaaccagatggcttaggttcagtggcctgtccctcgtcgctaccgcttggcacaacttgatcagccgacaaagaagcaaacattcgccgcctcctgctgccgcaacctctcaaccatgaccaggcagcgctgtacgggatcctcagcttgtaaaaaacacgcacacacacgcatggctcatccatccatccatccatgctacatttgcagtcatttgctgttattttccaatcctggttagttcttgtaagctaaccccgcatccgataagctaatcctgtaaatggcgcaaggagcatcagctctggactgctcctgttgtagagaaaaaaaaatactacagcttagagttggggaaggagggcaatctggaaattcatccaaagctttgtggcgtaacttgattatatatgtacttttgtaaaacctaccagttgtggttcaaatccaccggctactaactaactagcctatgcaaaaccaaaacaaaaaaaagaggagtaacatgatcacaggatgtcacttgactgcacctactgcgtttctccctttgcttctgaactgctccctgttcttcctactcacctccattgaccgcccaaaggagtaaggccggaacgcaccgatgagaagggtgggaggcgccatcgccatgttgaggcttggctttgccttgtgcacgcccttcctcgggctactcgccaggtaagatttcacgtggccgaagattaggctcggcattttattctgcatagcggccgacgacgagatatagtcccggaaagctaggccgacctccatgctcttgagcatgtcgtcggtgatctccatgctcacccttggcggactcgtcatggtggacaacccaccaatattttccgcaaccaaaccttaatctgctaccagacagggtcagcaaagaacatgggtgtataaatgcacacccaataatttttgcgagttcgcgcccctccggcaagggggcgaggggcgaggggcgagggcggggcagatcgagcagctctggtgccacagtgagaacggcgcggcgagttcggagttccggcttgggagcgtagcggcgcggcgagccccggttgtccggcgtggggggtgcggaggatggggcgcgtggggcgtgggccgtgg

SEQ ID NO: 142766 - DNA, 286 bp, Zea mays
  Clone ID: MRT4577_61683C.1
atcaggcgcccgagtatcagcctccgtccttcagacacagaatcaggaaaggcgaggcgctcaccctcccacaatcacacggggagaggatgaaacacggtcattgacccagcagccattaggggctccgttcatgctccggcgacgacgacagccggcgtcatgatatgcctatgcgtggtgccatgctgtgccgcggcgtgccgaccctaaccttaccgactacatcatccagggccgcttgtacatgcacacctgccgcgccgggttcgtgaccaacatcacc

SEQ ID NO: 142767 - DNA, 873 bp, Zea mays
  Clone ID: MRT4577_61684C.1
cggacgcgtgggcggtctcgtggtcggccatggaggccgcaagcaatcaggagccggggagatgcggcggcgacgacgacgaggcgaagaggagggaggcagagcttgcgtcaagcaggctcctcgacccggggttcaagccctccaaactatcccaggaccggctcgacaagtttaaggaattacacaagaaacggttacagataactgaaaagccgaagtataaaagaaaaccgaaaggaaccactgagagaagtatcaaagtaaccagcaattataaattcactgataaggatgcatctgctgatagttctccaagagatgtgcatcatatgtcatcagttacaggaattcaaggggatcctgcatcaggcctgtcctcgaggaacaaaaggaaactacattgggggcttgacattaaagaacgatgggaaagaaaggcaaacatgtaaaaatatctgaagatccaacaacaaaagcatatccacaccgcactcatttgaaatttgaaagctgagggacaaaacaaagcggccgaccttttccacggatcatcatgttgctggtaaaggtttgtcagctagcagaactgatcagtaagctagtatctaatttttcagtgttttgtctaacgttttctccagacgtttggttgggactttgctctgttgtattgtccgatccaaacttgcaaagttcaagtgcgatgataatttgtttattgctgtgtgatatagtttgggtttgtttgtcctctttttgtgtgagaaaaggtactgatggtgcaacacaggcccatgtgcacaatggaacatagttgttgctgatgatactagtgtatatagaagattatttctcatatgcttctcgccc

SEQ ID NO: 142768 - DNA, 1808 bp, Zea mays
  unsure (1)..(1808): unsure at all n locations
  Clone ID: MRT4577_61685C.1
gttcttttctctttaagtgagagaatgtcgcattagtgaatggaaatagagattcattgccttttgatggtatgtcagatgcagagattgaacggagaatgaaggaagccaatgctcaagcattccatcaaacagcgactaactttgtcatgccagtagcccctgctcagaattttgtttcgtcttcagttgcaccattagcgccacctcttagcatgatgccgcctccattcagccagccagttgttcagccaggtttttcagatccactgcaaggttctccagctagagaagagggtgaagttcctgagtctgagttggatccagacacaaggagaaggcttctcatattgcagcatggtcaagacacaagagatcctacacctccacacccagcgataccaccagtgcaagttccagttcctccagtgcaacctcatgggaattggtttcccacagaggatgggataaacccaagtaacctgagtagaggttcagcaggtttcaccgttgaatccgattctatgccctatgagaaaaagcaaccacctcatccttcattctttcatggtggggatagtcctatgtcgtctgatagatttggctatcagaaccagaggtttccctctcagttaccgcacaccgaggatcaccacatgcttcagaaccatgcacctccaaaatacagatccttttctggtgaggagctagcaactcggcatgttccctcaagccaaagaaaccatatagaatcaggaagacacttttcacaatatgctgggacctctgccggcgtattagagggcattgctgtgaaatgtggatctaaggtggagtacaggtcaacattatgtgataccgcagaactacaattctctatcgaggtttggattgttggagaaaagtttggtgaaggaattggtaggacaaggagagaagcacagcgccaagctgcagaaatgtctttaagaaacttggccaataaatacttgtcatctgatccaaataagttgactgatatgaaacaagatgctttcggtagcaacagaaacatctttggttactctggaaatactagnggatgatatgttgccactttcaagtacttctgaggaatctcgctttatgaanatggaggagacaattccaggaaaacaggagattctgtcactgctctcaaagactttgcacagttgagggatataacttagtttttcaagcctgtccatctccagcagatggtttagttgggaaagaatcttatgctcagatacaaattggtaggcaaattctaggcaaaggagatgcaggaagtggcatatttgctgctaggggcgagactgaatgagatgaatctgccaatacttttgcaactcccattcggatgactccaaagaattatcaagtactacttatgcaggcgccgacgagctgatgtggtcgtgggatctaacacagcacgcggcgggcgagttctccttcgccatggtgcaggccaacgacatgttgtaggaccacaaccaggtggagacggttgttgccaccaccttcatcggtgtctacgacggccttaggggtgtcgaggcgtgctgcttcatctctaatcacctatgtgtacatactgtctgtatgtgcctctcttgctactcgctagcttgagagttgaattgtttgggttactggttattttttagagctgcatccttgcgctgttgcgattgtctacactctaaagtaaccacgagaaataggtttctttgttaaattgtaccactattttgtgaataagataaaacatcaactgctac

SEQ ID NO: 142769 - DNA, 195 bp, Zea mays
  Clone ID: MRT4577_61686C.1
atcctcgtgcgcggacgggcgcggggcaaaccgagggggacaattaagactgcacgccgggacgccaccaccgatggatcgagcccacagaagaaagatagtgcagcaaacccacacaaaagcgcaacctggcaccccaaacctcccacgagaagatggagcaacacaccccaacccactggaagccgacacaac

SEQ ID NO: 142770 - DNA, 158 bp, Zea mays
  Clone ID: MRT4577_61687C.1
tactacacaaattttgcggtgagagtagtttttccacatttaccggtatcaaactgaatttactaagaaccttatgcaatggccacaaaaagaattccatccttgttgttctggaacttcgttccattttgtttttcctttattaggagacaggaagc

SEQ ID NO: 142771 - DNA, 130 bp, Zea mays
  Clone ID: MRT4577_61688C.1
ccccaccggggggggccgctctacaatataggaataccccgcactccaagaattcaggacgaggggaacggagacagtaatggagcgtaactagccagctagagatccgagacaagaatgagtgatatgg

SEQ ID NO: 142772 - DNA, 345 bp, Zea mays
  Clone ID: MRT4577_61689C.1
ttgggaccctcgaggccggccgggaacactgccaccacgagggacggggagaaccctccttgcttctacttccaacttctatcgagcgtcgcttgctgacctcatgtcgcattccgttcgaccctccagcgcgagcgacaaagcagggaataaaggcaacatgttcactctagagcttccgcgtgcaaggagccccgatgtgaggaagggcccgacggacatccagtcgaagaaccggtaccacacgacgaagatgatgtacgacgacaaggacggcgacatcgcgctggggcgacctgaccaagctcgtcaagcacaacttcctgaccatgaccgccgtcccca

SEQ ID NO: 142773 - DNA, 916 bp, Zea mays
  Clone ID: MRT4577_6168C.1
ccggccgggaaactcctgctctcttccatggtggtgcccagctcctctcttccctctgcctcccgcgctcggatctcgcccttgctcgccttctcagctcgtccagcgagtcgtgcctaggccacgtggagctccttccctggtcgccgtctccgagcccgaccccaagctgctgtgcgtcctgctctatccccagttcgcgctccctccctgctccagattttttcatggccgccgctgtccccagccatctccctggtggccgacctcgcccctgccccagccacagctcccccttcggccctgctgctgcaagcactcagcctctcccatggcacacggtgctcgcccagcccctttctgctggtggctgagccatctccctggtgctcgacgaaatgaccatgaggagttttgtgttgtgtgcagccccacctgcgatactgtcgacctccgggaaagacgaagtccaaacacaacgcttgctaagtgttcgatgatttgtttgagccaagaatcttcgtcgatctggtggtttcgagtctggtttagttatggtacactagttgatcacgtgatgcggaaatcgagctgagtcgaccacgagatgttgttaagcgtgggcttcttcgcaaggagatactgatgataaacctgaagatggataatctgaacgagtgccaacacaaaaggctggtcaccaagtgatcgtcatctaacaacactaacttagtgtttatcccaggttataattttgttctgttgtggatggtgctaagtgccggtgggctcggccttcttataaaagtatatcccatctttagcttttttattgaggattgtcacttaagctagcatgtattttcaaattttcaaatattttataacatttcaaatttggaatttcttttgaatc

SEQ ID NO: 142774 - DNA, 611 bp, Zea mays
  Clone ID: MRT4577_61690C.1
cagaggacggcaggctaggagttgccaaaacaagcaattcaacgcttggttgttcaacacttcacctgtggataagggaccatgaaagatgggaagaaagaaggcccattgagcttcgtatgctgctcccagatgatgccctacgtgatcctcaattcccgcctgaattttttccagacaagccttggctggctggctttgcagggacaggagctggtgtcattttctttaagacacgtcttgggtattttgctgttgatctgaattcagggaggagcaagaacataggcgagtgcttaggttggggttgcattattccctatgtgagcttctgcattccagcgccaggagcaatatccacagatgagggaccagaagctggtctctagggctaggagctggcttgtgaagtgaataagaagctctaaatcaagaaggatatttactagaccagaagcatggtttgggtgggatatctctacatgattttgttgctgttctgaccttgtttgtgctcccgaacttgagtttgcaatcaaattatgataatggtattgactctcatatgaaagcatggcatatggaatttaatactgtgtatgactgtggac

SEQ ID NO: 142775 - DNA, 574 bp, Zea mays
  Clone ID: MRT4577_61691C.1
acccccacaattttttttttttttttttggggaaaattttttttttttcttttttgccccccccccggacttttttcctttggggggggaaagggacccccaacaaactggcaaaccaacaacaaaatcttttttatggggggggggcggcccgcaaaaaggcggacaggacaaaaaaacagggaaggatccctggggtggccccctgggaaaaaggctaggggatcttgaacccccaattttcggggaggaagccccggcatttgaacttgggggcccccttgccccgggaaacggggacccaatttttgcaggggggggcccactgggggaggagggccccgaaagcccaccccccccaccagggggggccccccccccaccaaaagtgttttttcggccctgcaaaccctttggccaggggggaaaaaaccaaaagggccgggaaaactaggaccgccaacaaagggcggcccttaatttaaaaaacctggggcttaaaagttgggggcccccccaaaggagaagaacccaagcttaaagtgggccaccccgggccgaattcccgcccccc

SEQ ID NO: 142776 - DNA, 355 bp, Zea mays
  unsure (1)..(355): unsure at all n locations
  Clone ID: MRT4577_61692C.1
gtacgctttaactgtacagacattactgccacaatgacctgtcgacaggtgcaagggttgttgggcgggcttagaaatcttctattcgcaagacttnccaagcctaggaaaaacagtcttcagtatccatcagatgatgaagatattgaagaaaaagctgacaaggtcatacctgatcgagttgaacaaattgagcttgcgaaaattacactccaaccaaagggaaggggaactaagcttctggtggatgatataacgtgctctcactggaaatggtgataatgggaccgatcactgtcattctgcaaaaaaaggtgattgtgtatggatgatccacaacgggaaaactttattg

SEQ ID NO: 142777 - DNA, 1064 bp, Zea mays
  Clone ID: MRT4577_61693C.1
cacctctcagaatcatcacactacagaacgtagttttccaaagatttcacattttgtagctggtagatacaaagtagcaatatctgaatctgaaagtctgaacccaaagctcatggatgatgtgtgtcacctgaacgcatgcagaccggcgcgctgctcctggacggcaacaccctcaactacttcggcaacagcatccccatcaacctggtggtggccgtgatcgcggaggtcatcctcgtcggcggcgccgagtactaccggatcaccaacggactggaccttgaggacaagctgcaccccggtgggcccttcgaccccctgggcctggccagcgaccccgaccaggccgccatcctcaaggtgaaggagatcaagaacggccggctggccatgttctccatgttcgccttcttcatccaggcctacgtcaccggcgaaggccccgtggagaacctcgccaagcacctcagcgaccccttcggcaacaacctgctcaccgtcatctccggcgccgccgagaggacgcctagcctgtaaggacggacgccacgccgccgagcaatgccaagtcatgcgctgctgcatgccgtctttgattttaccgggataaaaagctgtatgtgagggtctgaagaatgtgcaatgcccacgcgtgtaaattatcgagagggagaacaaaccttttcattctgattgttaaaaaaaaaaaaaaaaaaggcctacgtcaccggcgaaggccccgtcgagaacctcgccaagcacctcagcgaccccttcggcaacaacctgctcaccgtcatctccggcgccgccgagaggacgcccagcctgtgaggacgcgccacaagccggcagcgatgccaagtcatgcgctgctgccgtccttgattttaccggggaaagagctgtgtgtgagggtctgaagtgaagaacgtgccatgcccatgcgtgtacattatcgagagggggaagaaaccttctcattctgatctcagatatgactgctgcttcagattgcgcctgagatatgctaagtttttgaaagctaattagttcttgca

SEQ ID NO: 142778 - DNA, 293 bp, Zea mays
  Clone ID: MRT4577_61694C.1
cagaatgccttcttttttggcttgcttacttgcgggggaattcacaccttacttattacacttccccccgttattgccccaggtgtttatttatttaaagttctggggcaaggagaggaaatagcggcttgcttttttattatcacacgatgtggggcttactggctaacaggttcaaaaaaacgccagccccgttggggtacataattccgggtcaccaaggagcccactggcaaaaccccgattgcggggtccggcttgtccctgagaatcaccattttggagtgctccac

SEQ ID NO: 142779 - DNA, 711 bp, Zea mays
  Clone ID: MRT4577_61695C.1
atcgcatattacaaaactaaccctaaactccaatcaactgaataccctcatcatctactacggacgtgcatgatctgcatccttcaccgccgccatcacggctgtcttccgtcgctacctcggtcgacagaccctcgcgctgctgccacccacgccggctctatctgttgctccgcctgcgccacctctggcactgctctccccctcggcgcatcttggaccacgagctgtacatcaactcgttgccacggccagcgtaatggacttgttgaccgctggttgctagacatggccatactccgaagccgcaggctgcgttctacacagcacgttcatcaacaccgtagatctctctgatcacattgcaaataagtactgcattctgttattctaccccttggagttcacctctactagctcgagcgagattactgcgcttacgtgacagatacaatgaatttgccaaggtaaacactgaggttcttgctgattcctttgcaccaagcggtctcccaccttgcatgggggcacacaaacaggaagtccggcggtgtcggcgatcctaaatacactcttgcatcagatgtgtcctaatcaatttcaaaggcctttggtgctctgatcactgaccacggtattgctttgagaggactgttcatcattgacaagtagggagtgcttcaacactctaccattaacaaccttgccatt

SEQ ID NO: 142780 - DNA, 1042 bp, Zea mays
  Clone ID: MRT4577_61696C.1
cccacgcgtccgcccacgcgtccgcggacgcgtggggtaccgctgggccttggcacatctgcaagtacacgcgtctccaatgagctcggcgcagggcagcctgaagcagcaaggctagcagcgcgagttgtggtctgcatgaccttgtgtggaggggtggtgttggcaaccatcatgattctcctgcgcaacatctggggatacgcatacagcagcgaggaggatgtggtggcatacattgccagaatgcttcccatccttgctgtttccttcttcgtcgacggccttaacggcttggtaatcataggatgtggcaaacagaagattggagcacgcgtaaacctcggcgccttttacatggttggcattccaacagggctgttgcttgcgtttgtgttcaacctaaatggaatgggtctttggcttggcattgtgtgcgggagcatcagcaaactggcgttgctcctgtggattgcactgcgcatagattgggagagcgaagctatcaaggccaaggacagggtcctccgttcgtcagggcaaacataatgatgagggtctcctacctttgtcgcataaacatatgtcatttgtcagggatatttagtggtaaggatccgtttggcattgctgaaccacccaatctcagtctgagtacgttctacttcaaagccttcatcatgaagttagagaaggaaaaaaaaaggcgtgcaactttgacgttaactccagctactgccggtcctgcatttaagggcatgcgtgtatttttatactgtgttccagcaagtgtgtgtattttttatataccatctaatttttgttgtctgctattttacttttaaactataacacgataaataaaaaagaatggagagagtatatatgatctagctaaaaaaaaaaaaaaaaaagcggccttgttcggttattaattgtcctattccatatgtattagatgggattggaaaaaattatgaataatgttcacttgtttggattataaacaaactcaatcttgttcaatccatatggattgaga

SEQ ID NO: 142781 - DNA, 265 bp, Zea mays
  Clone ID: MRT4577_61697C.1
gacatacggttttttaccagagcgagcgcgggggattttctatgactctcacaaaacaatggcccaaggcctgatcccgtgacgacacactcatagtagcacacatagctctactgatatgtaactacccgatcgcggggcacccattttcgtacggcaaggcgtatgcttggctggcgtccatctgcgggctcagccgcacatcgaatcatggcatctgttctgggaatgtatcgtacaatccccacatacaccgagctaaggt

SEQ ID NO: 142782 - DNA, 332 bp, Zea mays
  Clone ID: MRT4577_61698C.1
aaaaaagaaatagggcccgggcattaaaattctttaccctatatcaaaatactccacaggtttttttactttatatcttaactctttatcaacccccacatattatattatttattttcaattatattcaaaccaccggggctttttcctagggtttcccgggggaaaggggggcccctcgaaataccggttccgggggccacggggaatttttaggaacatatacataacgtcccgggggttttggggaaaaaatgaatcttttcagcacctgggttcccatggggcattgggggggttaaaagaccggtggggcggcagggcctttgggg

SEQ ID NO: 142783 - DNA, 369 bp, Zea mays
  Clone ID: MRT4577_61699C.1
cacgggcatgagaacaggtaacacttttttttttttaggggaaagacccaaatgatgagggcttattaaggctttacttacaaaggccaaagggggctctgactgactgatgaaggaccgcacaaataccttctctctccctctctctataggtatctctatccctctctctgtcactgggttctttttttttgggcgtaataaggcattgtatcagtcagtcaatggctttaagaacctttcttcttcttatcgggtggggaatacttattatctactgaaggaccaaattaagagtcacactatgccatcattattatctgccttttccaatgcaagcgacggcagcaataattttggccccaagtt

SEQ ID NO: 142784 - DNA, 379 bp, Zea mays
  Clone ID: MRT4577_6169C.1
tcctctagagcgggcgccctcttttttttttttttaaatcaaatagtgaaaggctgtcaaacagatgggacttaatgatacagggggaaagccctctcttagggggaagaacaaaagcggaacacatcaatgcgttaacataaggagatagggggaacaaacaataagaggacataaggagagctgaatgaacagcatccccactcaatggaatgcccagggccatggaactatttctactggtacacgacttactcagcctcctggcaaccggtcgtggggggattactgattgtagaaggccaagaatgaagcaacggcgggccccagggcgggggctacagtggacacgacagtagttgagcccatggcgggggcc

SEQ ID NO: 142785 - DNA, 275 bp, Zea mays
  Clone ID: MRT4577_616C.1
aaatagggaaacttgcaaacagaaactccttggtgttcaaaatttttcctgtgtggggaagggaattgccacgggtcaatttgggaacttcatcctttctcaatcactatttttaccggtgcgtgggtggtcgccaccccgtgaccagaggaaattcaaacacttgccatgaagagtgacttccacgcgaacagataggtgtggtgtattatttgggttctctgctctggtgggtgcccttgccccatggtgacctcaaggttggcgccctcatg

SEQ ID NO: 142786 - DNA, 318 bp, Zea mays
  Clone ID: MRT4577_61700C.1
gctcggaattcggctcgagcgcgcctccatgctccagtttattattcctagcgcctccttcagaaccggggtgcttcatgccgccaagacatcgaaggaccgccatgacgctcaacgtccgcagtacgcagctggacgctatcgagcggatgctgtacctgaaccagcgggcggtgccgaactgctggaacgaacagcgcgaggaccatgaccacacgatcctggttataggctcccccctgaatcttcagactatagcctgtgctaaagctaggcagagcgcgtacccatggtggtacccttaccctggccagctat

SEQ ID NO: 142787 - DNA, 440 bp, Zea mays
  Clone ID: MRT4577_61701C.1
ggtggggtgggttttttttttttttttttcgtttttttttttttttttttttttttttttttttttttttttttttttcggggggccccctttcccggttcccctgaatcaccccttctttaacaccccctgggggggggacaccaagcggcggggggggggcctttcaaaacccccccccgcccgattgtttccctgggagccggtgaaaaaagggtggccttgcaccttgccccattcgccgtgcccaatcccttctgccttggccttttgcttctggggctcccttggcccttctgcccctccccaccccccccggggtaattgggccctcccccttggcttccgccctccgggtcatctccgccccccccccacccggtggccccccccccgctttttcctcccctggggggccccggcgggtggtttgaccccct

SEQ ID NO: 142788 - DNA, 603 bp, Zea mays
  Clone ID: MRT4577_61702C.1
gaggtggtcatgaccatgtcttggaccaggaaaaagatcacccatcccatgccacaatttcgaatacgcaattcaagaattttaccgtcagaaaacgatgaatgatcacaatagctagccctatacactgtgacgccgagactactcacaaatttacaaggttaaagttagctacacctgcaccgcaatcgaaccacgcacgacgcatgtgtatcatgtcatgaccctccgcctccaccggccggcgcgcgccgcgccaccgcgtcttctctctgctgctcgtctcttatggcctcgatcatcgcgaccacgcgctgcaggacggcctcctgatcgtcgttgtcgtcgtcgaaggcggtcaacgcatcggcgcccctgtcgcggtcggcggcgtagaggctggccacggcgcagcggcacacggggcaggagttgcggacgtcgagccagcggtcgatgcagggcgcgtggtagaggtggccgcacgcggggacgaccctgacgccgtcgtcttcgccgaaggcgtcgaggcagatggggcagtcctctggcaggcccttcttcctggcggccgcggccgcgtacggcagcacgggcggcagc

SEQ ID NO: 142789 - DNA, 616 bp, Zea mays
  Clone ID: MRT4577_61703C.1
ggtaccggcgcccttcctcgagttttttttttttttttttttttttttttttttttttttttttttttttttttttttttttttttttttttcggaaaaaaaaacgggttaaccgcgggggcgggaaaaacattggatacataataccgggggaattaccccccagtgggggggggacccaaacaaaagcatttgggggtttgtttttgggtgggggggcccccatggggggggggctttaagggcccttcccccccccgttgggaaaaggccggggcgcccccttggaaaaattcctccagggagaagctgttggaagaacccaaacccccagtatttagttatatattggccaaaccgaaaattacaccaggggcgaaaaaaagccgccgttgccctcgtggtggaacctccaccggttggacccaaacgtgttgggtccccggttgctttttttccatgattggacaacgggggcccctccgccgccgtatttaaccagtgggaccgcctgggcctaagggggaatttgttccccccggacaagttggggcaggacctttttattggacggcctccccggggggctttttcccgggcaaagacccccgggggg

SEQ ID NO: 142790 - DNA, 1590 bp, Zea mays
  Clone ID: MRT4577_61704C.1
aatcgaatcccgtgaagttcttcctgctggaagcccatgaatcggagcccaaaacaaatgcgtgtgtactgatgagcccagccgaaagcatacagattctcctactcatttccctctcacttccaccagccatcaggaaaactcgtacgaaacacttttctctttctaggagcctggaacaaatctccaagggttcccatgtcttgttccacatcctcagccttggttctatccatctccctcaccggaaaacaccatcaccatttggggcatcactggacctagacgtaacacgtcgcaattcaccaagcacctccaagaaatcatctggcggggggcacgagaactcaaggacctttcctgaacgtgggtgcttgaatccaagcgatgcagcatgaaggcaaggcctgtccactttagacaacagattcgaaaggccactgtgatatttcgaaggactccttggtctcaggagcgataacgccatgctctgggtacctccatatgtttcgtcgccgagaagagggatccctatgtactttgcatgcgcccggatctgatgagtgcgtcctgtctctagtctccactcaactagtgcggatccgccaccagcaaagacctctcttactttgtacctactagcagcattccgtgcatatctgtggcctgatccagcaatagcagtcatacgaatccgattgttaggatcacgtgcaatagaagcctcaatcctgccagaatttggattaggtgcgccacaagtaagactgatgtataccctacggattgtatgcagcttgaactgttctgctaatcgagcatgagaatgctcatccttagcaacaacaagaagcccacttgtccccttatccagcctgtgcacaataccagggcgcacaagagcattccggacttctgaacttacatcttcagcagcaaactgatccacatgaaatacatcagtgtcttcatccgtagaatccgggcattcatcaccagctgagctgcgtgctaaacaggtaaatgtggagatcttgcagtgatgaagtatagcattgactaatgtgcctttggcatttcctggcgccgggtgaacaaccatatgagccggcttgttgacaacaagaacatggtcatcctcataaacgatgtccagcgggatgtcctccgcctctgccctcagcggctgtagctctgacaccgtgcagctgaccaagtcccctcccttcacagtatgcgaaaccttggagaccgggcggccattgacggcgacaagcccggcccggatgctggcctgcacgcgcgcgcggctaacgcccccgccgccgagacgcgccgatatccaggcgtctaccctcgagcgcccctcgccgacgggcacggcttcctccaggcgcgtcccgccgtggcctcccttccggctctccgccgcctccgcgctcgcgttggaggaggcgcacctcgcgtagaaggctctaggcctgctgctacggatgttctggcagcgcatgaggcccgagagggtggtggcaaccgccgccggcggtggcgccgtcgcagctgccattgatctgcggaagggggtggact

SEQ ID NO: 142791 - DNA, 336 bp, Zea mays
  Clone ID: MRT4577_61705C.1
ttgcaccccttaatggtggggtacgggtttttatttgagcgctaccctttcttcaacacggccagggaggaagggacggacgaggggctcagggacgacttcggcgcctggtcgcggtctggcgaggccgctgacactgtctgcgacactgcgggggaaagcctgaccgatagcgtcacacctccagggaaggacctgcttaaggacttgcttgaggaggtcgaggacgaggacagcatccatagcctcatgcttggggtgcttgacaacaggtttgtaatcagctgctcagggatacaggcgggcaaacacgtgcgccacagcttgcaccgcaag

SEQ ID NO: 142792 - DNA, 776 bp, Zea mays
  unsure (1)..(776): unsure at all n locations
  Clone ID: MRT4577_61706C.1
ctcgaggccggccgggatctattatattcgctcccgagctacacacagtcagctctcacatctcaatccgaaccagtctcaagcacaaaggaaaccacttttcaactcgaccacaacttcgcaactatgtcttccttcaccgaaaagctctccgccttcgctgaaagtatcgcttacccgaataaggatacgcatgcgggacacctcgaacacgacgctgcccacggtgccgctttagtagagcacgaaccggcaactggagtctgggatcgactacacggtgagaacaccgcccgtcagatcaggagtcagggagactgcggtgttggaatggaggatggtcttcaacgaaaagcgatccgacagcaagagcaagtagctgaacgatcacgcctagctcgtgagggtcttttcgaaccccacatgaaacacgaagaaatgacaaacctcaccgaagagcaccgcgacgtcgcctctggatctcaagtctttggaggaccggaagaagcgaaagctgcgatcgccgaatccctcaaggacggaggaatcggaaagcaagtcctcgagaaccaaaagatgaactcgagcgctttctaaactcccttgtcttccttccctactttttcgttcgcacttgcacaactttgtctctcgcttctcttctctcgtacatagcaaacagtagtaccaataagtatcaacagcaaatctccttcttgcaacaactgacgaaacaaattcagtatccaattcaaaaaaaanaaaaaaaagcggcc

SEQ ID NO: 142793 - DNA, 1232 bp, Zea mays
  unsure (1)..(1232): unsure at all n locations
  Clone ID: MRT4577_61707C.1
atgcatacacatacgggacggcaagatccacattgttggtgtcttcacggaattcagcggcactgagtttacaaacttccttgaggttgctgagaagctgaggtctgattatgactttggccccaccgtgcatgccaaccatctcccacgtggtgatgccgcagtggagaggccattggttaggctattcaagccatttgatgagctcgttgttgacagcaaggattttgatgttcctgctttggagaaattcattgaggctagcagcaccccgaaagttgttacttttgacaagaaccctgacaaccatccttacctcttgaaattcttccagagcagtgctcccaaggccatgctctttttgaacttctccactggaccgtttgagtccttcaagaaagcctactatggtgctgtaaaggagttcagcggcaaggatgtcaagttcctaattggtgacattgaagcgagccaaggcgctttccagtacttcgggctgaaagaggatcaggcaccacttatcctcattcaagacagtgactcgaagaagtttttgaaggaacaggttgaggctggccaaattgttgcttggttgaaggattacttcgatggcaaattgacaccattcaggaagtccgagcctattcctgaggccaacaatgagcctgttaaggtagttgtggctgacaacgttcacgacgtggtcttcaaatctggcaaaaatgttcttattgaattctatgcgccctggtgcggacactgcaagaagctagcacccatcctcgacgaggcagctgccacccttcaaagcgaagaggacgttgtgatcgcgaagatggacgcgaccgcgaatgacgtgcccagtgagttcgatgtccagggttaccccaccctctacttcgtcactcccagcggaaagaaggtctcctacgagggcggcaggacggccgatgagattgtcgactacatcaagaagaacaaggagactgccgggcaggcggcgaccgagaaggcggcggaaccggctgccacggagcctctgaaggacgagctctgagcatcagtgttgctagcacagacaggtaaggggagggggaaaaatatggttttggcaaggcagcttccaacgccagattttgcngagggggttaaagacgagagntgggttggttggatgtgtttgtcccccggttttgcctgatactgtatcccgttgcgagaaaactgtaaca

SEQ ID NO: 142794 - DNA, 407 bp, Zea mays
  Clone ID: MRT4577_61708C.1
gaaaaccgggaaagggaaccccttatttcgggggggccccctccctcacccaaaaaactttattttgggattccacccaataagccatccaaaagggggccccccccaagatgggttggggggagggggcccctgggtctgccaaagcaagggggacaaagggcaacaattgggggagttgaaaaagggggggggggttagccccaaaccgcggggaaaaaggcagcaaccggggctgggtcaaaaaggaagcacgggttgccgcacctagccggctaaaagggagaagaatttgctgccgcaaaaaaacagggggggtcagggcggccaattggttaaaaggaaaaagttgttgttgctgaaagaaggcaatacccagccggctaaaggggaatagggggggccgc

SEQ ID NO: 142795 - DNA, 390 bp, Zea mays
  Clone ID: MRT4577_61709C.1
aaacaaaaatttggtaaaaatttttttttcccaaaggccgcataaaaaaacaggggaactaagcagccttttttacaggaggggggggtgcattaaaatcacttttttccaggaggatccccataatttttttgccccgaaaaaacaatttgggcaaaccaagaagcaagaaaggcttcctgggggcgccacattgcccaaatgaaggcagaattttgatcagggggcgagcggggcgaataaatcggcgttgggcatggataaatcggggccatcgacacgggtgcgcacaatgggggggaacaccttgggcagaagcctttccaggggttccaggccgtcccttatggtttcacacacgggagggagctccggggaagcctcccgcac

SEQ ID NO: 142796 - DNA, 369 bp, Zea mays
  Clone ID: MRT4577_6170C.1
tcgaccgcacgcgtccggtgacctgcaaacttcaaatgctcaatagtccagtttctccagtactcgttcttctggacgacaaatgatgacagttgcgatgcacaaaaagatggggcttttgggggttaacttatgagtgatgacgcttgctgatggaactcaatacagccaactagctatacgcgatccgcgcagaaatttgattggtagtcgctgattaacatggcattattttgatatcactttttgtgtgataagattattctcatctagattttaagtatgcaatagatggttaagggtccgtatgtatgattgaatctatgggttcgaagtaatttttaggctttggatactgaactcttgttt

SEQ ID NO: 142797 - DNA, 377 bp, Zea mays
  Clone ID: MRT4577_61710C.1
agttgccgacgtcggattctgggtcatgaacctcgaattcgcgcgattctgaccttggtcaatgtctatcatgcctcacaagtcgaaccatcaggactgggagatgatgttagtgctggcgaagctgtctgacaaagagcgcttcatggtgtcagaccacgaccggctggcgaagctgaacgggtcgaagcaacggaggatggggcagctcgcgatcgactccgacatcttcaacgtgaaaccgatctttcacgtcgtcgacgtgacgaagtccgcaggcgagacgctggcgtatgacatgttctgcatcagcggcctaagaatttcactcagcgacatcggcatgggcacccgatgtgacgtcaacatggatccct

SEQ ID NO: 142798 - DNA, 433 bp, Zea mays
  unsure (1)..(433): unsure at all n locations
  Clone ID: MRT4577_61711C.1
ttttgggttttttttttttttggagacacttttgtcggggtattcacgttctaaaatgagtacattactcaggtatcacggggcgctgaccaggtctgacaacaatgctataacttgtgtgctgaaatcggttgcaccataatctccaccagtcctacacctgggggtgggaccatcacgaaattaacccctccctattttcatcatgtttctataccggtcatccggctgacgactctaggtcacccancctacacagtactgcccgactgacaagaccactaccggggagctaaccgcagcaaagtcaaaacctctactagggtttgctgactcatgttctccactttgttctatgacgcatccataggggaatatagtgcattactccctcagcttatgatgtcccctaatcctccaccccatagtgggt

SEQ ID NO: 142799 - DNA, 265 bp, Zea mays
  Clone ID: MRT4577_61712C.1
gtgaacatccaatcttatatgccttttctgctatcagcagcaccagaatgcctaccacgataattattacatgccggggtggcctctactaacactcacaaccctttctcttaaacatctatgtatacaaatgtacgctaattgctcattatatcacatttcttgttataccacccatggcgctagccaacaccatctcatataacctctcgaacatgctcccattcccagtttgttcttctaaaaacactaacaccgaccaccc

SEQ ID NO: 142800 - DNA, 446 bp, Zea mays
  Clone ID: MRT4577_61713C.1
ggtgtgtgttctttatttttaacatttttatttttcccaggaacagggttgcagcatgatacgaacaccaaaatgactggatatgacctggttggggggggggcggtgcctaaaaaacgggaacaaggttatgcgaagaacccccgggaacatttgggtgtgccttcgaaaagcccatgaacttcgaacagaacccacaagccccggaagaggatacacacaggggttttgatgaactcacataccgaacaggaaccagacctgccatctttgcatgccttggagggctccttttcttcacataataaaaaccatcgaccaagggattcaagctccacttcttctgccgaaataaacttagatgaggtcaccctctgctgggaatcatacaaagcttccccagcactgagggataccaggaacggggggcttcaaacccgggcggg

SEQ ID NO: 142801 - DNA, 249 bp, Zea mays
  Clone ID: MRT4577_61714C.1
aacaaaacagatgtggaacaagaagagagagcatgaagagcagcgtgaggcgaccagagaggagcgagtctatacttggagggatcagcttgaatcactgtatagatagaacggctacgactaaccaatctctgaaaactgaatactgaacatcggatcaaatctaatgtgcataatccactacagcgacactgactgtaatgtctacattgactgatcatctcatagcggccttgaatctgaccagat

SEQ ID NO: 142802 - DNA, 1078 bp, Zea mays
  unsure (1)..(1078): unsure at all n locations
  Clone ID: MRT4577_61715C.1
ctgcagtaccgntccttnttcccggggggagcgcctcgtcctccttattctcctccattcccccctactgtctccttttttctcttctgcacactccggcgggatcaaatccgattgagggggcgagaaaaaccccttaaagatgaaaacaaacacaatgaatattaaaaaaacacgtagaacccatacctgagactaacactaagaagcaaggagcgaagcagactcgacagcgggcccatcccaagttcccaacccacacgaagctgcagcagcaggcagccgcctcgccacgcgcccgagcaacgccgccgagagagccgcccgcccgcccgccggtgagcagcgagggcaattcgtcttcggctggtccccgtcccgctcccgcccgccaaccccaattgctcccctctcggaggtcagctcaattcctgctgtttctcggattcgattcggttgcaccgggcgcgtcgtctccctcgccggagatccagcaggtacgagctcgcctggggccgaggatcatgcccccattgctctagggtttgggtgggtaatccaattggctcgccaggcccgcggcctctatgcttgattcgggcctgccgcgccgctccctgggatctcgcggcggttggtgcggcgccagcggtgatgagatcccctccatggccggcgagctgggaattggggtacgggctcgctctctgcaggaagcggcgcaagccctaatggtttgatcctagctgggtgcggcgtgctatccccaattcattggtttctttactccgggtctgatattggggtttgctgcggtggtaactgcatggacacagtaagggaggaggcatggccagtggctgcaccgcggcagcagccatcagctccccaaccgcagcagcaacagcagaatggccgtattgatctcagggagctcaaagctcagatggagaagcggcttggtccggatcgctcgcggcgatattttggctacttgaatggctacttatcagagaggctcggcaggcaagactttggaaagctgtgcctgcataccctggggcgggagaacttcact

SEQ ID NO: 142803 - DNA, 663 bp, Zea mays
  Clone ID: MRT4577_61716C.1
acagggattaacccaaacctgagtttaacacgaagaagcgaggagcaaattcggcacgaggcgagcgagcccatcccaacccacgaagcagcagcagcagcagcaggcagccgcctcgccacgcgcccgagcaacgccgccgagagagcaacccgcccgccggtgggcagtgagggcaattcgtcttcggctggtccccgtcccgctcccgcccgccaaccccaattgctcccctcccgaggtcagctcaattcctgctgtttctcggattcgattcggttccgccgggcgcgccatctccctcgccggagatccagcagttacgagctcgccggggcccgggatcatgcctccattgctctagggtttgggcgggtaatccaattggctcgcctggcccgcggcttccatgctcgattcaggcctgccgcgccgctccctgggcggctccttgatcccgcggcggttggtgtggcgccagcggagatgagatcccctccatggccggcgagctgggaattcgggtacggcctcgcgctctgcaggaagcggcgcaagccctaatggtttgatcctacggcgtgctatccccaattcgttggtttctctactccgggtctgatatcggggtttgctgccgtggtaattgcatggacacagtaa

SEQ ID NO: 142804 - DNA, 844 bp, Zea mays
  Clone ID: MRT4577_61717C.1
gcccccctatgctcttaaccttggtcttcaccctcagcttcatttccagctgcgcgaaacagagcacctaaaccctaacttaccatcggtattcggatccgatctaatcacaagtatcgaccgagatatggacggcctgtggcatctgggggacgagctccgcgggcagcccaaggtggtggaggaccgccagtggtcgctcatgacgtccaagctggcagagatcaccaggtccaggggcgagaggacgaacgacctcgactacgccaggatgaacgccgcccccgacgccaagcggtggggcaaggcggcgtcctaccagcaccatgacgagggcaggatggaccaccacgtcggcctcagcctcaagatgaacgatctcaagatgaacgaggccgccgctgccgccgtcatgaagctccccttccgcggcgtgccctacaacgtcaacccgatgtaccccaaggggagcaacgccaacgccaatgtcaacgcgttcaagatgaatgtcggggtgaacaagtactccagcagcgcgaacgggaaagacgccggcgggaaaagcagtggcggtggcagcaacaacaacagcggcggcggaggcaacggcaatgggaccgccaacggcagttccgcggtcgacaagcgcttcaagacgttgccgacgagcgagatgctgccaaagaacgaagtccttggtgggtacatctttgtctgcaacaacgataccatgcaggaggaccctcagaggcagctttttggattgccagcaagatatcgtgattcagtccggggcattactcctggcctgcctcttttcctctataactacacactcaccagc

SEQ ID NO: 142805 - DNA, 281 bp, Zea mays
  Clone ID: MRT4577_61718C.1
gtgaacagtacgggagcactgttcatttttttataggcacgggacgcagcccatgtaaaattacacccatgccctttacattcgcaaataactctatagtaattcatcaaggtctaaatagccttttcatctttaagccggtttccttttctgctatcatggcgaagctctcctgctcacagcttcggcgctgcatcaaccttcgtattctttgggcttctcccactggggtactgattcaaatccgaaaatactttggaaaaaaatctcaggggatcatt

SEQ ID NO: 142806 - DNA, 288 bp, Zea mays
  Clone ID: MRT4577_61719C.1
gaagaacacggttttggtgaggcatcagttttgggaacacgaactgaactagcacttggtcgtcttgcatgccactcaatcgctggaataaataaactcgtttacaacttaccttggcaactttgggctaggaaaagtaatccggcgtgcgccttgagattcatgcggactcgtgagcaaaaaccaagctactagcacgattaccagccggccaacagccggagttactgcatcctggcctgggaccgccaatttcaataacactgctacgccaaacgcttgaggact

SEQ ID NO: 142807 - DNA, 209 bp, Zea mays
  Clone ID: MRT4577_6171C.1
taagcctggatcctctagattggccgaccgtgtttttttttttttttttctttcattaaatcgctcattcaggtattgctacactgacactgccacccatggtgaagcgtgacacattattactcgatcctcgccggtaaatgactcatctagctagctagtcagcgggtattttttataacatgggttcttaagcgggggacaccgcc

SEQ ID NO: 142808 - DNA, 1249 bp, Zea mays
  Clone ID: MRT4577_61720C.1
tgggaccctcgaggccggcctccccttcttcatctctccccgactccccctctccctctcgtggccacgactgccgccgctgccgccctacgccaggtgtccaggtcatctccggcccattcgccggcgacgagcaccccactaggtacgcccaccgcatgctcttaaccttggtcttcaccctcagcttcatttccagctgcgcgaaaccgagcacctaaaccctaacttaccatcggtattcggatccgatctaatcacaagtgtatgtgcatgtattgtgccttctactcgctccgattgctcttgaaaaatcatcgggtgtacatgtctacgcccgtgcccttcaccgagtccagctcggccgggggatctgttctcaagatgcgaaaagagcgtcttttcccccctatgatccatccatccccttgtagtataagcctataggaataggatcttgtcatctcttcactgacctcaggcgtgttaatctcggttctttctttctcttgcgacggggtaccagatcgaccgagctatggacggcctgtggcatctgggggacgagctccgcgggcagcccaaggtggtggaggaccgccagtggtcgctcatgacgtccaagctggcagagatcaccaggtccaggggcgagaggacgaacgatctcgactacgccaggatgaacgccgcccccgacgccaagcagtggggcaaggcggcgtcctaccagcaccacgacgagggcaggatggaccaccacgtcggccttagcctcaagatgaacgatctcaagatgaacgaggctgccgctgccgccgtcatgaagctccccttccgcggcattccctacaatgtcaacccgatgtaccccgaggggagcaacgccaacactaatgtcaacgcgttcaagatgaatgtcggggtgaacaagtactccagcagcgcgaacgggaaagacgccggcgggaaaaacagtggcggcggcagcaacaacaacaacggcggcggaggcaacggcaatgggactgccaacggcagttccgcggtcgacaagcgcttcaagacgttgccgacgagcgagatgctgccgaagaacgaagtccttggtgggtacatctttgtctgcaacaacgataccatgcaggaggacctcaagaggcagcctttttggattgccagcacgatatcgtgattcagtccgggcaattactcctggcctgcctcttttcctctataactacccact

SEQ ID NO: 142809 - DNA, 2589 bp, Zea mays
  Clone ID: MRT4577_61721C.1
acactcaaacactccagaaacgtcatagttgagagacagactttgagttgcaggtagtggaactgtggaagtagaactagcacgtatctttttgagatctctatctttttcagggcaaggaaatgaggtttgcaatggcgaacaaggcatacatggcggtgactctgggcgcggccatggagctcaaggagcaggtggccaagccgtgctcggcggcggcgaagcggggcctgccggtggtggctgtccggtcgtcggccgtcaaggtcgatggcgtctcggttgccgccgaggagtcgctgaggatggtcatgtacctcagctgctggggcccatgttaggctaggttgacaagctgtaaatacatgacttttcttttgacacgggtgaatacatgatctggagttctggccgaaaaaaaaaaaaaaaaaaaaaaaaaaaaaccctctctgaccggtggactccgtgtgggcggagcgaagtgggagccaacgccaagccagccgagcggactcctctcctcctcgcagcagttcgcgattcgcccccaaatccagcgccctccccgccggaatccggcgccgaatcttgcacattggctcgaggccggccccggccgggataaccaacccttttgataaagaaacgggcctacacgggacacctgcctcctccccttctcccatctctccccgactccccctctccctctcgtggccacgactgccgccgctgccgccctacgccaggtgtccaggtcatctccggcccattcgccggcgacgagcaccccactagatcgaccgagctatggacggcctgtggcatctgggggacgagctccgcgggcagcccaaggtggtggaggaccgccagtggtcgctcatgacatccaagctggcagagatcaccaggtccaggggcgagaggacgaacgacctcgactacgccaggatgaacgccgcccccgacgccaagcagtggggcaaggcggcgtcctaccagcaccacgacgagggcaggatggaccaccacgtcggcctcagcctcaagatgaacgatctcaagatgaacgaggccgccgctgccgcagtcatgaagctccccttccgcggcgtgccctacaacgtcaacccgatgtaccccaaggggagcaacgccaacgccaatgtcaacgcgttcaagatgaatgtcggggtgaacaagtactccagcagcacgaacgggaaagactccggcgggaaaagcagtggcggcagcaacaacaacagcggcggcggaggcaacggcaatgggaccgccaacggcagttccgcagttgacaagcgcttcaagacgttgccgacgagcgagatgctgccgaagaacgaagtccttggtgggtacatctttgtctgcaacaacgataccatgcaggaggacctcaagaggcagctttttggattgccagcacgatatcgtgattcagtccgggcaattactcctggcctgcctcttttcctctataactacaccactcaccagcttcatggggtatttgaggctgccagttttggtgggtctaatatcgatcccactgcatgggaggataagaagtgtaaaggtgaatctagattcccagcgcaggtgaggatccgcgttaggaagctgtgcaagccgttggaagaggattccttcaggccagttttgcaccactatgatggcccaaagtttcgcctcgagctctccatcgcggagaccctgtccctgctagacctatgcgagaaggaaggcatctgagctgttggctgcctcgtgaggttctagtaaatatcaatcatccttgtatgttctgtagatggtggttggcaatgttgtttatttttcaagcgcaagctgctgccggtctcgttttccctgtcctggatggaagcaaagggacctggtactttgaaggccccccctcaaacataagctgtgagcctgtcagtgcacgtgtccgccgttgtcgtcaagaaccaaaccaaatcatgaaatcttgcgccgacggagagttggagcgtgtatgttttgctatctctatctacatgtctcagtagagtggatataccctggggtccccaaaagatgggggcctgtatgtaacactacgtgtaatggttaaggtgaatgtgccgtgaggccccccaaaagttggagtgtgtatttttgttgtcaccttgaaccgactttgcgtatgcttttttttagtgctgctaccttctgcgctgtgtttggcttctggttcatgtttttgtaatataaggtggcttgcgcaaaaaaaaaaaaaaaaaaaaaaaacattgtgtctgtctgtccaaccgcaggatctggatgggtttcggcaggtgcaccaaccagacagacttggtatggatggtgaatggttgcatctgttcaaccgctgtcggtcagtgacaggccaagtactagcagatttggttcagctgcttgctggtgagagcaaagtactagcagctttgaagtcgactagagggccttctaggtgttcaagcaataatgcattcgtataacccataataatgaaatggtagcagcctgtcaacattc

SEQ ID NO: 142810 - DNA, 1673 bp, Zea mays
  Clone ID: MRT4577_61722C.1
aacctgcctcctccccttctcccatctctccccctctccctctcgtggccacgactgccgctgccgccctacgccaggtgtccaggtcatctccggcccattcgccggcgacgagcaccccactagatcgaccgagatatggacggcctgtggcatctgggggacgagctccgcgggcagcccaaggtggtggaggaccgccagtggtcgctcatgacgtccaagctggcagagatcaccaggtccaggggcgagaggatgaacgatctcgactacgccaggatgaacgccgcccccgacgccaagcagtggggcaaggcggcgtcctaccagcacacgacgagggcaggatggaccaccacgtcggccttagcctcaagatgaacgatctcaagatgaacgaggctgccgctgccgccgtcatgaagctccccttccgcggcattccctacaatgtcaacccgatgtaccccaaggggagcaacgccaacactaatgtcaacgcgttcaagatgaatgtcggggtgaacaagtactccagcagcgcgaacgggaaagacgccggcgggaaaaacagtggcggcggcagcaacaacaacaacggcggcggaggcaacggcaatgggactgccaacggcagttccgcggtcgacaagcgctttcagacgttgccgacgagcgagatgctgccgaagcacgtcctccttgggcaggtacatcttatctgcaacgcagttaccatggtggaacaaacgcttcaacaggttgccgacgagcgagcacgtgccgaagaacgaagtccttggtgggtacatctttgtctgcaacaacgataccatgcaggaggacctcaagaggcagctttttgatctgttactcttctgcaggattgccagcaagatatcgtgattcagtccgggcaattactcctggcctgcctcttttcctctataactacaccactcaccagcttcatggggtatttgaggctgccagtttcggtgggtctaatatcgatcccactgcatgggaggataagaggtgtggccgtgaatctagattcccagcgcaggtgaggatccgcgttaggaagctctgcaagccgttggaagaggattccttcaggccagttttgcaccactatgatggcccaaagtttcgccttgagctctccatcgcggagaccctgtccctgctagacctatgcgagaaggaaggcatctgagctgttggctgcctcgtgaggttctagtaaatatcaatcatccttgtatgttctgtggatggtggttggcaatgttgtttatttttcaagcgcaagctgctgccggtctcgttttccctgtcctggatggaagcaaagggacctggtactttgaaggccccccctcaaacataagctgtgagcctgtcagtgcacgtgtccgccgttgtcgtcaagaaccaaaccaaatcatgaaatcttgcgccgacggagagttggagcgtgtatgttttgctatctctatctacatgtctcagtagagtggatataccctggggtccccaaaagatgggggcctgtatgtaacactacgtgtaatggttaaggtgaatgtgccgtgaggccccccaaaagttggagtgtgtattttttgttggcaaaaaaaaaaaaaaaaaagcggcctagggcc

SEQ ID NO: 142811 - DNA, 1108 bp, Zea mays
  Clone ID: MRT4577_61723C.1
tagggttctacttctagcccagccactgccaccaagccaatcctggggcgggcgactgcctccttccctcgatttgacgtgcgcttcctcttcctcgctcgctctcggtcgcagtcacaggcccacaacacaagcaactttcttattactgtcggggttccgaagccaacaaaaggacgcatcattccaactaactttcagagcagcgcagcgtgtcttgctttgttggtgccttgcaaaccgcaggtgctgtgctacaattgcagaaataaggtgtagtgtatgagaagtagagaaccaatgctcttttatagccctcaatagatatcagtttctttcttttctttgatttacacgcacactttcccagctactgtttgcttgtttggtatagcaggaagtatctttgatatataaaaatgagaaataggccaaggagtatgctatcacgatgagccgcccagatatatatatcgtgtgcctccgtcacatcgtgctagctggttcttttcttcatgaggcatatagggtatttattcaaatgcccgcaaagggagggcagtgcactgagtgcatcgggagggctcatagttcttctttgactgcaagggataggcagcaggtcttcttcagcctcttttcaattctccctttctgatggaagctggcgtgccggaaggtgccgagcaggtacatgtctcagctgaagaatccgaagactgccaagaaaggcgaggagaccacggtggccaagagcgagaagcgggggcaagaatctaagacgaatgccaagaagaaaatcttaggacgctcacggaagtgtgcccatgccgaacctgatggggagaaccgaaacggttgcagcagcactgatgcagacgagaactcacttgcagaaactgctgcctccgatcaggagaggaaggtggtgctgcaggaattgagaatcgaggtggatacatcacgagctgacaattccaatgacaacaaggagaatctgtcgagtgctccgagtgatgaagaagcattgaacaattcacattctgaaaatgaaaacagacagttggagaacaatgagaacgttcctctgaacgagaatgttgctctg

SEQ ID NO: 142812 - DNA, 778 bp, Zea mays
  Clone ID: MRT4577_61724C.1
cattgggtacctcgagccggcgggatagccaccctttttgataaagaaacgggcctacactacacgggacacctgcctcctccccttctcccgtctctcccctctccctctcgtggccacgactgccgctgccgccctacgccaggtgtccaggtcatctccggcccattcgccggcgacgagcaccccactagatcgaccgagctatggacggcctgtggcatctgggggacgagctccgcgggcagcccaaggtggtggaggaccgccagtggtcgctcatgacgtccaagctggcagagatcaccaggtccaggggcgagaggacgaacgacctcgactacgccaggatgaacgccgcccccgacgccaagcggtggggcaaggcggcgtcctaccagcaccatgacgagggcaggatggaccaccacgtcggcctcagcctcaagatgaacgatctcaagatgaacgaggccgccgctgccgccgtcatgaagctccccttccgcggcgtgccctacaacgtcaacccgatgtaccccaaggggagcaacgccaacgccaatgtcaacgcgttcaagatgaatgtcggggtgaacaagtactccagcagcgcgaacgggaaagacgccggcgggaaaagcagtggcggtggcagcaacaacaacagcggcggcggaggcaacggcaatgggagccaccaacggcagttccgcggtcgacaagcgcttcaagacgttgccgacgagcgagatgctgccaaagaacgaagtccttg

SEQ ID NO: 142813 - DNA, 763 bp, Zea mays
  unsure (1)..(763): unsure at all n locations
  Clone ID: MRT4577_61725C.1
gaggtcggccgggctcatcgacattcttcccgtagacctgatcacctccctgcgatcacgtctcttccgcacatcctctcctctcgtattatctctagtctacactcgcaaccatggccgaccaggagctcaagctcttccaagaagaggtcgaggcggtcaagcagtggtggaagaacccccgcttcgcccagaccacccgtccctacactgccgagcaggtcgtctcgaaacgaggcaccctgaagcagacctacccctccaacatccaggccaagaagctctacgctacgctcgaagcccatgccgccaagggcaccacctcgcacacctacggcgctctcgaccccgtccaggtcacccagatggccaagcacctcgagacggtctacgtctcgggctggcaatgctcgtcgaccgcctcgtcgaccaacgagcccggtccggatctggctgactacccgtacaacacggtgccgctcaaggtggagcacctcttcatggcgcagctcttccacgaccgaaagcagcgcgaggagcgcagcaacatgtcgcccgaacagcgtgccaagacgcccgtcatcgactaccttcgtcccatcgtcgccgatgccgataccggtcacggtggtctcactgcggtgatgaagctcaccaagctctttgtcgagaagggagctgctggtatccacattgagggaccagcgcccggtaccaagaagtgcggtcacatggcncggtaagggtgctttgtgccattcag

SEQ ID NO: 142814 - DNA, 221 bp, Zea mays
  Clone ID: MRT4577_61726C.1
atggccagaggcaaacattattagcaagctgaatcaagctgtaaagtacccttacaaaaagcttgggggagggaaattagcattcccaccatctcaaagtttgtagcttacaatgcactggacgggtaaacaaaaaaatagactgatcctgtttttaagaacccctgtattgtatcaacgggtttgctagccttggttgaaatacaatggttttcttccaa

SEQ ID NO: 142815 - DNA, 1680 bp, Zea mays
  Clone ID: MRT4577_61727C.1
ccccagctttccggcgacgagaggtaggcataaatcttttgccaaatcaacaccagcaacagcggagcgactacagagagtaggagatgcttactctccacaccattcagtcatgcccctcgctgcgcagatcctctctgttccggcgtgctctgctaggcaggaagagatctttcatttgtgccagcagttccgaggatgccgaatccggcactcccccgccgcttggtggcgacaaacaccagcaggaggttcttgcacagatcgccatgcttcagacgcaaaatgtgcgaaaaaaaaatttcttggacgagcaaaaaaaaaaaaagacctcgaggccggccgggaatttggtcttgttacggaacagaagggatatggttcccgggctccggcgacgacgagaggtaggcagaaatcgtttgccaaatcaacaccagcaacagcaaagcgactacagagagtaggagatgcttactctccacaccattcagtcatgcccctcgctgcgcagatcctctctgttccggcgtgctctgctaggcaggaagagatctttcatttctgccagcagttctgaggatgccgaatccggcactcccccgccgcttggtggcgacaaacaccagcaggaggttcttgcacagatcgccatgcttcagacgcagaaggtgcgcatcacagatttcttggacgagcgctctgcttacctgaccaagttcgccaaggacgccgactcggagttcgacctgattgggcagaacgccatgaaagaacttgatgccgttggtgaccagatactggagaggctcgacagcaagatgcaagccttcgaggagacggctgaggtgcaacggcaagagatagaaatgaacgataaggtgttggaggacttcgaagactggattgagaaggagaaaaacgaaggaatgttcttcaaaagccttggcaaggtcaaacctcggaacaagatggaaataaaggtgaaagccaaggtggaagcacagaaggtcaaagagattgcagaggagagtgcaggatcaaaaactcgtatgaacatttacctggggctgatggggatactcgggattacaattgcgaatgccatctttgcaacaccagaggtggagtggaggaaggttgctgctctgggtctgattttcattggtctggttgctcaggtcatctacgagcaggatatctcaccgccggaagctgagaagacagagaaaatagaagaataaaaaaggagttgcagacatatcggtagggtgtgatctcccacgggcaatgtaaactgtatatggtagcatgaatagatacaaggtttaatactttaattaatcgttcataacccaaagagattgcagaggagagtgcaggatcaaaaactcgtatgaacatttacctggggctgatggggatactcgggattacaattgcgaatgccatctttgcaacaccagaggtggagtggaggaaggttgctgctctgggtctgattttcattggtctggttgctcaggtcatctacgagcaggatatctcaccgccggaagctgagaagacagagaaaatagaagaataaaaaaggagttgcagacatatcggtagggtggtgtaatctcacacaggcaatgtaaactgtatatggtagcatgaatagatccaaggtttaat

SEQ ID NO: 142816 - DNA, 293 bp, Zea mays
  Clone ID: MRT4577_61728C.1
ccggttcggaatattcccggtgtcgaccacaccgtccgcgctacgcatgcgcgtgctgcgctcttgttcgtgactcgctcggtcggcggaagaaggggcgcatcgatctgggcgctgctagctgcgagagcccaatatgcatccgaccatacaatcgactgaccgctctctctcggcagcgtctgaatctgcactcgggcgaccactcctctggcgtcaagtcactgcaccctatcggcctgcgtcgcatatttaactaaacgcctgcgcccataccaaacggagatctattg

SEQ ID NO: 142817 - DNA, 1167 bp, Zea mays
  Clone ID: MRT4577_61729C.1
ttttttttttttttttttgggacgatccttgggatcgattgaaataacagataaatcaacagttcgttaattacatattgcaagtccttacaggtagaattagcgaaagcttgaaatactagcaaaggcacgtgcgaacgtacgtcaaaatttggcaacgtacacatatataggcggaagttaaatcaaatgcatgccatccatggtacgtacggccggtcaggtgccgcgcgcgcgctcatcgtcacaactccatcagaggacagagatggatcgagatcaccggccggccatcaggggcatgccgggttgtgtcccgggccaccgtagtagaagtgggttccccagcctccgcgggcggagtgctggccgccgtcgtcgtcgtcgtcgtcgtaggccttgcgtatgtcgtagcaggcggggtcctcggccagcgtctggatggcgtcgagcgccacctcggccaggctgttgtcggcgtccaccgtctccaggttgcggaagtagctggcgcggccgaagccctcggcggcgaagcggcccgagcccatctgcgtggcggtgtgcgccccgccgggcctggtgtccaccacctcgccgccccactccaccatggtggcgtggtccgacaggtgcgtgaacagctgcgccggccagtaccccaccagctggtccccgtagctgagccaccagttgcccagcttcgggtccttccacaccagcagcgtcatgtcgtactgcgcgccgccggccgacgacaccggcgagatggacgcgccgatggcgatgcgggagctcgtctgcacgaaccccgggcacagcgcgttgtagcaaccagtagcctcgtacgcgtcgcttgtccagtacgtgaagagcctcggcctgctgtccccgtacagctcagggctgacctgccatcctgcctcgatgctgttgaggtcggagccgttgaaggagccggagaggacccagagctgggagaggctgaagccgttggactcctggatggccggatcccacacgttgatggtggccttggcgccgtacaccggctgctgcgacggcgccgtgtacgcgatcgcgtgctcgtgcccgttgccggtgatgatgggcggcgcgtaggccgcgcgcgcggcggcggcggcggcgatcgtccggtgcgagccg

SEQ ID NO: 142818 - DNA, 484 bp, Zea mays
  unsure (1)..(484): unsure at all n locations
  Clone ID: MRT4577_6172C.1
atgatacaagtacacgggncaacttcctcagaaaccaccaaacagagagtagtaaaacaggtaccgcgtgggggcgagatcaagaaaactactaacctaaccacagacggagttttttttttttttttttttttttacgatacaagtacacgggcaacttcctcagaaaccaccaaacagagagtagtaaaacaggtaccgcgtgggggcgagatcaagaaaactactaacctaaccacagacggaggtttttttttttttttttttttttacgatacaagtacacgggcaacttcctcagaaaccaccaaacagagagtagtaaaacaggtaccgcgtgggggcgagatcaagaaaactactaacctaaccacatacggagttttttttttttttttttttttttacgatacaaggacacgggcaatttccttagaaaccaccaaacattgagtggtaaaacaggttccggccttgggggtac

SEQ ID NO: 142819 - DNA, 378 bp, Zea mays
  Clone ID: MRT4577_61730C.1
gtcttttttttttttttttttttttttttttgttttttttttttttttttttttttttttttttttctcttttttctttgggaaaaagccgtttgtgcacccaagaaaatttttggggtgggccaatgtaaacgggggggaaaaccccagggggacctcccccccaaacccccatttggttggaatccctgggaaacagaggtttttttttttaaattaagggggccccttcccaaatccccttttccagaatggcccggcccccggtgggggggccgcccaacctggaaaacccccggggggcaggttgggtgaaaatccccccgctctcaaacggggggattttttccctggccagggggagggggcttttccggg

SEQ ID NO: 142820 - DNA, 791 bp, Zea mays
  Clone ID: MRT4577_61731C.1
aaagacactcgacactcgacactcgacaggctcggtttccgccctcctctcccaccgccgcgcaccgagaagatggggaagcggtggatcccgctggaggccaacccggacgtcctgaaccagttcatatgggggctgggagtccacgaggaggatgtgcagttctgcgacgtctacggccttgacgatgagctgctcgctatggtgccccagcccgttttcgccgtcctcttcctctacccgctcacctccctggacgaggagaaagaagaatgtttctgctgccacatcgacctcagcgggcaaggtgtggttgtatcatcctgttctgtttttttcatgtgccgtgatggtaatgtttttgacacaatgccttggccactttagtgatgctctatggtctaagtccgtgccctggagtaggaaagagaaggtttaatttgaattgtgttagtacctttttcaaagttgagagatgttgatttgtgttgttagaattgtatgctgattatctttgtgaaatttgtacatgttaccagtgttggccctccagtccttgaaacagattttgtgatttagtttgttcttcactgcaatatcatcgtgtggttacacatttccacttgtgttcatatgtgatagatgccagaaattggaaagaaagtaacggcagctgttatctaggtaaccagatattgaattgtattgaaaagaaagtaatggtagctgttatctaggtaaccagatattgaattgtacatgttttttttcacgtgtttatttgttgctct

SEQ ID NO: 142821 - DNA, 282 bp, Zea mays
  Clone ID: MRT4577_61732C.1
tcgacactttcgcatacaatcttaaagttatcatctatagaccccatgaccgggataggttccttctatgggacggcctgccctataaaacgtcatcccgagcattaaatttcctgaagtactctcttatctgaaacccctattgacctatgactacgtaaataacaacccctaccagtatctcccccgttccataaataaatccattgacactagctctactagacctgtataacaactctacataagaagcattatctttttctacctccctaatcctac

SEQ ID NO: 142822 - DNA, 219 bp, Zea mays
  Clone ID: MRT4577_61733C.1
atgcaaatgagggagttagtattagatctgatggggttaccgtaaaatctagtgcatatggaagaccctcatctgctgctggcaaaagtagtgacctatatcttgatgctgcagccaaagcaaaaaatgctttgcagctcaacaatgaactggaagagaaacttatcaacatacctatgcttaataataagcttggtacatctgttactgctacacaag

SEQ ID NO: 142823 - DNA, 1350 bp, Zea mays
  Clone ID: MRT4577_61734C.1
ctccggtccgttccgctccttcctccccctatctagctagccttcccgttcctgcatcgcggcggagatgggcgcctccaccacgccgacgcgggcgtccactccttccgcctcgggctcaaccgcttcgccgacctcaccaacgacgagtaccgcgccacctacctcggcgtcaggagcaggccgcagagggagaggaggctcggtgacaggtacctggccggcgacaacgaggacctgccggagtccgtcgactggcgggccaagggcgccgtcgcggagatcaaggaccagggcagctgcgggagttgctgggctttctcaacaatagcggctgtggaaggcatcaaccagattgttactggcgacatgatctccttgtctgagcaggagcttgttgactgtgacacttcatacaaccaggggtgcaatggaggtctgatggactatgcgtttgagttcatcatcaacaatggcggaatcgacaccgaggaggattacccttacaagggcacggacggacggtgtgatgtcaacaggaaaaacgccaaggttgttgctatcgacagctatgaagatgtaccagcgaacagtaagaaaagtctgcagaaggcagttgcgaaccagcccgtcagtgttgcaattgaggctggtggcagagcatttcagctctacaactcgggtatcttcacaggaacctgtggaacagcgttggaccatggtgtcacggccgtcggctacggcacagagaacggcaaggactactggatcgtgaagaactcttggggcagcagctggggcgagtccggctacgtcaggatggagcgcaacatcaaggcgtccagcggcaagtgtggtatcgccgttgagccgtcgtaccctctgaagaagggcgccaaccccccgaaccctgggccgaccccgccttcccccaccccgccgcccaccgtctgcgacaactactactcgtgccccgacagcaccacctgctgctgcatctacgagtacggcaagtactgcttcgcctggggctgctgcccgctcgagggcgccacctgctgcgacgaccactacagctgctgcccccatgactaccccgtctgcaacgtcaagcagggaacctgcctcatgggcaaggacagcccactgtcactgtcagtgaaggctacgaagcgcaccctggccaagccgcactgggctttccctggcaacacagctgctgacggcatgaagagcagcgcatgagaaaaacgcagcatggcattaggccgccaacagccagcatgattagagcccccctgcatgcagaatgatcacccggtcccgtagttcacgacgaaagcatggctg

SEQ ID NO: 142824 - DNA, 1986 bp, Zea mays
  Clone ID: MRT4577_61735C.1
cattgggtacctcgaggccggccgggatcaatcctctacaattccacatccatctgctctgctccggtccggttccgctccttcctccccctatctagctagccttcccgttcccgttcctgcatcgcggcggagatgggcgcctccaccacgccgctcgcgtcggcggcggcggcgctgcttctgctgctgctcgcgccgctcgccgcggcggcggacagcatgtcgatcgtctcctacggcgagcggagcgaggaggaggcgcggcggatgtacgccgagtggatggcggcgcacggccggacctacaacgccgtcggcgaggaggagcgcaggttcgaggtgttcagggacaacctccgctacgtcgacgcccacaacgccgccgccgacgcgggcgtccactccttccgcctcgggctcaaccgcttcgccgacctcaccaacgacgagtaccgcgccacctacctcggcgtcaggagcaggccgcagagggagaggaggctcggtgacaggtacctggccggcgacaacgaggacctgccggagtccgtcgactggcgggccaagggcgccgtcgcggagatcaaggaccagggcagctgcgggagttgctgggctttctcaacaatagcggctgtggaaggcatcaaccagattgttactggcgacatgatctccttgtctgagcaggagcttgttgactgtgacacttcatacaaccaggggtgcaatggaggtctgatggactatgcgtttgagttcatcatcaacaatggcggaatcgacaccgaggaggattacccttacaagggcacggacggacggtgtgatgtcaacaggaaaaacgccaaggttgttactatcgacagctatgaagatgtaccagcgaacagtgagaaaagtctgcagaaggcagttgcgaaccagcccatcagtgttgcaattgaggctggtggcagagcatttcagctctacaactcgggtatcttcacaggaacctgtggaacagcgttggaccatggtgtcacggccgtcggctacggcacagagaacggcaaggactactggatcgtgaagaactcttggggcagcagctggggcgagtccggctacgtcaggatggagcgcaacatcaaggcgtccagcggcaagtgtggtatcgccgttgagccgtcgtaccctctgaagaagggcgccaaccccccgaaccctgggccgaccccgccttcccccaccccgccgcccaccgtctgcgacaactactactcgtgccccgacagcaccacctgctgctgcatctatgagtacggcaagtactgcttcgcctggggctgctgcccgctcgagggcgccacctgctgcgacgaccactacagctgctgcccccatgactaccccgtctgcaacgtcaagcagggaacctgcctcatgggcaaggacagcccactgtcactgtcagtgaaggctacgaagcgcaccctggccaagccgcactgggctttctctggcaacacagctgctgacggcatgaagagcagcgcatgagaaaaacgcagcatggcattaggccgccaacagccagcatgattagagcccccctgcatgcagaatgatcacccggtcccgtagttcacgacgaaagcatggctgggcggccgctgtttacggatttacttatatcactatagtaggtactcctcctgtacataagcctgaaaaaaaatgggttcagttgtttatggaactctgccaaatttgcttttgcatgccatgtaaaaatccagctagctcttgccaagcttcccctgcgcagttcaacaggactgcgattgatattcggtgtaatggaagtatttatcggaacaatcagcaatgttatgctatattcagaaaaaaaaaaaaaaaaaaaaaaaaaaaaaaaaaaaaaaaaaaaaaaaaaaaaaaaaaaaaaaaaaaaaactcgaggaaagggccgcggtaccc

SEQ ID NO: 142825 - DNA, 385 bp, Zea mays
  unsure (1)..(385): unsure at all n locations
  Clone ID: MRT4577_61736C.1
acaaaaaaaaggccgggggggggttatttaattcggcgccttgctaagggatggttactgcccattcttttaaaaaaatcctgccggcaggtcttatttatgcttcctacgtacatacacatacaaaaaaaaagttggctgggaaacactccctgccaaaaacaagggctgggaactaacttgggggctcttttttttccttcaaggaaagaaactaccccttccctcccaagtaattattgggggggagggannnnnnncnnntnnttttttcccccttgtcatggagcttgctgaggcgaaaaatgacgctcggatccgctaataatttggccccgcgctcccacacttgggcatgcacctggttgctggactactccagctt

SEQ ID NO: 142826 - DNA, 508 bp, Zea mays
  Clone ID: MRT4577_61737C.1
agagacagttccttccagagtccatgaaagtcctgttctgagtccacagagaaaggcatcaccatcaactaatgatgaaactgcaaaggctgacactcctgctgcaccagcctcagattttctccattcagctacaggaaatgccagtgatgtggtgggtgctgagatgacagaacttggattggcgaaaccggtgcaagttgagtcttctgttgtgcaggactctgatgcatcggtgcaacagcacacaagtgagggtttaccatcccagggtcaagcttcacacttggaagctgctgctgataagttggtcggctctgatggtatagctgcatcggttgatgaaacggtaactgtcaatgcaaccattgaagatgtacctttggctgtaaatgattcagagccatgtgttgatggttctgctggaccatctgtggtgaacctggtacagatggatggtccattatttgatgcacaaggtacagtactaagtgcagattttcaacat

SEQ ID NO: 142827 - DNA, 311 bp, Zea mays
  unsure (1)..(311): unsure at all n locations
  Clone ID: MRT4577_61738C.1
ccccccttcgangccttttttttttttttttttttttttttttttttttttttttttttcttaggacggaaaaacaggcagaacctgaattcttcttgcgccattttaaaacaaacggccgttgtttgaggtctcggaatgcttcccctaatcttgtggaagcatattcccccccatacgccggccgaataaaaacacaaatcacccttttgcctttggacgggtaactgccataccatatccttaggcgcactctcagaagccaatcttctttttgccttaatcgaagatggggtggtttgattcccatg

SEQ ID NO: 142828 - DNA, 316 bp, Zea mays
  Clone ID: MRT4577_61739C.1
ttttcatgacttattctttgttttgtttcattatattctcggggccgttccgccaaaaagagaaaatgcggatcgtggcaacatgatgtatttatccctacatcatcttatcgaatcggcacatgcccattgtttctatgatggacctcacacctgtctatggtcttaacgaacagcacatgcgcaaagtaccatgaagggagcttacggtggctccaccatctattcaaagcaccgccaaacaatgagccagtccttaactaacggatcctcctccagaaagaaattttgacacgggactgcgggggaaagtgta

SEQ ID NO: 142829 - DNA, 247 bp, Zea mays
  Clone ID: MRT4577_6173C.1
ttgaccctttccatttttattacatatttcgataaaactaaaaataaagagtttctgtgcggattatgcacgctctgaatccttaaaattatatgcaaaggtatttaatcaaggcaattttttcatctatatttcccaaccggatgtacaccacttgcatggtaccaagtactatatatataaaaccaaatgttattttttgttaagccctcaaattattcatgcgagctcgcttataatatcaaat

SEQ ID NO: 142830 - DNA, 233 bp, Zea mays
  Clone ID: MRT4577_61740C.1
aacctatagcctactatcaacaacagctccttgcatgcaaatcactcaccatgacaaactttcctatatcccaacatcaacaacagttataacaaattctaccacagatcactcactttgtcatccacaaccctattgactacctacaacagcatcaacaccttctatctacccaactcgatatcaacaatatacctacaaacatacaacaactgttcttacaacaacacctt

SEQ ID NO: 142831 - DNA, 398 bp, Zea mays
  Clone ID: MRT4577_61741C.1
tataaaggtaatgtaaatgtcttatgattaagaacagggtgatgttccatttgatggcatgctatgcataataacctggcatgcaaatgttgaagcatgttgaaatgcttctattcattgttctaagttggggtccatattgatggtagtccctctttcttcgtatgttcataagatgggtcggcatctttagtgtctcacacgcagtggccacgggatttttcaggtcacttggtcgtggaagggcttcttattgcagtcatagtgttccagctctccaggaagagttacaaaccaccaaagaagccactcactgaaaaggagattgatgagctatgtgatgagtgggagccattgtggttgttgttgcatgagtaatcctacatatcatttcatat

SEQ ID NO: 142832 - DNA, 254 bp, Zea mays
  Clone ID: MRT4577_61742C.1
accagatttgctttgctaatgattgaagaattattgtgaagttatgaagtgctgcagctatttgaggtttctgcagaacctaaaacctacctggctcccctcttatggacttccttgcaaaattggtagtgtctctgctaattgagccttcatggcattagtggaagcaatcgaaccatgctagcatatgtgatttcttactgtatgttaggtggcgattgcagattctaccgtatttctggacattctcaaca

SEQ ID NO: 142833 - DNA, 672 bp, Zea mays
  Clone ID: MRT4577_61743C.1
tttgaaaagcacctctaaaccgtgagctgacactcgaattattaaaaaagcaaaacaaaacttgcttcgccaaatggcaaacgtaattaagcgccacttgcaaaaggcgcccgtttattgtagcagtacataggctaggatctaaacaggcacggctgcggctgagtaaacgaacccgccgaatcctgacggcacgggcactcgcttccatgcaccgctgctcgcttccatgacccacgcagagtagttgacgccctccgccgccgcgtctgccactgtgccgaacacgagcacggccccgccgttgccaacgccaaccgccttcaagcaggccttcatgcccggcggcccgtcggccacgtccttccacgcgcgcgcggcgccgtcccattcccgcacgccgccgttcccggccccgacggcccacaccgtcccgcgcaccgacgccaggcacgtcccagccgtgtcgccgtcgggtaccacgtcgcactcgctggtccacgcgccgccgccggcgttgtaccactcggcggtatccttgaacgcgccctgggcttcggtcgggtagccgctggcggcgaggacgcggcccggggtcgccacgacgagctgcggctcgtcacgctcctccaacatgtccgggagtgcgcgccaggcgtcggccgcgacgct

SEQ ID NO: 142834 - DNA, 143 bp, Zea mays
  Clone ID: MRT4577_61744C.1
tcggcgcgagcgaagaggggagaagcgcaagttgttccccgacgcgcggtggctttcccggcagacttcaggtcgggaacctgtactacgggaacagcgatccgaacacaccgctgttgccgtcattcgcagcttgggacgac

SEQ ID NO: 142835 - DNA, 560 bp, Zea mays
  Clone ID: MRT4577_61745C.1
ggtgcattgccgtccgcgcctccctacagcggagcttggcggcggcgaggcgcagtctcagccagcgcatggtcggctgccgatcgagggtggcgcgttcgccggctagcgggcgtcctgaggcggcgcctgctgcgcgcgctctacctgcactagatgctggctgcggtattcgacaaaccactactatacaacgacgatgtctcctacctcaccgttctgacaccgacgtggcacacatactgcagatgcgcgacatactggaccatgcatgcccagaccaccacgacgagcaacatttaacttagagcacaaacacacagtgttcataggtacctacacgagcatgctagacagaaagagagacctacctacgggcccctgcctgcccctgctgagatgcccacgaccgtcagatagaacggacgggccttcctgcttgacttgggtaggcacgcacactggtagcaatctggccgggtgtggaggcccgacttggccagtatctttatgtcacgcttgagttcgatgctgtagactcccattcacatggagttctt

SEQ ID NO: 142836 - DNA, 346 bp, Zea mays
  Clone ID: MRT4577_61746C.1
atagaactctccctttttattgtttatttatggtactttgtctggacaaaatacggcttctgattcgagaggaaatccggcagtgcgacccttggggctctaattaacagggtcggtcatggctagcaaggatctaagtctagacactacctggacgccgggcccccctttgggaaaatgaatacccgcaggggaagaactgaaaccctttgtggattgccacccgccactgcgagggggagtgcgacccatgctgggggtccccaccccgatgaaaaactgcatcagccctaagctcccaacaaaaaagcggggataggcacccaaggattgccttgaggacccc

SEQ ID NO: 142837 - DNA, 560 bp, Zea mays
  unsure (1)..(560): unsure at all n locations
  Clone ID: MRT4577_61747C.1
tcgagcggccgcccggngcaggtaaaaaaaaaaaaaaaaaaaaaaaaaaaaaaaaaaaaaaattataaaaaaaaaaaaaaaaaaaaaaaaaaaaaaaaaaaaaaaaattttgggaaaaaaaaaaaaaaaaaaaaaaaaaaaaagggttggtccctgggcccgggccccccctgggggggatttcggcggattcccttcccccggggggccgttcggccttccttttggggggcccatttccccctttgggggggggtttaccaatccccgggccggggttttccaccgtggggccggggaaaccccgggggtcccccaccttaaccgcctgggggcccacccccttttccccggggggggtaataccaaaggggcccgccccgaccgcccttcccaccagtggcccaccctgaagggcaaagggcccccccctgtacgggccctttaaccccggggggggggggggttccccccagggggcccgttcccttggccggggccctagcgcccggtcctttcgtttttttcccttcctttttggccccgttcgcgggttttcc

SEQ ID NO: 142838 - DNA, 117 bp, Zea mays
  Clone ID: MRT4577_61748C.1
agacagtgtccgccgtgtgcctgcccagcgccgacgacgacttccccgcggagacactgtgtgccaccaaaggctggggcaagaccaagtacaacgcaaacaataaccctgacaagc

SEQ ID NO: 142839 - DNA, 626 bp, Zea mays
  Clone ID: MRT4577_61749C.1
gggccccccctcgagttttttttttttttttttttttttttttttttttttttttttttttttttttttttttttttttttttttttttttttttttttttttttttttgggaaaaaaaaaaagaaaaaaggctttggggggaatttttttttcccctggggaaacccccggtttgttgggggggaaaaacctttacaacccgcccccccctttggcattaccaggggggaaaaaaaagaaaaaaagcccccctacttaacctaaaaaggggggttttttttggggggaaaggggccccccaccaaggggtgttttgaatgccgggggtcaggataagccacccgtccgtacgaccccccttttttgggccccaaacaaaaaaccggaaaatttttttttttttttttgaaaaaaaaaaaggaccccgggggggaaaaaaaaaaaggggggggagggaaaaggggtttttgtaaaaataaaagaaaaaatttaacccgggggatttttgcgggaggggggcaaggcccaggcccttgggcttgccccccgcttccaggtggccctgggggggggggggcccccgcaccctcggaatttgggggccccttttggcctgccccggaat

SEQ ID NO: 142840 - DNA, 269 bp, Zea mays
  Clone ID: MRT4577_6174C.1
taaagggttgctgtctcagaggacttaagtccatgcatgtccgtacgtgatgctacaatcactccacagggcgattcaaaccgaacctatcggatgctgccccataatgctccgatcgggcaaatttcggtgccattgaatccaactcttccgtagcataccttttccctgatagacggtgcaactgttaataggattgtattgactgtgtccgttaatagtcgtctagctcgaactgttaacgggatttctatcgcagcggagtacca

SEQ ID NO: 142841 - DNA, 1276 bp, Zea mays
  Clone ID: MRT4577_61750C.1
ctctatattcttcttaatctatataaatagagattttaaaaaaaatccccttcaacaatttatctaaagggctatcaattatagccatattctattccgggtttctcgctagccaaatttagaaaatgtaaatgcctctttagagggcaaacaccctatagaaaggctattggatattgagaagatataaaaagtggtttttatacaaatgactctaaatgatagtttagagcgaaatttagaagaaaaaaaccttttggagacgctctagggttcaattgcacgaacagtcttttaagtgaagcaagcgtttctaattcagtctttcaccggtccagctgccagtccggtccagtccaaatatctacgcttcaacatccagagtgtgtgcgagggtgtggacatgtggtgatacacgccgagtgacaaagcaggccaacacatgagggtaaaattgcacaaataaaaaaagtagaactgcagaaaaaagaactcaatgtgatcgattgaagcgaacagaccgctgaaatttctgtcagttcgtactgagtaaaaatcaagaataaattatttttaaaaaaacttgaatgctagctgaaagtgtttccaaaacattaacggtgaaatggctaaaatatcagcacagcaagaacctggatcattgtaaatgaattggtatagcaagaaaaaaaaaattaacctaacagatccaactgtaacaggtattaactccgaatgcaaggacatcataaagctgaataaggatacgtaaaaggatacggcggaaggctaataccacagagcccttattatttagctactggatatgaagcaacaataatctgtattgccctgcagtgattataatcacgcttcctttcataatgtgcatgtcaatgtacttcatcatggtatatctcatgctttcctttagtagcatcaccaagcatggttgtcggatgatctccatcagaatatgcgctttggggatcatatctatcactgaattaatcttgagttatagataatgatttatgtcacttctgagttctgactagctctacttctatcaaagcacccttctcctggcaagtgagaatattctgtcacaggggatctttgtgactgtattggccatgtacaatcatttgattcatcacggtggtttgagacatccttcttaaacttatagccattgggtgtgtaattctcttgcgggtaagagtaaatttgatctacttcaccttctgaccctaattccacccattcttctcag

SEQ ID NO: 142842 - DNA, 360 bp, Zea mays
  Clone ID: MRT4577_61751C.1
gggctccgtgatgggcgacgaacgcgttctgttcatcatggacgaccacgagggcttggccgactccaagcgcatcggcgtggcctacaacctgcacatgcaaaccaagcatttaggcctcctaaccgaagtgctttttgcctcgaaaggtgatttcacgctcggcttcaccaggcttataatgcaactaccatgacacctgaagagggtatggactcacgtctgcaacagagggcacgcaaggcggtacctcaactgcttgtaccatggactaactgactactatgtctggacatttctgaagatcagcactgcatcaatgagcgatgtccaagggcgcctaattgtggacaagctaat

SEQ ID NO: 142843 - DNA, 363 bp, Zea mays
  Clone ID: MRT4577_61752C.1
accaaaaaaatttgtcaaattgaagaacattttattgcttttgagcaggggcaggggaggcagctttgttttcctctggcttcttggcttgctgaggagcttcagtaagggcaaccttaacaaccaaagtacgttcatcaacagtctttccattgacagcgttcaaagcctttcgttgatctgcttcattttcaaattcagcaaaaccaaatcccttgcttcttccgcttctttggttcttgacaacgtaagcttgcttgaagttgactccagcatccttgaagatttgtccaaaagtgttgccatcaagcctgaatgggagattggtcacaaacaataaagtcttggaaggggttctgtttt

SEQ ID NO: 142844 - DNA, 662 bp, Zea mays
  Clone ID: MRT4577_61753C.1
actgagtaaaattcaagaataaattattaaaaaaaacttgaatgctagctgaaagtgtttccaaaacattagcggtgaaatggctaaaatatcagcacagcaagaacctggatcaatgtaaatgaatttgtatagcaagaaaaaaatttaacctaacagatccaactgtaacaggtattaactccgaatgcaaggacattgtaaagctgaataaggatacgtaaaaggatacggctgaatgctaataccacagagcccttattatttagctactgcaagatgacatcaaatagctgagtaaaagcaggtgctaaaaacttggaaaccccaacataatttaacaagcatgcctggacatgaagcaacaataatctgtatagccctgcagtgattatgatcacacttcctttcataatgtgcatgacaatgtacttcatcatggtatatctcatgatttcctttagtagcatcaccaagcatggttgtcggatgatctccatcagaatatgcgctttggggatcatatctatcactgaattaatcttgagttatagataatgatttatgtcacttctgagttctgactagctctacgtctatcaaagcacccttcctcctggcaagtgagaatattctgtctcaggggatctttgtgactgtat

SEQ ID NO: 142845 - DNA, 549 bp, Zea mays
  Clone ID: MRT4577_61754C.1
ggaattcccgtccggaagtgcgccttggatcatctctactttggcgctggtggttttgtggatgtcctctcagtgccactcccagaataccaggccagttgaagtcctcaagcttctgcttggattctagtgtcactctcaactcttgttatcttttgagaagagatcccctgggcccatgacgaactccaggaatgcatggttgcctgcatgatagatgtagagatggcggtcatatagttaaattacacgttctgccgtatgtatatgattttattggagctaatggattttttatctgctttgtttggagaaaaacatagtttgcatctatctctacacgacttgcttttgtaccggaggcacgcagcagcagggttgtatatgtccaacctctgatgggtctgcggtctgccgttgaaagaggggctttggagatctgaaggtattccacgccaggtgctcctgtaatgtgctggacttctgttctgccactttggttacgcagagctgatccattacaaatggtacttgtgatgctttgttgtt

SEQ ID NO: 142846 - DNA, 122 bp, Zea mays
  Clone ID: MRT4577_61755C.1
ttgctaggtaaacatccggcggccacgggggggtcattatatagctcgcgcagtccatcgcagcctcgtcctctagatggagcggaccaggctcgcgaattgtgatgaaagccatgggggac

SEQ ID NO: 142847 - DNA, 804 bp, Zea mays
  Clone ID: MRT4577_61756C.1
actcccagatacaggtagctgcatttgtttgccttatgatggtgctcatgatttttgtttcttcagtatcagattcatctagtggtttcttgatctatttaagtggtgctgaatttcttgtgtacatactgtgataagtagcatgttgactgcaattctggctgttcgagaatcggtcggctgttgttttaaaaataatgtttttttggatatctttcatttgtaagttaaatttaggggtggtcattgtattaatgcttacaggccagttgaagtcctcaagcttctgcttggattctagtgtcactctcaactcttgttatcttttgagaagagatcccctggtagcagccctttgccttttctttctgttctcttcctttattgtcttgctaatctttgataaactccggtgttgtgattggttgtatgtgcagggcccatgacgaactccaggaatgcatggttgcctacatgatagatgtagagatggcggtcatatagttaaattacacgttctgccgtatgtatatgaattattttttttggagctaatggatttttatctgctttgtttggagaaaaacatagtttgcatttatctctacacgacttgcttttgtactggaggcacgcagcaacagggttgtatatgtccaacctctgatgggtctgcggtctgctgttgaaagaggggctttggagatctgaaggtattccacgccaggtgctcctgtaatgtgctgggctcctgttctgccactttggttacgcagagctgatacattacaaatggtacttgcg

SEQ ID NO: 142848 - DNA, 636 bp, Zea mays
  Clone ID: MRT4577_61757C.1
tttttttttttattttttctaaaaattttgaataagacaagctgatcaaacttagaaaaaaaaagtcaaacaaataaattataaatgataatagagaatagtaaatagcagcaagatcgaaactaacagccaccatgataaaactacagtggcaattccatccaacagaacgtaatcaaagaatgtgcagggcatgcgtcttgctttcttaaagtttaagaaaggcgtacctcacaaacaatccccagtgccacgccactcacacactagccaggtacggtatctcccaggctaaaggctcattagcatgaatgcatgggaagctgatgccctttgtcccattagcccccccaccaaatctggcatcactagtctgagtacccagtgctgacacccatcattaagcacgttgaaaagtaagggattccaatgatgcattacccaggcgtgcctatgcagagttgcccatgctcaatcatcacatcctttacgcatttatatttgtagattaaattagcacgagttcggagagaaattcatgctgttagggcatcatcagaacgacaaaggtttcgtcaggctcagaaaggcctctgcttttctgtttggcaccgcacctctgttccaccgacatgc

SEQ ID NO: 142849 - DNA, 707 bp, Zea mays
  Clone ID: MRT4577_61758C.1
gccatgctgtcatgtgggacggcacgggcaccagctgcactgcaccgccccacagttatattgtttactgctgctgtgcccactcctggtatatttgcatcactgcctgcttctggaatcaggaaaggagatcaccacttcactcaagaaggcaccctcccttgccactccttttccttgagatgacgatgacgacgatgaagaagcagcagcagctcctcctcctcctttctctcatgtttctcgttgctgtgacagcagccgctgttgctgccgatccacatccacagcaggtgcaggtgcagcagcagcagcaagcacagatgaggattaacagggccaccagatcccttcttcctcagccgccgccgaaactagactgcccgtccacctgctccgtgcgctgcggcaacaactggaagaaccagatgtgcaacaagatgtgcaacgtctgctgcaacaagtgcagctgcgtgccgccggggaccggccaggacacccgccacctctgcccctgctacgacaccatgctcaatccacacaccggcaagcttaagtgcccctaggccttcgccactcatgttatgtacaatgtactatcatcacttcaataaataaataaaaaaacttctggttctggaaaaaaaaaaaaaaaaagcggccaaactgcccattcttcttcagaacgtgagatgctacactgcact

SEQ ID NO: 142850 - DNA, 777 bp, Zea mays
  unsure (1)..(777): unsure at all n locations
  Clone ID: MRT4577_61759C.1
gttggggtttttgctttaagaatttctgatgtatatctgcatcattgcaatactaccattacaggtactgaagtgtatgtacatgcttcttcaaggtaatataaatgtaaacttgaatttcaccttttgaagaaagaacgaaaacacttttatacaaccacgggaacgggatcaccgcaaacaagaaagctgtgctatttatgccaaaactacattgaaactactacatgtgtaaacgtaaaattgacaccctgaacgagcctgtagcctctcaactgaacgagcctcaaagattcacaatattgaagtaggagcacgcacttggaaatttcacacgagtgaaaagtagagtaagatattggccaagaaacatacgatgcagtaaacaagcttcaaaacgcgcatcccagttaaccaggagcatctgattaattcctgtgaaagaactcagttatagtgaacaaagcatcagcccgctattgtgttcttctaagaatcagacaatacttttgaataaccccaactaatgaaatttcatcggccaacttgtagaaattggagcataattaacccctcatagtaatgttgatgaagcagttgatgcctcagatataagccacagaggctgacgtgcttgaaggcatgcagcaatatcaaaggggtgtaattcggctccatcaaatataagatttactcctggtaagactacannnnnnnnnnnnnnnnnnnnnnnatctggttttacgtcttgtatggatgattgttcctggtgccgaa

SEQ ID NO: 142851 - DNA, 184 bp, Zea mays
  Clone ID: MRT4577_6175C.1
cagactcctgggcagacacgtgtacgtttccgtcctactaggcaggaatgccacggggacgtcgttaattggcggatcagcatcatgtaccatcatgcgtgggaggtggctatgagctacgcgagcccacagtatgagaaggtgcaatgcttgaagatggataaatagcatcgcgaattctgtt

SEQ ID NO: 142852 - DNA, 3168 bp, Zea mays
  Clone ID: MRT4577_61760C.1
gaagaaagaacgaaaacacttttatactaaccacgggaacggggtcaccgcaaacaagaaagctgtgctatttatgccaaaactacattgaaactactacggcttaatttaggtactctagtaatgagtgggattggaatggattgagatgtattgagagagtatttgatctattagggatttacaccctctccaatccctccaaaacactctaatcccaaaatatccaaactagacctacatgtgtaaacgtaaaattgacaccctgaacgagcctgtagcctctcaactgaacgagcctcaaagattcacaatattgaagtaggagcacgcacttggaaatttcacacaagtgaaaagtagagtaagatattggccaagaaacatacgatgcagtaaacaagcttcaaaacgcgcatcccagttaaccaggagcatctgattaattcctgtgaaagaactcagttatagtgaacaaagcatcagcccgctattgtgttcttctaagaatcagacaatacttttgaataaccccaactaatgaaatttcatcggccaacttgtagaaattggagcataattaacccctcatagtaatgttgatgaagcagttgatgcctcagatataagccacagaggctgacgtgcttgaaggcatgcagcaatatcaaaggggtgtaattcggctccatcaaatataagatttactcctggtaagactacatccttgctgtctgtttcttctggatctggttttacgtcttgtatggatgattgttcttcattgtgctcaggatcaagtgcatatgacctgacagtgctcccatcaaagctcacaacttctgttcggggtcgctgccttccaacaaatttcagcctctcgtgttcacttggggctcctccactaggtgttgaagggtcattagacaaattccatctgccactaatactattgattaaggcacgtggtgagtcccttgagcttccacgcttgttaaataacttagctactggaccggttgcttgatattcactgcaaagttctctcagctgccttcttacattttgcatcacatcagaatgctcaatgagatcatctttctgaagcatatgggatgcaaccaccctttcacaaatcttctcgcacaactttggactgaataaaggaaccccgaactccaagctcagaggcacccacttgtagcttacattttctgggtcaaatttatctggttcatctatcctgtgaagtcttagtagacggaggtagccaagtgtgctcagctcaaatttactagataggtctttcaatacagaagtcaaatctaatatctgttcctttggcaaattagtttgggctaccacagattcaattgactggtcatcattttttaggggtaaagggatatccacagtgacaaggtttcctgacgtatcaagatcatgtatactaagtggttgcaccagtacagcagattgtttcagcatcgaattcaagcagtgtaacaataagttgcccttcagtaagttcccttcaaactttccccctaatccacccaccacagagccatcccaagaccatagcagtgccttctcacaaccagctaatggttcaggcagcaatctaaaacgtagccctttcatgaacacagcagatactggtccacaatgtcctgctgtatacagtactagcttcatccaaggtgtcatggaggaataagatggtggtccaaaatgaattgggcctgaagggcctggaagaactgatgaagaaggaagaggaaccatcgacacaataatgtcatagtcccgaaggaatagccgttctaatgtagccggggcaagtgaggctaagctctcacatcgaagaatatcaactttgtacttccttttgttcttcaaaactcgagattcagttgaaacatttagctgcacagttgaatcattcttgtcatcattttttaccatgctttctacactttccaagataaccatagctggtgatactatattcccatcactattatctaactcacctacgcactggttatgctcggaaaattcattatggttattgtcagcaacaccctcaatgttcaccttggacaaatggtcagcagcattgtcaatatcatgaacagagcttcttggagtctttgcttcactagtattatcagtaatttcatttgcggaaactccgccagactgtaaacactccaagaagcatcgcaaactgaatgcatgacttgcaaactcctctagcacaccctcaaatttctttccctctaagctagccagatcactacatagttctgcaatgcaagaagcacccagttttccagcctcatagagtgtgacagcatgagattttaaccctggcgatagtgagcccatcatcaagtatgatgtaacattggcatcaacaacaaagcccacatgagcagttccagaaattttcctgggtccatcagaatccatgccattcaattgttgaccagacttctctgagtggatacttgtatttgaaccttcttcatcatcactaagaatactactaggaaacgcaggtaaacgttcttcattaagaacagagttcgcatccatgactttcgcagcccagcccaatcggcaagcaaatgatgcagctgcctggagttgataaaggtcagcttgtaaagttgcagccagttcagcaacagtagcattagcacttgaaacaacaaatacagcatacaacagctcttcaattgggtcttcatatgattgatccttattggaaacaaaattttcaagcctagaaactttgaagcggtcatctgggtaaacaggcacatcgaagtacactagccctcttttataaagtccatctataaccttcggatcaaaaagaacatatgaattggcttcctctttacatattttgtctattgttgttgtctcttcttctgaaagtttcttgaactcttccagtgtaaagttaacaagacaaaccccccaccaaggctcaactgggaagtcaacaggctgtgtaggcagcatttcttttgcaatcgatttattcagtttccacattagtttctttgatctgcatttgttcataatatcaataaactcgtttctcccaacaccagtgagccttagtgcatcagcagcagtgaagttcggaac

SEQ ID NO: 142853 - DNA, 1123 bp, Zea mays
  Clone ID: MRT4577_61761C.1
cccacgcggccgcacgcgtgggatctcaccgtttcttcctcgtctccgtctctacacggcggcgccgccgccgccagctgctgccaggagccaagcccaagcctgagcttaaaccatgccgattggttctcttttcgtgtcgaggctggccaggtctagccatgccctccccgctgccgccgccgcggccatctctcaggcgcccaggccccagcacatcgcatctcctatattctccggccttggagcagcggctcgtgatttcagctcaagggctctatggaagggagcattcgtcgatgccttcctggctagaataaagaagaacagagaaaacatgaatgggaagaagatttggtctcgtaggtcttctattttgccggaatttgttggttccactgtgctcatttacaatgggaaaagtcatgtccggtgcaagatcactgaagggaaggttggccataaatttggagagattgctttaacaaagagacgaaggccccatcgaacaataacaggaaagggaaatcaaggaaagggcagaaagtaaaagtagaaatgtgcatgaaaggtgggtttaaggatagcttgatgacggaggagttgacgaacaagcacttgaatcaccagaattcatgatctggactgttttttcttagaccaataaccgcaggaaaatgttagctcatcttacttaggggtaatttggtaactctatttttccaagacatttttatttttctaagagaaaattaactaatttttcttagtaaaatagaaatcccttagaaaaatgaggttgccaaaccagctcttaaaaatttgcctacggactctgttcctctgttatttcctgcttgctatcggtgtgatcggtataccttaaactgattgtaagttatgctttagagtgattgtttatgaacaaaactagctacatttctgactgctgcaagcaaacttgagtgcctcaagtagccgtcaggtagaaaatcctttgctttgcgagtaatatcgcacctaagccctgcacatttgctgaagcaaacaagttttgccttgcatcatttaagcagaagaattcacccggtggccacttaaatagcaaaaaaaaaaaaaaaaa

SEQ ID NO: 142854 - DNA, 294 bp, Zea mays
  Clone ID: MRT4577_61762C.1
catatctcaagttcaaaggccaaaacctgagaagcggtgggctaagataggtcctactgcaaaccacccctccatatttccgtaccatttacaattcagtttctgtgacatctttttaaaccactggaggaaaaatgagatattctctaatttattcttctataacactctatatagagctatgtgagtactaatcacattgaataatagttataaaattattgtatagacatctgcttcttaaacagattgtgagttctttgagaaacagcgtggattttacttatctgtgta

SEQ ID NO: 142855 - DNA, 520 bp, Zea mays
  Clone ID: MRT4577_61763C.1
ctctaagtcacaatggcaggacccactgatcaactatttcctgccacgatcaggcatcattacacactgtcgtgcccggggaaaaacaattaacagctaggctcggcacatttcagctcgaaatatggtcccccatacaggagcgtactactataagcccccaatcatttttagggatgggccccaatcctttcttggagtgtcaccaggacaaccacaccatgcccacttacagactctatgcaccagctggacaagacctctcaaactaccacattccctggtgctcggagtgcaaatcatgctttaccctaatcacaccacaaacctgctattaatgaacatcttgcatttgtggcaaaaacaagactgacagaaatacgtagctcaaacttactcaggattcacagaagctaatgtgtgtcttcttcatcactgacaaacgcctttctgcacacaacataaattataacctgtgtagccaaggaagtcatgcctccatacatgtcttaccaagatc

SEQ ID NO: 142856 - DNA, 509 bp, Zea mays
  unsure (1)..(509): unsure at all n locations
  Clone ID: MRT4577_61764C.1
cctcgaggcncggccggggaaaaaaanttacaaaaaaaggggaaaaaaaaaaaaaaaattaaaaaaaaaaaaaaaaaaaaaaaaaaaaaaaaaaaaaaaaaaattttcgttgtcgccttcgtcccaccagttgagggggggactgctcctcggggggaaaacgctccagcctccttggtcgtcctgaaggggccagaaggggttgcccctgggggggccttctttgagccgccgccttctgcacctggcccggggaaggtttcggtcgccaagaaagtcgttgtcggcgcgcgctcgggggcggaagggtcggtcgccgttctgtcgccgccgcccctgccccgggaagggggttctggttttttgttgttgcccgcgaaggtcgccgcgcccaaggggccaccgccgcctgccgctattgccttgacttccgaaggggccgcggaacccatgggatctgaggaaatccacaggggggcttcccctctccctccctgaaggaagggggc

SEQ ID NO: 142857 - DNA, 301 bp, Zea mays
  Clone ID: MRT4577_61765C.1
ggggggggggaaaaacctggatggtttggggtattttaaattaaaacaggccttcccgaaatttttgaactggggggcccaaaaaaaaaaattaaaatcctttaaaaaccggacaggaaaaaaaacattacaagaggggggacccaaaatggaaaaagcatttggcctggcaattgcaaccggttgaaaatgaatattagggaaccctgtgaacaaatggggggggggtaaaaaaccaacctgaaataaagggtgccattggaaccaacccttaaaaaaattgaaaccaaatttgttttta

SEQ ID NO: 142858 - DNA, 442 bp, Zea mays
  Clone ID: MRT4577_61766C.1
ggcaacagaaccaattgcagattaatttttctgtttgtgctgaaagggaagaaaatggactgaatagaaaaataataaatatatgctattacagaatacagttttacagcacatcattcggaattttgcttttaggttggatagctcatctttggagcaccttttcagccattgttattaaggcatcacttaagcggtgcttaagcgccagagcggtcgaaggtcacctcaggggttaggtgatgcctcgtcgccttattcgcatgcctatgccccctagattccgctgtctcctcatcgattctgctggtggcctgcttgatttttcttctgctggctagatctcttccatctcccactcatgaattgcttgatctggagaggagcggagggaaccaaaccaggcacttgggtggaggcggaatagcagtggagaacgcgt

SEQ ID NO: 142859 - DNA, 203 bp, Zea mays
  unsure (1)..(203): unsure at all n locations
  Clone ID: MRT4577_61767C.1
cactcactccagtcatggctgggggggagngattcctccggacctctcctttcctttcctctctcgcccggcccactctcatgccgttctcgctccaccttctctcgccccgtcgccgtctgcgnccacacctgcgggtgggggggggggcaatgttcgtgctgnnncccttcttgctgggggggggggtttacctgaccatc

SEQ ID NO: 142860 - DNA, 760 bp, Zea mays
  Clone ID: MRT4577_61768C.1
cattgggaccctcgaggccggccggatgtgctctctcgcctcctcccccacctggtgtggctttgttaaactccaaatcccgacccccttcagtgtcgccgcttcttctctcacgcgttctccactgctattccgcctccacccaagtgcctgctctgcttccctccgctcctctccaggtgcgctgctctgcttccctctccggatgtgctgatcaagcaattcatgagtgggagatggaagagatctagccagcagaagaaaaatcaagcaggccaccagcagaatcgatggggagacagcggaatctagggggcataggcatgcgaataaggcgacgaggcatcacctaacccctgaggtgaccttcgaccgctctggcgcttaagcaccgcttaagtgatgccttaataacaatggctgaaaaggtgctccaaagatgagctatccaacctaaaagcaaaattccgaatgatgtgctgtaaaactgtattctgtaatagcatatatttattatttttctattcagtccattttcttccctttcagcacaaacagaaaaattaatctgcaattggttctgttgcaaatgatttattattaaacgaaatggcaggctgctacttcatgaaaaaaaaaaaaaaaaaagcggccatattataaaatattttttaatatatataaaaaaattatgtaatattatataaaaattttaaaatatatttaataaatttttaaaataaatatatttttatatatt

SEQ ID NO: 142861 - DNA, 225 bp, Zea mays
  Clone ID: MRT4577_61769C.1
caatttcaagctattcaaacaacttggcttgcggggatattagcacgagtttattagactgagttagtgagatcagacagcatgattacttcgatggttatggacattgagttccttatatgctgaaataaaatgcttaaatcacaaactgatagggtagatcagtaaatgcttgaccacatgttccattcaacttttcattcttattatacgatggtcaatctt

SEQ ID NO: 142862 - DNA, 395 bp, Zea mays
  Clone ID: MRT4577_6176C.1
ttttttttttttttttttttttttttttttttttttttttttttttttttttttttttttttttttttttttttaaaggggaccagaaaaaagcttgggtgaactccctcaccacagatggaacaaaggaaatccgccctacaaaagggtaaaaaaattactgggagttacagccttacgggccccccaaaaaaccaaatgggggcccccggggaaaaactttagctgccctggaggagcagcaccgtttttgtccacacacaaaaaaaaaaacgggggggcactacaaaactacgggggaatccggaaaatgccatccgtttgaactgaacggggggaaaccaagctttttttttaaaaggaaaaaatggggcattaccataagccccgccaag

SEQ ID NO: 142863 - DNA, 636 bp, Zea mays
  Clone ID: MRT4577_61770C.1
tttaccttcttgctgacacctgtacttctttgttcatcttctaattctatgcaggtagctacgatggcaaatgcaatatatggcgtgtgggcgaaataccgaatgcaaattacaggtataggtgctaagaactttgcacatggttgacttatgacagtgtacttccatttgttgtggtagttggatcaaaacttcaacgaaacttaatgcaaatgtgcactgaatatttcgcattgggtgagcaaatttgatcactcttttttcctacctacgataggtcgacctccgctagaaaagctgcagtaagttgtccttctgatcatcagctcacttcttttgcctgatgctgtgctcagtaccaatcagtaatcatactggttgcgagtgaacatttcagcagcttcagtttactgactgcatttcccttccgcagggcgaatgtaaagatgacaaagtatgcaagatgtgagcataaaaaatgttctactgtgctacatacctccctcacctatattcatgcttagtgcttagataggctcatatacatagttttaacacaaaaaataatcacaatggtattgaaaagggcgaatagcttatgtaatggtttgtcgaagtaaatatatacattttctg

SEQ ID NO: 142864 - DNA, 243 bp, Zea mays
  Clone ID: MRT4577_61771C.1
agcaacaacatccttgtgatgtacgactgctacacgccagccggcgagccaagcggcaccaactagaggcacaacgcgacaagagcatcagcagccctgaggtcaccgccgaggaaccgtgatatggcatcgagacacgacaacacccgcctccaatcacgcacgaactgggcctgtgggtggcgaagcggtagcatccccagacctcatgaggccttaccactgtggaagcagcgccgaaaa

SEQ ID NO: 142865 - DNA, 284 bp, Zea mays
  unsure (1)..(284): unsure at all n locations
  Clone ID: MRT4577_61772C.1
aaagaagaagaaaaatcaactttccacagtgtgtgaatatatatatactagctaatacattatacagngtatatatgtatatatatatatatatatatatgtgataaagtcagagcgtaataactgaacacgaaaaatatatgaggagaacgcttgggtttttggtcgcctcccctgcctgtatcgtactgtactgtacgtcccccaatttgaatccgaacccgcaactaacacgcgggcaaaaattgacgtaaacgacagacaacagcgcgccggactatacg

SEQ ID NO: 142866 - DNA, 602 bp, Zea mays
  Clone ID: MRT4577_61773C.1
actatggaccacacccagagcaggccatcactagctacctgtgcagaggcaatggtcgtgacagaggctggagctgggtggttggagcgtcaagattcctcagggtgacaagctgtgcacggggctgcgtgactacacggagctgttgcgcacgatctatcccgctcagtacatgtatcatgcctaccgtgctggtcgacggcaagtcggtcggcaccgacctgcctcctcatgtacaccgatgcggtgccgatgctgacgttctccaaggaaaagcttgacacggccgaccaccagaacaacgggctgacgcacatggtggaggacggtgagctggcgcacttctacatgaacttcaagatcacgctgaatgcgacttctgccattgtagcagacgagggcggcagccgacgtcagatggtccatggagtgcgacaaggacaacacaccaggtgcccgacccgggacctatcgatgacaccgccaccaagacggtgcacgatcttgacctataccttctaagcaactactaaggcacgacaactggagatggagcagttcagttacagttgcatgacattcattgacgcgtcacagtttac

SEQ ID NO: 142867 - DNA, 363 bp, Zea mays
  Clone ID: MRT4577_61774C.1
gaacaagaagaaacatgcagacacatggtatttatctgtgtagaaaccttatcaatcgtttttcgactgtataataactattttctgtaggataactacaatgcaaacttctaacgcatgagaaaatgtaattaattttatgctacagacacagagtcatttcaaactggtctatcaagcaaatcaaagccttgcaccaagtttttcaggttatagtcttaacctacccgaaataacatcagaacggtaacctgtatcttttttcactcttcttacaacaaatcaattatctggaagtttcattttatatgccaaagatatatggaatacttgaatagtaacactaaatcgtgatatataagc

SEQ ID NO: 142868 - DNA, 851 bp, Zea mays
  unsure (1)..(851): unsure at all n locations
  Clone ID: MRT4577_61775C.1
ccggccgggccgctacttctgactgttgccattgtgtcagactccttttcaactttcttctcttttattcatttcctttttgtcgctctatttccttcctatcctttcacttctttgtgtctgttgctgtgtccgtcatcgtcccaactcgaagtcacgtccaacaacaaaatatcggtcggtcaccatgatcatcacacgcgctctctccatcaccaactttgttgtcgccagctcggcgctcagcttccaggttggcgtgctatacccgtggcacaagcagctggatgacgactttgaagcactcaagagagagcatcttcgcgtcctgacagccgtcgagggcaaggtcggtcgaacacaagaacctgctcttcttcaagagaaccgaccgggaattctcagcatgatcggaaacttggcaccgtggaaagcctgagcgcatagccgacttcgggacatatcacgcataacacaacacaacacaatgacaacctcgcatacccccagccattacggcataaaaaaaaaaatacacgccagaggcaagatctagacggctcgaatatttattcacaacaacgaattacacggtttctcattccctttgcatcaggcgtttcttgtttaggcattcagaccccctcggaatgagtgnggccggtaccggtcacggtcgggcaccggcttcacccgaccaaagggacccgactgagcgatgcgaattagattcaataatttatcagttggntatcggcacagatatattttcgtatattgttctgcttagaccgtcatattccatggtggttttaattggcggattggtactactnaataaatatttccac

SEQ ID NO: 142869 - DNA, 175 bp, Zea mays
  Clone ID: MRT4577_61776C.1
tacgagtacaccccaatcactgacgatagggcggatgtgcggaagatcgatgatttctacttcaatctggcccctactatcaagtgactatcccccactcactaaccacataggccgccggatgaacagcaagtgtgaccacatcggccagagctagcataacattttgtacagc

SEQ ID NO: 142870 - DNA, 511 bp, Zea mays
  Clone ID: MRT4577_61777C.1
gggagaaaacaaattagggggtttcaacaattaacccgggggaaacaaaaaccacccctttgggacaaacaggggtcattttaggggacaacgccaactcaaaatctcgacttgcctatgcaagggaacgggaaacaaaagacacacatgcctttggcagcataaaaaaatccacgggcggacaccctttccgatccgaaagacaaagaagttgcatagcatagccggggagcttaattgccggggacaaaattgggggggtaggcccatgccttggtgttgacgggggcaacgatgggggcagggaggttttcgagggggcccttgccggggacaaaggcctggacaaaaaaacccaacatggaaaacatggggggggggccggttttgagccccttcaccttgagcccgggaaaggcctcgggggccccggccaggccggggggggcaaaactgcccccagggtacaaggggttgaccacctccccggggggcccgccggaaatgggga

SEQ ID NO: 142871 - DNA, 267 bp, Zea mays
  Clone ID: MRT4577_61778C.1
cccacgcgtccgcccacgcgtccgccttctcgtacggagagtgcatcgggggagtggtgtgtttcatgttcactttgctgttatactctaccataccatcagtgtctgatttggaactgcgtgatgccttcggtgaacgccgctgtgaatgatctcttcttggtcaaccttgtttgtatgccaactgagtgtgacttctattttatgttctgttttctttgctttgtaattatgtgttagtaattattaataatatatattttttgt

SEQ ID NO: 142872 - DNA, 546 bp, Zea mays
  Clone ID: MRT4577_61779C.1
cggttgaaactggattaaaaaaaaaaaaaaaaaactactgcctcgttgggcaacgtgttgaagtgtgatttgagccggctgaaactggattaaaaaaaaaaaaaaaaaaaactcctgcctcgttgggcaacgtgttgaagtgtgatttgagccggttgaaactggattaaaaaaaaaaaaaaaaaaactcctgcctcgttgggcaacgtgttgaagtgtgatttgagccggttgaaactggtttaaaaaaaaaaaaaaaaaaactcctgcctcgttggccaacgtgttgaattgggattgggcccggtggaaactggtttaaaaaaaaaaaaaaaaattcctccttctttgggcaacctttctaaaagtggtttgagcccgtttgaacttgtttaaaaaaaaaaaaaaaaaaactttctgccttgttgggcaacgtttttaaggtggttttggccctttttaaccttttttaaaaaaaaaaaaaaaaaattcccccctctttggggaaccggttaaagtggtgttttgccccgtttgacctgtttt

SEQ ID NO: 142873 - DNA, 556 bp, Zea mays
  Clone ID: MRT4577_6177C.1
ggtaacgaagagacaatagcaacatttttttttaacaaacaatgagctcgtgttaagaggaacttatctaaactctagaggccaagctcaaacgtgctctaaatgttggacaacctgagattcgagctttagagttcaaagagtgggcataaaatgtctctaaactttttgcaagctctaaagtttgaaggggataccgaacagcccttgttggggaaactttcaggggagctctcgtatagcaaattgttaataaccctgtggttatggccccaaaaggtgaacatacccttgggccttgcatgggaaaactggatccacaggaaagcaaatggcttgtatgagaaagaggtggtcggacattccattggctgcactttgttgacctcaggacccatgtggtgcggcgcgacattttcctctaccacccatggatatatgttggcagattcaggaacagttcatgatgtcgatgcctccagcagtgcttgcttcacaatattgagaaccagtggtgatacctctgctgctggaggcactactgttgtaagaatgc

SEQ ID NO: 142874 - DNA, 292 bp, Zea mays
  Clone ID: MRT4577_61780C.1
cagcacagcacagcacacgcttccttctctactggagagaagcagaagcagaagcagaagcagaagctgtagaggggacctttcttctgttctctgatcgagctctgaataccggggatggcgtcctgggcggctctcctggcgctgctgctctcggcgttctcggcggcggcggcggcgcagctggacgagaggttctacggccagtcgtgccccagcgtggaggacgtcgtgcggaaggagatggtgcgcgcgctctccgtcgcgcccagcctcgccggcccgctcctca

SEQ ID NO: 142875 - DNA, 721 bp, Zea mays
  Clone ID: MRT4577_61781C.1
gcggccggtctggaaacaatcttcccacgccggacccgcaaggctgcaactgcggcatgcagatccgcagagcacacacgggcaccgggcgcaccagtgcaccaccgcatacggccgtgcgcttcctttccttcccccgccgccgcagattttccccgcagtcccggttcccgttcaccacctccgaaccagaggaggaatggccatctactccttcctttctgttcgcaagcgcccagttgttgtcgtcgccgccgtcaccctcttcattgtcgtatcctctctcttcctcctcttcagccccgcaccgacagcgctcccgtttttctcctcctcctcttcccacctctcctctcaagcttcaattgctgccgtctcctctaacgcatttccacctgagaccccaacctctgttgtctccaactgggtcagcagcaacacttctgctgatcgcgtctctgctgacgcatctccgcccgtagtcggaaccgccatcgcgtctgatgcggtcagcaacagcacggctgacccgcctaggccagataccaccgccgctgctggcgacgcgaaggctgatgtgtcccaaccagatcacggcatgccccctgccgccactgaagcgagtggatcggcaggcaacggtgagacagccgcgggagtctcgagcgagagggatgaggaggggcaaggcggcggcggcgccgtggaggagctaccatcg

SEQ ID NO: 142876 - DNA, 655 bp, Zea mays
  Clone ID: MRT4577_61782C.1
ctcgaggccggccggggtcttctagagtggctcaaaaaagaaactctcggggtacaccatactggtcttgctacttctagatagaggaacaagatagagaaggccagccgacatggcctcttaaaccgacaagccccattgcccaggagaacctccgcgccgaggagcgagccgggcgcattccccgtcacgtgacaccggtaccaggggaaggaggacacacatgtcgactgtctctctctccgggggcggcagccgcggccctggatctggacggcaactccggcgcgcccctcagcatctgcatgattggggccggagggttcatcggctcccacctctgcaagaagatcatggccgagacgctgcatggcatcctctgcgtcgacatatactgatataagattcgccagctcgtataacccgcgtcgtcgcacatcgagttgtgcatctgcttccaacgactaaacatcaaaaatgactccagaggtcgagggactcattaagatggccgaactgaccatcaacctggagtgtatctgcacgccgaaagactacgactagcgtcctctctactgcatctacagtgacttcatcgatgtgctctcagtggacaagtactgctccgatgacagcaagcgtctcatccgcttct

SEQ ID NO: 142877 - DNA, 368 bp, Zea mays
  Clone ID: MRT4577_61783C.1
gtttcttggatgatgtatgcggccaatcagtaataagaagtcacactcccagagggtagggagcaaggttcgaggggccaccaaaaaaaaaaacaaaaaaaaacccggctaccgagaagccagacgaagccgggcatcgatgacggacccaaaactacgtgcccttgatgaccaaacgatctcccaggaggacagccgaccgaaactctgggcgcggagcctaaagcttctgtactcgacatcatggacacgctgccactcaccaggttatccattgaagaaaagacccctgacttccgggctggcacacaatcgtgctacaccgatgcgctttttgcttccgcacttttgcccagcgtgatgggcaa

SEQ ID NO: 142878 - DNA, 455 bp, Zea mays
  Clone ID: MRT4577_61784C.1
ctatggtacagatatccgttctggatccagattttcaactgctccgtattgtcggcagggggtttaatgcaaagagtgctatccgagcgcaggcagaaaagcaacgtgctcacaggcatgacaaggaaccacgtcttcatggctgtccttcagctgcacggggatcttccaattcattatggtgcatcatctacgagagtaccccaacacgactccccttatcattcaccaaagtctatccagcctgctcctccttctccccggcatgcccatcgatgacgccgccaagctgatcccagtctgctcgtcttgataccattgaacattgcttctgcctgtgatgggaaacacggcctgaaaagcgttaggctgtgctaactgcaagacattcgtttgagctgagctctctctctgtctctctgtgtgccgtaaactattcgaatgcactgagggca

SEQ ID NO: 142879 - DNA, 1098 bp, Zea mays
  Clone ID: MRT4577_61785C.1
cggctccctcgtggcctctctcccctcctcacacaggcacacacgcactttctgtcagcttcctcccctgcgccgataagcaagcccgtgagccaacagtggtgccagcggcccgagcggcgaggatgcacagcggagcgaggaagctcatgtgggggaccagcccggacaggcccgacgaccacgacgtggtcatcgtgctcgcctcgctgctgtgcgcgctcatcaccgtcctcggcatcggcctcgtggcgcggtgcgcgtgcgcgcgcgggcccagcgcgcaggcggcggctgccgccaacaggggcgtcaagaagtcggtgctgcgcaggatccccaccgtgccctacgccgcctgcagccaaggggaaggggacgacgcggacgagtgcgccatctgcctggcggagttcgaggagggcgagcccacgcgcgtgctgccccagtgcggccacgccttccacgccgcctgcgtcgacaggtggctgcgcgcccactcgtcctgcccctcctgccgccgcatcctctccctccagctgccgcccggcgagcggtgccgccgctgcggcgcgcggcccctggacgacggggacgctgggtggaagcccacctactacagcgccatgccgccgttcctggcgtaagcggcggaggaatcgcccgatccggaagcaaaggaaagcaaagcaaagcaaaccttcgggttaagttcctcggctgcagatttcggtactgcctgtatgtggttggtagtgcgtagcaatctgggaatgaggaaaattaggggatcaattaggttgtttgttgcagctgaaaacactgcactgcagcgtgcgtagtagtagtactagtaccaggctggcgtgtacagtacagtttgtaaatactcaagtaattaatatgcatgcgatgtgcgtttatttggcaaaaaaacgagaccccctcgcgttttcttggttgttttctattattcagatgtttgtaggcaatccccacgaggtagacagggaacagagaaaccgcttggttcacctgtgtttatataatactcctgtattatccaacatgcatggtttaaaacctgtggcaagatat

SEQ ID NO: 142880 - DNA, 232 bp, Zea mays
  Clone ID: MRT4577_61786C.1
ttgttctactgctagcaccagaccgctgtcttcttgagcacattgagggcttcggatttctcccggggtggcccctcgccacaccccaaaaatgcgtatacaagccacccctgaccggccttttcttgtcatgtcaagccaattgctccaaagtttcaggaccttaacagggcgttacccaaccagccaatcatctgggagattccttgcttaatgggtaatttttgctacc

SEQ ID NO: 142881 - DNA, 3894 bp, Zea mays
  Clone ID: MRT4577_61787C.1
atgatcgagaagctcacgggcacgatctctgtcctccaaaatgacgtcgagtcgttgaagaaggacaaggcgccttcctcctcgccatccggcagcggcggccagcaccacatcgatcgaccgccaaggttccaaaagatagacttcccgcgttttgacggcaagtcggaccccatgctcttcgtcaaccgctgcgagtcctactttcatcagcagcggatcatggaggagaaggtttggatggcttcttaccacctcgagagcgtggcccagttgtggtacctccagctacagacggacgaggggactccgcgctggcaccgcttcaaggacatcctccagttgcgcttcgggcctcccctacgctcggcgccgctgttcgaactcgctgagtgtaggcggacgggcaccgtggaggagtaccagaaccgcttccaagagctactaccgcgcgccggaccactggaggaacgccaacgcgtgcaactcttcacgggctggctgctgccaccgctcagccatgcggtgcgcatccacaacccccagtcgctcgtggcggctatgagcatcgcgcgacaagtggagctgatggaactcgacagggccccagcgccagcccagaccaggccagccgcgcgcgccgtcctgcctcctccgccgccgcgaccggcgcctcttccggcgccccacgtgcctttgacgctcccggcaccaccggcgggcgcggctccaggccgtggcgagggcagaaggctcagcactgaggagatggctgaacgtcgtcgcctcggattatgtttcaattgcaatgacaagtattccaggggtcacaacaggttctgcaagcgcatcttcttcgtcgaaggcgtcgagatcatggacgaagacggcaccgaccaccccgacggccccaacgctgaggcgtcgtgcttctcgttgcaggccgtctcgggctgccccgtggccgacaccatgcaggtggccgtcatgctaggggccaccccgctcgtcgccctcctcgactcgggcagcacacacaatttcatatccgaggcagcggcgcggcgttccggccttccccagcaacagcacccgcgcctatcggccatggtggccaacggcgagcgcatcacttgcatgggcgtcatccgcaacgcgcccctcaccgtcggcggcgacgcattcctggccgatctcttcgtcatgtcgttggccgggtacgacgtcatcctcggcactcggtggttgggcgcgctggggcccatcgtgtgggatctcgcgtgccggcgcatgtcgttccagcaccacaaacgtacggtctgctggaccggcgtgcccacgtcctcggctccggtgctgggcgccaccaccgcggccgagcctcttctcgcggctcttctggacaccttcgcgaccgtcttcgcagagccggccggtctgcccccgttgcgcgcccatgaccaccgcatcatcctcaagcagggcgcgcagccgatggcggtccgaccctaccggtacccggcggcgcacaaagacgagctggaacgccagtgcgccgccatgatcgagcaagggatcgtccgtcgtagcgattcaccgttcttgtcgccggtcctcctcgtgaagaagcccgacgggtcgtggcggttctgtgtcgactaccgcgcgctaaacgcggtcaccatcaaggacgccttctcgatcccgatggtcgacgagctgctggacgagcttcatggtgcccggttcttctccaagctagacctgcgttccgggtaccatcaggtgcgcatgaggccggaggacgtgcacaaaatgacatttcgtacacacgacggcctggacgagttcctggtgatggcgttcgggctttgcaacgcaccggcgacattccaggcgctcatgaacgatgtactccgtcccttcctatgccggtttgtccttgttttctttgatgatatcttgatatatagcaagaattgggaggagcacctgcaccacctcaggatagtcctcgaggaactgcaacgccaccaactcttcgtcaagcgctccaaatgcgccttcggagccccgtccgtcgcctacctcggtcatgtgatctcggcaacgggcgtggccatggatggacccggcaaaggtgcaggccatcttcgactggccggtgtcgcgctcggctcgggcggtgcgcggtttgtgcccaactacgacacggtcgccgcaccgctcactgccctcctcaagaaagacggcttcgcctgggatgacaaggcagcagcggctttcggcgtcctcaaggccgccgtcacctcggcactggtcctcaccatgcatgacttcacaaagacctttgtggttgagtgtgatgcgtcgtcacacgggtttggcgtcgtgttcacccaagagggacacccggtggcattcttcagccgccccatcgctcctcgtcatcaggcgttggcagcctacgagcgcgagctcatcggcttagtgcaggcggtccagcactggcggccgtacctctgggggcggtgcttcgtcgtcaagacggaccgctatagcctcaaatacctcctcgaccagcgcctctccacgatcccgcaacaccattgggtcgataagttgttgggatttactttcactatggagtacaggtcgggcgccacgaacgtcgttgcagatgctctttcccgccgcggcacggaggagagcgtgctgctagcgatctccgcgccccgcttcgacttcatcgcgcgccttcgtcaggcccaggccatggacccggctctagcagccatccatgaaggagtcggcaccgggacccgcgatgcaccgtgggcggtggctgacagcatggtcacctactacgggcgcctgtacattcccccggcgttgcccctgctgcaggagatcgtggccgccgtgcatgacgatgggcatgagggcgtccaccgcacccttcaccgcctgcaccgggacttccacttccccaacatgagacgcctggtgcaggactttgtgcgggcgtgtaagacgtgccagcggttcaaatcagaacatctacatccagctggcttgttgcagccgctgtcggtgccctcagcggtctgggcggacattgcgatggacttcgtcgaagcgcttccccgggctttcttcaccgacatcgtccgtctccacgggataccgcaatccatcgtctccgactgcgacccgctgttcacctcgtcgttctggagcgagctaatgcgcctcatgggcaccaagctcctcatgtcgtcggcgttccacccgcagacggatggccagacggaggcggccaaccgtgtcatcgtcatgtacctgtgctgcctcacgggggatcgtcgtcgccagtggcttcgctggctcccctgggtggagtacgtctacaacacggcctaccagtcgttcctccacgacaccccgttccgggtggtctacggccgtgatccgccctccatccgctcctacgagcccggcgacacaagggtggcggcggtggcacaagaaatggaagcgcgggaagcctttctggctgacgtccgcttccgtctcgagcaggctcaggcggtccaaaagctgcagtacgataagcaccaccgggaggtcacatatgaggttagggactgggcattccttcgccttcgccaacgtgtggcggtgtccctgcggcgaaccatcacggggaagctcaagcctcgctacgtgggaccctaccatgtcaccgagctcatcaatgacgtggttgttcggctagaattgccgcccggcgcgcgcctgcacgacgtgtttcatgtcggcgtgctccgaagtacgtgggctcgccacccaccacaccgtcggctctgccgcctctgctcaatggtgcggtag

SEQ ID NO: 142882 - DNA, 625 bp, Zea mays
  Clone ID: MRT4577_61788C.1
atttctcctatcacaccacttagtctcgtgcgctctccgtgccagcgaggactcgcggccgtcgccagcggctcgttctcctagatctccggccaaccggtgaaagaataggaggtgttgcacgaattagttccgaatccttctccattacgattttcgcgccgtcgagcatcatcagcaacaaatggctgacgctgaggacattcagccccttgcttgagacaatgtaactggcatgtgcaaggctgactttgctggcgacgatgcgccaagggctgttttcccaagaattgtcggacgcccccgtcacactggtgtgatggttggcatggggacagaaggatgcgcatgtctgtggcacgaggcccacttcacaagaggtgtatcctgactttgaagtaccccatcgaacatggaattgctagcaattggtatgacatggagaacatgtggcaccactccttctataatgaactgcgtgtggagcctgaatagcaccctgtgctgctgacgtgagccccactcaaccccgaagctaacgggcagaagatgacccaaatcatgcttgagaccttcaatgtccctgccatgtatgacgccatccaatgtgtgctttccgtgcacg

SEQ ID NO: 142883 - DNA, 262 bp, Zea mays
  unsure (1)..(262): unsure at all n locations
  Clone ID: MRT4577_61789C.1
ctccacaattcnncatctggaaggacttcgtggatacgcggccgaggatcccgtaaatgaacagtttcggaccctttcaaactcacttgtgtctgcacaggcatatgttggcctctttacccatgggcctgctgtagtctttcttcaccatcgtggttttgaacttcatctggttttcgacaactcgcagccttcagcggcgcctgaatagccttctctcgctattagggttgcgcccagtcggattcaattttctgggttg

SEQ ID NO: 142884 - DNA, 143 bp, Zea mays
  Clone ID: MRT4577_6178C.1
gcaggctgaggctttttagaccaccaaccggggcaggatccaacctaataggtacagaatggaacagcaaccagaacaggggccaacataatagcaggggaatatgcacaggggacttgaaatggacaaaggagttcattcga

SEQ ID NO: 142885 - DNA, 282 bp, Zea mays
  Clone ID: MRT4577_61790C.1
gttgtgctctctatctttattcgatccacgcctaacatcgagccagccgtctagcgcgggtgtctccaccgacgacggcttcggcatgcctagccgtatcttacgaaggacagcgccacacccagatccccttgctgattcaatgcagaaccccagacagccagtacgccagcctctgctttcagctgctgtgctatatggatctggccgtatgtcaagcgcaattagcaccaccatgactaaaagcatggtgtacctgcacgtgtactgccatggcacaca

SEQ ID NO: 142886 - DNA, 721 bp, Zea mays
  Clone ID: MRT4577_61791C.1
gcacgaatggcgcggcggcacggcgcgctccccggccgccgcccacagctggtcccgcaggcccctgtccatggacacgtcccgctcctggaagcgcgcgcccaggccctccagcagcgcgcgcacgccgttgcagtcctcgaaggtgcgccgcacgccgcgcagcgtcgtcgtgtacagcaccacgccggagccggagccggagccggagcccccgccgccccgagggaaccccagcagcgggtcgggtgacgcgcgggcgtcctcctggtcctggtcctggtcctggtcctggtccgggtccaccagctcccacgcgtccagcggctccgcggagggccgccgccgccggtgcgccttggtgggcgtctccggctcccgcgcgtcgaagaaggacgcgtcgtcggacagggcgtcgacgtcgccgtggtactggcgggcggacggcggcgctgcgccgtcggccccgcccgccgccgggagcgacgacttgagcgcgcgcaggatgcgcgccttcaaggtcttgatggtcatagcgccgggcggagtggactccgccgccggcgcagcctgtcggtggggctgtcagactttgagacctcgattcgatcgatcgatcgatcggggaggctgccgctttcttgcctcgcttttgcttgcctctggagtctggacgcgtgtggtcttggcgataatggtggtggtggggaaagtgggagcg

SEQ ID NO: 142887 - DNA, 238 bp, Zea mays
  Clone ID: MRT4577_61792C.1
aaataacaaattatatatcatatttatttgcaatcggaagtaagacgaaaaatttaacatctgaataagtattctgatttatccctaaccagaccagcccaacaattgtttacatcttcagttcaccaactgtctctaaatttttttgaccttgacaaccttttcaattattggatccacaattgaataaacctttttcttgaacttagtaaccttttcaattatggccttggttttt

SEQ ID NO: 142888 - DNA, 246 bp, Zea mays
  Clone ID: MRT4577_61793C.1
atttgtttctgtttgtgcgagacaaatcacttgcgttcctgtatgcgtgagactgtttttgattctgggggtggccagacaatgtgtgagctgctactagtttctgttcgcggccagacaatgcctttgttttcgtttcaactgcctgctttcattggtgggaattgccagtttcaaaaacagacacacacaacaatctctttttagctgagtgcatctaggtcatcagcgccacagcgagatctg

SEQ ID NO: 142889 - DNA, 941 bp, Zea mays
  Clone ID: MRT4577_61794C.1
ccaaacccccgctgcttgcttcccggccgaaggttcctcgtatataaaggcggcggcgtgtcgtccggtctggtgctccgtgctcctgtgagacctgatcacctggagcctggagggtgcaagggagggaggcggtcgaatccgtcatccgctgagcaccgccagccccgcacgcggaggtcggagggctacgctccggagtccgaggggaaggcagaggaggcaagcaggcaggatgggtgccgctggtgacgccgcggcagcgggcacgcggtgcgagctctgcgggggcgcggcggccgtgcactgcgccgcggactcggcgttcctctgcccgcgctgcgacgccaaggtgcacggcgccaacttcctggcgtccaggcacgtgaggcgccgcctgccgcgcgggggcgccgactccggggcgtccgcgtccagcggctcctgcctgtccacggccgactccgtgcagtcgaggggcggcgccgccgccagggagaggcagagggaggagggcgccgccgcgcgcggaggcggtgctggaggggtgggccaggaggaagggggtcgcggcggggcccgcgtgccgtcgtcgcgtcccgctccgcgtcgcgatggccgccgcgcgctggtcggaggtcagcgccggcggtggagcggaggctgcggtgctcgcagttgcggcgtggtggatgacgcgcgcggcgagagcgagacccccggcggcgggcgctccggacctggaggagggatgggccgagtgctctcctgaattcgtggtccggcagggcccacatccgtctgcaacaacatgtgggcgacgttagtttgtccttttcctccctaattattttagtaattaacgagatcgatcgtgtggtggtggtgtcgttggcttcctctcgtcgtccgattaacaaaagccggttcgatttgattac

SEQ ID NO: 142890 - DNA, 278 bp, Zea mays
  Clone ID: MRT4577_61795C.1
attagaccaaaaaaccagaggaactgggtaccgggatccccaggtaatttacatggaatgaatgtaacatggtccaaacagcaacagaggtcttaacgagtacaagacaaaaatggagacaaagtgcatcaacacgaacaacggtattggccctacaaaatttaatgtggatggagattctgggtatagaacaaaacaaaacaaaaaaaatgcatgcaaatggaaacagataagaagcacgcgattatagttggacagaaacaatttgaaaaatagaa

SEQ ID NO: 142891 - DNA, 160 bp, Zea mays
  Clone ID: MRT4577_61796C.1
ggatgtaccaacagaggtttgaaaagtgaccatgaagggacaaggcgagatgaacacaatggttggcggggtagacactctttggatggaataatcaaattactgggcatcaaatggagctggtacataacgaaagacaagaggtcacatgcgaatgggg

SEQ ID NO: 142892 - DNA, 571 bp, Zea mays
  Clone ID: MRT4577_61797C.1
ctcgagttttttttttttttttttttttttttttttttttttttttttttttttttttttttttttttttttaacccaaaacttatcaaaataataataataataactcccaaaacgataatcgatttcaaattacctttgatctcaccatgactttggcaatttacactttttccacactaaacgtagcaaaaagagtagtagccccattatgcgtttaactcacccaaatcgttttcgtacgttttcctgatcacctcccttttgagcttgagggcgggagtgacaacccccgactcgggggtccatggctttggtatcagcttgattttgactggtatttaaaacttttaaagtcgcgcttgtttcgaagcctttgttaaaaatccaagcacttttttaacagccttttgtttttggcacaaatttgaaaaatcgctgtatttgattccttgctgcaaagcccatttttccagctaaatgggggcagccaccacgaaagcaacacagtatttggggaaaggatcagcatggatcataatgttctccacatatggcctcgggccaaatt

SEQ ID NO: 142893 - DNA, 993 bp, Zea mays
  unsure (1)..(993): unsure at all n locations
  Clone ID: MRT4577_61798C.1
ggtacccctcgnggtctcggccgggnaaaaaaagaaaaaaaaaaaaaaaaaaaaaaaaagtgtgcgcacttcaccccccctctcggtctcaccctcctggcgacgactgggcggccgaccggccgtcgccgccgccccacgccaggtttcaaagtcttcgtcaggcccttctccggcgacttgagcaccacagggtgacaaggatagctttctcgggtcactgaaggaagacatcttctcgacgcgttagaccttctgacggttggctggttgtgctttaagtgttcaaggggtggattaggaccgggaaactctgtactgaagggaaggtcaaaagtgtcaagagagcttgttccaagatggatgaaggtcagggagttaggtattggtgccacatgtgtcaggaggtgatagatcccatgcccgagatgaagtgcccaggctgcgagggcggggtttgtggaaggagatggactctgaagactttgagccagctgcgaacgcgagatcaagactcaggagggaggccatggttgaagctgatgccgaccaggatgacgaagaggatgattcagatcatgagcttgaactattcggctcgagcggaggatgaggcgctcatcagcgctttttattgtgctggaggctgtgcgtgaccgtgatgaagtaaggggctcggatgacaccgacagtgatacagaaagaggacggaaagcattaatactgatcaactccaacaacgagggtattattctgaagggaacattcggatctgatgacaaccaggaggactcaagcaacacaagttctggtgtatcacttggggattactttcttggtcctgccttagacactctcttgcaacgtatggcggagagtgaccttagtcgttctggcacaccgcctgccaagaaggaagcagttgccgcactaccaaccgtgaacatcgaggaagcgttgggctgttcagtctgtctagaggattttgagatg

SEQ ID NO: 142894 - DNA, 346 bp, Zea mays
  unsure (1)..(346): unsure at all n locations
  Clone ID: MRT4577_6179C.1
gggggccaccgcgacggaccccagccaaacgcgccaaccaaggcaaaaacccggaccgagaacgggccaggagggggccagacnggcggcgaaagggagccccacagaccaccggaagaagaggcacacgcggccgcacgccgccgccagaaggggggcagcgcncaagaagacgacgaggaccacggnggcacaagagggngggcgcgccacgggggggccagncannacaaccagcgacgacgaggaggcaccaagggacgaggacggaccgcggagagggccgaagcgggcacaacggagggaacggcacagagcnacaacgaaggngggagcacacccggca

SEQ ID NO: 142895 - DNA, 416 bp, Zea mays
  Clone ID: MRT4577_617C.1
ggggcgggccacacccttccgttcttggcttagcttgcaattgcttttaggtgctaccgccatctctcttttgttgtggaggggaatgtaaacgccgggcgggtggcaaaaattcccatggcaaccttagccacaatggccctgttgaagcccgccgccaaggcctgggggcggttggatctttctacaagaatcggaatggttttgttgttcttctgaccggggatgactgcaaaaaaggttgtttttttattttatgattttttaataatttatattgtatttaattattatcaacttttaaaccctaatattctttgtttttgtgttctaataataaataaaaattaaggtttttccttttctttttattaaattttatttttactttattgcttcttaaattcttttctttt

SEQ ID NO: 142896 - DNA, 416 bp, Zea mays
  unsure (1)..(416): unsure at all n locations
  Clone ID: MRT4577_61800C.1
ttcttccacgccgtccgcaccacantaagaggggaaatccttcagtggnaggtgaactttgaggaaaacgctgtgatgcttcccaagnaagcataaagggcaagggctatggnaaagctaattttctgaagggaaaacttngaagnatgctatttgaacaccnttaccaacgtcaatatgtgcttgaatcccactctcagnnaatcagtgtatgggtactgagagcatcttgngtttattaaaaaatgaagaaaccagctgnntgccctattcgtgatgccatatgctgcttctagaaaatcaaacccagtactcttgcaaaaaggctattaaaactcgtngtaatgnngcatatgccattgcttggcaanatggggaggaagcttgctcatgnatctgcncacaagcatctaaca

SEQ ID NO: 142897 - DNA, 287 bp, Zea mays
  unsure (1)..(287): unsure at all n locations
  Clone ID: MRT4577_61801C.1
cgaataatgagttgacatgccatcgcgtgcgactcattattaacaataaaacaagtttcctcttattatctttttaaaanaaaaaaanaaannnnnnanatannnaaaaagaaaaaanttttaanttnntaatttatggggggggggggggggnntccnctctttgggcgacttgggccgcgttccctcccactgtggggcggttggtcctgcttcctgggggccgcgttcgcctttttggggcccggctttcgctttctgggcccgtgttttgcaacggtggttcg

SEQ ID NO: 142898 - DNA, 264 bp, Zea mays
  Clone ID: MRT4577_61802C.1
aaaaacttacgtggtgccctcgtagctgaattcctcaggcgtttcctcccctctctcgacagagaggctctgtgcgggccccttattccttgttcttcttcatggctaccgcagaggggagaccgcgactcccccgactacctgcccaacatcgttcgcacccgcccacaccttgcacctgttctggcgcacgtctctcgctcgttgcgcgcgcctctctctgttcgcgtctcattacaccacacaaatcagccttgcccgcgc

SEQ ID NO: 142899 - DNA, 446 bp, Zea mays
  Clone ID: MRT4577_61803C.1
taaatggacagacagagcgggcacatgacgaggccgttctcgttgcacccgccgcggcagcgcccgccgccgtctccccccgccttccggctgccgtcgcaggagccgcacaccacgaacccgacccccgcgcacgcgccgcacctgcttctcgccccggcctctccgcacggcagcagcggggcgaggcggccctgctcgtggagcgcgagcacctggcccgcgccgccgaggtcgcgcccgcgcacgaacaggcgcggcggcaccgccttctccccggccgcggcccacagctggtcgcgcaggccgcggtccatggacacgtcgcgctcctggaacggcgcgcccaggctctccagcagcgcgcgcacgccgttgcagtcctcgaacgtgcgccgcacgccgcgcagcgtcgtcgtgtacagcaccacgcccgcgccggcggc

SEQ ID NO: 142900 - DNA, 452 bp, Zea mays
  Clone ID: MRT4577_61804C.1
acgactatctatgaggaaagctggcgcgcttgcagagctccgatcctgtatagcgggcgcgctccacgcgttcgattgagaccaactagcaacatttcatagcacatgggaagcccaacaatggcagccaaaacatcttgcttgcttatgctccttgatctttctgaagtagtgctcccgcatccatggtcccacagtgctcacatgctcgtatagcttacttcattgcgccataccgctcaccagcggtgtcttcagtatatgaaaacccagttattcacccctacaggatccaacagggactcgcagcaggcatcttacatttatcacccttgttactagaacaactcgctagattattacagcagttacctttggtgcattcgttggaacacaacattagggctcagcagctacaacaacttgtgttaggaaacctagctgcttactct

SEQ ID NO: 142901 - DNA, 326 bp, Zea mays
  Clone ID: MRT4577_61805C.1
ctgccgcgtcgtagctggatccttagagcggcgcctttctttgtttatattgagacaggtgccgacattattcaacaaaagaatacttcgctgatcaagctaactcaactagtgggcattgtgaaactccatctgaagcaggaggaagcagcgatagtgatcactaactgcttaaatagaatccaaacatgttacaagtctttgggattgcgatctgacacctactctatgagatatcgcaagctagccgttgcattgtacatcacccgtgaaccgagatttaatcaaaaactgaggagttgttgtaattgctggcattcaaaatg

SEQ ID NO: 142902 - DNA, 266 bp, Zea mays
  Clone ID: MRT4577_61806C.1
catgaaaaaatttccaaaaaaaaaagtcactctgggcagggtaaccggcctaaacgcaaaaacacaaggctagaggactaagggtgggggataaccgggggagcagaagccatgaagaccccgcgccacaggtaaccggaacagtgcactgtggcacacgcaatgttaacaggctacattagcaggcgccaattggcgaccccaccaaacaaactgtttaagggaacacagtaggcggcaacaaaaacagcaaatcctaaaggctg

SEQ ID NO: 142903 - DNA, 343 bp, Zea mays
  Clone ID: MRT4577_61807C.1
cctgcgccgacccggtctgccctgcccgacccactcacgcgcccgtttgattacaaatgatgcctgcctcaaggcagtgggtggaatgtattggtttggcagcccgatgcactaccccaagagaaccatggaggtgctggggaactaggccgcatgggtggaggcgccgcaaaggacgcgccaccaaagattgcacattggtgcgataaaacacctcggtgctactaacagaggctcgagcatgattgactgcagatcctacagtgccaaacatccattcccggatccctggatatataggcgagaatctggcatcaactgacgctagactgaagggcaaagc

SEQ ID NO: 142904 - DNA, 607 bp, Zea mays
  Clone ID: MRT4577_61808C.1
ctcatacactggtgtatcgacccaaggagagatgaatgcgaagaggctgacaccgattctcctcgctgttctgatgatgacatgtctcgtgtttgctgcaaattgtgcgattgcaggcagccatgacgtggagacgacaccggctagcggtctccggcggccgccgccggacgcagagaagacgatgttgggaagcagcgacataaacatcaagttgtgtttgaaagctcagtgcgccggttacaagagctgttactgctgcttcactttacctggtttgccatgctggcctgatcagaacacgtgctggcaagagtgtcccaatcgccagcgactccgatccacccgatccatgaagcactccgacgcgatgccctccataggtcccagcaggttctcatgagaaaggatctggcctcgaattctcctgctttgagtgacaatatgtgataccgtgtcatgcatagcagcgtgagtgtaggatgataataaataagcaacattccatgcaacagtatgcattgcagcgtgttatatcttaggcttgtatggcaggatgtaacatacttactttgttctaaaacaaatatacttactcagttttctt

SEQ ID NO: 142905 - DNA, 379 bp, Zea mays
  Clone ID: MRT4577_61809C.1
accccggaacttttagttcattaaaaactattcagcatagtcctgggactaaaggtatatttcaagatttggatattgcaaaagaaagacaatttccaacaccttcacttagcgaaggaacaagggctgtcacaggaaacttgccacgcctctggccaaactgcccgccgagacggcgcggccgtcgggggagaaccatgtaacttgcacgtacttgagaccctttgtgcgggccgagatgaatacacgcaccgtcattctgccaacgctgttgtccgtgaccgatacgaaacttggcgggctcagctacttcagggccaacgaccggcagatgtacttcggggctcccggagccttctgcgcggccaagctcgttaag

SEQ ID NO: 142906 - DNA, 483 bp, Zea mays
  unsure (1)..(483): unsure at all n locations
  Clone ID: MRT4577_6180C.1
ccccgcgtccgtgctgctgctctccaagggctctgcaccaccgcgcgtgggtaccacacgcctagtcgctagaatctggcctgctcaccaggacagaagctcaacctccccacacttgccaccatcacatccgtcgcacccccgaaccgttgacctccggagggtcctccgcgagtaccacgcaaaaaagatccttctggacgaatacgtcactgacactaatgcaggaaatcaacacggtccgctaaccttcaagaagatctagacattgatcgctgcttctgcatggcctagcctgagagaaacgatctggttgcttactcaggtgagcagatctccggatcatcgttcactgccaatggctgacgccatacttatgggctaaggtccanccagcctccgatcatctacggcgacgatgtgccgcccctaccacccgaccgtcctctgccaggagaccttacagattgggcctccattcca

SEQ ID NO: 142907 - DNA, 2544 bp, Zea mays
  Clone ID: MRT4577_61810C.1
atgcctgcttctgctcacaaaaatctcgattctggttgtcctaggagatctacaaggtttaaggatattcatgtagtttatgaagattctgacagggatccttcttcttttaagaggatcaaaactgaagtaattgattctgaactaagtgttggttctgtcagtgacaaggatagtgaacacaattgtcatgatgtattactcaaggatctcaggactcagtgtaaagctaagaatcggaagatttcaaaaatcacattggaaggatgtggcattaagaatcaggttaaaacagaagatgacattgatcttgataagcctattgttgcattgaaacagaagaggctgaaaacatctcctgctaaggctaatataaagatggatgcgctaagatcttctccatgtgctgctaaagagaaagatacaacatcagccagagacaagattcttagttctgcacagactttcctgctgaaagcaacaatgcaagaccgaggattagagaagcctggaaggagaattgcagaactggagcagtctaaagttgttattgattctgctgaagaaatagttggggagcaaatttattgtgctgaagtgaacaatacagctggagttctagcgggttgtgtaaaacctgatgtactatatgaaataaaaactgaagatacaaattattctgaatttggaacttctatgtgttccataaagaatcctgatcattcatcctttgagctgcaacagaagctggtggatgatgatgactgtgtgcctccattttgtttcatgacccgaccagctcaattagctgatgtttgtgatcattcctgcgaacaaacctgcagttccaaagaaaacaattctgatgacattacagctgcaaaggcaactgatgttgtttcttcattgggtctcactgatgaagtgagcaatcatcagaaaacatctgaaaatataactaatttagatgtggataagtcttctactgcaaatggacttatggcttctttcagtgagtcctgccatgaccgtatagataaagatgagcaatggaatttatttgcccatgggaatgaacctgcaaagattttggaagagttgtctcctattgatgagtctagcacagatactcaatctgatttgtgtagaagcacagaaatgaatttcacttcacttgagggggttgtacggatggaggctgagggccaattggattcaatagtctgctgtggtgtaagaccaaagcatatgttactagatatggaaattggacatacagccactggtacattcacctttgacaagactatcgacttagctcatcctgccaattttgttgcacaagatggaaggctagaaagtatagtatatgatgttttgaataatcatgcacaaaggacaacctctaaaagtaaatcttctgttggacttccagatactgctgtgcttcagagctcacttattgagttcactgacaattgtctggaagataaaagggcttcagatgataaattttcacatcccaataatgtggacttgccattgaaggatacgttaaattctacaatagactatgacatttgtagatctattaataatgaaggatcagaagaagaaatagtgcctcaacatcagttataccagtcatgtagtgataagttcaaccttagcagtgtcatgccagagatctctaatgctgaaaaatcacaaaaattatctgctggaactcaaaattcttctgctacttctttggaaactgacggacgaattaaaaggccaaatttttttgtggatgaggaatcaattgaagaacatgctccaaaagtattactgtccaagagaaagattatgtcaccaacgtctcaggagaagctttacagtgctgtgactggtattgatttgtgtgatggagtccaaagatcgaatagcaaaatcattattgaagattgtgacaaaactacaatatcattgcctcagccagcacacatgcaaggcaaatcaatgttccacacagacaggagacttaaggacaggacatctgtctcccctacaagcaaaggacttctgaagtcaacaggatccccgcccaatcaacagacttgttcttgcatgagaagttcgccagtggtcttagacactgagaaagctgttgagttttcacaaagacagatgcatgatatagaaaatattgctgcaaagcttatcaggagcttgaaacacatgaaaagtatagtggatgaaagtttgtcaacagaagcatactctttacttcctaattttaacattgcccagatcagagcagcctctgaggatgcattagaagtggagaggactacgaggaaatggctgtcgataatgaacaaagactgcagtcgcttttgtaaaatattgagcctagcaaagaagaatgatgtttctcatcctgaagcgccaaggaaacaaagaaaaataacgtttgcagatgaagctggaggaatgctctgccatgttaagttttttaaggatggacaagcctctctttctgaatgccagagtgatttatag

SEQ ID NO: 142908 - DNA, 529 bp, Zea mays
  unsure (1)..(529): unsure at all n locations
  Clone ID: MRT4577_61811C.1
tcgtctcgtgtcgagtcgacggtggttcaggaaactctgagtatgtcgccaaggggaagctgtactgagctggggagggcccgtcacgtggctcgcagccgcttggctcgacgccttagatgcttctgtgannagggttcgtagcttggtagcaacgccctgtcagggacccctgataagaatggtgaatcttactgcctgatgcgggtgcgaagcccagaggtaaatctctgagtggaggcttcgaagncgatacctgacagtgcataatcgtatcgtcatgactttgggtatatggggccgataagacttaatgcgaacccattcttagtagnnctggttccactcacgaagtcttcctctcagggaatagctggagtcccacaacgagtgtctagtcgggtaaaggccaatggattagtagtgcatcgggggccgcaacgtcccttcgacgtattctcaaacctttaaatagtgtaggacgggcgcggctagcttcggtgaagccgtgcncacggaatcgtggagc

SEQ ID NO: 142909 - DNA, 346 bp, Zea mays
  Clone ID: MRT4577_61812C.1
aaggaaagacccccagcacccttttaacagggggggctcaatcctaacaaggctcaaccgggggaacaaaaaaaaaaataagcggggactacaagccccaacatgccccctgacaaaacaaaaacttagggcttaggaccgcccgttctttttcttgaccccggacttgggaacctggggggtggggaaccccgggcttaacccaacaagagggggcttggccaaaacaggcctgtagtaattgccactaacccgggttttcacagccttggccattttggggaaccccttgcgcatcacaaacttggggctgaacctcccaggggcctcctgctctttggccttg

SEQ ID NO: 142910 - DNA, 604 bp, Zea mays
  Clone ID: MRT4577_61813C.1
ctctcgacagcggtcgaaactctcactaccactggacaaccccaaaccagcgatgcggctccttacttgccttggctcagacaacacagagagatctccaaggacaatgaagggtggcaagaaaaagaccgacgacgcttgctctgacaacgaaggaatgacatcacggcagcggcgtcgctccgagcgcgccatatgggacaagaatctgggatccccaaaacaagggaccaggattgcttctgagggcctgaagcatctacatcatgaggcttgcctagatgagctacaagctcacgattgtcaagatgacaagaaaatgcacgctccgaagctgaagaagagcatcgcacgaacgggctcaccatatgttgagggatgaagtttaccactgatatcactgagatgcctagcgatgacatggctgacatgaatccaactgcatgatgatgtaaagacaaccgaaccctacatggtgagcctggactgcatctccttaccgaacaggggaccgaaccacatccagacaaccagctaggttcggggatcctacatcaccattgactcgtcggacatgactcacacatgagtcaccaggattcta

SEQ ID NO: 142911 - DNA, 334 bp, Zea mays
  Clone ID: MRT4577_61814C.1
aatatgatccgtcattttttttttttttttatttaaaaaaaaaaagggagggggccattttttcaattcggcaattttccagggaagggaccaggttggaaaatttcttggggggcctttttccttgggcggaaatatataaagggggggcccttaaaatatttttgtagaaacagggcaaaggccccggggctttttattcttcttccctaagggacccgggtggtattttttttccccccacctggaaaaaaaaaaaacccgggaaagcaacatccatttttaaaagggggcctccttgatctggaaaaccacataaaaacccacccccttt

SEQ ID NO: 142912 - DNA, 822 bp, Zea mays
  unsure (1)..(822): unsure at all n locations
  Clone ID: MRT4577_61815C.1
catctccagtcgtgctctgattttccccaacgcgtcttcttcctcgtcttgccgctactggagctctggagcccgcgcgcacaaccttcccctgctagccgtagcattcatgctctctgcgtgcgccccatctcgccgtggcatcacctgctccctcgccgcggtacttcctcagctcgctaggcccgcacgctccccctcgttcgtggccgcgtgcccagatgcctgctggccccaatccttctctgctcggcgcctagatcttcttccccacgcgctgccgtcctctgtttggtgctttcccagccgcgcccctgtgctcgtcgctggagctcccatgcgcttggccacccacctccctgctctctagcaagcttcagctcctacgcgttgtcagctctctggtatttggcccatggtcgcacccctgctgtgctcgtcgggattagcctctgcgcgtccctgctcccctgcgcacgcacgctcctgccgagctcggtcctgtccatttcgctgcgctcggtctctagctccctgtgcgcgcctttgttcatgggccgtggtggtgttgtggcatgggagacgtcgtgcacttcgcgacaactgtcttggccgcaaagcagtccgcgccatagagttcgctcgaccacggtctcgncggaactgcgagnttcccttgccgtgcgctctaacatcggctatcgcagattctgccataatgttcacgagcgctccttgctctatttatttcgctatgggcaatttctccatggttcaatttcgtgctggctgcccccgtgtgcgctcgctcctcatccttcg

SEQ ID NO: 142913 - DNA, 343 bp, Zea mays
  Clone ID: MRT4577_61816C.1
gcgacccacgcgtacgaggacactttattttagctgctttgttcgtggtccgcaaaaactgttagatagcgggggcataatggcaacagcagtgccgcacacattgtaatacctggctctctatgcattgtacctaaaatactgtggctctttatgaactgaagaaagatttgaaggtaatgtgagacttgtccgcatcatatgtgctcagatgatattctacctcataattacacagctgtctcatgcagaactacttctcgacgccaaagccaccttttgatgcctgaacacagactactttacttgacgtctttctatggaactattatgcaatatacag

SEQ ID NO: 142914 - DNA, 362 bp, Zea mays
  unsure (1)..(362): unsure at all n locations
  Clone ID: MRT4577_61817C.1
gnnaaaaaaaaaaaaaaacctttgttttttccccccggaaaggccccaaaaaaaggttccttttttgcaccttttaccccccgggtggataacgggtttttttccaatatacaaacgttgggggggaaacaacccctttcccaaggttgtttttttttccccctttttttaaaggcccctttccttccaaaatttttttaaaaccccggaactggaatcttaggtgtttaaaaaactcccgccccagccttgaaaggcccattattgggggcgccctcttttttaaaaaaaacctccccccccttttttttttttaaacccccaaaaggtttgaaaattgcccccctttacaaaaatttgcc

SEQ ID NO: 142915 - DNA, 627 bp, Zea mays
  Clone ID: MRT4577_61818C.1
aaagatcgcattctttttccttcgtttcatttcaaatagtgaagaggagacatgccagccagagccgagagagagagagtgccatggccgtgtatgcctcacagggcgcagccgcccatggcctccacatgcaccaagtcactcgctgtcgccggcctcctcctccgtctgtctcggctctatcaaaaccctagaacaatacgagtttattatgaatcattctgcttcattactattttacagctatattcaactagtagtttattagtaaagaactcacgccgagtccatcgatccctggtaacgcgctaaccaagctagtagctagcaagcatcggccatgtccaagccaaggttggacgggaaggtggccatcgtgacgggcggcgcgagcgggatcggcgaggcggcggcgcggctgttcgcctcgagcggcgccacggtggtgatcgcggacgtgcaggacgcgctgggggaggcggtggcggcgtcggtggggccccggtgcgcgtacgcgcggtgcgacgtgacggacgaggcgcaggtggaggcgacggtggcgcgcgcggtggcggcgcacgggcgtctggacgtgatgctgagcaacgcccgcgtgctgctcccgac

SEQ ID NO: 142916 - DNA, 278 bp, Zea mays
  Clone ID: MRT4577_61819C.1
tcgcggactcttggtcggactcgtgggcggtctcgtgggctgactcgtgggctcttcttaagattgttgtgagagtaggtttggcatcccttactgaggccttctttaactgggctggattttggagtgcaatggcttcaaatgtaaccttccagtcaaggaatgttctaagcaagaaacttatggtgcacaaagaggaatctctctacaacattaacctattctcgatcattacagacatgtcattctttctgtacatcatagtaaccttacttaca

SEQ ID NO: 142917 - DNA, 663 bp, Zea mays
  Clone ID: MRT4577_6181C.1
cattgggtacctcgaggccggccggacagcagcatgtgtctgcttactctacttcgtttttcctcctacttctatctctcatttgcatcaccagaacggcacgcgtacctgtagctgagcacactgcttgcgacttcgcaatatgtcatctccaagcatgcggcgaaagatgccacctcataaacttgatgatgatggactactaatcgaatatgtagatcgaggggatgcaagagtgctttgttgactgctggtcactaacctgaacatttatcgacgaggcctatgataggctaaagtagatgtgccacatgactatcattaccaacctgatcgactgcttgtcacaataagatgtatcaccccaaagacaactgaatgtatggtgcattaatgttgagtgcttataaccagacatggaaaccaatgattgagcttgtcaacgaagacgaggactgtcttacacaacttatagtgtatattctaaaccttcatgagccattatatggagatgccccttctgtgatgatgcgtgatcgccctgcttatgtagcgcagagtactgatgacattacttccaagcggaggatgctggtgtcagcccggcctacgagtccagtgactaatagctgtatgaagaggaaaatgactcgcttgatgaag

SEQ ID NO: 142918 - DNA, 371 bp, Zea mays
  Clone ID: MRT4577_61821C.1
acattagctctcctcaagagaagtgatgctaccaacgggaacttttctgaagacacgcgtatattaatcttgtcttaacgcgtgaaaataataaaacgaaggccagaagtcaatagaacatactgcagtgttgtactaaggctggtgggaaccaaatgagggatgtacagtgcctataactgaaagcgctctcgtgctatatcggcttcgcccgaaagacccatgacattgaaggggcaccactccgaatacgtggcgagacttgctttgatacctcatggaacatgcagcggcaaggtataaagagcgcaaggcccatggagtatcgcccgcgatgtccccccatcaagctaataaagctctccatcgac

SEQ ID NO: 142919 - DNA, 273 bp, Zea mays
  unsure (1)..(273): unsure at all n locations
  Clone ID: MRT4577_61822C.1
caatntgaaaactgattattacattgactgctagtttttaaaaaaaaaaaaaaaagagaaaaaggaaaaaataaaaaggcagacagataaaaaaaaataaaaaacaaaaacaaaaaatcaaaatctaataaaaaaaaagggcaaccgcctctcgttttcaaagttccaatcttccttcctccgacatccaacgttttatcttttttatcctaaaaccaatttacaatccactgccctacattttacaacctggaaaatccaaaaccttcccat

SEQ ID NO: 142920 - DNA, 376 bp, Zea mays
  Clone ID: MRT4577_61823C.1
agcgcatttgagcacatttgctccagcactactgctagctatggaatggcgacgaaggtggcgaccgctcgcaaggtgcaggttgccaccatgaaggtggcgccgatggccgagagggccacggtgcaggtgcctgtgaagcgcatggacctgtcgctccagaagaaccacttcccgccgtgcgtgcagaaccacatccactacttcctcgggggccggctggtgcacctgtaccttgacgtgctgaagctcaccggcttccctacccaggacatctagatgtcgcgcctcttcacgatgcacatgctgctggccagccgcaactacgaggacaccgtgacggtcttgtacctggtgaccatcaactacgggcacg

SEQ ID NO: 142921 - DNA, 194 bp, Zea mays
  Clone ID: MRT4577_61824C.1
atcacacgcgtgttatcacagaacctctaccgacgattctgcaatataagggggggcatgaccaacattagctgcacaccaaccattaccagagcatcaaggcgcagaagcccttgcataaatctacctgacgagaaagggatcgaatgccctcccaggctgagctcatcacttgaagaacagctccagagaag

SEQ ID NO: 142922 - DNA, 1908 bp, Zea mays
  Clone ID: MRT4577_61825C.1
ccggccgggaattcagcgagcgacggccgggacggcccccccaccgtctccgtcgcgcctcccgaatccccgtcgaatccgagctcccggaggcacccgaggcgcgggctccccaaccgcctcccgaccccgcgcgcctgcgctgcgcaccgcgacgaaaacaaagaactactgatcaatataaaatggctgtaagcttcaaatactgggacgattgcttggatccagaggatatgagattgatgtggcaggatcctgttgtaagtaaagagtggaatgatgctggggaagagcaaggacagaaagttcacctgtcacgggaccctgatggtgaagcatatctcacacaaactgaaatgatggcagtggcggcaattaccgtccatagacatttcaaatcgcagctagacccgtatatgataggagcacttgctgaaattgcaagtggaaggagactctttgtagatacctatgatcgcaagactaaagaaaccaaggttggcatactgcaggtggcacctgaagttgctcaatggcttggaagggaactaggttacaagagttatgacattgaagataatactaatttgctgtactggcctcttgtgaatgtctattttggtgctgcttatgcaaaatggctcttctcttgtgatgacagacaaagaactgaagaatttgttgttagagcatataaaggcggcaaaaagaaggctgctcacaaatcaacttcccccatcttccagcgttatctttatgtgaaagagaacctgttgtctataagacaaccagaaatttgccatgacctcgctcctgaccaagaaaaactgtcaagcacagaatcacagttgatatattgggattccaaggtatcagaggctgatatggatgcaatgtggaaacatcctgatgtgtataaggagtggataaaatctggtgagagacgtggaaatgtacgattctcccatgatgcaaagaacaggccttacctttctcgcgttgaggtgaaggctgttgccgaaataatcatatcacgccatttgagcacaagaggagtaaaaccagaagctctcgcagcacttgcagaggtttgcagtatgcgctttgttcatggagtaagtacccggactggattgatgggaatagactaccctactgctgtatggctttccagggattgtggctacagggcatatacactgatctctgtggatgatctctacaatccttttgcatcaatgtactttggtgcatcgtacttggcatggttgtctcagtacgaaggaagggagcaaagctacgaattcattgtccaagcttaccttgggggaccagagaatgttagtcttcaggagactggaccgttttggaaccaattcctggagtcattaacacaatatcaagatccaaagaaggacaataataatagctgctgtatcttgtgaagttatctgatacctcttccaactttggttactgaagtttctgctgaggatcatttatgaatgctcatcgacattcttgccaaatttcaaatccccttccgaagggttcgggtactggcaaacaattttgcttgctggacaacacgaggtacaggataaaaggggctgtcagttcgtacatacattttggtcgctggcgccttgctcatgtttaaatcatgattgatcccatctcggttcatagagctgccccccagttccatatgtttcttcttctacttttaccatcagaatgttaacgcccttcccgttctttccgcttattggtgtatggcatactgtacctctgttgtataataataggaaccttagaagaaaatggcctttgtaaaattatcgacgcttcatagtacatgtgctaccgttatagatgtaccaactgatactctgatagcagaaccgt

SEQ ID NO: 142923 - DNA, 281 bp, Zea mays
  Clone ID: MRT4577_61826C.1
gtataagcttgcatcggttggtgacaaggactcaaaatgggctcgtattgaagcgctatctgatacattgttatcggcataaggcacattgtcctgtggggtacatatgaacaaacacatgtccaaaattccatggccatcattagacatcgcgtatagcctagcttggggtgatcatgcccgctagcatctttggctgttgggaaggctttcttggcctgaggggaggatccgatcttccatacatgggggaggtcgtcgctggcgcttacgagcttgcc

SEQ ID NO: 142924 - DNA, 886 bp, Zea mays
  unsure (1)..(886): unsure at all n locations
  Clone ID: MRT4577_61827C.1
ctcgagggccggcctgggccggggaataaaaaaaaaaaaaaaaaacaacgcgcgttagatgagtcagttaatacataaggggagggcacaccctctgtcttcncgctagtagatcaaagaaagtgctttctgtacatctgcagaaatgggcaggcaatgcgctcggtcgcgctgtttcctcgccgtggaacctgggtggggttcgccatgggccagacgcctgtgggtgggaaatgtgcccacagccaaccccggatcagttaatactaagggcaggcacacctctgcttcgcgctagtgatcaagcaagtgcttctgtactctgcagcaatggcaggcaatgcctcggtcgcgctgttcctcgccgtgaacctggtggtgttcgccatggccagcgcctgcggtggcaactgccccacgccgaccccgtccaccccgccgtgtgcctctgcaccgccatcaagggagaggtcctcggaatcaagctcaacctgcccgtcgacctcagcctcatcctcaaccactgcggcaagaccgtgcccaccggattcaaatgcctctaagctagccgcgagcatgcggatatatatgtgttcttttggttgccattcgcctgcaggcttcttgtcgtttgctacttattaagcgagtgctagctctgcatgcatgactacgtcctttgcatgttgatgagcagctttcgcttttgggtgtttgttttgtgtaagtgcttcgtcctttgcatcgacagtgtcccagaactatttggactgttattcttttatttgtacccagcaatctgctcgatgaaataaagcttatatatagttggtggaaaaaaaaaaccaaaaaaaaaaaaaaaaaaaaaaaaaaaaaaaaaagaaag

SEQ ID NO: 142925 - DNA, 1076 bp, Zea mays
  Clone ID: MRT4577_61828C.1
atccatcaactgcgcttattaacagttcgtcttattaatataagctaaggccgcccagcgtgatcagttaatactaagggcaggcacacctctgcttcgagcctaagagcaagcacacgctttctgttcgcgcctactgaggtaaagcaagtgctttctgtactgctgcagccccgggacgggcggggcgggggtacgagcgcttagtgatcagttaatactaagggcaggcacacctctgcttcgcgctagtgatcaagcaagtgcttctgtactctgcagcaatggcaggcaatgcctcggtcgcgctgttcctcgccgtgaacctggtggtgttcgccatggccagcgcctgcggtggcaactgccccacgccgaccccgtccaccccgtcgacgccgaccccgacgccggcctcgttcggcaagtgtccccgcgacgcgctcaagctgggcgtgtgcgccaacgtgctgggcctgatcaaggccaaggtgggcgtgccgcccacggagccgtgctgcccgctgctgaagggactcgtcgacctcgaggccgccgtgtgcctctgcaccgccatcaagggagaggtcctcggaatcaagctcaacctgcccgtcgacctcagcctcatcctcaaccactgcggcaagaccgtgcccaccggattcaaatgcctctaagctagccgcgagcatgcggatatatatgtgttcttttggttgccattcgccctgcaggcttcttgtcgtttgctacttattaagcgagtgctagctctgcatgcatgactacgtcctttgcatgttgatgagcagctttcgcttttgggtgtttgttttgtgtaagtgcttcgtcctttgcatcgacagtgtcccagaactatttggactgttattcttttatttgtacccagcaatctgctcgatgaaataaagcttatatatagttgttggaaaaaaaaaaaaaaaaaaggcccctagggccctttggctcgatacgaggctgcctaccaagctggagtgcttttgtgaaggcttttgcgaatcacttgaagcgttccgacttttgtgactgat

SEQ ID NO: 142926 - DNA, 842 bp, Zea mays
  Clone ID: MRT4577_61829C.1
cccagcgtccgcggccgcgagggcgaggcatcgcaagcagagctcctcacgaagctcagtctgctttgtgccttgtggtcaaggaggacactgctgtgcagcaataatggcaggcaacgcatcgatgacgctgttcctggccgttagcctagtgatgttcgccatggccagcgcgtgcggtggcaactgccccacgccgaccccgtccaccccgaccccaacgccggcctcgttcggcaagtgcccccgcgacgcgctcaagctgggcgtgtgcgctaatgttctggggctgatcaaggccaaggtgggcgtgccgcccacggagccatgctgcccgctgctgaagggactcgtcgacctcgaggccgccgtgtgcctctgcaccgccatcaagggagaggtcctcggaatcaagctcaacctaccggtcgacctcagccttatcctcaaccactgcggcaagagagtgcccaccggattcaagtgcctctaagctataagccgcggggagcatgccgacgtgctcgatcttctgcttgccattcttctcaatgcagccttcttatcatgtgctacgtacgtacgtgcttactagctagttctgctacctctgcatgcatgagtacgtgcatccgcacgaacacgcgtagtagctacgtatgtagagccggccgttttgatgagcagctttcgcttttgggtgtttcttttatgtaagtgtctcgtcctttgaatggacgtgaccctgaactattaagatttttgttcttttatttgtatccggcaattaatctgcttgatgaataaagcttatatattgttcgcaaaaaaaaaacacacac

SEQ ID NO: 142927 - DNA, 395 bp, Zea mays
  Clone ID: MRT4577_6182C.1
cttggagtatgaaatgcgtgttgttcatcaagaacaagcactgtagttctctagaagaaaatgattctgtctgtttctcgagcactgaatccaggtcggcaatgagctcaagcagtagacgagctgttgggtttattacctcaactgtcaatagatgatcagtgtgaccatgtcctagcatggtatcaagtgaactcttatgcttcgtcagtaacctgatgtacctcatgaggtacgcagtgagtgacgtgatacctccatcctgctcctgcaccactctccgtgagctataattctgaaccaagcttctgagctccttaactatctcagttgcagagtccttcagttttgcaagaagaccctctgcatctctgctgatagaatcagcgtagaat

SEQ ID NO: 142928 - DNA, 595 bp, Zea mays
  unsure (1)..(595): unsure at all n locations
  Clone ID: MRT4577_61830C.1
ggccgctttttttttttttttttggagtcatgaatattctgaacaatttactaaactttgaatagaggccctgtttggcacagctgctgcttgttgaaaaagcagcttatctgataagctggtgaaaagcagattctgcttgttggctgcttttagtgtattctgagaagcagctgaactgataagctgctgcagaagctatctgtttggcagaacttctgcttaaatttgtgaagaagctgaaaataagctgtgccaaacagggccagagacagggcnctcgcttctcccctatcctcttcttcttcctctaaaccccatctgctatctcgtcctggttagcagaggctaacagctccgctcgtgcgcgcgcgcaggcccgtctgaattctgaaaaagatcgtgcgttcgattgtgtggcggcggcgcgctgaccttgggtacttggcgccgaggatgtccttctggccgtactttctccagctgaggccgtcgtcgagggggctcacgtcctgcacggcgctcaccctcacctggctgctccacttgggcagcgtcttcctaatcttgcactggccggcctcgaggtacccaa

SEQ ID NO: 142929 - DNA, 319 bp, Zea mays
  Clone ID: MRT4577_61831C.1
aagctgttctcggccatggtggtgcgcaggccggcgcacctgttcctggacgagctgggcgtgggctacgacgaggccgaggagctacgtggggggcaagcaggcggcgctgttcaggtcggccgggatgaggcggcgcctggcgcggggcaacgtgaagctgttcaacgccgtggcggtggaggacctgatcgtgcggcaggggcgcgtcggcggcgtgggcacgaactggggcgctcggtgtccatgaaccactgacacgcaagtcgtacatggaccccaacgtcatggagggcgcaggtggtggtcagctcctgcg

SEQ ID NO: 142930 - DNA, 2474 bp, Zea mays
  Clone ID: MRT4577_61832C.1
gacccctaccaagagagaggcctcctcctccccttgtcctcgcgcttgcgtgcgcgcttggccggaggctggctgggaggaggatctgactccgagccgcgtcgccgtgctgggcgctgcggcgagggatcgggggccgacccgcctcccgccaccgctcggaactcgatcgtcctggaggagctgtacctgtagacttccagtcctctgcaacctacaaaatgtcagtgcgtcgtcggtcaaccagcatggaagggctgctcacgcttgatgactggaaagaacggagatcagatgtggacaactcagaggacgagcgaaggcggctatccatagggtcactgaagaaaaaggcattgaatgcatcaaacaagctcacacattcactcaagaagaggggaaaaagaaaggtggagcatcgggcatcgtccttcacaatcgaagatgttagggatgagcaagaggagcgagccgtcttcaccttccagcaaaaacttctggacatgaacttgctgcctgacaaacacaacgattatcactcgttgctgaggtttttgaaggctagaaaatttgacacagagaaagcgatccatatgtgggctgagatgctccagtggaggaaagaatctggagcagatacaatactagaggacttcagttttgaagagctagatgatgtgctatgctattatcctcagggctaccatggagttgacaggcagggaagaccagtatacattgagagattagggaaagtggaaccaaataaattgatgcacattactacagttgatcgctacatgaagtatcacgtgcaagagtttgagagagccttcagggacaggtttcctgcatgctctgttgcagcaaaaaggcatattgattctacaactactatactagatgtcgatggcgtgggtctcaagaacttcagcaaaacagcaagagatatgttaagtagaatgcagaagattgacagtgactattatccagagacgctgcatcagatgtttgttgtgaatgctggtagtggtttcaagctactatggagttctgtgaaaggctttcttgaccctaaaactgcctcgaagatacatgttttgggaacaaagtttcagaacaagcttcttgaagtaatagatgcaagtcaacttcctgaatttttgggggggacatgcacttgtgctgctgtgggaggatgtatgaggtctaacaaaggtccatggaatgatccagatattatgaagcttgcacataataaggaagcaaagtttacaagacataccagacgtttatccgagattgagcaagggcggagttcatttgctaggttacatcttttgaagggtagaaacagtgacacgtcaactgtggagtcaggatctgaaattgatgatcttggtgctccgatcatgagaagcacagtggggtgtagtcgattggccccagttcgcgaagagatgcagatgagagcacgagactctgcagcttattacagctgtgacgatcactttgttgtggtggacaaaacagttgactatggtcgaggaggatcaccgtcagataaaagcagtgcttcagaagtaagaactcatgttcggccactggatgctagcacagcagcccacgtggcaggtccctcaagtaacaggcgagctacagttgtgcctgaagaggtttcagatgaaggagtgttccgtcgctttgtcagactacttctggccttcattgtcaaagtctttgccttctttcacatagtacgtagtcagcaggaaacgagggtcaacaacctactacctcctgccgaaccagaactgatttctgacgatcatccggcagtagagactttcaatgtagaccacatcagtcctgtcatagagcgccttcagagacttgaagggaaggtcgatgagcttggcagcaagcctccagcgattcctgtggagaaagaacgatccctcttggagtcatgggataggataaaatgcatcgaatctgacctggagcgaacaaagaaggtgctgcaagccactgtgaggaagcaactggaaagcgctgagtccctagaggaagtgattagatcaagcctacctagacgaagattttgtttataacaaggaaccagtactgctgaaatcaagatacatcctgtcgcggagaaaaatatgcacaggaattcgattggtgatgtgatgaaggccgtgcattcagttgtccacattactggcagaaaagatggtgaccacggatagtgaaaaacacggtccacttatttatttttttcttgtgaccctaagaggcctgtgcatttttcatgttaacagaggatgttaggatggatggcattgcaagggctagaaaaataggagatagaaatgtggaaagtggggtggtacccgaacaactgaacaagtgcgcatattgtgatatacaggtccgcgtctatgttatctttgcaaaaaattgtgcgaaaa

SEQ ID NO: 142931 - DNA, 855 bp, Zea mays
  unsure (1)..(855): unsure at all n locations
  Clone ID: MRT4577_61833C.1
gcgtgcacgctatacacgatacacaaaacagaaaaacatcaggacgaccccgacgcaccaccacctgctcctcccggcggctgcctgctcgactcgattccccaaccgcagggtcaacgtgggaacctgtcgcgcgatgggcttaggactgagattgcccttctgtctactcctcttgctgctcgtcagcctcggaagcgcacaaggccggagcactgtttttcttgatatccaggaggaggctcgaggccctggtcaaatcatcaacgatcaactaactttgagcaaaattcccgtgcgtgttgagaggggcagcccactatgcccagcttgtgagaagtttacagatgaagctcttagctatcttagtcagaaacaatcacaagataagatgatggaggtccttcatgaagcttgttctcagacattctctttggaaaagaagtgtgttgagtttgtggactcctatgcaactctcttatttgccaagatcgctgagatcaagccagaagagttctgcaaacgaaatggcctctgcagggacaatgctcttctgtctggtgtgagaagtgagagcacatgtgtgttttgccaccacctcatggatgaagttttgtccaaactgaaggatcctgatgctgagtttgagataattcaaattctcctcaaggagtgcaagaagatcgaaggtcatanacagcaatgcaaacgattggtcctgcaatacatccctctcatcctggtgaacggagagaagttcctcgagaagaacgatatatgtaccatcgtccaagcgtgcgatgctggcaaaagacgatggtcggccattctcccgagaggtttgttgcgcgatgc

SEQ ID NO: 142932 - DNA, 219 bp, Zea mays
  Clone ID: MRT4577_61835C.1
gttggagagcgaacaccaagagcgtgttttacgaaataagaccggtataacacggtgccggagttttttccaccccggggtgtctggtgttttaaccccggaacccaagaaaacctgccaaaccttgggatttccggggactactttttttaatcccgcagtgctggtggtttactggtagggctaaaaccgggcaggggtacaaaagcgtgtaacacc

SEQ ID NO: 142933 - DNA, 412 bp, Zea mays
  Clone ID: MRT4577_61836C.1
ggcttcctttaagattttgtagcagtctcacctcataaacgactcgtcaggtcgcagagcgaccacggtgaaggctatagccaaaatatttgatgacgctgggtgttcagatgttacaaagaatttcttgggtatgtgccctgtgtagtcattttttgtgcgcctcattaaattaggacacaggttgctgtaacaggatagtcggtctgatacatgccatcggagaaaactgataaggggctcttgtcgagtacataccttactgatgaactgggcagaacgaactcacacgtttactcgtgctgttcccacaacttttccatattaattcggtgccaagatagtttggtagcccgcatctgcataataatgtaccgtgggcagcagcatatggatagagtgtgcatcaagc

SEQ ID NO: 142934 - DNA, 742 bp, Zea mays
  Clone ID: MRT4577_61837C.1
ccggccgggaaccggagtcggcagtcaaggtcaattcctcttccccgccgtgcgcgtgcagatggagatctgaggaagaagaggagctcaactgctggtgcctggtgctgactgctgacagacgcagccgccaccgcccacccacccacagctttgctttgcacgcggtgaaggaaagaacccatctcaccgtctgcctttctcatctcagccaattggaaagagaacttgtcaaccaatatcagcagcggggatcagggaaggaagacgaaggaggggattcgaatccgatccggtcgattgcggagctcggggcgattcatgtcaagaagatgctgcagcgggcggcgagcaacgcctactcgtggtggtgggcaagccacatccggaccacccagtccaaatggctcgacgcaaacctccaggatatggagaatcgagtcaagatcatgctcaaactcctcggacaggaagccgattcctttggcaagagggccgagatgtactaccacaccaggccagaggtgataagccatgtggagcaagtctacagggcttacagagctctcgtcgaacgctatgaccacatatccaaggagctccataaggccaaccacaccatcgctactgcttgtccagaagaggtgcagtatgcaatgttagaagaggaggaccatgatttccccaaagcaatcacaccaattcagacacaccagtcctcggtccaagagattctccacgc

SEQ ID NO: 142935 - DNA, 450 bp, Zea mays
  Clone ID: MRT4577_61838C.1
gagctcacagtcggcggccgcctttttttttttttttttttttttttatgctctgatcagttattttaatttaatgctaacccaggagatctgatgaatttacatacaaagggaaccaaaaaacctggcctaccgggggccccgcccaaaccaagagggggcgaaaccaaccaaccccagcgggggcaccgcaaaaaattacaagcgaaggggggcgagacccggagaccccacaaaaggcaaaaggggggggggaaaaaaggggcccccccccgggaaaggggaagccagccccacccccatttcaaaagccaaaacaaccaaggaaaagggtccccccccaaccaggggagccccagaaggacaaaacccgcgcgaaaacctaaggccgaaattcaagaaatcgaacccctggatgccaagggaagggtccgggaagggggcaaccaa

SEQ ID NO: 142936 - DNA, 1642 bp, Zea mays
  Clone ID: MRT4577_61839C.1
atggcctccaggaagcttggacactatttccgggcatatcatatggtggttccttcgtcacaacctctaaaggacataatgagaaatagagaagctactgggaggatcataaaatgggctaccgagctcaatgaattctctattgattatgttcatagatcctcaattcagtctcaagccttagcagacttcattgctaattggacgctaggggctcacgaagaagaagcaacaaaagacgccgaagcctggacagtcttctgcgatggttcttggggaaccttcggcgcaggagcagctgctgttcttgtagcgccttccgaagtcaaaacatgttatgcagcaaggctgaattttagttgtacaaataacattgttgaatacgaagtccttcttttggggcttcggaagctaaaagcaatgggaataagacgagcgatcctcaaaactgactcccaagtcatctctagccatgtagacaaaaccagtaaggcaagggatccgaagcttgaaaagaatttggacatagtccgaaggttggaggcttctttcgaaggtttttccgtaaaaaatattccaagaggggaaaatgagcatgcatatttgttagctaagttagcagcacaggggctccctctacctttggaagtattctttgaaacaataaaagcaccttcggtcgaacttcttgaaagagcagtgcttgcaatatcacctatgcatagtaaagattggaggactaaaatcatatatttcctccagggtaactgtctctcggatgacgaagtttataataaaagaatggaagcaaggacaagaccatatgtcataatagaaggggaattatacaaacatggagtctgctccccacttctcaaatgtttatccagaaccgaaggtatagagctaatgaaagaaatacatgtaggatcatgtggatctcacaatagatccagacctttgctgggaaaggtttttagagaaggattttattggccgaaggcagcttcggatgctacagatctggttcaaaagtgcgaaaattctcaaaaatgtgcaagagaccagaaacaaccttcatcgctaactcaactaatacagccaacctggccattgcaaagatggggcttagatttgttgggtccactcccaccagcacaaggcaacttgaagtatgttgtagtggcagtagaatatttttccaaatggattgaggcgaaccccttagctacaataacttcggtcacggtccaaaaattcttctggcaaaatattgtttgtcgcttcggtgtgccgaaggcaataaccgtggacaatggtacacaatttgatgccggagcattcaaagatttttgtgaccaaattgttacgaagatccattttgcatcagttaggcatccagagtcaaatgggctggtagaaagagcaaatggtattataatgacaggaataatgaagctaatcttcaaccagcccagaggaaagtggccagacaagctgattaaagtggtgtggagccacaatacaattgcgtcaaggtcaacaggatttacaccctccatgctcctatttggtgatgaagcaataactccaaaaaaaaaaaaaaaaaaaaaaaaagtactctgcgttgttaccactgctt

SEQ ID NO: 142937 - DNA, 385 bp, Zea mays
  Clone ID: MRT4577_6183C.1
cccgggccgcccaacccccgacgacaagacccgagcagccacgccgcggggagacgaagcaagcacaggggacacccagcaccggagacaagagcagaggggaccagcacaaccgaggagcaagaagcagggagccaaggcgtgccgccagcccaagcccacaacgccgacctgcaagcagcccccgagcccacgccgcaagccccagctcgaccacgcggaccacggcggcggcaagatccaaggcaccaccggcacaggaagcggcgcggcgcaagacgcgggcccgggccaccacagccgccagcacccgcacagcgccaggcagaaggcgggcagccccgcggccaaaacgacagagaccaagaaccggggcacgggcggc

SEQ ID NO: 142938 - DNA, 406 bp, Zea mays
  Clone ID: MRT4577_61840C.1
ggttggggtcttttttttttttttttttttttttttttttttggacccccaaataagcaactagctggattcaataaacattggtactggtccataaaataacagttgctaccgggggaaaccaaacacagcagcccctaactacaggaagacacccgaacattccagggaagcctcgaagcggaggccacccagcctaagacgaggggaacttggagacggccttggtgcccttggaaaccgggtgcttggggaacttcccggggaggaccaggcgcacggaggtctggatctcacgggaggggaaggggggctttttgttgtaccgggcaagcttggcggccttgggggcaagcttcttaaaaatgtcgttgatgaaggagttcattatggacatggccttaaa

SEQ ID NO: 142939 - DNA, 383 bp, Zea mays
  unsure (1)..(383): unsure at all n locations
  Clone ID: MRT4577_61841C.1
ctccttttnttttttttattttacttacttttttttttggggggaacctaacaccgtttttcggttatttttatactcattttttttttggaagggggcccctaaacaggggtttaatttaaggcatttttttggtaaatttaatccgaaacacccgggggtttaaaaatcccccgggacccccgaaaaaaaaataaaaccggattccaatccgccgcttttgtaacaaagcaaaagtttcttttaaaaacaaaatttgaaaaagaaatttaaaaaacctttttaaacgggggttctaaaaattgggcatgctgggcccccccacaagacattttcgggccaagtaaagggggccaaatggaatcaagggctataggggcccc

SEQ ID NO: 142940 - DNA, 733 bp, Zea mays
  unsure (1)..(733): unsure at all n locations
  Clone ID: MRT4577_61842C.1
ttcaggatgttgatttagtggttgtaaaatggcaaagcttggtagtcatatatcactcatgtaggtactcgctatttcatagtacgttgttcattgggaggtctgaatattttacgtccgctcagacgtccgccgtcagtccaagatgtcaaaactctacatgagcatctcaaatgttgcacacaagcataaatgtacttgtttgagcttaaaaaaacttaacctgtagggggtaagacaacccctgggcacctggtccacccatacacaacggcaccatagcccatgtgagaatgactgcgactagggccgggccttgggcctgtttgtcatgggagtatgggacaaagtaggggatatttttaaccttagcctgaaatttactcccgtgaggagtcaaacacaggacctgtgtagtgctactcagaccccctatccattcgcctggtttgagcttatgctgtacgatttctgaacttgaaaatatgtatttgagatgaatatcccttgcggtaaaaactaggacaattatgcttgtaactttatttctgtaaatttgctttaagtaggctggacaatgatcttgaaattgtgacgtgtttgttttcattgcttcttgcttngggtctcaatttaccatgcttggttttcccggaaagacatatggattttgtaggaaagagcaggtgatgttggagccttcggcactgggtctgccctctgtgttgccctg

SEQ ID NO: 142941 - DNA, 243 bp, Zea mays
  Clone ID: MRT4577_61843C.1
tcttttgctactgtgtttatttgaaaaaaatttgaaacactaaagccattcatcatacactgaaacaaaacaggcaatatcatgaacaattttataatcgaatgtgacaaaatcaacaaatacatatttgctattcatacagatacggagattgaatcctgtttaattcaaaaccaaaacaacacggacaattttacacaaagattcttagcacaggtagcaaatataatctgcatctatcgg

SEQ ID NO: 142942 - DNA, 492 bp, Zea mays
  Clone ID: MRT4577_61844C.1
gactaggaatagctcgcgagcaccgacctttttttttgtttgtacctcatatatctagcgctgggtctttataagattttatcagcaccaaaggggcctgtgatgtacaatgcgctaggctaggacactatgaagatggccctttgtacttggcttgcttacgatggtagtgggggatctgctttacatcgtgctttgggagccccgctacataagcggcagcaagggctgtatactataatgcaacgtccagtggccataggtaggtcggttcctcccaaaccaattgcagactaatgttggattaaaggtcggccgattgcaccggcactgacgttagcacatgatcctggaagtgtctccaaccaactggccaagacatacgggaagatcttcactgaagtaaggccatatacagagctcccaagggagaaaggcaacaggggactcaagcgtagcataggagcaaccttaagcccattttgacctatt

SEQ ID NO: 142943 - DNA, 346 bp, Zea mays
  unsure (1)..(346): unsure at all n locations
  Clone ID: MRT4577_61845C.1
tgctcccgcaaggcggaggagaaaatgagngggccgantgggacaancatcctcctagatactgttttaggaagangggngcnctnnncggggcctcagttgaagagaggaaggaaacggccacncataccccagacnnnagaagnncagnggggcnganaggaagaaacccaaaaaaacccgccacagaaanggnccaagaggacccaggaacgaagangcgcanacacgacacncnccncaagaggaagcacaancaaagcaagaacgaatnagccacaacaggaaanangaggacagacgacanaaaagagacgcnccagcagcagaaaagcaccgaagacaa

SEQ ID NO: 142944 - DNA, 425 bp, Zea mays
  Clone ID: MRT4577_61846C.1
ccccccatgtgcagccgtccccccacttctcctcctccccttggccgccgtccaccatggccatacacctactttttccctttttgagctactaaaccgtagccggaccccctcaattgcctacgtcataggagcctgttcttgtcgttctaatggcattattccagatatgattccataaactacttggaggacgaacgaaggcccgattgagaaggtgaaaatcctacgagatggacttgcggatagcgtctagcataacctcctgccttcgtccaacgtacatctttggtacttctacacatacaggtcatcgcaacacaaccactacatctgactacggccgccaccatgcaactaggctggtagaaccacggctcatacttgatagagcagctgcttgcatccaaccgaattgatctggg

SEQ ID NO: 142945 - DNA, 975 bp, Zea mays
  unsure (1)..(975): unsure at all n locations
  Clone ID: MRT4577_61847C.1
ccggccggggggcgatgggctttctcgaggccggccgggatctcacttcttaacgcttgacgacatcttcagccttgtgctatcactctccttaaccgattcttgacaacgttctttgtgccttgcactcttcagtctctcattttttgctcaacgcaacaagaatcacatcacgatcctttatagtcactacaattcgtttcagacaaacacaatcacaatgcactacaccagcatcttcgttgccgccgctggcgcctcggtcgccgctgctcaggactacgctcctcctgctctggacaccacaactctcacctcgaccactacccgggttatcactctcactcagtgcaaccccacagtgaccgactgccctctgcgcactcatacctccactgaggttgttgttacaacctcgactgctgagcccgaggtccctgccgagcctaccacctctgtctacgttgctcctaccaccagcatctacgagcccgttgtcaacacaactagccaccacgaggttcctaccatcgtcaacactcccaccatttccaccaccaagaaggcgcctcttcctaagaccacctattaccctgctggtacacaaccgtcaatgctggtcctactgctcccgtctctcacgtcaccaagcttcctgtccccagcagcaacggcacccccgagaagcctggttacgaggctcctcctaccacccccgaggctccttcaagcgtccccaccgctggtgccaacggtctcatcgcctcttcaggcttccttggtgccgctctggtcgccgccatggttgctctcttctagctcaaccttccatttggttgacctatctggtctgtctcttgacagatgtcggaccttcacttcttactatgatacctttttattcttcgggngacggacgtttggagacttatttcagtgcatgattcttgctcttgcagcaaggcatcttctctt

SEQ ID NO: 142946 - DNA, 250 bp, Zea mays
  Clone ID: MRT4577_61848C.1
gggccccaacgcgcgcgccatggagcgttcctaggttgggctgcaggtggcgaggaacgggaaggacttttcgttctatctccacctcaattaactacttacatttggtaaatttatattaaattaattatttacttaataaattaactaaatatcttaataacataattaattaattcatttattaaaaaatattaacatattttctatattctaatttatataactatatattcactttatttatatt

SEQ ID NO: 142947 - DNA, 387 bp, Zea mays
  Clone ID: MRT4577_61849C.1
acgaaaacatgtacacaagctatttcaaaatattagtttcgttgttcatggatacaaaaatgaccaataatacctgagaagatcagctgcatcttctggaccaggatttgcggcacctattattctttttccatcaacagaaccagatgtcactgaacctggagggttggctccaattgtggtaaccaactgcggttttgccaccacaacagctcctggatattatttttctagtcatatcataaggggtgtagcatatatctgaaattgcataactggcacccaagatgaaacttgcactgctatcatctcagcaccaagcttagaaatattgaggtggtaacccgtaacagaacagttaacaggcacattggatgatagatgtat

SEQ ID NO: 142948 - DNA, 572 bp, Zea mays
  Clone ID: MRT4577_6184C.1
ccggccggggattatttacttttgctgttcgcttgaacagtagtctttcttcgataaaaaaaaaacacactacgcaaatggcgatactcgatcggtttagagggcgcgatagtacgtcgacttccgagtcgacggtgctggagaaggatgtcgaggcgaagccgcagatgctcaagggaggcatgaaggagatttttcgaatgcggattattgccatggcgattattgtgtctatgggtggtttcatctttggatacgacactggacaaatctcgggtttccttgagatgccggatttcctggagagatttgcggataatagggatccacagacgggaaaacggtcgtttagtaattggaagtctgggttgattgttgcgttgctgtccattggtactttgatgggcgccttgatcgcagccccgattgccgataaattcggccgcaaatactcgatcgtcttctggaacattatcttctgcgtgggcgtcattgtgcagatcactacaacaaacgtctggtaccaaatttcactcggacgatgggttgccggtcttggtgttggagcacta

SEQ ID NO: 142949 - DNA, 362 bp, Zea mays
  Clone ID: MRT4577_61850C.1
tttttttttttttttttttattagaaatacattttttttttttttttttttattagaaatacatctcaatcagtacttgaagttccaacatacagattacatcatgacagtccactcaatcagtacttgaagttccaacatacagattacatcatgacagtccacttactgctacttagctacaaataagtaacagtagcacgacataagttgacaaagtttcatgctgcccaccccagatgcagtagagtgaacttaaacgacacatcttcgccacctaccaagaaaagtcttgcctaacctctggtatttacacgaaggggtagatcatgattgtgccggagcaatgttattcagcaggc

SEQ ID NO: 142950 - DNA, 299 bp, Zea mays
  Clone ID: MRT4577_61851C.1
gcgacggcgagcgtgtgagccgcagccgcgagaagcacgccctgctggaggggcggaccaaggagctgggctacacggtgaagaagcatctgcaggacctgtccggcaggatctccagagctcggcacaacgaactctgaaggcattggggagcccagcccggcagggaagaggccagcgtgaatgacctgggctcttggccgtggcatttccgtggacagcccgccgtcaaggtggctggggctggcacgggtgtcgaggcaggaaggattgtttctggtgactgcagccgctgccgt

SEQ ID NO: 142951 - DNA, 267 bp, Zea mays
  Clone ID: MRT4577_61852C.1
gagtcgttggccgctgagcaaacgcagacgcgggggcctttttaagggaaggagctccatccatggagcacgtcaacttctaccgcaactatggaaagacgtccaagaaaccaaggcgctcttatgagaaggaacgtcttgatgcttaacctaagctgggcggcgagtcttggctgaggtgcaagcgtcagctttggagggtccagtatgcactgagcaggatccggaatgctgcaagggactagctcacgctcgtcgagaagaacc

SEQ ID NO: 142952 - DNA, 275 bp, Zea mays
  Clone ID: MRT4577_61853C.1
aaggctcggaagcaccgccgaggtacgccggcttcctcgctccctgcggggccgcgggccacgcatggaacacgcgacatggccagtgcacactctcttgggcctcggaagaacggactggcagagcaccgagcaggaggactcctcgggagatgaaggctgccgccggtaccccatacgaggtgcagggtggtctcttcgatgcggcctacgaggacgtgaataacgacggtgtcaaggcgctcttggacaaggacaccctcaagtccgcaggg

SEQ ID NO: 142953 - DNA, 514 bp, Zea mays
  Clone ID: MRT4577_61854C.1
cttggcttggaacctttgggctgatttatgtgcttgtttatgtgcttgcttatgtgcttgtttatgtgcttgtttatgtgcttgtccaccccgtgattgactttacctttatgtaaaggtattgagtgcgactcttgcttgcgttgttacggttctgtattgggtgtcgtcgtcgtcgtcttctgttgttgtgtctgctgtcgtgtcggttgtcgctgtacttgttgatgatgttaatgttaagtttattacttcgatttttgcggtgtacattttgtcggggcttcctgatggtgataagttggttctcgatgatgatgttgctgatgatgatgaggatgttgctttcgctggtgtgtttaatggggttattacgatcgagtttagggatgatgcttttgctttgtttggtgttgaagtaattgtgggtggtgttgctgctagtaatgtgtttgctgtatctgttagtgttgtggtgtgtgctcgtgttgctgctgtggctgttgtgggagtt

SEQ ID NO: 142954 - DNA, 336 bp, Zea mays
  Clone ID: MRT4577_61855C.1
cttaatcaaactcagggtggggtcttgaaatgttgggcatcccatttcccgggggcaactcaggggggaaagattttaatcgcttgtcaagcaaggccaaatacaataatcataccggttgaaggggaactaggagtgagagagggggatcatgccttgtcttttttatcgctgttacagctgacctttttgacattgtggaaagaccgccgtttggggccggcctccttcattttcgcctgccaaccccttgcttgccccaccgcctacccgcccctgctgggggtgggcttttgtcttcccgcttatccccaacggtccctaaaggccaaaacc

SEQ ID NO: 142955 - DNA, 274 bp, Zea mays
  Clone ID: MRT4577_61856C.1
gaaacagggaaacccatcactttttttattgcgtgcatgacaaggccaaactgaattggaacaatgcgtttttagccacgggggtggaaagtatgcctccaaaacctttgggggggaaaaaaaacaaaaaattttcggttccaaaccacacaccatttttttatgggctgcacccacataatgaggcccccgatttttaagctggcgaaaaaatttttttggtgggctttttcggggggttgaactgtttaaaccacttggccggacccgtggg

SEQ ID NO: 142956 - DNA, 1055 bp, Zea mays
  Clone ID: MRT4577_61857C.1
ttgggtacctcgaggccggccgggacataggccccgagcgcgcccgtccaccacacagcacgcacttcgcgccacagcggacgctcttctcgcgagcgcgcaccgatcgatcgcggacgggtaggcgccggaggaggggagggatgatgtggctcccattcctgtacccggcgccggcgtcggcgtacatggcggcgatgtcggcggtgtcgttcgtgtccatggcgaacgcgggcctcgccgagctccgcggcgaccacatgccctactccaagttctggcacgccgtggcgggtgccgccggcggggacaccaggcagcggggcgggatgccgctcctgcgaagccgggacggcatgctgctggcctacgccccggcgctgctcgccgccgccgcgtccttcgcggtgccgggcgccgtcgagggcgcgcgcgccgagctgctcagcgccgcgctcgccgcgcacttcctcaagcggatcctcgaggtgctgtgcgtgcaccggtacagcgggagcatgccgctgggcacggcggccaccatctcctgcagctacctggtcagcacggccaccatggtctacgcgcagcacctcagccgcggcctcccggaccccgccgttgacctgctctgccccggcgtgctcgtcttcgccgtcggcctcgccggcaacctctaccaccaccgcctcctctcgggcctgagggccgacgacggcacagggtacaaggtccccaggggcggcctgttcggcttcgtcgcctgcccgcactacctcttcgagatcctcgccttcttcggcttcgccatgatctcgcagacgctgtacgcgctcgccgttgccaccggaacggcggcctacctcgccggccggagctgcgccaccaggaggtggtaccggtccaagtttcaggacttcccgccgaggatcaaagcgttgattccgtacgtgctgtagtgagctagctaggagagtgatgagtcgcatgtacaagacacactgttcatttggtacagagcatcatctgttgcagctgaacgtaaacttcatggg

SEQ ID NO: 142957 - DNA, 513 bp, Zea mays
  Clone ID: MRT4577_61858C.1
ttatgatggcgctttgccactggccttgctactgccgccgccacccatgctaccaccgccgcccctgccgtcgtcgtcgcccttgtcgccgttgctgtcgcccttgccgcttttgcctccgtcgccctcgtcgtcgtcgtcgccgtcatcgccgccgtcaccaccatcaccgccatcgccctcgtcatcgccgtcaccgccgctctcctccttggacgagtcggaggagttctcctcgtccgaggagacctccgactcatccgagccctcgagctcggagcgctcgacagcccggatatacgtccacacctcggcagcgatcccatgggaatcgtctgagtcattggacgacaccaggggagaggcgtagaccggcgccccctcggacttggaggaaaactcctccttcgagtactcggagtcaccaaagtcctccgaggggggacttggctcgcgttttcgcttatcgccggagtggtgcgacgaacttccatccttcttgttcttgcccat

SEQ ID NO: 142958 - DNA, 630 bp, Zea mays
  Clone ID: MRT4577_61859C.1
tttttttttttttttttttttttttttttttttttttttttttttctttttttttatgttttttttttttttatgattactttctggggacacagtgcaactagggggtaccgcagggctgacagagacacaagatcagaaagggcacgcagcgactcccggcggcgagctagcaagcagcccggccaggagcagaaggcggggccagccacgggagtgggacggagcgcggggggcaggagagggggggggcacgagccacgaagcgggggggggcggggggggcgggggggggggggggggccaccccccgctcgggggtcacggagaggactccgcccgagcgaaggtagctaggccgcgggcgcgggaatcaggacaggccgaccgacggagcaggggggcagagccggggacccgcccggggggcccgggggggcggtacaaaccctcccccgctggctggggctggcctagcatagctggctagacccggagggccctcgcgggccccggcggggggggccggtccccagcgtcggccgggggggggcccgagcgggggccgggggggccccggtgcccccgtccggggggggggggggggggcgctcgggcggcggtgagggg

SEQ ID NO: 142959 - DNA, 266 bp, Zea mays
  Clone ID: MRT4577_6185C.1
acctctccttgtcccatcgccttatgacactctgctgccacctagtatcttgccaggctattcctagtctgccatggaatgaggacaatggcgactggcaaccagacaccaggaggcaattccaagatgctgctctggaatgagaagtcaaggtcctctaggccattgttgttctgcgggcatcgtgaatccatttaattttacgatttttctagttatttgacagtgtcctcagaattggtttcaagactacgatttacttgagc

SEQ ID NO: 142960 - DNA, 354 bp, Zea mays
  Clone ID: MRT4577_61860C.1
atgccgaagatgaccgagaaggatgcttcgaatgcagagcctgggctggttagactttgttataagcataagtttgaagatgagtttggggagcctttaaaccggaagccgaagtgttgtatagggcctttgcggtatgaaataaatgtctattggatcgtgttttttgacgctatcggcttcttttatcctgactacccttatgcggttcaagagacaaagaagaggaagaagcaaatattgaaggtgatgatcaagcgccgcaagattctgaaggtgaagcccgagacaacatcttctcaggcttcggaagagacaggcgacacccaaaactatgaggttgcctacgattga

SEQ ID NO: 142961 - DNA, 393 bp, Zea mays
  Clone ID: MRT4577_61861C.1
ctctgcgtggcggcgctgtctggccacccaggggcgccgcccagcgcggcgcacccgccggggaccggcgtcgagccctgcttcgccgcgcccttcgtccccgtcgcgcggatgaagcgcgcggcagcgcaggcctagctggcttgccgcgatcgacgacaggcagagttggttaccgctgctacgacgcctacgcgtgacgcctgaagtgaatagacttgcttcgctcgtgtcgatctcggcatgtagcagcgaatcatcatgtaggacagggggcgctctcgctgtggtgcccagccccagtgagcaatggcatatagaacactccagtgactgtacttaaatcttatggaacttgggtctgctactgataactaatgaaccaatgttttc

SEQ ID NO: 142962 - DNA, 148 bp, Zea mays
  Clone ID: MRT4577_61862C.1
gactgactactgtagtaccatagatcgaacaacttggagctgcaactcaaaaagagagatttgtgctttttatggcccgtggtctgatagatagagagagaaccatgacggtggaccatcagtgctcacatgcatgatagagatgaac

SEQ ID NO: 142963 - DNA, 2318 bp, Zea mays
  Clone ID: MRT4577_61863C.1
ccctttggaggtttttttttttttttttgttttttttttgaagatcttgcgtgctctcatattcaaatcaatagattagatataagtgcataactagcttggcatgctctcatattcaaatcaatagattagatataagtgcataactagcttggcagttggccccagcattccccttcttttcctccctagctgagtaggccatataatggcaaagtcttctttttaagagcgagtcctggtgaaatgagacgaccaatttcaaacggaatactaagctgcagtcttaacaggaggggaggaggagcagagaaaacaggcgaacttgatgccaaactaggaacagcttaaggaaacctcgcaaggtatttccgagctgttcacaacaatgtgcgagaatagaatcaacattatcaacactggtgcagcggcgctggctgaaatgctccgactaaccgctaaccgctgaaccaaagctcctatcggcagaaatgctgcaagaatgttgtggcgctttggcacgcatgtcacaaataagggcttcatcctccagtgctgggggaaacgggctttctgccatgcaccctgaagcggtagatgcatgtaagttccaagttcccatggtttgaggagatatcaagctgaaccatgttgacaacacgtgattgagcggttctctctagttggaaggtctgagcattgctcttgtcaaggtcataagagaactctcctaaagtagacatcacatttgaatccttttctgaatcatcatgtggtccttggtaccatccacggacctggaaatcctttggagcacttgatctatcataggccacactcttgtcaacatgttctagagtgacggcttcaggaattattgctgttcttagcttcaccttcacaaacccactacttcctttcactgcaaaacactctcctggctgcccaaaacttggctccagcatcttttgggctgttgtgtgcacattgctgcgaccaggtaaatagttcttgccattcatgaaaggctctgagtgacttaccactttagcaccaccagatcccaatgcataatccaccataccaaggccatctgcggaatgccttgctatctccatctcaaccacatctttggcatatagccttatatcatccaagcttatttcatcatctgtaccaccgaatcccttctttttcttcaactggctcaaaatctcctcaaactcatttttagaaagaaatcccatgtcactaagctcagccagtgacttgtccaacttgtcagttttgtcttccaaaatcttcatctttttctctatcttattacccttatcctcaaattgcttagcaatgaccccttttgctttgtcaatctcattttctagctttttatccaaaacatccaactgtagctgaagcatcttggctgtcttcttgaacccttccaccctggatagcctgttctccatatccagtgttgtaaatgataattcaccactttgccatctccagaacacctgccccatccaagcagtagctgaaataagaagacacagcttcaccagcacacttaaggcagttacccagttggcgttttcttgtttagtagggcttttcttttggcgtacagcagctgctgaagcaaccacatttgtagtgtttttgttttggcgttcagcagttgctgaagcaaccacatcttttcttccttcagaagaataatttgacttttgaagaactgattctcctcggatagtatgactcagatcattgctaggaattttttgaagaatcgaaggcaatgcttttctttttgtaataccagctgttcgctgcctagcatcttggctagaatgtgaatccgaacttactgcatggtttccatttgtattcgcagtacgaattgcagcagtagaagcagacattgtcatcagctataaagtagatcgtattctataaataatgatgctcctgtggagctgcgttccggacgcaccggagccggtcgcggagacaccggggctgcagagggcggatgccgcgccgaggtggtcacgaggacgctggggcgctgggccccaggtggtgctcaaccgagcgcggtctcgttacgggctgcgacgctgcgagcggagggaagagatcggccgcgggcaagaggcggcgggcgggggagcgacctcggccgcggaggagaggaagcggccgccgccctcagtgctatgcggatggatcgggattcgggaagtggaagaaccgacaaaggggagaaaagaaataaaaaataaaagagtataggatgcccggacccggccggc

SEQ ID NO: 142964 - DNA, 1306 bp, Zea mays
  Clone ID: MRT4577_61864C.1
gtgcggcgctcgaggcggcgggtggagcttggtgctaagtgaacaatgggcctgtaacagtggcccacttaaagcaagagtagcccagctcaggactactcctctcctctcctctcaacctaccctaaccgccgccgtcgccgcccgccgtcctttcctgtataataaaacctcaaatcgtctctctcccgtcctcccctccaccgccgcagccgccgccgtacctcctcctcccgcgcagcagccaccgccaccgccggaaatgaagaccatcctggccacggagacgatggacatccccgagggggtcacggtcacggtggcggccaagctggtgacggtggaggggccgcgcggtaagctcacccgcaacttcaagcacctcaacctcgacttccagctgcaggacggcggtcgcaagctcaaggtcgacgcctggtttggcacccgccgaaccatggccgccatccgcaccgccatctcccacgtccagaacctcatcgcaggcgtcaccaagggtttccgctataagatgcggttcgtctacgctcactttcccatcaacgcctccatcaccaacgccaactccgccattgagatcagaaacttcctcggggagaagaaggtcaggaaggttgatatgcttgaaggtgtgaccatcttgcgttcagagaaggtcaaggatgagcttgttcttgaaggcaatgatgttgagcttgtctctcgctccgctgctctcataaaccagaaatgccatgtcaagaagaaggatatccggaagttcttggacggtatctatgtgagtgacaagggccccatctttgatgagcaatgagctgccctttgttcctggctagcaaaagccgtgttaggctgtggccagtagactgtttgcggagtggatgtagttggaaataggagatgggatgagtaaggttgctggagataagagctttagcaagaatttatgagatggacctttattttgtgttgtgtttttttttgtttgagttcagttaactacatctttgcaagttggttggatctgaagttctgtactgttttaggatgttattatgtaacccgaggtggacattgtttgtgatcatattcttcacctaagtacctccactcctccagttccatcgttagttgaaagagttcaactgcatgatgaaattgattgcaagtgatcatcttttgcgatgtacaaggcccggagtggagcacaacaatgcaaacaatgttttggcagttgatatgggcgttcattgtatgcaattgcattttttttgagagattctag

SEQ ID NO: 142965 - DNA, 207 bp, Zea mays
  Clone ID: MRT4577_61865C.1
gtgcactacctaagggagatgcgcatcgcgcacttcgtggtgaaggagccgagggtgatctgaccccactgctcggtcgattcttatgatttgtctaactgccactatctattcttcatcggccaccttacttcttttcctgtgccggtcactttcttaatttaaaactgtttcacttgccacgctttttgttttcctacctttttg

SEQ ID NO: 142966 - DNA, 343 bp, Zea mays
  Clone ID: MRT4577_61866C.1
cctccttttttttttttttttttttttttttaaagggttttttttaccaaattacattgtaaatcaacaatggtacaaccgagaacaaaaaaccacaggggttcccaaagattttttcaagggcaatcgtcagccaggggatccccggcaggtggggccccccctcacgagagaggcccaagaaaaccctcccgagaaaattaagttccccgagggaacccaagctggaaaatctgaaacccaaaaagatggccctttttttttcggggaccccgtgggcatttaccatgttgggaacccacacacatgggaccccccgggggggggggaccgccggagaaac

SEQ ID NO: 142967 - DNA, 193 bp, Zea mays
  Clone ID: MRT4577_61867C.1
atttggaatttgtggaaaacattcacaattatggcagtagaatttatttggtttggcgctggcgatggggtcgggagttgtcgcgtgggctagttgggccgcggttggtgattcggcccactattcctcccaaaccctagccgccctccctcctcacccctccccctttgtgcagccgcccccccacttcccc

SEQ ID NO: 142968 - DNA, 198 bp, Zea mays
  Clone ID: MRT4577_61868C.1
ctacgcggcggccggggcgggagcgcggacgtgccaggctgctgctcgaccgacggtggggcgaggtgctcgacgagttgccggagcggcaagccagcgccaggcgcgctccggttccggcttgagatgatgagccgggccgccacgccgcggcgaggggcgggagcgtggagatgctcatggagctgctcgacgagt

SEQ ID NO: 142969 - DNA, 284 bp, Zea mays
  Clone ID: MRT4577_61869C.1
cgcgttcccgaatttttgggtcgaccgatgcattcggtgactagacggctatccgtggcgagaaggcactatgatcaagacaccgtatgaagtgctgaacctgtgagatgaagccgacaacagggagcatatggccacggaacaccatagcttctctgggtcctatttcaagaggagagacgaactgactgtccgacctcgctcactgggtgaacacataaaccgtgaagcaggcctataggagacaaaataacaactgaagcaccgggcggcaaaaatgaaaa

SEQ ID NO: 142970 - DNA, 1176 bp, Zea mays
  Clone ID: MRT4577_6186C.1
cggtccgaatagtccttctccctgcgtgcccctggccgattctcggctccctagctcacctctagtcttctccgtcctcctctctatgcgcgcacagggttggcgtgcgtcactgccctgtctcagctccactgtgcttcgacggctgccatggatgtccggccgctgctttgaccggcgtcctcctcgtcgaccgtcattcttctccaaaccaggatccacaccagagccaccccagccgtttgccactgccgtgatgcttcctctgctcagagctcccagccatggcgcctggccggatcttcctgcagctcgccgtcgaactccctagcgcgccgcggtcgccctctcccactgtcgtcttcttcctctgctcgcgtcgcacgcagctccagctcacctgcgcgtgcgtcctcgccgcgccgagcgccgtgaagtttctctacccagccgtgctttttcctcctctgctcggtgctcctgcttcagttcgccctgcgcgcagccggcgtttcttcatgacgcgttgttgagctccattttgagcgggcggacggtccggctctgaggccggacggtccgtggtccggacagtccgcgcctgtgggccggacggtccgcgcatgcgcagagcagtttagggttctgagttttgtgctatgtttgttgggtagatttgcgaaattagctcggaatccagtcgtgtaaagggtccagcccccctcctctataaaaagagaggtctacggccgatttgtaatcatcaatcgaatcaatacaacttctattcgcatttatttctagtacaattaggagtagttctagtctagttctagtttagcctctcgatccccaaattctccgcctctcctcgactctacgtcgattagaggagtctaggtcggccggcccgagcctagacaacccctaggatctctcctccccggcgggtccctccccgggagcgagatccaggcgccgccggcgatcttccgccgcccctgcgcacgcgcggaccgtccggccgtcaggcaggaaaccttagcccctgcgccaggtcgcggaccgtccggccccaggccgcggaccgtccgcgcctgaccagagagcaccgccgccggttcttcttgagtatttggcgctccgaaaaagtgtcaacagtatcggacgcgtggg

SEQ ID NO: 142971 - DNA, 299 bp, Zea mays
  Clone ID: MRT4577_61870C.1
aaaggaacaacttcggtttacccccattcatgtgttttattgattgtttaatttacatggaaaagccaaaaaaaaaaacaggggctgcccctctttagtggagttttgtgaactgcaaaaaacaaaaaaaaatgcctttccaacaccccaaggagtttgtcttttggtgcccttatgctacccccaaaaaaaaccaactttttttttccaaccccctttggccttttttgtaaatgtccccctcctccaggagggtttaaaaagacccctaaattcctgtaggctttttaagcccatta

SEQ ID NO: 142972 - DNA, 575 bp, Zea mays
  Clone ID: MRT4577_61871C.1
cctcgaggccggccggggccaccgaaatcttccgtcccaaatcgaccgagcgaattcaccacagcttctcaccaccgataccttcgatggcacccaaggcggacaagaagccggcggcgaagaagtccgcagaggaggagcccgcgacagagaaggcaagaaggggaaaaagaaagcgaagaagtccgtggagacctacaagatctacatcttcaaggtgctgaagcaggtgcaccccgacatcggcatctcgtccaaggccatgtccatcatgaactccttcatcaacgacatcttcgagaagcttgcggccgagtccgccaagctggcgcgctataacaagaagcccaccatcacctcccgcgagatccagacctcggtgcgcctcgtcctccccggcgagcttgccaagcacgccgtctccgagggcaccaaggccgtcaccaagttcacctcttcttaaggttcatagtactaggctgggtggtgttggtagacgtggctcaatttatctggtaggggtagtgatggatgatatgatctgcgtctatttgagctgttaaaactgatgaaca

SEQ ID NO: 142973 - DNA, 822 bp, Zea mays
  Clone ID: MRT4577_61872C.1
cattgggtacctcgaggccggccgggaccgaaatcttccgtcccaaatcgaccgagcgaattcaccacagcttctcaccaccgataccttcgatggcacccaaggcggacaagaagccggcggcgaagaagtccgcagaggaggagcccgcgacagagaaggcggagaaggccccggcggggaagaagcccaaggccgagaagcgcctcccggcgggcaagtccgccggtaaggagggcggcgggggcaagaaggggaaaaagaaagcgaagaagtccgtggagacctacaagatctacatcttcaaggtgctgaagcaggtgcaccccgacatcggcatctcgtccaaggccatgtccatcatgaactccttcatcaacgacatcttcgagaagcttgcggccgagtccgccaagctggcgcgctataacaagaagcccaccatcacctcccgcgagatccagacctcggtgcgcctcgtcctccccggcgagcttgccaagcacgccgtctccgagggcaccaaggccgtcaccaagttcacctcttcttaaggttcatagtactaggctgggtggtgttggtagacgtggctcaatttatctggtaggggtagtgatggatgatatgatctgcgtctatttgagctgttaagactgatgaacattgttccacgtcacgttgtgtttgatggacattgttccagatcacgttgttaagactgcagaactgtgtctgacatggaacaagtatgatactcgaaatttctgtgagtgcattgaaacgtgaaatctgcagtccttaaaaaaaaaaatctggaat

SEQ ID NO: 142974 - DNA, 826 bp, Zea mays
  Clone ID: MRT4577_61873C.1
gggaccctcgaggccggccgggccgggatcgaaatcttccgtctccaatcctcctagcgaattcaccacagcttctcaccaccgctaccttcgatggcacccaaggcggacaagaagccggcggcgaagaagcctgcagaggaggagcccgcgacagagaaggcggagaaggctccggcggggaagaagcccaaggccgagaagcgcctcccggcgggcaagtccgccggtaaggagggcggcgagggcaagaaggggaaaaagaaagcgaagaagtccgtggagacctacaagatctacatcttcaaggtgctgaagcaggtgcaccccgacatcggcatctcgtccaaggccatgtccatcatgaactccttcatcaacgacatcttcgagaagctcgcggccgagtccgccaagctggcgcgctataacaagaagcccaccgtcacctcccgcgagatccagacctcggtgcgcctcgtcctcccaggcgagcttgccaagcacgccgtctccgagggcaccaaggccgtcaccaagttcacctcttcgtaggttcatagtactaggctgggtggtgttggtagacgtggctcaatttatctggtaggggcagtcatggatgatatgatctgcgtctatttgagctgttaagactgatgaacattgttccacgtcacgttgtgtttgatgggcattgttccagatcacgttgttaagactgcagaactgtgcctgacatggaacaagtatggtacttgaaatttctgtgagtgcattgaaacccgaaacctgcagtccttgaaaaaaaaaacccgaaaacact

SEQ ID NO: 142975 - DNA, 750 bp, Zea mays
  Clone ID: MRT4577_61874C.1
gaggccggccgggaaaacgaaagcttacgtccccaaatcgaccaagcgaattcaccacagcttctcaccaccgataccttcgatggcacccaaggcggacaagaagccggcggcgaagaagtccgcagaggaggagcccgcgacagagaaggcggagaaggccccggcggggaagaagcccaaggccgagaagcgcctcccggcgggcaagtccgccggcaaggagggaggcgagggcaagaaggggaaaaagaaggctaagaagtccgtggagacctacaagatctacatcttcaaggtgctgaagcaggtgcaccctgacatcggcatctcgtccaaggccatgtccatcatgaactccttcatcaacgacatcttcgagaagctcgcggccgagtccgccaagctggcgcgctataacaagaagcccaccgtcacctcccgcgagatccagacctcggtgcgcctcgtcctcccaggcgagcttgccaagcacgccgtctccgagggcaccaaggccgtcaccaagttcacctcttcgtaggttcatagtactaggctgggtggtgttggtagacgtggctcaatttatctggtaggggcagtcatggatgatatgatctgcgtctatttgagctgttaagactgatgaacattgttccacgtcacgttgtgtttgatgggcattgttccagatcacgttgttaagactgcagaactgtgcctgacatggaacaagtatggtactcg

SEQ ID NO: 142976 - DNA, 268 bp, Zea mays
  Clone ID: MRT4577_61875C.1
gaaagactagaatctgatgaagatgtgctccaagcttcccttgacgctgttgctgaggaaaagcctcatgtgctacgctatatgtctaagaccattcgcgatttagaagttgtggagggaagtgctgctagatttgactgcacgattgaaggatacccagactctggagatagctagctcagagatgaccaagcaatcagggagtcccggcacttgcagattgactacgatgaggacgggaactgctctgtaattattagcgatgttt

SEQ ID NO: 142977 - DNA, 1289 bp, Zea mays
  Clone ID: MRT4577_61876C.1
aattaccagatttccaagttcctaaagaatgagaataatagcaagcggagagatacaactatattccacaacagggacatcaaatctaagaggaccattacaatccggcgcgccggatttatagagcaggcaagctagctactaggcgggtagggtgggggactggggaaaggacacagcaaagaacccttctaacagatccgcggatcccgcagcgcgctcagttgctggtgaacttggtgacggccttggttccctcggagacggcgtgcttggcgagctctccggggaggactaggcgcacggaggtctggatctcgcgggacgtgatgcggacgcgtgggcggacgcgtgggcggacgcgtgggcggcggcgaagaagcctgcagaggaggagcccgcgacagagaaggcggagaaggctccggcggggaagaagcccaaggccgagaagcgcctcccggcgggcaagtccgccggtaaggagggcggcgagggcaagaaggggaaaaagaaagcgaagaagtccgtggagacctacaagatctacatcttcaaggtgctgaagcaggtgcaccccgacatcggcatctcgtccaaggccatgtccatcatgaactccttcatcaacgacatcttcgagaagctcgcggccgagtccgccaagctggcgcgctataacaagaagcccaccgtcacctcccgcgagatccagacctcggtgcgcctcgtcctccccggtgagcttgccaagcacgccgtctccgagggcaccaaggccgtcaccaagttcacttcttcttaggctcatagtactaggctgggtggtgttggtagacgtggctcaatttatctggtaggggtagtgatggatgatatgatctgcgtctatttgagctgttaagactgatgaacattgttccacgtcacgttgtgtttgatgggcattgttccagatcacgttgttaagactgcagaactgtgtctgacatggaacaagtatgatacttgaaatttctgtgagtgcattgaaacgtgaaatctgcagcccttgaaaaaaaaatctgaaatacaactgcgtgttcatgatcaagttcaggatgcaggcacattttgtatcctatcattagtgctatttggtttatatatttataatgtaatagctggctaatatgataatgttaaattatatttctttaaaaaaaaaaaaaaaaaaaaaaaaaaaaaaaaaaaaaaaaaaaaaaaaaaaaaaaaaaaaaaaaaaaaaaaaaaaaaaaaggggcggccgc

SEQ ID NO: 142978 - DNA, 845 bp, Zea mays
  Clone ID: MRT4577_61877C.1
cattgggtacctcgaggccggccgggagccaccgaaatcttccgtctccaaatcctcctagcgaattcaccacagcttctcaccaccgctaccttcgatggcacccaaggcggacaagaagccggcggcgaagaagcctgcagaggaggagcccgcgacagagaaggcggagaaggctccggcggggaagaagcccaaggccgagaagcgcctcccggcgggcaagtccgccggtaaggagggcggcgagggcaagaaggggaaaaagaaagcgaagaagtccgtggagacctacaagatctacatcttcaaggtgctgaagcaggtgcaccccgacatcggcatctcgtccaaggccatgtccatcatgaactccttcatcaacgacatcttcgagaagctcgcggccgagtccgccaagctggcgcgctataacaagaagcccaccgtcacctcccgcgagatccagacctcggtgcgcctcgtcctccccggcgagcttgccaagcacgccgtctccgagggcaccaaggccgtcaccaagttcacctcttcttaaggttcatagtactaggctgggtggtgttggtagacgtggctcaatttatctggtaggggtagtgatggatgatatgatctgcgtctatttgagctgttaagactgatgaacattgttccacgtcacgttgtgtttgatggacattgttccagatcacgttgttaagactgcagaactgtgtctgacatggaacaagtatgatacttgaaatttctgtgagtgcattgaaacgtgaaatctgcagtccttaaaaaaaaaatctgaaataaaaaaaaaaaaaaaaaaa

SEQ ID NO: 142979 - DNA, 379 bp, Zea mays
  Clone ID: MRT4577_61878C.1
agccagcccccccaaaccctaggctgccgccaacccgactggctcccccctcactcttctcccgccatgaactaccgcttccagaacctcctcggcgcgccgtaccgcggcggcgacgccgtgttcgcgggagactcacccgttctcctctccgctgttgggaatcgcgtggcctccactgacctcactgcctcctcgtctctcacgcttccgttcgagtcctcatccaacgtcacccgcctcgccacttccccctcgggcgacttcctcctcgcagccgatgacaatggccgcgcgctctacgccaacctccgccggcgggccgtacttcaacgggttttctttaaaggcgcgccattaagcggtcggtttaaccccg

SEQ ID NO: 142980 - DNA, 294 bp, Zea mays
  Clone ID: MRT4577_61879C.1
cctcagcagagagattgtcccgacagagaggcaattctattccctaccaacatgaagctgttgctgctgctgctgtgtctgggcctgaccctggtctgtggccatgcagatgaagctagtctcgagagagggaacctcgatgtggacaagctcaatggggattggttttctattgtcgtggcctctgatagaagagactcgatagatgagcacggcagcatgagagtttttgtgcagcacatcgatgtcttcgagaattccttaggcttcacgttccgtattaaggataatgga

SEQ ID NO: 142981 - DNA, 523 bp, Zea mays
  Clone ID: MRT4577_6187C.1
ggggggcagctcaccgctgacaaatccatctatcccaatccgtcgccattatcgaagtaaacaatcaccaagaagccattttataacaaccaaccggccggcctcaactctcagcatcaccataagcaaatcctgatgcacaatgcgaagcggttcgccacatagacaatctcacacatccccaaaccctatgacacactcaacggctgcacaatacacgacctcttccgggaatccatcactcttcacatcatccgtaacctttgaatcccaaacaaccaccgtctgcccattctggatgttacctacacgctccatatctcacctcatgaggtgacgtgcaagaccatgacgcacccccactaatatcccttcagctgcttcacccttccgcaaattccctacgaagagacttacaaccttctctgcgtcatcctaaaagacgtccatccttactgttacatccactactagcttcaggtcgggctcaccgtcgacctccccatcatcagacacttcacca

SEQ ID NO: 142982 - DNA, 285 bp, Zea mays
  Clone ID: MRT4577_61880C.1
ccacagtcgaagcgtggcttaagcccgcccctatgctattggtgctgctataaaccactgcagccctttgggccacaaactaatctgccactgcgtaatagcttgagcgtggccatgcatcatgccagcttcacaccctggagtgcatactttagcatgtagaaactgttttagcatacatactccaaactccaactgctgtctgcacgactgcatcagctaagaatctgtatgtacctcactgctggtgttctattttacatcttgttaatgacagatgctgct

SEQ ID NO: 142983 - DNA, 532 bp, Zea mays
  unsure (1)..(532): unsure at all n locations
  Clone ID: MRT4577_61881C.1
gcaagacaaggaggngaagcttgccnncggaagcgncggcgacgccggcagcgccaccnccancaaggccnacggggccgagnncancgccacccnccncnncgncnncgccggcgncggnnccgccancgccnacgggcaacngacgaagggcggcgcgcnggacccggcgggccggggggcgancgcgancgcgcacgcgcgggcgcngnncgngggcgngnccgncgcggcgaacancncgggcggccaccngaacccggccgngacgnncgggcnggccgngggnggccacancaccanccngacgggcgncnncnacgggggggcccagcggcggggcgccaccgnggcgngccngcnccncgggnncgncacccacggcaaggccanccccacgcacgccgncgccgcgggcancagcgagcnggagggcgncgngnncgagggcgncancacccccgcgcccgnccacaccgngnacgccaccgccgccgaccccaagaagggcncgcncggcaccancgcgccc

SEQ ID NO: 142984 - DNA, 556 bp, Zea mays
  Clone ID: MRT4577_61882C.1
cgtgcgccgacgcgtgagcaagacgcgtgtcgggcaaatgcgtgtccaaggataagctttatgactaactgagtatatattatgcttccagtggtgggtatagtggggactcacaattagttcgttctattcctatgcaccatggagatgctggtagctatggattttgcacccccatcaggaaacggtgctggggtgctcttgcagccgatattctgtactgtacactggctagtcaaaagatctatagtcatttctacttgcacaaaccagcttaattgtgaaagttggatcatggtacgaaatactgagtaggcagacgctaactgcacaactgcgattggaacaccagcttatcttttttgtgccaggctccatatgcttgtgcctatcatatagtacaaaggtttgctcttcgataactggagtcagtattctaactgaacatttttttttttattcgggcctatatttgactgcgtggtgggttgttacgagctgacgaacggcagagaattgaatgactcgttttctcagatggtagttcttccacatt

SEQ ID NO: 142985 - DNA, 681 bp, Zea mays
  Clone ID: MRT4577_61883C.1
gcacgaggaaccgtgtattttcgaacagtaggagtaaactctataacgtgcgcacccttttctcaggcacaccctctgttcatggtgatcggctttatcatctgcaccggagaagcggtgatggcgtacaggatcgtgctgggcccgaggtcggccaagaaggcggtgcacctgctgctacatctcgtagccctcaccttcgctgccgtcggcctgtacgccgccttcaagtttcaccatgacgtcggccttcctgacatccgttccctgcattcttggctcgggattgccacgatagcgctctatggtcttcagtggttgatggcattcgtgtactttgtcttccccggggctgtgatgacgatgagggcggactacgctccatggcacatcttctttggcctcgccatctttctgatggccatttgcactgctgagaccggactggccaagttcgtctccgccttcatcgcttacccaggcgaagtgtttgtcgtcaacttcaccgggatcgccatcctcatgtttggcgttgcgtcggcttggctgtcatccttccgtcaagatactaagctgcatgctgctattataagtccttccgatccatgcttcttctcaagtcatattgttttatttggactgtgcatgcatgctgaaatgattttgatatattgtttcatt

SEQ ID NO: 142986 - DNA, 452 bp, Zea mays
  Clone ID: MRT4577_61884C.1
gggacctcgagccgggcgggactcattgactactcactcactccccttgcccctatccatccgctagccactagctccagcaggctcgccgccgacactccactagtgctctgctctctccgctccactcacaaactcccctcgctccccccccccccacccccccaaatcggcgatggatctgatggtgagggggcggatgctggccgtggtggcaacggaggcggtgttggccgtgtgggccttcacggcggaggaggggttcaacatcctgaaaatcctggggaagcacaaagagttcacgaagttatgaaaggtgatcaaagagaaggacctgggcggagaaattttttttttcgcacaaccaccgggctggccgtggccaaaggagaaatgagccaactcgacgacggcaaataaacgataaggaacatgagaaaaatcctcgagat

SEQ ID NO: 142987 - DNA, 503 bp, Zea mays
  Clone ID: MRT4577_61885C.1
gatatcaactttgatatgacgaggctacaaatgtgagggcagatacatacaggagagaaacaccaaacgaacaaacagtaatgaacacgtcactcctcgctgcctactgtagcctcgacgtcagcagcttcgctgagaagcgtcttctgcttcaaaatacgatctctcgtagtcgtattactcccttcagaatcaaaatcgctgcctcctgtggccaaaacttcattatattcgctgcacgtcagtgattggatgcagtttggacagccaacggcacttgtgcagttgcacgtggaaacgacttctaaagcagccaggaggagttccccgaagagcatttgggcctgtgatgctatgccgataccacctggatgtctatcatataaaaggattctgtctgggatgccacggctttcatgaggattagcgcactctgttcctaggtcagaagcactgcacatcatatgcagaggcactatattcaggagtgcatgcgaagcagc

SEQ ID NO: 142988 - DNA, 334 bp, Zea mays
  Clone ID: MRT4577_61886C.1
gagaggcctacccggccgaacgcggacaatctttaccctccactgtaaacttgtgcgtgagcggccaaccgcaaggggctggtgcttccaaacagacttacagacagagagacagagagggtcgcgggggccgttgagggctcgtcgaccacccatggccacgaccgggacgacggtcgcggcggcaatcacgatgctggcggccgtggcggcagttttcctcaccgtgctgctctgcttctacattgcgctgtgctccaagcaataccgtggcgaggcgccctgctctggactgcttgccgttgtgggaggtgccatagtttgatctgttgct

SEQ ID NO: 142989 - DNA, 321 bp, Zea mays
  Clone ID: MRT4577_61887C.1
cgatttagcccggcccgaaagaaattcgtgctagcacggcccgaagcatctaagcccgaagcacgacgggcccgtgccgggccagcccggcccggcccaacttgcaggactactcgtgatgcgggttgctacttgcgactgccagtgatctggggccggcagtggggcgccgggtgcggcctaattaaaggcgcgggggcggtgcacatggggcgcccaggcggtgtaccgcgccggtttcatcgcggccgtccgaacttggatcgtaggcagctgcccggcgtggccgcgtgggacatgtggtggcctgataggctgtgg

SEQ ID NO: 142990 - DNA, 252 bp, Zea mays
  Clone ID: MRT4577_61888C.1
cggaatcgaccgcacgcgatcccacgcatgcgtccgcgcgccgtaccacgacggcgtctgcacggagctggcgcacgcctgaggacgctgatgcatccattgctgcccagcacgctatgtgcgtatgagtagcacatgggctacatctacgtcgtacagccctggcagctggacaagctaactcgcgagattacagaataccagtagacaagcaaagtgaacagcgtgaatataatatgcatgccttgggtt

SEQ ID NO: 142991 - DNA, 256 bp, Zea mays
  Clone ID: MRT4577_61889C.1
gcaaaatttgtgcctgacttggctaactggatcataggttaccacggcaagaacacttatatgggcatgtcagtcgaattgattacaaaggacagtctaagcagaggtgagagagcctgggagtcagctgattacatcgtcccggtcttgagagaaccgtggcaggccgctgtttcgacaaggacagaattccaggtataagttggttatgtggctgatatctgtgtaaggcactgcatgattccactgcgagaaa

SEQ ID NO: 142992 - DNA, 174 bp, Zea mays
  Clone ID: MRT4577_6188C.1
aactcccgcatacaacctggacacgtgggactgagagatgtgcacactggtgaaaaagacatcatgatgcagagtatcgtcctggcagacaccctcaagtacctgtacgtacatttcccccgtccatcagtcatagccgtcgacgagtgggttttcaacgttgacgctcagcca

SEQ ID NO: 142993 - DNA, 415 bp, Zea mays
  Clone ID: MRT4577_61890C.1
gacaggctcagttgggcttttggaggaggtgatgaaggttgtaacatacgatgtacgtaaaggttaatgaggataaaaagtgttcaactagtgttatctgcagatccatgttttgacttggacaaaaatggacgctgtgtgtgcacacaacatacaatttatttatgatgtgcacttattgacgaggcatttatacgtctatgatcgatcccactcactttacagaggtaattttatatcgggaagcctatttaatgctggatattcacaattattgtactgtggaacatgaaaactgctacaaaaatgttatataataagaactgttacattaagtaatgctgtactggctaatgttactgtagcatctcataatgaatctggtgcgccattagcgtcaacgtcacgcttattt

SEQ ID NO: 142994 - DNA, 742 bp, Zea mays
  Clone ID: MRT4577_61891C.1
agccggccgggcggcaccgccatcggagtacgtacacacgtcctgctgtcccgcatgccaccggccgggggagaaaaccaacagccaagccaagcccacattgtttccgcagctaggtagaggggcaaaggaggagtatagcggagaggttgatgcgtgacggaggaggcgccatggacgtcgacatgcaagcccgcggtggcggtgctagccatggcggcgaacttgacgacgacggcaaggagaagaggacagggacggtgtggacggcgtcggcgcacatcatcacggcggtgatcgggtccggcgtgctgtcgctggcgtgggcgatggcccagctgggctgggtggccgggcctgtgatcctgctgctcttcgcggccatcacctactacacctcctgcctcctcaccgactgctaccgcttcggcgaccctgtcaccgggaagcgcaactacacctacactgaggccgtcgagtcctacctaggcggcaggtatgtctggttctgcggcttctgccagtacgccaacatgttcggcaccggcatcggctacaccatcacggcttctgccagcgctgcggctatcctcaagtccaactgcttccactggcacgggcacgacgccgactgcacccagaacacgggctcctacatcgtcggcttcggcgtggtgcaggtcatcttcagccagctctcaaacttccacgagctctggtggctctccgtgctcgcggccgc

SEQ ID NO: 142995 - DNA, 132 bp, Zea mays
  Clone ID: MRT4577_61893C.1
ggcgcttgcgcccgagtctcccgccagtctacggccgcgcgccgccctgccggtttctttggaagggaatggcgggaggcgaggctaggggcggggagtgcggctactacacgacggacgacgcgctgtccc

SEQ ID NO: 142996 - DNA, 372 bp, Zea mays
  Clone ID: MRT4577_61894C.1
gatgacaagaaacctgatgagatgaagtatgaatgggatgatgatatgtcgctccaacgaaaagacaggcacaagctggagtttgcctttttgcgttcgttgaggatgatgctgccggtttactcaacattggctgtttgtttcttggcctgtcatattgcccgtgaagccatcttgccaagtgacatttacaggtgggcaatggaggggaatatcccatatgtggctgcttttactgaagtagacaggttccttgggagctctttccaagactgccctttggatgcaaggcagctgttcaggccggtgcgagttatcggagcatggcaactggaagctgcagctggatccatagcacaaagagtagccttg

SEQ ID NO: 142997 - DNA, 702 bp, Zea mays
  unsure (1)..(702): unsure at all n locations
  Clone ID: MRT4577_61895C.1
gatactgatccatgcggagcatatgaacaacaatataatctcccgctacaacgatctgcactccctgactccctctaatgcctatgcaagcaacgcaagcatcgtcgacctcgcgatcgagcatctaaggccctgccctgtctagtagtggttgtgcagcaccggcgcgaggttgggcttgtagaggctcctgctcctcctgaagagatccccgaacttgcgcaggatggaccgcctcttattgaccttgcgctccgtgccgtcgccgtactggcccaggttaaggtggtcgaactcgtagccgtagtcgtccaaggccgccgccgacttgagctccgcgaggttgctcagcgacgcgaacatccggtccttccggcccgggcccccagccttccggagtccaggaacgccgccgcgcccagcttgccctgcgcgtcctcgcgcttccacttgtccaccagcggaagcggaacctgccgctctttcgccgccgcgagccgcgcctggagctcgtcggcgcgctccctggccgcggcctcgctgtccctgaggccgtcgttgtcgcgccgcagggcctccagggcttgctccctctcggcgccggcctcccgcaggccggcgcagtcggcgcgcgcgggctcnagcgcctcggcggacgcgcgggccttcttgggcgcccgctccagcgcgcggcgcagggcg

SEQ ID NO: 142998 - DNA, 252 bp, Zea mays
  Clone ID: MRT4577_61896C.1
tcgaacccttggccggccccttggctggccctttggccggacccttggccccatgtcctggtaatagaattggaactcccggatgcccggaaaacgccattttccgttggcttaaggttccaaaggatacttaagttttcaaaagggccccataccaactgggatttccggatggccattgcctgggtagtcggggaacttttggcggaagttgctcttgttttcgggttaaactggaatgggggtccggcc

SEQ ID NO: 142999 - DNA, 302 bp, Zea mays
  Clone ID: MRT4577_61897C.1
gcggcaacggatactgtaccagagccagcttttttttaaccactgaatatggattgaatgaatctggtcaatataaacagggattaatcctaaaacgatgtattttcaaaaatcactagcgaatacatcttgatcaaagcttgtggaacgggcattttgcttcccaaattcattcaatcgttcataatcataatgtgctgaatggcctatccaagctgagtagtagccatgcgaaccgcttttgtcatccagccacactggcccgtcgatcttaactaatgaagccactgcatggttccatt

SEQ ID NO: 143000 - DNA, 784 bp, Zea mays
  Clone ID: MRT4577_61898C.1
tgctttggttttgttgaatgatcgctcggtgctagcagtcatatatagacctacaccggccacacagcaccatttacctcgaaatgatattaaccgagcgggtaccggtgtgtccacgtttgcgtcaatctacgtccacaagcgcgcagctggagttgtttattcaaccagttgcattcaacaaatgagagagcgccacctctggccagtgagggtgattagcaacatctctccccataattaatcaccatatgctaacttcacaaccatggaaggaagagtgcattattttttgacacatggacaactaattatccagaaacgttttcaaatagaaccacgtgacaacttggatacacaaatcatggcataaaccatgattcacactaaccactaagtaggcacacgtacatcttgcaaatggactaactgataatttttcccgcttgagctaatctagatcttggcacgcttgcatggagggctctcagcgtcatcttcttcgccaccgtcctggccaaggccagtcgctgaaaggtggtccccatcagccaatgcgcatgcaacgccttgccttgcatgtgcctgatatgtctccaatgtatctataattttttattgttccatgcagttatattatcattcttggatgttttacaatcattttatagcaaccttatatcattttggagactaacctattgacatagtgcccagtgccagttgaagttttttgcttgtttttttatttcgcagaatatcagtatcaaacggagtccaaacg

SEQ ID NO: 143001 - DNA, 357 bp, Zea mays
  unsure (1)..(357): unsure at all n locations
  Clone ID: MRT4577_61899C.1
acaaagtcgctcccgacaacttttgtttttataaacaaagacgcggggaacaaaatgccaaaaagggccactacacaaaaggaaggaaggctcattgacccccacccgttggcgcggacagaaaggaggcaagaaaactgaccttgcctgcaaggctagcaccccaaaaaaaaaactaggaggaggcactggaactggcacgggctcgcttnacatttaaaagaccacagaggggggcccaaaaccccggaaactgacatcttctgtctgtccctggaccaaaccaaaagcccctgacgctgagccatacaaagcaaccaaggaaacccttccaggggcagagaacgccgccgaatg

SEQ ID NO: 143002 - DNA, 910 bp, Zea mays
  unsure (1)..(910): unsure at all n locations
  Clone ID: MRT4577_6189C.1
ctcgacattgggggcctcgaggccggccgggcaccaccgctcctcctcttctctgccccaggccagaagcgagggagggtgaagcaccgccgccgtctccgccgccgccgcacaaagacgagaggaagaggttcccggcgccgccaccaccatgtcgtcgatgatgaacgcgctggcaaactggctggcgaacccgcgccgcaacccgctggcgcgtctccacatgcacgccgtctcctcgcgcctcaggaaatacggactgaggtacgacgacctctacgacccctacttcgatctggacatcaaggaggcgctcggtaggctgcctagggaggtggtcgacgcccgcatccagcgcctcaagcgtgccatggacctctccatgaagcaccagtacctcccggaggacctccaggcacagcaggttccattcagaggatatttgggtgacatgttggcgttggtgaaaaaggaaagcgccgagcgtcagtcactgggagcccttccactataccagaggacacttccctagggtgctggatagacatggtcgcaagtattctacctctttaccgcaaatcagaacgcatcaaataaaatgcagtggatgaaactgttttttttttttgttccaaccaaagtctaattttacttgttcatgccatggtgcattaaccatgggctgtagctgttgttttcagcaaatttgtcttcaaccattattaacctgtgaaatcttcaaaaaaaaaaaaaaaaaagcgaccgggtgacctgaattgcattgactaatgtcgctgcccanatctcccgcatggtatcttagaaaatgcacccattgatttctgaaagacatgntcacgggatagaactttgtactcatgatttaatcaaactggnataattttttttg

SEQ ID NO: 143003 - DNA, 231 bp, Zea mays
  Clone ID: MRT4577_618C.1
gggacgaaaactccccgggtggattcgactttttccttcctggacaggatttgggacacaacgaactagcccccatgggagtctcgaagcaaccaccagaacttgaaactttacatgctttaaaaagctggggccagggcagccgtgtttaactcctacccaaagttgttacaactttcacgtgacaaacggggacccttgttcacccggtgcccaccggggggggggggg

SEQ ID NO: 143004 - DNA, 389 bp, Zea mays
  Clone ID: MRT4577_61900C.1
caaaactcatcctgctgcgttgaccaccacaaaatatgggctttccagctgggaatcactcaaggcagtgatgtcaagagagcagctattgatgaagcgcaactctttcatctatattttcaagggcacccagttgatcatccttgcactcatgtccatgactgtctttctcaaaataaagatgccccatggtcagattgctgatggcaccaaattctttggggctctgacttttggtttaataacgatcatgtacaatgggttcgctgagctacaattaaccataaacaagcttccagctttctacaaacatagggatttcttattcttccccgcttggaccttatgagtggcaaacataatcttaaaagttcctgtctcgttcgtgg

SEQ ID NO: 143005 - DNA, 354 bp, Zea mays
  Clone ID: MRT4577_61901C.1
cgggccagggtgaggagttccttaaattgtcttgcgacatggagtacagaaagagggtggatgcgctagtgtttttctcgttacttctcctcggatactttgctgctcatgcacatggaaaggctaaagaaggaattatgcaaggaaacggagcacgatgcgttgtggggtttcctccatgcaaagataacaagtgctactgttgcattggggggcgaactcatgctcgctactctacgatggctgagtgtagtcatgcctgcttctaaacaaaaattaagatcgatgttattatataaattgtaatggtaggtaatgcaattaacaatatatgggaattttagttttggtatt

SEQ ID NO: 143006 - DNA, 383 bp, Zea mays
  Clone ID: MRT4577_61902C.1
tttattcgtacggtcggagcggtgctcatggtcctgtaccacggccccgtggtgcatttcccatggttcatggggcagcaccaccacgacagctccgtgtgccatggagccaacagtgccggctgcggcggttgttctctcacgtgaatcatcacgattacattcgcttgcgtatgctgatcctgcttattcgtgctgcagggcaacacgctcaagagctaccccgccgagctgtcgctgactgcgctgatttgcctgatggggtcgctcatgagcagatcctgctcgctctgatctgtgcgccggaacactcatgcctgagtcatcatctgtgacacgcgcatattgaccgtcgtatacgccgtgatagtgtgctccggcgt

SEQ ID NO: 143007 - DNA, 159 bp, Zea mays
  Clone ID: MRT4577_61903C.1
ccccggcgcgcggccccccggtgttagcgcgggcagacgggcgaagcgcgcggacgctcagtctcccggcggtggcgcgggcagacccgacgctcggaggcgcgttcgttcggaccaccgtggcgtctcgttctagacatgacgtaggttcgcagatcc

SEQ ID NO: 143008 - DNA, 1234 bp, Zea mays
  Clone ID: MRT4577_61904C.1
ccggccgggaaacccctgccatgaacctctttcctcttccttctcacacaggagcagcccacgcgttttcttctctatgcattgtgccgccgtggtctaaggggccgcctcgtcgtcttcctcgcgtcgtcggaggagtagccccatcgtcttcctcacgtcgtcttcctcttccttgcatgcctgctcggctgttcttcatgtgtagattgcgatctgttcttgagcttcgaggaatcgacaatcaagatttggtgaaccactggtcctgagatgaagttctttgagtcctacaaagttgaagaccctaagcatcggtttggttgcctttggtgcaatctatgctcaggtaaagaaagtgtcgaggcggatctccaggagttccaggacttcgacgagttcaaggattaggctagtgacctcccgcagtcagctgcctgtggtcatgtcacagatgatgtcggtgtttctactccagctaaagaaggaattatgcaaggaaacggagcacgatgcgttgtagggtttcctccatgcaaagataacaagtgctactgctgcattggggggcgaactcatgctcgctactctacgatggctgagtgtagacatgcctgcttctaaacaaaaattaagatcgctgttattatatacattgtaatggtaggtaatgctattaataatatatgggaattttagttttggtattaaaaaaaaaaaaaaaaaaaaaaaaaaaaaaaaaaaaaaaaaaaaaaaaaaaaaaaaaaaaaaaaaacccccccccccccccctaagcggggaaaccccccctaaacgggaacccccccccgcaaaatccccgccccccccacaaccccgcccccaaaagggacccccgggcccctaggcgcccccccccctccgccccacccccttttcccttagaacccccccccccccgcaccccccccccccccctcggccccctccccccccccctcccactgtgccccgcggcggcttcggggcccccccggcggttccccccgaacccacccccacccccccccccccccccgccccccccttgccccccccaagttgactggggagcaaatttttttgttcttttaagaggggtaaaagggggctttgggggaaaatggggataggggtgttttgtgggaaaaattgtaaccggaacaattttgcacaaaatataggagcgcgtaagtaaaaggggtaactcgggggg

SEQ ID NO: 143009 - DNA, 920 bp, Zea mays
  Clone ID: MRT4577_61905C.1
agggtcccggaaacccgccggggaattgcagataacaaccagcaatggtcacgactgccgtcgcggcggtcgccggcgccgtgccgccagctcggaaagcccaagcggtaactgtggccacaaccacagcactacctcccaccctcactagaaggcagctcctcgccgcggtcgccaccggctccaccctccccacggccgccgcctcagctgcggcccccaggttcgccgagattccgggctccggcggcgtgaaggccctggacctccgggaaggttcgggagagatcccggccgttggcgaccaggttgcggttcactattatgggagattagcagcgaagcaaggatggcgcttcgattcgacgtatgatcacaaggacgagaccggcgatcccatgccgtttgtcttcacccttgggtccggcaaggttatacctggcatggaagcagcagtgaagtccatgagagtcggcggtcttcgccgagtgatcattccaccatcgcagggataccaaaacacgtcacaagaaccggttcctcctaatttctttgatcggcagaggctgttcaccactatattcaacccgacgcgcctcgcaaatggcgagggttccactctcggcacacttatcttcgacatcgagctaatcaacattaggcaacgtccataactgttctgctccatactcttgtgtctaaaagttgttccgtgcaagaatctggttatgctttaagtaactgtcagcgctccttcggtcaatccccaattacatattgtaatgcatactgatcgctgacagacgatatatgaagaaaaatcaattgaatgcggatttgattccgttgttctacccctgaaaagtaatatgcttaaaaaaaaataaactaaaaaaaaagaaaaaaaaaagagaagaaga

SEQ ID NO: 143010 - DNA, 626 bp, Zea mays
  Clone ID: MRT4577_61906C.1
ttttttttttttttttgagcaaccgatgtattcagggctatcaatctataatcatgcctaaggctcgaattgaatcccagccctttcctgcgccatgctgccattgaagcaaattgtatgtcatatctcgtaaaacgccatgccatgccacttcatacccgtggctccatctcttctagttaatcgcaccgaatgaaaatcgcttattcctcagcactgtcggcctggacgcgctgcacaacgttgaccaattgagggaagatcttctcgttgtcctgaatgccgcagacctgcttgacaacgtcctcggggccgttctcggacatgatctcggcgagctgcttggactcctcgtcatcggggacatcctggaagcggaaggccatctcgatagcgtcgaggaggtacttgatgggctgatcgttctcagcgagctcagcagcagggccgatgaatcgctccttgcgagaaagctttcggaggggagcacggccaacgcgctcgacggcatcctcaagatgggggttgccaattcgcttgatgatcttctcaacgtaagcggcctgcgcctcctcgtcaatagcgtgcttggagacgatcaggttcttggtctccataagtgcacc

SEQ ID NO: 143011 - DNA, 1092 bp, Zea mays
  Clone ID: MRT4577_61907C.1
ccggggttcgcgttatgaaaaacaggcatcccagagatggtctcaatctgtactcagatgcttcagttgattatactgatgtgattttaggtaccacagtgaaggttgaaacaatagaaggactcaaggatcttcacattcctcctggcacccagcctggagagaacttaaaattttctcaactgggagttcccgacattaagaagcctaatgtcagaggagatcactacttcatgataaaggtgaaaatcccgaagagtatcagtggccaagaacgtttgctagttgaagagcttgccgcactaaagaaagctcagaatatctcagttccagaacctacaaaaatagaaaattttcgggagagaaaccatcatccatctacaaagagaagatcattctggggacgtgtctggaatttgttcagggatgataaaggtgataaaagatttgcttcaatcagtgtgcaacctattatcccaggatggaattcttgccgaggaactgatacggctgtccccttgctattaaaaggattcctcatgaccgcaatattcttatttgtaatcagaagtaaactcaggtacactgggaagcgcattgaccgtccaactcaagctaaaatacctgttgagccagagtgaatttctgtcgtcttcatttctgaacgtttgcgacatcacagttttgatgatgatcataaatacgtaactttgccgcgcaaagcttcgtcctgggaaaagaatccggctttgcttgcagtgtatggtatccagacgcagcagtacaggttaacagaatatgggttgcttctcattagtcatttcttgattcattattccaatatgtagaagacacctgcagcaattccgagttttgacgaaagccacatgaaagacatgaagaaacatggccgtaggctaatgtacactgtatgtatcttgtctgcacaaagttttgtaaccatcccggcttgatatcgtttaacgattttgttgcaacataaaaaaaaaaaaaaaaaaaaaaaaaaaaaaaaaaaaaaaaaaaaaaaaaaaaaaaaaaaaaaaaaaagaaaaaaaaaaaaaaaaagcggcc

SEQ ID NO: 143012 - DNA, 470 bp, Zea mays
  Clone ID: MRT4577_61908C.1
ggaattggaattccgagctagacgtacgcgtacgcccacgcgtacggcgaaagacccatacatagatgcgatcgacttgaagaaggcttgtaacggaacgttaaaaaatattatatggtggtatggagaaacataacaaaatacgttagattcattaaggacatgtacaacaatgttatgaatagtgttgaacaagttataaggatgtatataactttttgattaaaataggactatatcaagggtcaactttgagcctttacctttctgccctagtgatagatgatgtcacaagggaatacatgagatgaacatgaatatatgagatatgtggctatacaagaatggatcgagttcaaaatgatgatatacgctatagattataagtagcactagcaccaattaaagaaaaacatattcaacatcgattgagatagtttggacatgtacaacggagatcccaaacacac

SEQ ID NO: 143013 - DNA, 428 bp, Zea mays
  unsure (1)..(428): unsure at all n locations
  Clone ID: MRT4577_61909C.1
cattgggtacctcgaggccggccgggaaggaattcgatcactcgttactttgattcatctcgagagatcggagcttctgtttgaccatctgagcacagacagatagtcattgcaactgcggatgagagctctctgatgctgttcaagatgccagntgctgccacacgaagtacccgtgacgctggaagagacgatgcaccgccagagcactccacctgtcgacatcggcgcggccccctaaaaaaaggcgcccacaaacagcccgacttcctcaccctcaaccctttcggccagatcccggctctcgtcgacggagacgaagtcctcttcgagtcccgtgcgatcaaccggtacatcgacagcaagtacgcgtcggagggcacggacctgctccccgcgacggcgtcggcgctgaatctggacgtgtg

SEQ ID NO: 143014 - DNA, 928 bp, Zea mays
  unsure (1)..(928): unsure at all n locations
  Clone ID: MRT4577_6190C.1
cctcgaggccggccgggcctctntttcattgggagcctcgaatcaggggagggtgaagaccgccgctgaccgctgtccccggctccccgccgccgcacaaagacgagaggaagaggttcccggcggcgccacgactatgtcgtcgatgatgaacgcgctggcgaactggctggcgaacccgcgccgcaacccgctggcgcgcctccacatgcacgccgtctcctcgcgcctcaggaaatacggactgaggtacgacgacctctacgacccctacttcgatctggacatcaaggaggcgctcggtaggctgcctagggaggtggtcgacgcccgcatccagcgcctcaagcgtgccatggacctctccatgaagcaccagtacctcccggaggacctccaggcacagcaggttccattcagaggatatttgagtgacatgttggcgttggtgaaaaaggaaagcgccgagcgtcagtcactgggagcccttccactataccagaggacacttccctagggtgctggatagacatggtcgcaagtattctacctctttaccgcaaatcagaacgcatcaaataaaatgcagtggatgaaactgttttttttttgttccaaccaaagtctaattttacttgttcatgccatggtgcattaaccatgggctgtagctgttgttttcagcaaaaaaaaaaaaaaaaaagcaaccaaaaagcggctgtgaaatcttcgatcgtgagtgccgttatgacaccgggtgaccggaaatgtcttgactaatgtcgctgcccaaatctcccgcatgttatcttagaaaatgcacccattgatttctgaaagatcatgttcacggataggaactttgtactcatgatttaattcaaacttggataatttttttgggattgaaaaaaaaaaaaaaaaaaaa

SEQ ID NO: 143015 - DNA, 286 bp, Zea mays
  Clone ID: MRT4577_61910C.1
tgccagctaggtccttcggcgcagtgctccggtgctatggctgcgccgccgcagctgacgggctcttctccaggctgtcaacaagctgctgcgccagcgccgttaccacgctgcgctggccgtgataaagggcttccggaacggggctgtctatggagtcagaatccgggcgcctcatgcactgctgaggacctttctcttcaggagtggcagtctccaagagaagctgcaggccattctgaaagccacgtacacccactctcggaacctggcctgcttcgtcttc

SEQ ID NO: 143016 - DNA, 1854 bp, Zea mays
  Clone ID: MRT4577_61911C.1
cattgggtacctcgaggccggccgggccgataaatccccacccctagctttccgttctttcctcctccacgcgaatccgcatctccacactccaatcagcgctcctccgtccccgttctttcctcctcccttcagccatcgcagtcgcagcgcaggttcttggctggttgctggtgtcgacagcaaagtccgcaactccaatcctgcctgcgctcctcccgtcctccgtcctcactcagcacccgcgcacgccgcctgcctgtcgattgagatctctttcacgcccctttctgccatcgcacaactgagcgctagtaacatccattttgctggtcaataagtcgcgtgggaggaagaagatggattatttgaaggtgcaggtggtagagtcatcatttgtagtgccgagcgagccgacgccaacgaaggcgctctggctctcttgcttggacatggttcagtccaacaaagcccacaccccaacgatccacttgtacagctccaacgatgctgcggcggctgattttttcgacctgggcagactcaagaaggctacggccaaagccttggtggccttctaccccctcgccggacgcctcgtcgacagcgacgatggtaggaaggagatcagctgcaacggcgaaggtgcactctttgttgtcgctcgcgcggatggtgatctcactatcgatgaagtcaagaaattcaagccatcgccagagttgaggaggctgtttattccactcatcgagccatcgtccatcataatggccatacagacatggtcggcgttctgcaagcatggtgacagtgctgccgtggagctcccgtgccacgaccgcaccctactccgcgcacggtccccgcccacagtccaccctgacgcgctctcgacattgcagcctcggctcgtcctcactgaacccgaggggcctcttgccatcgaaatcttcaccatttccagggatcatgtcgccgccctgaagcagctctgcggtggcacgagcaccttttgcgccgtcagcgctctcatctggcagtgcgcgtgcgttgcacgacggatcccaccggactctcaggtgcgcgtgatgttcccggccgacgtccgccgccggatgaggccgcccctcccgacccactacttcggcaacgcagtgatcaggctatacgccgctggcccggcaggggacattggcacggcggcgttggcatccgtcgctggccgcatcaagggcgccgtcgaacggatggatgacgagctggtgcggtccgcgattgactactacgagatggccgagacgaacaagagacggactgggacaggcatcttaccacggacggacctgaatattaccagctggttgggtaggccacagcacgacgcagattttggctggggaaagccgcaatccatgtcgcgggcggagtctgtccgcggcggctctatgcacttgatgaacgacgacggtggtaccggcaacgtccgcgtgctcgtgtgcttggaggctgaaaatataaaggagctaggacggctgctttatgcaaagctctagcaagctgctagtgctatgctctaaaaataataatattaataataaggtttgttactatgcttaaggggaaccatactttttccctcgcgatttattattactatggcagtttcaataatgaaaaccatttgtaattcctgtgacaattaatttatgcctccacgctagaaataaaacttgtttgtaataaactacatatttgtttttgttatggcagtttcaataatgaaatccgtatgtaattcctgtgactattactttatgtgtccgcactacaaataaaaacttgtttgtgataaac

SEQ ID NO: 143017 - DNA, 1935 bp, Zea mays
  unsure (1)..(1935): unsure at all n locations
  Clone ID: MRT4577_61912C.1
cattgggtacctcgaggccggcccgggcctcctccacgcgaatccgcatctccagactccaaccagcgctcgtccctccccgttctttcctcctcccttcagccatcgcagtcgcagcgcaggttcttggctggttgctggtgtcgacagcaaagtccgcaactccaatcctgcctgcgctcctcccgtcctcactcagcacccgcgcacgccgcctgcctgtcgattgagatctctttcacgcccctttctgccatcgcacaactgagccgcagctagtaacatccattttgctggtcaataagtcgtgggaggaagaagatggattatttgaaggtgcaggtggtagagtcatcatttgtagtgccgagcgagccgacgccaacgaaggcgctctggctctcttgcttggacatggttcagtccaacaaagcccacaccccaacgatccacttgtacagctccaacgatgctgcggcggctgattttttcgacctgggcagactcaagaaggctacggccaaagccttggtggccttctaccccctcgccggacgcctcgtcgacagcgacgatggtaggaaggagatcagctgcaacggcgaaggtgcactctttgttgtcgctcgcgcggatggtgatctcactatcgatgaagtcaagaaattcaagccatcaccagagttgaggaggctgtttattccactcatcgagccatcgtccatcataatggccatacaggtgactttcttgaagtgtggaggtgtggtgttaggaacagctatccaccacgccgccacagacgtttcaagcgcgttccacttttttcagacatggtcggcgttctgcaagcatggtgacagtgctgccgtggagctcccgtgccacgaccgcaccctactccgcgcacggtccccgcccacagtccaccccgacgcgctctcgacattgcagcctcggctcgtcctcactgaacccgaggggcctcttgccatcgaaatcttcaccatttccagggaccatgtcgcctccctgaagcagctctgcggtggcacgagcaccttttgcgccgtcagcgctctcatctggcagtgcgcgtgcgttgcacgacggatcccaccggactctcaggtgcgcgtgatgttcccggccgacgtccgccgccggatgaggccgcccctcccgacccactacttcggcaacgcagtgatcaggctatacgccgctggcccggcaggggacattggcacggcggcgttggcatccgtcgctgcccgcatcaagggcgccgtcgagcggatggatgacgagctggtgcggtccgcgattgactactacgagatggccgagacgaacaagagacggactgggacaggcatcttaccacggacggacctgaatattaccagctggttgggtaggccacagcacgacgcagattttggctggggaaagccgcaatccatgtcgcgggcggagtctgtccgcggcggctctatgcacttgatgaacgacgacggtggtaccggcaacgtccgcgtgctcgtgtgcttggaggctgaaaatataaaggagctaggacggctgctttatgcaaagctctagcaagctgctagtgctatgctctaaaaataataatattaataataaggtttgttactatgcttaaggggaaccatactttttccctcgcgatttattattattatggcagtttcaataatgaaaaccatttgtaattcctgtgacaattaatttatgcgtccacgctagaaataaaaacttgtttgtaataaactacagtttttttttgttatggcagtttcaataatgaaatccgtatgtaattccaaaaaaaaaaaaaaaaaaaagatcgtgcgcggtagatgtagagaattcaagtttgcgtgcgcccgccgtcctgctatatntata

SEQ ID NO: 143018 - DNA, 288 bp, Zea mays
  Clone ID: MRT4577_61913C.1
catgattagtcttgaatctcacttgtaggacatgtattcactgagaagttgatcagttgatgtgtattattgttctgaattatttgcattacgatcgaactataggattagatattcattgtccacgcgcaatacgaattattggaagtacacacacaagtactggcaccggcacgcgcacatgcatacagtgatcaggcggtcacaattacacaccggcttgatcctgcttcctcttttgctgaaaactggctagcgcacgagctctccggaccttggagatcccca

SEQ ID NO: 143019 - DNA, 633 bp, Zea mays
  Clone ID: MRT4577_61914C.1
aattcggcacgagggcggtcactctgcttacacaccacgccgagccacccactaaagcgtcgccgtgaaaaactaccaaaccccttcactgctccctcccatccaaaaccctaaccctacagccaccgcagtggctggccatgggggcgccgcgcgagctcgagctctccgacgagatggagggcgaggaggacggcaccaccgactttgttttccgccttgccggtgaccccatcccgctcctcccgaccgactccaacccgctcccgctcttcgacctgctgtcccctcccgcgcgcccgctcgccgtctccgaccgacacgccaccgtcttcctcgcccaccccagcgggtttatagctgtgaggaccaaggagttaatcgaagccagcaaggaggcgcgcgagaagggcaagtcgagcactcgctgcgcgcaggactgctgcgtcgccgacgtgcccctccccggtgtatcccttatcgcgctctcccatgatgagtccgtgttagccgcctgcacacatactgagatccagtttttctcgctggcgtctctgctcacacataaggacgtgggcccatcctcatcatgtagcctggaacgagctgtccctgggaaagattcaagggggt

SEQ ID NO: 143020 - DNA, 550 bp, Zea mays
  Clone ID: MRT4577_61915C.1
ccacgcgtccgcagttcacttagatggagaagatgctgttttggttaagcaatcttgtcaatcaaagcaatagtgaaaatggatccagtatcccacgaaaaggtaattgtccgcttggttcgtggtttggacaaactcaaggaacctgcagcacgatccttgatcatttggatgtttggagagtatagcttcatgggggatctcactacaaagattgttcctcctgttctcaagtatcttgcgtggtccttcgttgctgaagtggtggaaacaaagcttcaaatcctaaattcttctgccaaggttataatgcgttgtacagaagaagacatggaagaattcaaaagcatagttgcatatgtcattgagttggctacgtgtgacttgaattatgatgttcgtgatcgtgctcgtttactatcaagactcttgccgtgctacatgactcaccaagggtcctcacatcaacctcagaatggtgatatctataaagagctagccaatcatatatttaatgggaaagttgcagccaacatctcatccagcaagc

SEQ ID NO: 143021 - DNA, 605 bp, Zea mays
  unsure (1)..(605): unsure at all n locations
  Clone ID: MRT4577_61916C.1
atggacccctcgccagttagttagctctctggctgaanatgctagttctattgatggagttgtaatattttgaaactctttgttttgaaatatttactgtgtcaactgatttgaatcctcatgttgtacagaatatagtaggccgtctttcgtttttttggcttactccgtatgctgcatgaccgataatagcagcagacattattaactgtaatacaaatagtagttttttctcgttgaacaaaatgttttggtactcaaactgaccacccatgtactataaatagacccctgaggcaaggatgtagggagatctcatagcagcacaaaaccagattccttcctcactcacgtgaagtgtcagcaaacaacagctgcacataccactggcagttcaacaataacatttatgcacattagcactcattggaaattctttttgtatagaatggattaataattgttaatactatgtccaaatgatacctgattttctgaatgaagccgcaaggacaaagaactacagtggagcagagttggaaggtgttgtcaaaagtgctgtctcgtttgctttgaaccggcagataaccatggacgacctcact

SEQ ID NO: 143022 - DNA, 115 bp, Zea mays
  Clone ID: MRT4577_61917C.1
gggtacctccagccgccggaaggaaatcctgagcttattgccaaggctatggcataaccctggaaaagagggtgacatcactattgcggacgcaacaaccctttataatgtatca

SEQ ID NO: 143023 - DNA, 294 bp, Zea mays
  unsure (1)..(294): unsure at all n locations
  Clone ID: MRT4577_61918C.1
ggccggcccacaccctaattaactttattttttcccccctaagggtcaggggcccggatccaaaaaacacaccagcccccatgggaacccgggctcggggccctcaaagcaaacacaggaaaccggggcaggccacgccggggggggggggacccaaaccaaaaaacccccccccccagggggggggccccggggggaccaatgcttgggcggggggggggggcccggcgggggaccggccccccaggcccctcccccccnctcccgggggggaaagcccctgtggcgggggcc

SEQ ID NO: 143024 - DNA, 301 bp, Zea mays
  Clone ID: MRT4577_61919C.1
gcccataacctacctgtattttcttcatacgcatctcgttgcagcgggagaagggcaactggtattgacggtaccaggtgggaagcatcccctttaatctcctattgcgtacttaaacatcccagatgctctctatgaagagtcgcctctctgtttgtacaatctgcttttggcttgactgagacacacatcttcaagcgttgttgaggattcggggaacctttactgtgacaactcgtggaggagaggcgagctccttctctcctgacctcatcgccgcgcattgcttcatcgagtgaag

SEQ ID NO: 143025 - DNA, 698 bp, Zea mays
  Clone ID: MRT4577_6191C.1
gaagaccgccgctgaccgctgtccccggctccccgccgccgcacaaagacgagaggaagaggttcccggcggcgccacgactatgtcgtcgatgatgaacgcgctggcgaactggctggcgaacccgcgcctccacatgcacgccgtctcctcgcgcctcaggaaatacggactgaggtacgacgacctctacgacccctacttcgatctggacatcaaggaggcgctcggtaggctgcctagggaggtggtcgacgcccgcatccagcgcctcaagcgtgccatggacctctccatgaagcaccagtacctcccggaggacctccaggcacagcaggttccattcagaggatatttgagtgacatgttggcgttggtgaaaaaggaaagcgccgagcgtcagtcactgggagcccttccactataccagaggacacttccctagggtgctggatagacatggtcgcaagtattctacctctttaccgcaaatcagaacgcatcaaataaaatgcagtggatgaaactgttttttttttgttccaaccaaagtctaattttacttgttcatgccatggtgcattaaccatgggctgtagctgttgttttcagcaaatttgtcttcaaccattattaacctgtgaaatcttcgatcgtgagtgccgttatgacaccgggtgaccggaaatgtcttgact

SEQ ID NO: 143026 - DNA, 559 bp, Zea mays
  unsure (1)..(559): unsure at all n locations
  Clone ID: MRT4577_61920C.1
cctggccggggatctnngttccttgtcttctctctcaaaaaaaaaaaaaaaaaaaaaaaaaaaaaaaaaaaaaaaaaaaaaaaaaaaaaaaaaaaaaaaaaacctctcgaaaccctagtcccctgctccattctcagccgccgccaatcccttcccgggctccgcaaccgttgagggagaagaagagatggccggcaggggcgagggcccggttatgggcatcgatctcggcacgacgtacttttgcgtcggcggggggcagcacgaccgcgtcgagatcattgccaacgaccagggtaaccgcaccacgccctcgtacgtggccttcaccgactccgagcgcctaatgggagatgcggccaaaaaccaggtcgccatgaaccccataaacaccgtttttgatgccaagcgtctcatcggcggggggttcagggatgcgtttgcccagagggatataaagtgggggcccttaaaggtaatttttggccctggggagaagccaaggattgttgcccagcccaggggtggggagaagcagttgcgcgttgaagagatctcc

SEQ ID NO: 143027 - DNA, 530 bp, Zea mays
  Clone ID: MRT4577_61921C.1
ataaaaaaaaaaaaaaaaaaaaaaaaaaaaaaaaaaaaaaaaaaaaaaaaaaaaaaaaaaaaaaaaaaaaaaaaaaaaaaaaaaaaaaaaaaaaaaaaaaaaaaaaaaaaagtttttttctttggccggaaacccccttaaggggaaatttttggaaatttccataaaattggcggggggtttaacctttcttttagggggcccatttccccttttagggggtggttttaaaattaattggccgtttttttaaaacgttgggattggaaaaaccttgggtttccccaatttaatcgctttggaaaaaatcccctttttcccatttgggttaatagcaaaaaggcccgaaccaatcgccttttcaaaaatttgcccaccttaattggcaaatggaccccccttttaccggccctttaagcgcggggggtgggggggttcccccaagggggacctttaattttgcaagcgccttagcccccgttcttttggtttttttcctttcttttttccccactttcgccggttttccc

SEQ ID NO: 143028 - DNA, 582 bp, Zea mays
  unsure (1)..(582): unsure at all n locations
  Clone ID: MRT4577_61922C.1
ggtncgcctgcagtaccggtccgnattccgggcgagctctctatagcagctcgctcttgctgtatgtttaccgccgcccctttccatactcctttgtgggccggatagagagggccggcgcgctgtagggcgcgtactacctgagctacacgctgagcttcttgtatcgactgcttctactggcttgaaccaactccttgaactggcttcacagtggcaagcccgagatgtaaatatgacgctctcatagatgcaaaattacacactctggcttgcaacactatctgtgttatatagcgctaccaaagttgaaacaattgtgcgcaagaaaacaacggcgggactaggaaaagcttctacattcatagctaaagcgccttgattatcattgatgtttcttctactgtgacatacaagaatgaggcccacatggcacaggccttctgaacaggggctcagacaacatggccattggtaactcgcgctacaacggtgcattaaacaacaggcatgtgaaggtcacgcaacatacataccactccactgaacacttgcctaactatcagatctttggctatatca

SEQ ID NO: 143029 - DNA, 314 bp, Zea mays
  Clone ID: MRT4577_61923C.1
tttcttacgtccatggacgcgagggatggcttgtttgtcctttgctcgggtacctgcttcctagctgtgctgaaatccatggcgtgcttcgactacaacgtcctgctcgccgctgtgctgctcatggctggacggctgacccatgcgggtccgtccacggtcgaggggttttggtggcgcgcaggcctgccggactccgacgtgccgaacgccgacgctccggatcctacacccgtttgaccacttggtaaccgcaggcaatgccgtggacaccgggcgagccaacgctgcgttcaactaccaaaactgcaagc

SEQ ID NO: 143030 - DNA, 414 bp, Zea mays
  unsure (1)..(414): unsure at all n locations
  Clone ID: MRT4577_61924C.1
aaagnnccacaaatccatttgcacttgggaaccccatttggtggctttttgccctggtcaatacaaactttttttggcaaaaaaattttaaaggatgtttgccactacaactccaaagggaaaaaacctgcccgccattctttgggataatttgaacccttaggggagggggccaactttttcccggtaaatttggtggtaactttctcccaattttttaaaagggccgaaaaaggccccttggaaattttcacctggcgggttataaaccttcttaccgggaccccaaggaaatttttccccccgaaaaaagaattggcgggggcgaatttatccccaaaaaaaaagaacatgtgccccgttcttttaaaatggcccaaacaatttctgagggccttctgaaatttttggggg

SEQ ID NO: 143031 - DNA, 446 bp, Zea mays
  Clone ID: MRT4577_61925C.1
ccaggttaatatataaagttaaaagggaaaaaccttccggccctttgcgaggggtaagcaatacattcacgaggggaaccaaaaaccaaaaaagggaaaaagctgtaacctttgttttttttcacaagttcacatgacccatacagttaaatcctggcaagcgggcccaaatccatgggggggacgtcgaacggaagccccgccctgaaccccctccaaccgacaaggatgttgcccccctcggggggggggaaggcgccccaaaaaaggtactcgttcctgttggcccacggggtttgaaacggaaagcacgtcacctgcccgtttttccgtccgaccccgaagaacccttggttcgtcaccgtaaaaccgggcaaccctggggctttgaggatgccctgaaaaatcccatacccgtttatgtaggggaagcctcgggccaaatt

SEQ ID NO: 143032 - DNA, 340 bp, Zea mays
  Clone ID: MRT4577_61926C.1
atcccattccccttccccctcttcgactacctctgtggcgtcggaccgaacccgaaccaggaagcctatactaaccctaggaggacagcagcctccgccaagctctactacacgctgtaggaagccgcggagctgaatggcctcaccaacctgcagccaccccacggatgccacgaccacaacttcctctactacctcaagctcaccaccaagaccttcgaggagatcaccaaccactacaactacgtcacccacaacctgcaacatctacacttcaaaactacaccgtccctgcttacctaatacaaaaatgcactcattatgccagatattcatattt

SEQ ID NO: 143033 - DNA, 874 bp, Zea mays
  unsure (1)..(874): unsure at all n locations
  Clone ID: MRT4577_61927C.1
cattgggtacctcgaggccggccgggagcctcatcaccaagctcctcagtccatcgcttcatacagcccatccagctaaccacactcgctttccaacatgaagcttaccctgctctccctcgctctcatgagcggtgctctcgcagcccccgccccggcccccgtcgccgacccagaggccttctccatcactgaagccccccgcggtgtttctctcgaggagcacgccatttccaagcgccagtacagcagcagctcgtacaaccagctcaccgacggcaccgcctgccgcccgatcagcgtcatctacgctcgcggcacctcgcaggcaggcaacgttggcgactccgcctccgttggccctctgttcttcaaccagatcgccagccgtgtcggcggcaccagccagctcgccatccagggcgccacgtaccccgccagcgtcagcggcttcttggctggtggtgatgcggcaggcagcaccaccatgaccaacctcatcagcagcaccgccacccgctgccccaacaccaagatcgtcctcgccggctacagccagggcgcgcagctcgtgcacaacgccgcgggccgcacctcgaccgccaacgccgccaaggtcgcagccgtcgtcgtcttcggcgacccaaagcgcggccagtccctcagccccatcgccgcctccaaggtcctcaccatctgccacgacggcgacaacatctgcgagggcggatcgtccatcaccatcgcccacctgacttaccagatggatgtcgccaccgcgngcgcttttgttgctggtaaggtttagacaccaaaaaaagagagagcgcgttttgcgattctggggtctgggctaatgaattgttacgagcga

SEQ ID NO: 143034 - DNA, 181 bp, Zea mays
  Clone ID: MRT4577_61928C.1
tagcatcatagaaagcacagtagtgttccaacaatggcaggcaaaatattgtgccgtgctaatccatgtagtccttgatgaaagtgctgttacggcgaccattttcatacatggctaacaggctccaactgctacggttcttcttctgaacttttaactagcggaactttcgtattttgaa

SEQ ID NO: 143035 - DNA, 279 bp, Zea mays
  Clone ID: MRT4577_61929C.1
aacaaaaagacacatcacatgcatttctggcctctgggtttttacccggccctctttggattataaaaatcaattacaagcatgcgctgccctggacttggcgacatcatctatatccaacattccaacttaaacatatcacttgggggtcagggcccatgttcgtttttcttaaaaccaggacaaacgaaagctggcaaaatatctgatcctctcctgtttaacattaaaaacaataaatgctagaaagggctttttcacttgcccccgcttactggg

SEQ ID NO: 143036 - DNA, 509 bp, Zea mays
  Clone ID: MRT4577_6192C.1
ggacatgagaataagcaaccaaagataattaagaagatactaacaactctaagagaggagagcaaatttagggaaagcaattctcctgttagagctagccgtgtaaagctaaattcacctagcaatagagaacgctcatctgacgactcaaagcaaagtgatatttcctccagttcaaggtctagtgaagttatgtcacatgaatcagcaaatgcaagctgtgaacctgtcaaacgaggacatgcatctcctcccttgaagcatttttcaccaattgttgagcattctccgaaggttaaaattaaagtagatgagctattacatccacaccttgccaagcaggttggagaagttgttgatgcagctgcagggaaggttaagaacagaacaccgcccatttttattaaatgcaccagtattcctactcggaggcaaggagtagcaagtccaagccgtcaacacactggggtaaagcgagctcacaataaggtcatggcagagcatgcaag

SEQ ID NO: 143037 - DNA, 411 bp, Zea mays
  unsure (1)..(411): unsure at all n locations
  Clone ID: MRT4577_61930C.1
gtgagtggtgtctgctgtaatgtaacagnagtattgcacccccccccccctnnnnntttnttnttgtactatttaacatgctctaacctgcgcccaaactcataagtccaactctttctcattttacaccttccccctttcttgtccactctatccgtctttttctttctgctctcgtgtgacctacttggtttggggtgggggccgacgctgcaggcttgtggctgtctgtacttccctgcctcgtctacctggacctgcgccttgccgctgacattggcttgctctctttgctcctggcggctgccccgtattgcctcttgttgcacctgctggcatatctcgtgtgcggtccgtgctgcttgttggctgtttgctgtgtgctggtctcgtttttctgccttctgcctt

SEQ ID NO: 143038 - DNA, 308 bp, Zea mays
  unsure (1)..(308): unsure at all n locations
  Clone ID: MRT4577_61931C.1
gcacgaggccagatgggggacatctaccctttactattgatcctggataccatgatctagtctgctataactgcggtgaacctggtcattttgtgggcatttgttcaaaaccaaaaatctgtttcatctgtgggattccgggtcaccatatgaatgaatgccccgcttggaaagtgttgacgccttttcggagcgccaaatactcaagaagatgtaatacccactttgtaagaaaaaaaaatctaaaaggaggnaattatataaaaaaaaaaaaaaaaaaaaaaaaaaaaaaaaaaaaaaaaaaaaaa

SEQ ID NO: 143039 - DNA, 302 bp, Zea mays
  Clone ID: MRT4577_61932C.1
cttttgatttttgagctggcgcgggacgcacaccgtgacaccgacacacccggtggttggccttggccccatccctttaccaacaaggattccaagtcagaagcgccaacagcgagcaagatgtatgcggcgtcctctcatccgggcaccagctccagtacctaccagcatggaggaatcccatggcatcgtcatcgtaggcggcggcatctgcggcgtcgccagcgctcttgcactccaccggaaaggaatcgcgagccttgtgctggagaagtcggaggctctgagagtagatggcggct

SEQ ID NO: 143040 - DNA, 471 bp, Zea mays
  Clone ID: MRT4577_61934C.1
ggaacccaagaaaaaacaccccccgcctcgattttactggggacaaaagggggggggggggggaaatgtaaagcctcccccgggggaagcaacaacggaaaccgccctaatttttctcaaaaacccgggggcaatgggggggaattaacgactcttacaacaaaaggggggggaaaccacacaattctttataacagacccccctaacacggtggggggggcaactcacgggaaatcacgggataaggggagcacactggcctgatgctgggtaataaaaaaacttttttaggactcggaacccttggggccatcctcgcccttattaaaataaaggcccacctccttggaggccttttcgagggccgccagggcctcaagggccttaaaaaaataaacttttttcatacccttaccgaagtaccaaggcaaaaagggccccttggggtacataagggcaaacttgggggc

SEQ ID NO: 143041 - DNA, 384 bp, Zea mays
  Clone ID: MRT4577_61935C.1
gaacacggctcacctcacggcacgggcagttcgtcacctcctcctcccaagtccccaaccccgcataaaactcgccgtctccgaccaactcgttagtttacgtgtgaggccaccgcgtgttgccagggacagcggtggcagtggcgcatgtcggcatgtgaagcgagccctctgactctgaggctactccttccgaatctgtcattcgtgccgcttgttcccactccgggcggcccgtgatcacaccactgaaacccacagccctaggaacaaagatggcggtgatgaggaagggcgccgcggtgggcgccggaccagctctgtgaggaaccctagggttctaccgacgtgaggaggtctctctttgccggatctgacgaaaca

SEQ ID NO: 143042 - DNA, 251 bp, Zea mays
  Clone ID: MRT4577_61936C.1
ccaggaacaggaaagacacaaactattcttggactgctagggccgttctccattctgctcctgcaagaatgcagatcaaaggaggatttgatgttctaaaacatgggccagaactggacattgatggcaagcgtgcacactggataaaggcatctccttggttacttggtgcaaatcctcgagatctgattatgcctgttgatggtgatgatggattttacccaacgggaaatgaactgaaacccgaaatc

SEQ ID NO: 143043 - DNA, 1627 bp, Zea mays
  Clone ID: MRT4577_61937C.1
ggatatcttcagggggatatctctggcttggtattctaagacacagttttgctaggacaatgggcaacaccataaataaattatatcttagataattttattaaatctgacatgagttacatacaccccatagtacacgtccggtggaatcctttcccgacctggcctattttccatatttgacgatctgttttcggggaattccgttcgtattgattcgttcggacttcgggtacacccacatatcacaaccccgtctccgattcggggattcccattttttccgaatctggcgccattttcaccaaaaaaaaacacaaacaggagttatttttccgctcgtttcatccctagcggctaggcccaactgaaatactacaattgcattttcaccaaagatattacctatcagtcaaactccaccgtcatttttctctctttttgcgcttttttacccttttaccggcctcacaagagctatgggtatatatagtctacagactcaacagacaaagaatgtacatccgagattgtgaacacaacacttttacttctcgtgatcttcatttgacgtgtcaatcttgattacaagaggttgttgcagatcggagggagaggctaccacaggaagctgcgatgttcctacatccagctctccattctcggccaatgctttctccagagatgattttgcaatttttgtgacgcagatgatcaagaccacagataatacaaagccagatattatcagaatccatcgagtagtcgagatctcactccacccatgtgtcacatctgatagatctttcagtgttgttccaacgtacaccaaagcaagagtgattggcatcattccaaaccaagaagccagcatgtattctccaacaccaacaggagtgacagataacaggtagttcaacatgttgaacggaagtaaaggtacaagccttagtagcaacacgatcttgaagccagatctttggatggcaatagctactgcttgaaacttagggtaatctttgcatttcgaaagaacataaggcctcccaatcgtcctgccaagcagaaatgcagcagttgcaccaattgttgctccaatggaatcagcaacgaaccctactggcagtccaaataaatagccccctccaagtgtaagaattgatgctggaacagctaagactgtcagaggaatgtaagctagggccagcaccaaaggaccccatgcacccaagttctccttgatccaaagcagaaagtcctttaaaatcttctcgacggggagcgtgaagagcgcgacgacgacggcggcgagcaggacggcggcgacggcgaggcggacggccgagggccacgagagcgccatggacgcgagcagcctcctgcgccagggcctgagcctgccgcagtcctcccctccctccccgccctccgcgccgtccgcccagccccccgccctcccccgcgcccgcagccccaccgcggcgcctgccagatttgccgcccaccggatccgccctcccgcctccgccgccctcgcgcaccgctcgctgctaccgctagcacgcccgcccggcgcggcggcttatctcgcgcgagcgacagacccacgcgtccgcggacgcgtggg

SEQ ID NO: 143044 - DNA, 1482 bp, Zea mays
  unsure (1)..(1482): unsure at all n locations
  Clone ID: MRT4577_61938C.1
ggggtgggcacactccccgccggggacggacggttggtgcaactggaaagcgaggcgttttgttttctcccgtgctccccctcccggggaaggggcaacgagaaatcgaacccacacgcaacgcgacgcctccacccgctcgcctagtccagaatccagatccagcgcccgcatctctctctctctcgcgcgcgcgcgagcgcgatgagctgccgcgacgggcgatcgtgctagcggtaacagcgagcggtgcgcgagggcggagtgggagtgtggatccgaggggcggcaaatctggcaggcgccgcggtggggctgcgggcgcgggggagggcggggggctgggcggacggcggggagggaggggaggactgcggtaggctcaggccctggcgcaggaggctgctcgcgtccatggcgctctcgtggtcctcggccctccgcctcgccgtcgccgccgtcctgctcgtcgccgtcgtcgtcgcgctcttcactctccccatcgagaagattttgaaggactttctggtttggatcaaggagaatttgggtccatggggtcctttggtgttggccctcgcttacatccctctgacagtcttagctgttccagcatcaattcttacacttggagggggctactatttggcttgccagtggggtttgtgctgattccttggagcagtaattggtgcgactgctgcatttctgcttggcaggacgattgggaggtcttatgttctctccaaatgcaaagattaccctaagtttcaagcagtagctattgccatccaaagatctggcttcaagatcgtgttgctactaaggcttgtacctttacttccgttcaacatgttgaactacctgttatctgtcactcctgttggtgttggagaatacatgctggcttcttggttgggaatgatgccaatcactcttgctctggtgtacgttggaacaacactaaaagatctatcagatgtgacacatgggtggagtgagatctcgactactcgatggaagtggactttgatttgtatgcttcctagtagcttctgctgacacctatgcttgttttctctctccagattctgataatatctggttttgtattatctgtggtcttgattatctgcgtcacaaaaattgcaaaatcatctctggagaaggcattggctgagaatggagagctccatgtaggaacatcgcagcttccaggtgtagcctctcccttggatctgcaacaacctcttgtaatcaagattgacacatcaaatgaagaccacgagaagtaaaagcgttgagtctacaatctcagatgtaaattctttggttgtagagtctgcagacttgtatatacacccatactctggtgaggcccgttaatgggtaaaaaagacatcatccccccttccaaaaaagggaatgaagtttagtttactgataaaaaaaaaaaaaaaaaaannnnnnnnaaaaaaaaaa

SEQ ID NO: 143045 - DNA, 316 bp, Zea mays
  Clone ID: MRT4577_61939C.1
cggaccccatcgccttcaacttcaggttttacccttactgcaccgaaccacggccatctggtgatcacctacggggcttcttcgctttacctggccccacttccgacactgcattttcatccgcagccctccttatccacctcgctcatgactgcacgcaagtactactacacctacatgctcatttcccggccctgcgacctcgctcccacgcctttgaccggaactgctccctcttcaggcggctcacggatcgggacctcctcatgctcaccgtcagaggggcaccgagccgtgccatcaacctgttgctcac

SEQ ID NO: 143046 - DNA, 876 bp, Zea mays
  Clone ID: MRT4577_6193C.1
tgcgaggtgctgatgcgtgtatgaaagtctgtcaattccctgatgtcataaagtgatgacttctcatacatcccgacaggctctgatcgcagaagcaccgccgctgaccgctgtccccggctccccgccgccgcacaaagacgagaggaagaggttcccggcggcgccacgactatgtcgtcgatgatgaacgcgctggcgaactggctggcgaacccgcgccgcaacccgctggcgcgcctccacatgcacgccgtctcctcgcgcctcaggaaatacggactgaggtacgacgacctctacgacccctacttcgatctggacatcaaggaggcgctcggtaggctgcctagggaggtggtcgacgcccgcatccagcgcctcaagcgtgccatggacctctccatgaagcaccagtacctcccggaggacctccaggcacagcaggttccattcagaggatatttgggtgacatgttggcgttggtgaaaaaggaaagcgccgagcgtcagtcactgggagcccttccactataccagaggacacttccttagtctttgtttgggtatagagggattgaagtggattgagatgtattgaaggggattgaaagaaaaattagttcatattacacttcaatacactacataccacctcaatccactccaatctaagattacccaaacaagccccttagggtgctggatagacatggtccaagtattctacctctttaccgcaaatcagaacgcatcaaataaaatgcagtggatgaaactgtttttttttgttccaaccaaagtataattttacttgatcatgcaatggtgcattaaccatgggctaaagctgttggtttcagcaaatttgtcctc

SEQ ID NO: 143047 - DNA, 688 bp, Zea mays
  Clone ID: MRT4577_61940C.1
ggagtacgtgcaggaccggggcagcctggcgcccgggcacgatctgggcgaggccaacatctcccaccagacggccttcatcatcttcttcgtcttcgactcggtgtcgctcttcatctcgctggccgtggtggtggtgcagacgtcggtcgtggtcatcgagcgcaaggccaagaagcagatgatggcggtgatcaacaagctcatgtgggtggcctgcgtgctcatcagcgtatccttcctggcgctctcgttggtcgttgtgggccgcaccgagcgctggctgcccgtgtccgtcaccatcatgggcgccaccatcctggtcaccaccatcggcaccatgctctactgggtgatcgcgcaccgcatcgaggccaagcggattcgcacaatcaagcgcaacacgctcacccactcccgctccttctcctgctccggcatgtcggagggcgagtgggtcgacgaggatttcaagaggatgtacgcaatctgacgacccacgctacctgcatgtgtttgagatcatctcgtgcaatggccatcgcgttattgccaacttgccgtgcttcggaccgggctaacattcttcttccgtcactccttagtggcgattgaagtattgtccaaccgaataaacctacctgtgcgccgcctgcgagagagaagtaataagttttgtcttcataga

SEQ ID NO: 143048 - DNA, 371 bp, Zea mays
  Clone ID: MRT4577_61941C.1
ggggtaaaacgaattggggaactgggccaaacaaagggcaagcaaggggacaggggtcgaccccccactcgggggaaagaacaaataacgggggcccaaattaaactggggcatcagcgataccaattcgttaaatgaaaatcaagtagaaaggggaaggaaaaaaacaaacaaaaggaagacgaaggggggccactgccaccgccgggcccaatcagagcacgcccacccattgggaatgcgcgggagcagcaaagcagcgcagcgcaaccaagtttttccccccaccttgggcttttccctccggctccggttccttgtccggggggtctttgaatggtttcccctttcgcgggggccccggcggcccc

SEQ ID NO: 143049 - DNA, 187 bp, Zea mays
  unsure (1)..(187): unsure at all n locations
  Clone ID: MRT4577_61942C.1
tatcttcaggcctcgctcatatctctcggccggccccatcaactctaaccgaacggttgacccagngcagtttagagtgtagagcaacctggaacgcccggatttctatcccatccatgcctcgtctgagtcgtagtctgctggaacgatgacatcccacaaactgatctacaatctgagaaacctc

SEQ ID NO: 143050 - DNA, 2564 bp, Zea mays
  Clone ID: MRT4577_61943C.1
cattgggtacctcgaggccggccgggaacccagtccacacgagacgaaacgagccgagcccatccctccctcccgtcgccttcgccaaccctagcctagcctcctcctcctcctcccgcggatccaacctccgcccgcccgccgccgccgagagagccctatctcccccacgccgcggtctccgcgcaagcgggggcaggggacgcggatcccgcagctccccgccatctccggaacggccatggaggtggcggcggctgccgcagggaagccgctgacgccggaggaggaggcactccggcgcagcaccgactgcgtctacttcctcgcctcgccgctcacttgcaagaagggtaatgaatgcgattttcgtcacagtgagggtgctaggatgaaccctagggactgttggtactggttgaatggcagttgtttgaatcccaagtgtgcatttcgccatccgccaattgatggtctctttggtgccccaacttctggactacctccagtttctgcgcactacggtgcctataacttgggcaagcagatggtcccatgctattacttccagaaagggaactgcttgaagggtgatagatgccctttctatcatggaccacaaacagctagtaatgatcttgcagagcaagcggcgaaggtttcttcctttcctttggaaccgtcccaggctcaaaataacgaagaggctgtagctccaaataattcgacgcagcaagaggcccgaatgactgaaaacaggacttcgattcatgtttccaagagtggtgtgggtgcaactcccgctgatgtagcttccaatgcattgaagcctgggaccaacttcgagcaggcacccagtaatacgcttgcagcaaagaaaagttccacaactgaggatcatcctatgcactatcagaaccaggttcctgtggagatcgatcctgtcaaagactggaaccaaaattttgaagtgtctcctactgattacctgccacaggatagtagggaggctgatgatattttgggggagtcctctcctggttttgatgttcttgtagacaatgatgtagatgttgctgaagattttgcaagggatatgtacccggtagaagattacgagtatgttacatctgattttgatgctcgggcccatcatgaaagtgagcagttcaacgatggaatgggtgtgaatggacggattggacagtatgatggctatgagaggaaacgccgtagatcttcatctgagaggaacctagacagacattaccatccagatggaaggtttcttcacagagagcttgatcgtggcgagatagatggatcagatctacgccatcagctccgcaggagaagaataaatgggccctcaacaaccattagcccagaacgggctaatggggaccgacatgggagggatgaaccctacagagaaagggcacatggtggtcaccacacgtacagagatcgcttccggggcccacgaggaagcaatctaagttcccgtctgcaggccagaataaagcttcctcgaagatcacctgatagagttgatactcgcttcgaggatgagcgagacaggagaagattcagggataggttttctccaatgaggcgtatggatttccatggtggtaggcatcaagaggctggacataatcaagaaaggggccacaggaagttaagcgagcttgtctctactgtcaggcatgcagatggcctctctgctagaagagatgcagtgggttcaactcattttgctgctcgcagaaacttgggagagccaaggaaggcaaatggtcttgtggaatccgaagcatctcttgattttgagggcccaaaaccccttagtgtcatcttacagagaaaaagggaggcagcacagggcaataactatgagaaatttgctgaggttgcagtcacgcagacaggttctctggatgaaactaagaaaagctgtgacaacgttaccaggtttgcagattgcaagagtggttcaggtgacgaagagtataaagagcaagatcatatccttgtggatgcacacaggcagtcttcggatcatggtgataagtttgaggctgggtatgctgctgaagtggatgcagaaggaaaacaagaggcagatgactatgaccagagagagggcgagtccgacgactacgagacatttgaaggccatgactacaaatctgaagatgaaaatgtgtaccaagacgacgaggatttcgatgataacgatgactttgctcggaaagtaggggttttattgccttagacgccgcggtgtcattggttctgttgcttgaggcaacgagctctagtttttgccatcggttctgttgcttgaggcaaagctgaaatgccgatcataatcgatttgaggtttacatgtaaactgctgtgtggtgttcagcacatctgacctctcctcggactttgttgtattagtttccgtactaacagcaggatatattccttaatcaatttgtgcccggaatgaaatataatcaactccacaatgggggggcgttttgcttaaaaaaaaaaaaaaaaaagcggcc

SEQ ID NO: 143051 - DNA, 681 bp, Zea mays
  unsure (1)..(681): unsure at all n locations
  Clone ID: MRT4577_61944C.1
cgtgagagtttggttgagtacacggcttaattaagatcagcagtacaggttncaatatatagccacagatatacccagcttatagaaatagtatctgggtaatcgggcaagcaaccacaggattgatatcctgggatgggtttccataacagctgatagcctactaagagtgactgtctaacatttagaacgctggtgctttctagaactagcaataaaaaagaaagagtgacgggcttggcgactggctcctggtagtgagggttctccatccctggacttctcccttttgtgcagacaccatcgggtgccgcagcacgcgcttgctgtagcaagcgaggaataggctacggtcaccatcccataccagattttgtttgggccgtgccgtaagcagcaggatgatgacatcactgcggggtgaagcgacaatcccatctccgccgtgggaatcatgggtgagcgcttcgttcttggtggtttcgcctgtttttcctggtagtcttaggtactattcttgcttacctggccatcgctagcactattttttgcggcatctggtgggttcgactatgacgattatcctcacctatgtaaaccctagattgatggattttttaataaataaatagcagttctagccaaataaaaaaaaaaaccaacaaaaaaaacttgcaaaaa

SEQ ID NO: 143052 - DNA, 408 bp, Zea mays
  Clone ID: MRT4577_61945C.1
aaaaaaaaaagaggggggttggggacccaattaagcaataacccccttgggggggggggattttacaaaaaaggcccttttccggccgtcctttaaaaaaaaaaaaaaaaaacaaccctgggaaaaagactaatttttcctcctgcaccagggaggccctttttttaatccccccaaaaaataaaaaaaagggcccccattaaacccccccgaggggtttttttttaaaaaaaaaaccaatggggggggaaatttttccctgccaaagggaccctccaggggaaatccaaacaaaaagccaaggttatttgggctatgtccccaccgaaaaaaaacttttccatttggatgggggcccggaaaaaaacaagttagcttttactacccccaaaaatttttttttaccgg

SEQ ID NO: 143053 - DNA, 581 bp, Zea mays
  Clone ID: MRT4577_61946C.1
gcttcagctcggcgtcttccaatcgtcgtcgtcactctcccctgagctccgacagatcttgcattccacattccggccaccgatcgagcttcgcgtcaatctcgccctcttccgaaggcgtcgcgcgcgactgattgagaggagaggaggaagacgagggagtgcatctcacgtccacatcgctgcatgccgtgcatccacagtcgttcaacgcagtgcatgggaactttactgccgtctagtactccatccatgctgatgaccaagtgtctgtagataagaccgcgagacatcacgatgatgccttctacaccttcttcagccagactgctgctgctaaacacgttccccgagaaatcttcgctgatgtaaaacccactgtgatcgatgacgcgtgcactgctacatgaccgtcgagcttttccaccctgagcaactcatcagtgatgaggaggatgccgctaacaatttcgcccgtgctcactacacaattgttaaggacattgttgatctgtgccttgaccgtatccgcaagcttgctgacaactgcaccgtgctccagagcttcctggtcttcaatg

SEQ ID NO: 143054 - DNA, 564 bp, Zea mays
  Clone ID: MRT4577_61947C.1
aaacacaaatcacacaccaacaatttgcagtggaaatcttattaccaaattttacaagttacatcaagtttacatggtacatgatcggagtaattgcactatgttttgaatgtataaacatttatatgtttaaaatatatgctagctcaagtgaccatcctcaataagaagtatagaagaagtacttagacttataagaaggtcgtgcccaccggcgcttaacaccattcacaatcaaaatgactcgtaacctgagtaacactaggttagtgttgttagacgatgttctcttgacgagcagcctttgtcttggtactcgttcaattatccatcttcagattcatccgactgacgacgtcgtcttgcggagatgtccactcctagcaccatcttgaggtcaacttggctcgtcttccgcatcacgcgatcaattaacgtacctcatgggatgcacgatgcacatgtatgagcacgagtataaatagtacaagatagataatttacactaaaaaggatgaaacacttataaccaagcatattgtatacaatataccaattataact

SEQ ID NO: 143055 - DNA, 167 bp, Zea mays
  Clone ID: MRT4577_61948C.1
acgcatagggggatatttgctctatgagagcgtaggagtatagatgagcggataggtaatattgtgaagagtgtgtgtggttagtgtcgcttgatgtatagagtattgtattatatatcgtagtatatattatagtagtagtattgtattgtgaacgttgtacgata

SEQ ID NO: 143056 - DNA, 314 bp, Zea mays
  Clone ID: MRT4577_61949C.1
ctcattttttttctttttatttattttttttcactttcttatttctccaaaaataaaaccattcttctgtacctttcataaaaaaccctcaaaaaaaactacgttactctctcctttcccggctataactaaactatacacgtaccgcctcttcttcccacctaaactacttataccttaaaccctttatacaaaccccccttctatttccttcacatccttcaaaaaatactacaatacccccccctcattcttctcaaccaaacggtgactgaccacttaccccccctttttaaaccttataactcccaacc

SEQ ID NO: 143057 - DNA, 1946 bp, Zea mays
  Clone ID: MRT4577_6194C.1
cattgggaccctcgagggcgggcggggcacgggcacgcccgcgaccggccggcctcttctctgccccaggccagaatcaagggagggtgaagcaccgccgctgaccgctgtccccggctccccgccgccgcacaaagacgagaggaagaggttcccggcggcgccacgactatgtcgtcgatgatgaacgcgctggcgaactggctggcgaacccgcgccgcaacccgctggcgcgcctccacatgcacgccgtctcctcgcgcctcaggaaatacggactgaggtacgacgacctctacgacccctacttcgatctggacatcaaggaggcgctcggtaggctgcctagggaggtggtcgacgcccgcatccagcgcctcaagcgtgccatggacctctccatgaagcaccagtacctcccggaggacctccaggcacagcaggttccattcagaggatatttgagtgacatgttggcgttggtgaaaaaggaaagcgccgagcgtcagtcactgggagcccttccactataccagaggacacttccctagggtgctggatagacatggtcgcaagtattctacctctttaccgcaaatcagaacgcatcaaataaaatgcagtggatgaaactgttttttttttgttccaaccaaagtctaattttacttgttcatgccatggtgcattaaccatgggctgtagctgttgttttcagcaaatttgtcttcaaccattattaacctgtgaaatcttcgatcgtgagtgccgttatgacaccgggtgaccggaaatgtcttgactaaaaaaaaaaaaaaccgatgctagagttgctgaatgctgaccaacaagaccccaatggcagtggtacaaatgctgtagattcttgaagtcgtccattcgacaggagatctttcgattctgaagcctgaagccctgaaccctgagctgggacagctgattagccactgggtcctgtctctcctgaaaccgtcactgttccaaccttcttgtccgtcggaaatggtagactagtgatgctgtggatcggaggctgctgttgtttgaacttacaattttgataattcgttgtaaattcctgtttgggcagaaacgcaaatagcagcagcatggcagattcatttcctatcagaattgtagtccgtaatggagaagcagtaagatgaataatataaagatattcattcgtccgccacattagcgcatgattcgtgcataggataattgtctgttatactccatttagatattggagcacggaattggaaattaaaatcagctttcctaaattctgttgtttagttgtatatggaattgagatttggaatcagagatctaattctctggaattggattataactagaatacaggcagaaaggaaacaaggccgctccgccagtattccagacgccccttctagccaagaagacatgccagcgacaagtcaagaatcttagcatatgtgcttgtcaatattccgttggtgtccgttacagcttgccgggacttttgaagcctgagaaatgaatatgttactgatatcttgttttgcttgagtttgcggaagttctggtcccatttaacacatactcagctgtcaacctactcaggcctttggggattgtaactataacctagagttgcattcctctacaagtaactcggtattgttactaaccatataagctatccgttgttccttgttttttgttcgagacaaaggctgttgctggtaaatgttaccaatcatataagctctcagtcgttccttttcttgattttgtttgagactgtaaaaataactactgcgtctataaattgtgggtccagctgggtctataaaatgtgagcctgatggcaattttacaaacttgtttcttgctgatggcaaatatcaaaatctctcgctgcattgtgtgttag

SEQ ID NO: 143058 - DNA, 147 bp, Zea mays
  Clone ID: MRT4577_61950C.1
cccatgcgtccggtaaccatagcattgagatggagcaagctgatgtgtcagccaagatggctgtagactcctgtttggagcatccagaggctgttacgagcaaaagctctgttaagaaacacaggcagcataaggggaaagatgctc

SEQ ID NO: 143059 - DNA, 272 bp, Zea mays
  Clone ID: MRT4577_61951C.1
gaaaaggccaaaaggcaccttcgcccgcgacgataacaatggcagcctcgctccaagtccaagcgggggccaccttgatgcaaccggtcaagatcgacggccgggccccgtccgcctcgttgccgtcgtcccgcccgtcgtcacaactcgccagggcgttcggcgtcgacgccggcgccggcaggatcacgtgctccctccagtccgacgtcagggacgtcgtcagcaagtgcgtcgacgccgtcaagctcgccggcttcgcgctcgccacc

SEQ ID NO: 143060 - DNA, 469 bp, Zea mays
  Clone ID: MRT4577_61952C.1
gttgcacatcttggtcatatattgtttctatagcgaggagtgcgtacatacctatcgcttttatatgcagctcgcacactacagcccacctggccggtggtccgacggtgcgcgttggcgactgattgcccctgactctggctggcttccaatccttgccggaaggaacggactgttcgcacgcattgccattgagttcgactgcccgtagcgtctgtgtccttgatttcggtgagacataacgagggcgggtgggggctgcaactgcctctcgccctctggtttcttctccggttagcagcgccgacccattctccttttcttgcggttctcaataagcaccagctgttgccggcctgagcagctcgttgaggctccagatatcctcggcgctcgccccatcctgtggagctggagcatcatcaggctgctgcataagacctaggttgcctcaccgactcgttgctgc

SEQ ID NO: 143061 - DNA, 235 bp, Zea mays
  Clone ID: MRT4577_61953C.1
agccgccgtgcgctcgctctatctgtcccttaaggccttcgccggcgaagagcgcctagacacccaccaggatgaagttggttgctgcttacctgcttgctgtccttgctgggaactccagcccctctgctgaggacttgacggccattctggagtcagttggctgtgaagatgacaatgaactgatggagctgctgctgtcccaactgatcaggagggacattatctagcttat

SEQ ID NO: 143062 - DNA, 476 bp, Zea mays
  Clone ID: MRT4577_61954C.1
agaacgagatagataacaaaggggggttcctggcatgggaacagacagagagacacgggacgggacgaaagaagatgacgagcagctgggggctacgctcaccgggctgccaccaaattggagccccagctcgggagccacttgagcagctcaaacaaaaacccaccagtcacccccaagccaaagggacaaacttgatgcataaaaaagggctagggacccaaaaaacggcaatataccctgacaaactctaaaaaaacccatccacacattttggtcaaaaaaaaaaactccattttttcaaaaaggacccggacctgggattaaagggggcggaaggggggaccttaaaaagggattgacaacacccaccaccctttaacacaaaaacacccgcttaatactccaatagcagtagtccgggggcaggagggagtagtaataattacctttaagaagaaagaaagaaagaaaga

SEQ ID NO: 143063 - DNA, 149 bp, Zea mays
  Clone ID: MRT4577_61955C.1
ctccgctttctagctatgcccttccttataggatgtgcaatagtgcagctgcgcaccgccgtctctcaccagccatggccatcaaatatgagccgcagccgctgcacatcctcttcttcgcgttcctcgcgccgggtcacctcatcccg

SEQ ID NO: 143064 - DNA, 614 bp, Zea mays
  Clone ID: MRT4577_61956C.1
ctgcccttctgtcgctgctcccacctctagcccgacaggcgaagccgccgccgctgcagtgtccatagccaccgcaggagactgagatggatgggctctagtcatagacccaccaaagtcatgcgtacttcgagcgttccaagggaacgtcaagagaagcccgctgcgaacaccgactacaggcgcatcatccggatgattcgcccggagtatgacatgacgatacacccagataccgatgtgctgggcgatttaccaacgatgacatcgcacgcagcaacatcatctcgtgctagtataccacggtgatacggttcttgcctccgcttactcccctgagttgccacgacatgcgcttgaaatcgacctgaccttctatgcagctgcctactgcactgggcttctgttggctcgccgtgtgctcaagacccgagcgttagataatgaatatgaggtctatgttgaggccactggtgaggatttctctgttgagccagctgatgagaggaggcctttccgtgctctcttggatgctgcccttattatgactacgactggtaaaccgggatttggagcccctcccgctactctgcatgctggactggatatacctt

SEQ ID NO: 143065 - DNA, 282 bp, Zea mays
  unsure (1)..(282): unsure at all n locations
  Clone ID: MRT4577_61957C.1
atctgactccccggatctgtgcgccccatcttccatggaaggggagtcagacgcccctgagctgctgctagagaggaccgtgcgaacgggactcatacgccccgggcttgtaacattgagcggcgcattctacatagaaatcagggaagagacgacnacaacatatacattatcacaaancggtttcaggtttttcaggagtcgactctacctgttgtttaatactatgacaaaanggggaagctctgaaaaataataatttgccgttgctcttattttttc

SEQ ID NO: 143066 - DNA, 364 bp, Zea mays
  Clone ID: MRT4577_61958C.1
cgaacccaccctccccgattcaaaccgtcgccgccgtcgccgagagagtcgtgactccccccagcggcggcctgcgaccacccgttacccagccgtcccttctccgcagacagcatttgcgcccaccccgtcccgtcccgtcccctctccctcgcggaggcccgagagctttgagctgcctcggttaagtcgtcgagtggtccacagggccgccgccgcggcgggggttacaaagcggggagggaattccggcgcgggatgccgcgatccctctgcgatgcgcggatcagaatatgggtgtgacccaaccggaaagttgtggacactgctggtggaggactagggcctggagtgggagggagct

SEQ ID NO: 143067 - DNA, 218 bp, Zea mays
  Clone ID: MRT4577_61959C.1
cggacgcgtgggtgactctgacaccgcagttattgacaatggatagggtaccacaaacccggaagggggtggtagtgtaataacaaccacagtagcggccgaaacaaatgtcatggtgcaaaaaatactgcgagcctacagctgaccatactacgagccgagatcatgtgacatcacgcgggagtggacatatgcaaagttgctcagagcaaaaagct

SEQ ID NO: 143068 - DNA, 401 bp, Zea mays
  Clone ID: MRT4577_6195C.1
cccaaaaactccggggggacccacgcgggcgcgacccggaggcgccgttctcgggggcgttcaaggggcgggacgggatggcgtgggtgtccaacgtcatcggcgccggcgcgagcctcggcatcctcacgtcactgatggtggccatgctggggcaggcccggtacctgtgcgtcatcggccgctccggcgtcgtgcccgcctggctcgccagggtcgacccccgcaccgccacccccatcaacgcctccgccttcctcggcctgctgacggcggcgctggcgctgttcacggagctggacgtgctcctgaacctcgtctccatcggcacgctcttcgttttctacatggtggccaacgccgtcgtgtaccgccgctacgtgggcgacccgtgccccggc

SEQ ID NO: 143069 - DNA, 272 bp, Zea mays
  Clone ID: MRT4577_61960C.1
gctttgggtaacactggtgttcaagctcctgcgggcaggcatatttagagtcagcggccatggccatcccgccgagaaaagcgcacaaccttcggcaccagttaactttgagattcccctttttagcacataaaattgacaaggcgcagaaatagccaggtttcccctctaggattatggcgagctaaatgcgtatactgttcggttttggagatatattgctagactctatagcgtgagggaaggtgatcaagaatggtatgtatgtgaac

SEQ ID NO: 143070 - DNA, 231 bp, Zea mays
  unsure (1)..(231): unsure at all n locations
  Clone ID: MRT4577_61961C.1
ccttnatacttcccctataccccccacccccggtgggccgctgacggggaaagaggggcacacaacaacgcgggggcccacagaaaataaccaaagggtggggcccacaaaaaaccacgcccgccacaaactaagacccgcagccacccaaaaagtaaccaaaagcagcggactggacaacaacacccgagcacaaacacgacccccctctgccacgctccggaacgctac

SEQ ID NO: 143071 - DNA, 916 bp, Zea mays
  unsure (1)..(916): unsure at all n locations
  Clone ID: MRT4577_61962C.1
gtcccgaatcggcatccccatcccatcccatcgacccacgaatgcccccgactcccgcacggccgccccccgccgtcgccgccggcgagccgtcggcgatgggctccgaccagggcttgcctccccatggcgccccctggccgcagagatcagactacgacccatacgcctacgcccgccacagcgccgctgccgcctcctactactaccagccgcccccaccgggaacggagcatgctgctcccgtggccgcctcctcgtcgtggtcgtccgcagcgggatcatccgacaacgtcatagtgggcgggccaggggcggagcctttggccgtccccgcgctgtcgcagccgaccggctcgatcgggtggtccgggggcgacgtgggacacctgccgtactacgacccgcagtaccagacggcgcagcatcccgcggcggttgggggtggtataggtacactcaacggtgtaaacagaggtcatgggccttcacatggtggaggcagaggtggaagctctatgtatcatcctcttatatggaatgcaggaattacatcaccacgtggtagaggccttgggcgaggtagaggcagtggccgaggtcgtagaaacaagagcagtgattggcagttagccattcaagcatccggtggatcttttgcattacaggctcagcctgaaacggtctgtgcaccagcacacatggtgcaagctacaaccatcagttcaacacggnggtactgttgttccagctgcttggtgtgatatatgccacgtgnggtgtaatagcaaggaaatccttgagcagcacaaaaatggaaagaggcataaacggtctgttcagagaatgcaagatatggctcgccctgcaggtacgactcctggctatagctgacatgggtgctccatcatcttct

SEQ ID NO: 143072 - DNA, 386 bp, Zea mays
  Clone ID: MRT4577_61963C.1
ctctcgtccaaaaccctagcccttgcgggggggggggctgcgccacccagcgctcgagctgggggcgtcctgcgagcgcgcgccgcaacgccaccatgaagttcaacatcgcgaacccttccaccgggtgccaaaagaagctggaaatcgatgacgaccagaagctgcgtgccttttatgaccggaagatgggccaggaggacagaggtgatgctctgggtgaggagttcaagggttatgtcttcaagatcatgggtggatgtgacaagcaaggcttaccaatgaagcaaggagatatgacttatggacgggaaacaactagtgctgcataggggcactacctgcttacagggatatggaaagcaaaatgaagagcgcaagaggaa

SEQ ID NO: 143073 - DNA, 1071 bp, Zea mays
  Clone ID: MRT4577_61964C.1
atgacgaagcattcggagaagcagtggaggtttcagcaagcgttggcctggatggtctccgtcgacagcggcgacgattatgcggcgaagcagggagaacgctgcggcggatggcaccgacgtagtgccaggggcagcgaaagccgtaggggtggggacgccgagagcaagtccgacgtcaactgtgtggagaagatggcgacacgacggaaggaacccctgacgtctcccattctctctgatttatttgtctcccgtctggaagactctggtagcggctacagaggaaaagagcatgcggaaggcagagtggaggaaataaacttggctttggacggctggatttggaatcctgagatgacgaagcattcggagaagcagtggaggtttcagcaagcgttggcccggatggtctccgtcgacagcggcgacgattatgcggcgaagcagggagaacgctgcggcggatggcaccgacgtagtgccaagggcagcgaaagccgtgggggtggggacgccgagagcaagtccgacgtcaactgtgtggagaagatggcgacacgacggaaggaacccctgacgtctcccattctctctgatttatttgtctcccgtatggaagtctctggtagcggctacagaggaaaagagcacgcggaaggcagagtggaggaaataaacttggctttggacggctggatttggaatcctgtaggactgatgcacggccgcgcatgtgcgggttgccgggcaaacgatttcgcaacaggtttatctgaaactgcagtaaccagcgtcgtcaagactgactgcgttctgaccctgctggcagctgctagtgctatagccgcatgggggccgctaagggtggacgttcgggttacccgaaaatttcgagtcgggtattttaggtttttaaaatttcgggttttgagaattgatacccgaaattacaacgagttttgcaataaccgaaaaatcgggtacccggaatttcgggttcgggttcgggtattcccgaactatccgaactattatgtcggcttcgtaaaaacacatacaccttattaa

SEQ ID NO: 143074 - DNA, 394 bp, Zea mays
  Clone ID: MRT4577_61965C.1
acgctgacgcgtgggagggccgcgacgccatggcccgcgtgtgccgcgccgacacgcgcagctccaggaccttcacgggcgccggggcggttggttgcatggtttacgagtaataacaagtctttgtagtttgtttgttgacttgaccctgtattatgtaatttgtatggcaattatttttagtgatactatgctttgattgctgttattttatataaatggttaactttgttattcgtgtttgtctttgtactaacaaaacaactttagtgttagttttatgttgtaattttttaagctatcatgtttgaactgtttaataaaaataattatttttttttatttttatttttattattattttttttttatttaataaatggttgttcttttt

SEQ ID NO: 143075 - DNA, 163 bp, Zea mays
  Clone ID: MRT4577_61966C.1
catacacataatcaaaaacaccatacttttaacatcctcaccaacgtaccatctctcgtggctctcaaaaatcatagctcctctaattcatgctgaatcttatcaccttcatacacacaacatctatctacatctttcccacatactactacctatcatctat

SEQ ID NO: 143076 - DNA, 568 bp, Zea mays
  Clone ID: MRT4577_61967C.1
tccgaaattctcctgcctctcaccctacttctttcgtcacatctcgtctcatcctctcctctcctctcgtctgcttccggatcaccgccgaactctgcgacccgacgggtggcttctggtggtcctgggtaatcctattgcacagccggcgtctaccttgggtcggtggccgcacgtatgcgaccgccctcctcatcggacttcaccgaccgcgactgctagggaggcctcatgaactataatcatagcgcgagattacgagacgcctgaatatcactcctgccacctggaatccctcgacacaggtgaagaactcgcaccgctggatgatgcccatgtaggacgcttcgacgactcctccgagtgaaatctatgccagctcctcacatccaactttgatgagatcgtagcgaagtcacacttataatgtaattatccatgttataaagcataaaactcctcgctatgcttgaacatgtgacattcgattcatgaaatttgaatgagcagctcgcgaaagccaggctccgactcaaactaatgaaacccccagaacttgaggaatcga

SEQ ID NO: 143077 - DNA, 347 bp, Zea mays
  Clone ID: MRT4577_61968C.1
tccgggtcgaccacgcgttcgggcgatgcagcatctacaagactagagattttatcacgtccataaactggaactgcgggtgggttttcgcagaggacatggggctggacctatacgcgtccctcgacatgcgcgccggcagcgccggcgcctgcgtcgacatcaaggagtcttgtgcaaagacaccagaccctgacgtgtgcctactagcgctacatgcggacaacgactccaagacccatcgggacctgtcagatgcggcgctacgcgcagagacgaccgctgtcgaagcggaggtcgactacgctcggaacgagatggacgtggtgaaggacaacgacatgtga

SEQ ID NO: 143078 - DNA, 280 bp, Zea mays
  Clone ID: MRT4577_61969C.1
tataaataatatttcacttgcacataacattcttcctttttcattttaatacattactggatcggatattctttgaaggggcgatattgatcaactttattttatcatatgctccaatttacacctctatctttttaacataccaacaatttatttatatatttcttatctactataatgtatatattaaaaattaacctaaatttaaatacatcttcattaaaatttacttgtacataaaatataaaattaaatatatttttataaatataatataata

SEQ ID NO: 143079 - DNA, 380 bp, Zea mays
  Clone ID: MRT4577_6196C.1
aggcggcgggtgctggatcactaacgggcttcgagggcgtgtctacgctggtggacgtgggcggcggcgtgggcgtcacgctgcacgacatcacgtctcgccacccacacatctccggggtaaacttagagctggcgcacgtcatctccgaggcgacgccgttccccggtgtgcgccgagcgccgggtcgaatgctggcgtctgggcccgccggacgacgccatccatcatgaagtggatcctcctgatgtgaagctactcgcactgcgccaatctgatcaagatctgttaccacctgctgccgcaaaatggtgacggcatcctccccgagtgcacgctgcctgtctgtttttacggcaccccccaggcgcatggcgtgt

SEQ ID NO: 143080 - DNA, 123 bp, Zea mays
  Clone ID: MRT4577_61970C.1
tctttcttttatatctcaccatcaaatccccggggcggttattttataaagatgggggggctacctaacaaaattctataaattactcttctatatcaattccaatctttacctcaattttat

SEQ ID NO: 143081 - DNA, 460 bp, Zea mays
  unsure (1)..(460): unsure at all n locations
  Clone ID: MRT4577_61971C.1
ttgtattcccaggtaccttccgtacgtacaagagggggtcgcgacgctctagcttgcattgcaccagcgcgcagagcgaaaggaggtgggaagcgcccagagagatctcgagagagaggctggtcggcacaaaactagttcattccgttggaatggggccgcacgcaacgcaacgcaggccaccacaacgtgaggaggagggaggatgcagccgcagggtcaggcgcatcatcaccgtcagtcgtactacgcggtgctcggcgtgcagccgggcgccaccgccgccgagatccgcgccgcctaccaccgcctcgccatgaggtggcacccggacaagatcgccagcggcgggggcgccgccgatccggcgcgcgcggaggaggccaagagcaggttccagcagatacacgaggcgtaccaagtgctgntcgatgacaagaggagggcgctgaacaacgcc

SEQ ID NO: 143082 - DNA, 349 bp, Zea mays
  Clone ID: MRT4577_61972C.1
tggacgcgtgggcggacgcgtgggcggacgcgtgggaaaaaaaaaaaaaaaaaaaaaaaaaaaaaaaaaaaaaaaaaaaaaaaaaaaaaaaaaaaaaaaaaaaaaaaaaaaaaaaaaaaaaaaaaaaaaaaaaaaggggggggccctttaaaaggacccaagattacctccccggccatgcaacctcatatttcttttatagggccaccaaaattaaattccaggcccgttgtttaaaaccccttgtaacgggaaaaacctgggttttcccaaataaaatacccttgaataaaatcccctttttcccagtgggaatataaccaaaaaggcccccccaaatcgcctttcc

SEQ ID NO: 143083 - DNA, 562 bp, Zea mays
  Clone ID: MRT4577_61973C.1
ggacccggccagcggctgcaaaaaaagaaaacccgaagcacacagcacagacccacaactgctcgtcggagcacatagagcacctagctagttagtcgcacctgcaagagcgagagtgtgtgacgagtgaccaccgagtgccgagcgaacgatcatggaggcgtctttgcaaggcctatcgaacgggggcagcggcttgggcggcaggagcgtccacgccaggagcggcggtcgccggtcagctgcggcggtgaagcggctgctgtcgaggttgaggcgctcttggagaagacgagcggcgcggccgaggcgaaccgcggtgaggttcgggtatgacctgcatagctactaccagaacttcgacgacggcactgcctcccgcgcccaccaccgcttgtagctcattgactcatcatgtaccggaaccctcgcttgtaaaaaaagtaacttattgcctatgcgtggagtttaatttgtattgtattttggagatataaaaaaaaaaaaaaaaaaaccctatccttgggggggggcggcggggcccccgtgccccctttggagg

SEQ ID NO: 143084 - DNA, 1042 bp, Zea mays
  Clone ID: MRT4577_61974C.1
aatatttttttttttttttaataacattataattaatataacatagataagtatcattcaatatctcataaataagcattgtcaaataattcatacaaaagtgtaatctaaattcaaactaaagtactaattgaaaattttggttatcaactgtttgcgttaacgttgagcctaactaagtatatatgaattctatttttcacacatgtgcggccaccaaagttctattccatcttttcattctaactttgttggaggcagtcgtgctcacaattggtgagacaatcattttttgccacatttgagcaaaaacttgcatttagctcaaatagatttgacggaccaagaaatagtatctgaaaaagcattcgacactctcccatcctggtaaattaggtaaatgatttgttagagcccatcctttcttcttataagcttccctgacttcttctcaagaattacaacattgacttgcaattaagaattgatgttcttcaacgaaacattcagactcaaaaggcttacttgagataaacaagcaccagaggttctcaggtccaagtaagcgtcacttggttatatgcatctcctgaagattaagcattaacttcgtctatgtgataaccaaaaacatagaaacaagataatccgctcaagttgagaggggctcactcttatatctgtctgtaccaaaaagttcaagatgttgcatatcctaataggtaataactattataaagatgatggttgttatcagttcctgataccacagtagctaacaaaaagtcacttagtaaactacagagagcctagcaatcaagaaccaaggtagggaaattagtgattactaaaccaataacgtgggaatcaaattaacatcaattaataggtactatctcctccagcactctgtatgtatcatggagtaaatcaatgttgtgatggcatatgcacacatttcaggttgaatgcacctaataaataagaaacactatgagaaaataaacacctaataaataagcaacactatgagaaaataaac

SEQ ID NO: 143085 - DNA, 585 bp, Zea mays
  Clone ID: MRT4577_61975C.1
ctcttgaacctcccgatgatcctatgaatctctctagacatcccatgcataagagtcaccaagaccacaaggaggatcgagaagagcaacatcaatggctagagggcattaaaaatccatgtgctatcaccattgaatggatggataaaacaaacttgagagacaatcctagaggaattttaagcattcatgaagaatcatccttggagtttgagaatgtgagaaaaaacagtgagcatggaaattatttcataaatacctcaccaagtccttggtcatataaaacatctccccaatcaattggtctctccaacatcaccgcatttgagatctccaaccccctctttctttctatttataaaaactttaaaggggtggttatcgatgcatatgtctataataaaaattgtagatatcgttgagtcgatcttgatataggcacgcttaggttggtgttggaggggaaaccacttcaccaacataatttgatggtttcccaaggacaagcttagtgtcctaaaacaagcacttatcagatcgtaacatgaactatttgcaacattgccttgtgtattgagcatataa

SEQ ID NO: 143086 - DNA, 568 bp, Zea mays
  unsure (1)..(568): unsure at all n locations
  Clone ID: MRT4577_61976C.1
aatctttgttctctctgtgtcgccgtgaccaaacttgcctaaggtgtttctcgaccgtcttccagtttctagccaactcaccgaatgtttcctatgtctgtgccccacgttcgtgtaaaaccagattacgccgctatccgagactgccgtttgtcgtcgttgtctttgaaattgtgatcacgctgccggcgtctcgcccctccgtggccaggacttggagaacgccgtggcaccgtcggtgaacaccgtctgggatgacctcaccatggcggacctagtctggagctggttgcgagcacgctcatgggttgttccgcttcgtggtgagccactgatgctacctgatgctgattggaactctactgcgtcgtgttccgtgttgttgttgccggagtttggcgtcgcanccggcgcgcanagggagcgcgggcgagcgcggagctggagcctaaagcgaacccaagaagaagaagtgaattgtgaagagggagcttgttccagtgttggtgattcagtagtgaactccatctaactacttatcataataggagatctcagatctcctcct

SEQ ID NO: 143087 - DNA, 255 bp, Zea mays
  unsure (1)..(255): unsure at all n locations
  Clone ID: MRT4577_61977C.1
aaaagtcctactactaattaagcttcgagagtgggcgcctggcgatgccatgcccccgcgtgtgctcctctacgcgtctgccatgtggacccgcctcggtcttcccctccggcctccgcgcaaccacaacaatggccatggtcttccccttcaagccacccagaacccgcattccccttcggccttcccttccgtcctttgcgcaaccgccatggtcttcccctccgngcaaccacagcaaccgccatgccccta

SEQ ID NO: 143088 - DNA, 374 bp, Zea mays
  Clone ID: MRT4577_61978C.1
ggaaggaccgcccgcaggagaccggcccggaaggcccgggacgacccacgcgccctgggtgcgaagcgaaaacacaccgaagagggcaggcccgaaaagacggagcagatggaccaaacgccgagggggaaacgcgaaaggaggaaccggcataggccagggcaagagcgacacggaaccgaggcgtcctgactgctggacgagacagaccgagcgcccgggcaacggagcatgagcgcaacatccacaaggagcaggagcgcccaccgaaggggcggaccaccgggcaagcggcacaccagacggcgactgtcccaggacagggccagatcaagggcgcagaaaaccagcaggaggcgcaggacggaagccag

SEQ ID NO: 143089 - DNA, 598 bp, Zea mays
  Clone ID: MRT4577_61979C.1
gaatctttcaccagtgcattgcgctgtaaaaaaatcgaataggcatcgctggtcagtgttcttctcttccccaatcccaccatgccgatcaccggcccccgttacacatcacatctgctaattccgccgctggtggccgcgatgcgccgacgacagcccaacccccagcaccgcgaaaactacgaatacgtacctaatggtgaaccattcagatccaaccacagcctccaccacgaggtacttgggacttcacaagcccctcatcctgcccacgccggaccgtatctcggagtattgtacggccaccccaggtgctaagtgctgccgctggtcccacgcttactttcaactgaatagacttgaacgacagctgtccccccatctactaccgatgtatggtgactgactctcaaggtgactctgcttcacctgatatagagcgtacaacatcgctcatatctgggacaaaaacctcccgagaagtctcgaaattcagtaccgtgcaatgtctacgcgcaggatagccgcgaatccaaggtcgttcgccatgtctgatgcgatagcgatacgcaagaagagatcgctgaatacaagaggc

SEQ ID NO: 143090 - DNA, 2205 bp, Zea mays
  Clone ID: MRT4577_6197C.1
cattgggtacctcgaggccggccagggccccaggccagaatcaagggagggtgaagcaccgccgctgaccgctgtccccggctccccgccgccgcacaaagacgagaggaagaggttcccggcgccgccaccaccactatgtcgtcgatgatgaacgcgctggcgaactggctggcgaacccccgccgcaacccgctggcgcgcctccacatgcacgccgtctcctcgcgcctcaggaaatacggactgaggtacgacgacctctacgacccctacttcgacctggacatcaaggaggcgctcgggaggctgcctagggaggtggtcgacgcccgcatccagcgcctcaagcgtgccatggacctctccatgaagcaccagtacctcccggaggacctccagcacaccatcaagtcatttaaccaaccatcggacatcttgttgcgcaactcagtcttaataatcttcatagctgagaaggctctttccactgttgcagtcgccaccggcacagcaggttccattcagaggatatttgggtgacatgttggcgttggtgaaaaaggaaagcgccgagcgtcagtcactgggagcccttccactataccagaggacacttccctagggtgttggatagacatggtcgcaagtattctacctctttaccgcaaatcagaacgcatcaaataaaatgcagtggatgaaactgtttttttttttgttccaaccaaaatctaattttacttgttcatgccatggtgcattaaccatgggctgtagctgttgttttcagcaaatttgtcttcaactattattaacctgtgaaatcgacgatcataaagggtgatatcaactagcccagcaataccacaaagtggttgcagaaagggatcaagccattgcagtcaaagatagactagaatctctttgtagggaatttcagcgtcaaaacaaaatgctaaaggaagagtgccaaagggtatcgacagagggacagaacatgcgtacggaattgtctgaaaaatttgatcatgccataaagggtgtcagtgccaaacttgaggagcagagagttgagcgcatttctcagctagaagagaacaatacgttgagaagtaaactgaaagaccttgctgatcaatataacattactcagcagaaatatgctcaccaattgaaagagaaaatgctggaacttgaacttgctgatctgagacttcaacaacatcaagagaaggctgctcaggaacatacacaaatgcagttgtatgctgaacaagtttctcagcttatgactactgagaagaacctgcggttgcaactagcttctgacggggaaagatttcagcactttcaggatgccttgtcaaaaagcaatgaagtctttgaaacttacaagcaggagatggaaaagatgatttcagtgataaagaatcttaagaaggagaacgaatttctgaagggaaaatgtgagaactcagatattgctattgtgaagctcattgaagagcgtgagctaacaaagaagcaaatagagaaattgaaaaatcaaaaggagaagctcgaatccctgtgtcgaacactacaggcagaaaggaaacaaggcccctccgccagtattccagatgccccttctagccaagaagtgtcagcgacaagtcaagaatcttaacattccagttgccccttctagccaagatgtgtcagcaacaagtcaagaatcttggcagttgtgcttgtcaatataccgttggtgccagctacagcttgcggagatttctgaagcctgacattcagctgtcaacctaccgtccgtctcaggccttttgatattgtggctagagcctagtggtgcattcctactcggtgttgttaccaagcatataagctctcggctgattccatctcttgtttttgtttgagacaaagcctgctgcattggagataattagatttttgccaatcataatattgtcttcttgttataattaccactgtgtctatgaattgtgggtctagctgggtctatgaaatgtgagtctgatgacaattttacaaacttgtttcttgctgatggtaaatatcagaatctctcgctgcattgtgagtgtgttaaaaaaagatacaaaatgctatagaaaaaaataaaacaaaacactcaacaatgcatgctaataaaaaatgatacaaaaggacaatagcata

SEQ ID NO: 143091 - DNA, 122 bp, Zea mays
  Clone ID: MRT4577_61980C.1
cccagacggcgagcttgaggcctctccacgctcctcacactcttgggcgagaacatgagtgtgaggagcgtggagaggctcagccggcgatcttcaagcgctggggcctctccaccgtcctc

SEQ ID NO: 143092 - DNA, 282 bp, Zea mays
  Clone ID: MRT4577_61981C.1
gaaaaaaaaacgggccggggttccttttcttttaaaaataggtggggcccggagcttttttttttttttcaaagggttgccacctaagccggaaacccagaaaccgtccttataacccccattttttggggccccccaacccaaaccattagcgcggggccaaataaaaaagacccccaacgtgtgaaagccctataaaagtgtgttttaccacaccatacccccaatggttttttttttaaaaaaaggcccccttaggcaaaaggtttttccctcttgggg

SEQ ID NO: 143093 - DNA, 354 bp, Zea mays
  Clone ID: MRT4577_61982C.1
gtctgcagccacatcttacctacccgcagggaccgctccgagcgcctgcaaagcgagcgtccgtctcggcgaagacggccactctttacgctcccatgctaagccaggcgatgcggagcagactcatttcgcactcgaggccgaggacccctgtcctctgctgctgagctcacgacgcggacccgcttcaccgctgaaggccatccactccgacaatgcaacgcaccaggcggtgcagcccctcaacggcgaccccttcatcggcagtctgcagacgagggacacctcgagtccgctcgagcggggggacctcgccaattttttttttaccgcccccccccgagcccgctgctg

SEQ ID NO: 143094 - DNA, 487 bp, Zea mays
  unsure (1)..(487): unsure at all n locations
  Clone ID: MRT4577_61983C.1
gtacacctccgaggtctggccgggatgccgctccagcacacacagcacccattaattccgtaatccaggggaacccgacgcacagatcacttgtggcaggcacccggccgtgacttgatcgcaatcacaaccatcatcatcgacaatggcggcgtattcttgcgccttgtggactgttgcttccgtggtcgctttccttgtcatcggcgtagcagaggggaggtacggcggccctgggcagtggaggaggcctgcccctgcccctgttgtccctgtggcggccctcgtcagcgagcagctgtacggctccctgttcctgcacaaggacgacgacgcctgccccgccaagggcttctacacctatgcctccttcatccaggccgccatgacgttccccacgttcgccgncactggcgacctcatcacccgcaaacgcgaggtccgcgccttcctcgcgcaaatctctcacgagaccacatgcgggtgg

SEQ ID NO: 143095 - DNA, 274 bp, Zea mays
  Clone ID: MRT4577_61984C.1
ggcccatggacactgaactttttattcattggtaaaccagggggaggcgcccaaagaggggtaaaattcgttgcaatgtagggatggatgaaaacgaaaacaatttgagaggggacgggagcgaaaacgagccaaaaccgtttttttaacaaaactagaccatttccctagatggagctaccactaccaccactagctactgggccgggacgttaatttttggggtcctaatttcccaggcgtccagcctggggaccttgacgtccaccttgcc

SEQ ID NO: 143096 - DNA, 670 bp, Zea mays
  Clone ID: MRT4577_61985C.1
ggcgcagacggggcagaacagaactctgttgtcgcagcaggagcgcgcgtggcctacgatgcagggtaagtggaaggcgtgggagcaatcgtctgtgaacactgccgagctgccgccgctcttgacgccacgcgagcacacgccgcaccgggactgcacgtaaagaaaagagagagaacccacatcagcagctgagactcaaaacattctgcaaagacaggagaatgatcaacaaacaaaacaagatggagtgttttccaaagaaaggaagaaaagagcacgagtaaaagattgggctttttggacgctaagcagcagtaggatcattcatttggagcactgagatcaaaatctccatttggacaggcaaaagctgatgtgctgtgatctgattggatccatctttttgcgctatagcctccaccttctccctcgtcctacgaaagaagagaaaagaaaagcagggggatttgcatccctctgtgcagcagctgctaccaaaaggtgtagtacaaatacaataatgctacagaggttctgaaccctagaaaaggcgttgtaggcagtacggttttgttttctttttggacggataaggaatggcaagagatgcatgaaatacagaatgagagaatccggtcctgagagggtctctgcctcgtgccgaatt

SEQ ID NO: 143097 - DNA, 278 bp, Zea mays
  Clone ID: MRT4577_61986C.1
aaaaggaaatttgtggcccacacacgaattttatctcactacgaatacagagttaaaaaaagttttttcatatactggtcacaaatgtaacgcgacttataaacagttaagctgaaaaaaaatttagtgttgctggttgctccttaagtttggagagaacgggtggacttttgtttatggggtttttaacattattgtaggtctttacttatttggccaacgaacagatgcttttaatatattttgcaacaaatttatttgtgtgcttgtacaaacgg

SEQ ID NO: 143098 - DNA, 306 bp, Zea mays
  Clone ID: MRT4577_61987C.1
agcaaacaagccagcgcccgctgcagcaagctcgaagcagcagtcagcgacaccaaattccccgaatctcccctcccaaatgcgagtcctcgactgaggaagcccttcccgacctcttcgtggtccgcgccgcggctatcatgccgccgccgggggtggagacgccggagtggctgcgcaacctgcccgtggcaccggagttccgccccaccgccgccgagttcgcggaccccatcgcctatatactcaagatcgagcctgaggcctcccgctacggcatctgcaagatcgtgcctcccctcgcgc

SEQ ID NO: 143099 - DNA, 328 bp, Zea mays
  Clone ID: MRT4577_61988C.1
agctctagttctagttagctagcagagggggggaaaatggctccgcttctcgctgctgccatgaaccacgtctgcagcccatcgtggcctcaggagacacccagtaagaccccagaaagagagtcggtgcatttaggcccctgtcgaccatcctctgaaatagtccgagagaactcatagccgaatgcgcccccgaccccagatagggcctacaccgcaccagatcacagatgataattccagcgagaatgccgaaagcaggggagcaatgacggaggaggtgctcctccggggaccgaccaacctcgcccccacctgaatccccgcc

SEQ ID NO: 143100 - DNA, 498 bp, Zea mays
  Clone ID: MRT4577_61989C.1
aaaaaacatttttttatttattaacaaattggtttttcatttggaaaaggatacttacatgcttattgtggttggacgacagggtccacctagagcttgtatgacctcctagagtggaggactgatccaattgcgagcctcgcctgtagttcagatgctcacacacgacaaaccgttatcacaacatctcgtctagggctgattcacacaagtaaccatagcgcacatcctccatttggttaccctttaaaaggaccaactcagattccaataaaacccataagcccgttttactcatcaagcactacaggcttctcctgcatgagacatacggttcctcctatcaggctagaagatcaacccccttgaagaccttattcctaagatgaggatcactgtaccacccctcatcttccaagcaggggaaaacattattggaccaacgcatcaacagcttatttaccatcacaaaagctccagtacacgaggagcccccct

SEQ ID NO: 143101 - DNA, 383 bp, Zea mays
  unsure (1)..(383): unsure at all n locations
  Clone ID: MRT4577_6198C.1
cttgaacatgcaaatggagtcgttgttttggcaacaattaaaggtttgtgtccattcccatgactgatgaacatcaacagcatgagaagaaggaagacaagtcagacaaaacagaagacgagaagaactagaaagaagtaaggacagcttccactgttgaaatgcatattcaacatagcttgctcagctcctatctgttgtttcaacgttgatttaaaagaagagctggtagttgtgggctttcgaacaatagctggaatgatctagctagctatatgtaaatgatctagttgtgaatgatattataactgtgatgcttttgtgaatatataattgtggtgcttttgtgttaaaaaanaagtattttaaaaaaaaagggcggc

SEQ ID NO: 143102 - DNA, 859 bp, Zea mays
  Clone ID: MRT4577_61990C.1
tgggacctcgagccggcgggattgaatctcccagagaccacaaggagggatattcgcaggacccggtttttgcagcacgaggtgtggaggctgctctgccataccaaaaagcagacagaggaccaaggaaggaagcagggatccggctttgctctgcaaccatgagctccctgtacgacgtctcctgcttcgcggctggccttgctgggaacgtcttcgccctcgccctcttcctgtcgccggtgccgacgttcaagagggtcctcaaggccaagtcgacggagcagttcgatgggctgccctacctgctgtccctgctcaactgctgcatctgcctctggtacggcctcccgtgggtctccgacggcggcagggccctcgtcgccaccgtcaactgcaccggcgccctgttccagctcgcctacatctcgctcttcatcttctacgccgacagcaggaccactcggctcaaggtcgcggggcttctggtgctagtggtcttcgcgttcgcgctcatcgcacacgccagcatcgccttcttcgaccagccgctccggcagctgttcgttggcagcgtcagcatggcgtccctggtctccatgttcgcttccccgctggctgtcatggggtgtggtggtccgcaccgagtgcgtggagttcatgcccttctacctctctctgtccacgttcctgatgagcgcatccttcgcagtgtacgggcttctcctgcgtgatttcttcatatacttcccgaatgggctcggagtcatcctgggagcaatgcagctggtgctgtacgcgtactacagccggagatggaaaagcagcgactcgtcagcaccgttgcttgcctgatcat

SEQ ID NO: 143103 - DNA, 376 bp, Zea mays
  Clone ID: MRT4577_61991C.1
aaccgtcgtagggacactagaatggccgcggcgccgacatccctcgcgtcctgccacctgtggccaatcgcggcggggtccactcccggcgcacgacatcagggtaggcatgggatgctcccgccggcgagccgggcgcatggttgccatggctggatccggcaagctcttcgtcggaggcaactggaggagccacggaacagaggacttcattagcaaacttggatactaatcgaatgctgctaccgttgaaactgatcgagatgttgtggaggcacctacgtttatctatcttgctcaggatcagaattcactaactggacgcgttgaggattatgctcataacgtgtggagcgctgaaggaggagcctacacc

SEQ ID NO: 143104 - DNA, 1575 bp, Zea mays
  Clone ID: MRT4577_61992C.1
gtcgtggctacgcagccattacgagcttatggccacgagctctcgtaaagcgacctggcgaatgagagctgttaattttccgacgtacagtactgtgtaaaaagggacaggtgggagcgggcttgtccatttcgcgccgagaaattcttttttttttctttctgcacgctgcgcttttgccagccgttcagtgagccagtgactcgtttgactgacaaggaaagaatacttgtggccatgcggcaaagatgaaccaacccgtaatgatcatgtaggggattttcttgttgagacccacagcatatatttgtgcgttcgtggacagaggggggctccggccggggagatacttgaagcctcaccagaccacaaggagggatattcgcaggaccagcagcacccgaggacgaggtgtgtggagaggctgctctgccataccaaaaagcagacagaggaccaaggaaggaagcagggatccggctttgctctgcaaccatgagctccctgtacgacgtctcctgcttcgccgctggccttgctggcaacgtcttcgccctcgccctcttcctgtcgccggtgtaagctgctgccagcaccctcaccgtttctttaatttccttttttcgtaccagcaccggacgaatgcgttgctgctgctgctcgcctgctcctcgctttctgcacgccgtcctccaggccgacgttcaagagggtcctcaaggccaagtcgacggagcagttcgatgggctgccctacctgctgtccctgctcaactgctgcatctgcctctggtacggcctcccgtgggtctccgacggcggcagggccctcgtcgccaccgtcaactgcaccggcgccctgttccagctcgcctacatctcgctcttcatcttctacgccgacagcaggaccactcggctcaaggtcgcggggcttctggtgctagtggtcttcgcgttcgcgctcatcgcacacgccagcatcgccttcttcgaccagccgctccggcagctgttcgttggcagcgtcagcatggcgtccctggtctccatgttcgcttccccgctggctgtcatgggtgtggtggtccgcaccgagtgcgtggagttcatgcccttctacctctctctgtccacgttcctgatgagcgcatccttcgcagtgtacgggcttctcctgcgtgatttcttcatatacttcccgaatgggctcggagtcatcctgggagcaatgcagctggtgctgtacgcgtactacagccggagatggaaaagcagcgactcgtcagcaccgttgcttgcctgatcatgtagccgagttcgtcagtccaattgcccgtgccgtgctttctgttgttctctgttctgccatcctgtaattctaggagaggagctaggcggtgttttggaacagattaatcgtactgctacgaaatatattttttgagatagattattttaaatagagatggtcataaagtttattcgtcttctaaaaaaattttaaatacgatcattttatttaatgagttggccaaaaaaaaaaaaaaaaaaaaaaaaaaaaaaaaagcggcc

SEQ ID NO: 143105 - DNA, 878 bp, Zea mays
  unsure (1)..(878): unsure at all n locations
  Clone ID: MRT4577_61993C.1
ccggccgggcattgaaggcctcgagtccggccgggaggagaacttgaagcctcaccagaccacaaggagagggatattcgcaggaccagcagcacccggtctttgcagcacgagggaggacgaggtgtggaggcttctctgccaaaaagcagacagaggaccaagggaaggaagcagggatccggctttgctctgcaaccatgaactccctgtacgacgtctcctgcttcgccgctggccttgctggcaacgtcttcgccctcgccctcttcctgtcgccggtgccgacgttcaagagggtcctcaaggccaagtcgacggagcagttcgatgggctgccctacctgctgtccctgctcaactgctgcatctgcctctggtacggcctcccgtgggtctccgacggcggcagggccctcgtcgccaccgtcaactgcaccggcgccctgttccagctcgcctacatctcgctcttcatcttctacgccgacagcaggaccactcggctcaaggtcgcggggcttctggtgctagtggtcttcgcgttcgccctcatcgcacacgccagcatcgccttcttcgaccagccgctccggcagctgttcgttggcagcgtcagcatggcgtccctggtctccatgttcgcttccccgctggctgtcatggggtgtggtggtccgcaccgagtgcgtggagttcatgcccttctacctctctctgtccacgttcctgatgagcgcatccttcgcagtgtacgggcttctcctgcgtgatttcttcatatacttcccgaatgggctcggagtcatcctgggagcatgcgcagctggntgctgtacgcgtactaccagccggagatggaaaagcagcgactcgtc

SEQ ID NO: 143106 - DNA, 416 bp, Zea mays
  Clone ID: MRT4577_61994C.1
gcgcagaaaatacttcattatcatctgaacaaatgataatattgcgactccggtcagaacatactattaacacaaacttttaaccgcgaggaacaatctatacagcactaccaacgtgacatcgtatacactattatacaatgcaggaaatttaccgccacggtggagaacgacgacgtgacacagatacaccagcgcctggaccagggtctaaactaaacaggccaccatggagagaggacctgggaccactaaccaaacacactagcgtgaccccgtttatgctgagatcattggattttcgccacatcacaagggcgcgcttcttgtgaattaccactgtgtctatgaattgcgggtccagctgagcctataaaatgagggcctgagggcaattttacgaacatatgtcttgc

SEQ ID NO: 143107 - DNA, 262 bp, Zea mays
  Clone ID: MRT4577_61995C.1
actaatacgactaactatagggaagagtgggcgcgcctgcaggctcgggatccggaatagcgggcgcgatccacgtgttcgttgacacgggggaggagggttaaagcagaatgtttacgaaggggcatggttatatgcatataggctttttggatctgctttataatctaagggataggacattatttgaaaaagaagtatgggaccgttatcattgattttaggtttatggggagaatgcaacattttgttggaaaaacta

SEQ ID NO: 143108 - DNA, 341 bp, Zea mays
  Clone ID: MRT4577_61996C.1
ggggagcagcaacagagagatgctcatcctttccctttttattaattattaaacgtgcttttttggtttccgccttttcctttccttagcctccttagccttagccttctggtccatcctaagccgttccttttcagctgcatccctttcttttcttagttcctcctcctttcgggccaactcctttgccttcctatctaactcctttgccttcctagctaactccaattgatgagccttttcctttaaaggctgttccaaatttttttcctttgatactataacagatttgttcttaatctgggcagagctcccaaatgctttggtttgggccccttact

SEQ ID NO: 143109 - DNA, 116 bp, Zea mays
  Clone ID: MRT4577_61997C.1
ggttaatcaaccacccatgcatgggggggggcttcttgagtgtctacgtgcagatgttgatggggcttgtcgactacgtggtccgtgtaggccgcatcatttcatgtatgcagata

SEQ ID NO: 143110 - DNA, 1116 bp, Zea mays
  Clone ID: MRT4577_61998C.1
ctcggatcgatggtgttgccggccaaagattcggcattaccagagcaagaacagtgcgtgctaatggtgagctcatcgaaaaggatgcagtgttgctcctaaggaggaaccagacggtaagagttgttggatcagaggcactgccgaagtctggaaggatttctcgctatgatgtgaagatcaaacacaaagcaggggaagagcaagaggagacagggaaagcccaagacaaagtagagaaaatccaagttaatgcaagcgggattcaagaaagttccaaggaaatattaggcaagacagataaattgttggatgcactggagccaaaccttgacaaagaagagaaggttcaagaaaaggaagagcaacacctcgatgaagtggataatgttcaagagaatgaaggcaaagtccaatgcccggcagagaaaatccaggaaggtggagaagtccaatgcccccggcagagaaaatccaggaaagtcgaggattctgagacaaagtagaaaagtccatttgaagagtgaggggagttttaaatccatacaatgtttttgaggttggcttaaccaactatcacctggcagcttacctggagcccacgagatacaaatctcattccccatgtatcatcatggtaactgggattgtaccagaaatgttccctggtcttgatgattggctgatacatccttgaattcaaacccaagcgatgtgatctgccatttcgaatgccagcaatgacaacaactccccagctattgattgaatcttggttctcgggtgatgtccaatgcaatggcttgcttgcgatatctcgtatcgtagctctgagatcgaaatcacaaagagctgtaagatcttcagattcaatttaagcagctagtgatcacttcgctgcttcaaactgattcagatggagcttcaaaatgaccactagttgaggtagattgttccttgtagtattcttttgttgattacttttcctgcctgcataaaacgagaagcacaagtgtggaattgttttggcatggtggtagctgcagtggatgttaacttttgtatatatctaagcggcctcttaacccctcgtcatattcggaaaactattcaacc

SEQ ID NO: 143111 - DNA, 645 bp, Zea mays
  Clone ID: MRT4577_61999C.1
aaaagaaaaacataacgaagacgcgtgggtgccctaacaccacgggctcccggtcttcatctctgactcctccctcccgtcctcccctccatctcgccgggccatggctcgtctcctcctcgtcgtcctagcgcttcacctcaccgctgccagagccttcgccgcgtcaagcgtcggcggccgtaacggcgacttcgacccctcccgcgtcgtccagctctcgtggcaccccagagcgttcctgcacaaggggttcctctcggacgcggagtgcgaccacatgatcgagctggcgaaggacaagcttgagaagtcgatggtggcggacaatgagtcgggaaagagcgtccagagcgaagtgcggaccagctccggcatgtttcttgagaagaggcaggatgaagtagtagcaaggatagaggagaggattgctgcttggactttccttccgtcggagaatggcgagtccattcaaatattacactataagaatggtgagaagtatgagccacactatgattacttccatgacaaaaataaccaagctctcggtggtcaccgaatagcaacagtgctcatgtatctgtctaacattgagaagggtggagagaccatcttccctaacgcagaggggaagttaacaca

SEQ ID NO: 143112 - DNA, 106 bp, Zea mays
  Clone ID: MRT4577_6199C.1
gagaaagtttatgatgaacttaaaaagttcatgagcagtgctctccaacacttgaaggccatgttcaagtctgtggatggcgacctttggatggggtccttcacct

SEQ ID NO: 143113 - DNA, 270 bp, Zea mays
  Clone ID: MRT4577_619C.1
ctccagctgagtcctgtagctgttactataggggacaggcgactcgctgatgtgagctccaggacttaaaaccagccgtgagggacattctacatctgaagagatggcagcgcagaacccagactcagctcaagatgctgcgacagtgtactgttatcagcatggcatgagtaccatcagaccctatgggagaacctacgaccatgcgtcttgagcgcggactgtatactacagctaggaccaatgccgctgttagactatggagcttgt

SEQ ID NO: 143114 - DNA, 304 bp, Zea mays
  Clone ID: MRT4577_61C.1
ataacattcaacatttttttttttttttttaattttttacattttctttttttctcattatacaaaatattttttggggggcaaccacaatacattttacaggctgaaactgcgattcaagtctacttttacaggaaaaaagacgttgctcttaaaacacaccaactttacatccaacgagagggctaaaaactagatctctacgggggtggacacccatcccaaccctttatacatatcctccccaatttttggacaacttctttggatgtaccattttaacaggctctttttttgtaatccc

SEQ ID NO: 143115 - DNA, 268 bp, Zea mays
  Clone ID: MRT4577_62000C.1
agcagtggtaacaacgcagagtacttttttttttttttttttttttttttttttggtttttttttttttttttttttttttttttttttttttttttttttttttccattcccaggccaacaggtttattggaggcccaaaaggcgggaccaaaagggccctacgggacattggggggggaaaattaacagctggaatcacccaagttatcttcctggctggcacaggacacccattcgggctaggggccaaggggccccccccccca

SEQ ID NO: 143116 - DNA, 263 bp, Zea mays
  unsure (1)..(263): unsure at all n locations
  Clone ID: MRT4577_62001C.1
gcagccaagtccagagcttaagacatacaggccaagctggttatcttcccaggcgtgcgcgcaaggtgaaggctggtgactctactccagaggagcttgccaccgctacccaggtccattgtgtctacatgccatttactcgtggtggggggggggagttnnagttgtgaaggtcacagatgagatgaagtcgtgggctgcctatggnaagcttcgncttgtgcggntgaacaagaaacatcttggtgcccgtccgaagaagg

SEQ ID NO: 143117 - DNA, 150 bp, Zea mays
  unsure (1)..(150): unsure at all n locations
  Clone ID: MRT4577_62002C.1
tcgcccacgcgtccgcccacgcgtccgcccacgcgtccgctgcctgctactgtccttatctgtttgaataactgctgtgttgccatcttatgtgtacaactctcgaaactcgctgccgttcgatgtatttgagcttttggtatgcanttt

SEQ ID NO: 143118 - DNA, 380 bp, Zea mays
  Clone ID: MRT4577_62003C.1
acaaacaagcaaaaaagggggattttaattcccaacgggacacaaaagggggggggactatacaaaaaaagggggtattacttgaaaaaaagggggggggggtattattaaacaaaaaggtacatttctggaacaaggggcacggggtcgggccctaaataaagaaccgggtaacctttctccctaaggggggccacagcttccttaaggggccccttccctttccggggagaaagcactttagccgggaccccggggacggggggggctttcttcgcccctgccggcgctggggggggaggccccctcttcaaaggacccccagggaggggagggcccaagagggggccaggaggagcagcagcagcgaccaagccgga

SEQ ID NO: 143119 - DNA, 730 bp, Zea mays
  unsure (1)..(730): unsure at all n locations
  Clone ID: MRT4577_62004C.1
ccggccgggacataccctctgccgtggcatgcccagacgcccgatctcttntttttccccaaaacaaaccaaccctcggtccacgccattatcttgttggtccatgcacggcagcggcaggtgttcccggcgagatcggttgcttccagggccacgtaaaacgatcgagctgcgctgccagggtccggcgtcggcagcggcagagcgaggcagggcatcatgtcaatgccatgggcgatgaccgtgtccgtcgtcgacatggcgttcgcggcgctcgcggcgtgggtatcggcgtgcctcttcgccgccgccgccgtcgcccgcgccgcccggaccggcgtgatcggccgcttgcacatcatcgcctaacgccctcatgggggctcctgctgtctgcgtgagcgtctcctccgacgatccttctctagctagcgaccggtacctccatgtctactggattccgtctctcttccacagtgtctactgttttatttttgtgcattgttttgaacagtttaatactcctggaccacatccattattatatatgccgatctgagcatggcattagcgctgaccgcgttcttttccacaatcttttcggttttgtcgtagtgatgagtacgtgcaaagccatgctcagattgtccagaactggatatatccaattngtgtaattgtgtttatcctcactggcatcgatgtaatttctacgatatgattataccat

SEQ ID NO: 143120 - DNA, 258 bp, Zea mays
  unsure (1)..(258): unsure at all n locations
  Clone ID: MRT4577_62005C.1
caaggggctgctgcgcctggatttcgccgtcgcagcgcagaactgctgggtgcgcaagggcggcgccttcaccggcgagatcagtgctgagatgctggtacacctgcangtagcctgggtcatggtgacgacatctgagcgcagagctctgttgggtgaatcagtgatgtgctgctgatacagttcatatgcactcactcacgtctcaggtaatgctgcatcgtagaccttgacagaagagctgacaccatgatgtgt

SEQ ID NO: 143121 - DNA, 353 bp, Zea mays
  Clone ID: MRT4577_62006C.1
ttctttttttatcaatttaatgtgcgatttggagattttttgactcttacctcttcttattatctaggggggggcacgttcaatttgctgccacccggttaattttttacaagatgcaccaacaatccccaacccaaaatttgccccggtttttcccccccacctaattgcactgtcccccctcccccacttgatacaattattaaaaacattggaagaactggctactggaaccaatgcaaccgaaccaaacaatttttgggtggccatggaaaaaaccggcaccaccagccttttttcctaatgttcttgtccctccgccgatcaaagtaaaggtgggccccccccccaaa

SEQ ID NO: 143122 - DNA, 319 bp, Zea mays
  Clone ID: MRT4577_62007C.1
caagtgttccgaggcattgaacagacaattcaatatgggggtcactgctactcaagttgaaagacattacaggcattataaagagaattggaagtttgttgctgcagccttaagcaagagtggtaatacttttgacacaacaaggtctatggtactcatatctgaatcagagaaagctaacctaaaggatagggcaaggaggctcctttctaagcctatcaagtttttcaatgagatgcaggagttgtttattgacagcagtgctgatggttttttagcattggatgttccatcctgcatgaatgaatctcatcctgga

SEQ ID NO: 143123 - DNA, 261 bp, Zea mays
  Clone ID: MRT4577_62008C.1
agaacaagcacttatttatgtccatttttctttttcagtttcattttatttttacttgaaactgttactctcttttttaataagccccagggccagccggccctgcaaggggggcgaaattcaaaaaaactacctgcatgtgtcctgggatgggggggaggacccacgggagccaaaagaaagaacacatggctgccccggggaaaagggggatccggtacccatgcccccaaccgaccaagcccgaaacgaaaaaataaa

SEQ ID NO: 143124 - DNA, 288 bp, Zea mays
  Clone ID: MRT4577_62009C.1
gaggtaatgtgtctttgtaaaggacaattgtggtgggtctcacgcaattatacatagaatcctaaacttgcgcacccaaactaacaaacgttaaggtggactcacggaatcaagcaaaaaccaaccgcttgcggcgctggaatcggaggcccgcacaccgctaagagatggaccaagacacactctctgaaaaggcgggggggaaccacaaaaccggcggcctcaaccgggattgaaagaggatgcacttcacggcaccctaggtcactctgggggggagctcctggt

SEQ ID NO: 143125 - DNA, 271 bp, Zea mays
  Clone ID: MRT4577_6200C.1
cacacatgtaccaacaatacagctcttgcagaagcaacaaccatacaaagacacaacaagacatggaactaggagaaacaacacccggagagaaccaggttcgtggagagctgctgctcctcatggagagctggtatccaattcagaggttctaatacactgctatacaaagatacagcaagatgcggtcttcagagtttctaatatactgctatccaatgaccaattcctggagaggtgctgctcctcatggccacccgatacacagaca

SEQ ID NO: 143126 - DNA, 238 bp, Zea mays
  Clone ID: MRT4577_62010C.1
acatccacacaccctagctggcatgcatttcttaccgccctcaacagtggggccgtggtgatctgattcattcttgcgggcaaagagctagacttacacctgaagaagctgcataggaagataggcaagatcactgtaccttacatcatgtcacatggattgctttctacccaaatgtctgtcctgatgagcacactttttttgtatagtagatgcaagtaaataccgttttaatcat

SEQ ID NO: 143127 - DNA, 580 bp, Zea mays
  Clone ID: MRT4577_62011C.1
taccaaagcgtatgttgaccaattctcaagatgcctctatgttgagtacaagagcaagggtattgatgtgcaatgccaggtgcccctatacgtggcgacaaagatggcatctatcaggaagtcttccttcctggtcccatctgctgacacctatgctcgtgctgccgttcgtcacattggatacgagcctaggtgcacaccgtactggccacactctgtcgtgtggttcttgatctcgattcttcctgagtcccttatagacagcgtgcgcctgggcatgtgcattaagatccgcaagaaggggctggccaaggacgccaagaagaaggcactgtgattgatgtttcagaatgcaggtccagattcgaagatttcctcatcacctgtagtagacatgtgccttgctgtagtcactttattagctccggagtctgttaagaatcgagaatgccattgctccatccacggttatgatgttaaaaattattattcttcaattcaaaatgtaacactaatacgagtaatgatgaatgcaattaacttgaagaagtgaaaaaaaaaaaaacccgcgcccgaccag

SEQ ID NO: 143128 - DNA, 217 bp, Zea mays
  Clone ID: MRT4577_62012C.1
tcgccctgacgacgctcccgctcatcggctgcggcggcggtggcgacgtgccgccgccgagcagcctctggtaccggcacgccgagcgcggcagcatgcggtccgtcgacgtgagcacctcgagacggcccatgtgaggtagctagaggtgggtgtggtggtggctgggtctgggtgacgacgaagagtgtggagctgagctcagcgattagctagc

SEQ ID NO: 143129 - DNA, 534 bp, Zea mays
  Clone ID: MRT4577_62013C.1
gcgttcggctagttctaggacgcgagggccgcccttttgttttttttttttttttttttttttttttttttttttttttttttttttttttttttttttttttgggggggccccggaaaaaaattttctcaggggggcaaaggggcaagggcctaaaaaaagggtaacacccaaagcacctatacggggggagggggcaccccggcccaaaacagggccccccacaaaaagggaccggaccccccgaggaaaaatttggtccccagggggcggggggcaaaaaacccaaaaaaaggggggtctccccaaagggccttttatttttcggggcttggaaccccaggaaggagggggggacaaaaacaactgttttgggcggaaccgagggggcaagggcccacctgggggccaaaaaggaggcccaaaaaccggaccaattggccaaaaaaattttcaatgaaaggagggcccgcccaaaaggggcttgggacccccatttttttttaaacggccccaacctgggcccccaaaacc

SEQ ID NO: 143130 - DNA, 1491 bp, Zea mays
  unsure (1)..(1491): unsure at all n locations
  Clone ID: MRT4577_62014C.1
gtcatgccccttataagctcgacacaggggcaggcacaccgcacagcaccgcaccgcactgcatcggtcgccagccgagccgagccgagccctgctctctcctccagctccccaaatcacactccgccatggccggcacgtgcgctcacgtcgagttcctccgcgcgcagccggcgtgggcgctggcgctggccgcggtgggcctgctcgtggccgtgcgcgccgccgcccgcttcgcgctctgggtctacgccgcgttcctccgcccgggcaagcccctgcgccgccgctacggcgcctgggccgtcgtgacgggcgccaccgacggcatcggccgcgccgtcgccttccgcctcgccgcgtccgggctcgggctcgtcctcgtcggccgcaaccaggagaagctggccgccgtcgccgccgagatcaaggccaggcaccccaaggtccccgaggtgcggaccttcgtgctcgacttcgccggcgaggggctggccgccggcgtcgaggcgctcaaggactccatccggggcctcgacgtcggcgtgctcgtcaacaacgccggcgtgtcctacccgtacgcgcgctacttccacgaggtggacgaggagctgatgcgcaccctcatccgggtcaacgtcgagggcgtcacgcgtgtcacgcacgccgtgctgccggccatggtcgagcggaagcgcggcgccattgtcaacatcggctccggcgccgcctccgtcgtgccttctgatccgctctactccgtctacgccgctaccaaagcgtatgttgaccaattctcaagatgcctctatgttgagtacaagagcaagggtattgatgtgcaatgccaggtgcccttatacgtggcgacaaagatggcatccatcaggaagtcttccttcatggtcccatctgctgacacctatgctcgtgctgccgttcgtcacattggatacgagcctaggtgcacaccatactggccacactctgtcgtgtggttcttgatctccattcttcccgagtcccttatcgacagcgtgcgcctgggcatgtgcattaagatccgcaagaaggggctggccaaggacgccaagaagaaggcgctgtgattgatgtttcagaatgcatgttcagattcgcacatttcctcatcacctgtagtagacatgtgccttgctgtagtcactttattagctaccattacctcctgagtctgttaagaatcgagaatgtcattgttccatccgcggttatgatgatgaaaaatacgattcttcaattcaaaatgtaacactaatacgagtaatgatgcatgaaattaacttgaagaagttgtgcaactcagttgtttttctgaaccatttcacatttttgtaaaaaaaaaaaaaaaaaaaaaaaaaatcccttcttccattcaaaatgttacactaatacgagtaatgatgcatgaaattaacttgaaaaaaaaaaaaaaaaaaggncgncggccgt

SEQ ID NO: 143131 - DNA, 294 bp, Zea mays
  unsure (1)..(294): unsure at all n locations
  Clone ID: MRT4577_62015C.1
aaaagttttaaaatttaaaaaacaaaaaaaaaggtaaaattgtaaattttaaagtttttcgggccccaacaccaancaaacnnnnccagaacaccgngacaaacancaaanaagaccaacaaccaaancactcaaagcttatnncccaaaacaaaaaaacgatccaaccccagcattcgaagcctattagaattgatggtgcattcaaggctgcacaaaaacgtggaagattacatgtaaatccaaaaaaagatgaccaacccaagaagaaaagcccactaggaaacccaccaa

SEQ ID NO: 143132 - DNA, 107 bp, Zea mays
  Clone ID: MRT4577_62016C.1
atcccccttggttccctcagcccagccctgtccagcccggttcccgggaggatgaagttcgtgtacatgtaataacatccgttcgagaagcgccgctctgagggcga

SEQ ID NO: 143133 - DNA, 167 bp, Zea mays
  Clone ID: MRT4577_62017C.1
cggtccggctacccgggtcgcccagctccgaccccgctcccctccatcctcggccgtggcgcactccctacagtaagaagagagaagaggcgaatggagaacacacacgtcatccccaagggcattcaagaacactggcagaacttgtcaaggacatggttcaacca

SEQ ID NO: 143134 - DNA, 675 bp, Zea mays
  Clone ID: MRT4577_62018C.1
atggcttcacaaagtcatcaagctgtgtcaccttcggcgacgaagctcgtgcttccgatcacaagcggttcaagcttcgaaccagccaacaaaaagcaaaagaaggaaccacaaagaagggtacaatatatcggagtacggggaccctacatcaagtctaaatggtctcatgtgccgatcacattttctcaagaggaccttcagcttaaggattatccccacaatgatgccggatttttggtccacaatgtcctggtggatacaggtagtgcagcagacattatatgtgaaaaagccttcagacagatgcaagagcaagacgacatgatacacgatgcaacacaccccctgtgtggcttcggaggaaagcacatagtgacactcggaaagataacaatgccaatcaccttcggctacgtgcacaacaccagaattgagcaggttgtgttcgacattatagacatggattatccttacaatgcaatcattgggcgaggaacattgaatgctttcgaattatctgaggacaaagaaaaggctttatcaaagttcttattcgacaacaaagatgtctttgcttggtcagccaatgacctatgtggtgtcaacagagatgtcatcgagcgttctttcaatgtggacctagccatcagaccaagaaagcagaagctttag

SEQ ID NO: 143135 - DNA, 898 bp, Zea mays
  unsure (1)..(898): unsure at all n locations
  Clone ID: MRT4577_62019C.1
ctcgaggccggccgggccgggatccgcagctcaaaactctacccaagtcaatttcaaaccgcaatctcccctgccctgccttccttccccttcacagcttcatccaccgctcctccaatctccatcgccatcgccatcgccaaccctgagctgaaagcaaggccaacaagcatcatagcagtctcgctcccgcaccacgcgagtgagacaccaggcaaccaccacgagacagggacaccgacgggcgccatcctcatccaccaccaccctcccagcttccgttggcttcactcccactgcaggccccacctcactcgcccgcgccacagatctcgcctgccggaaccctaatgccgcaggtggacgcgccgggggagtaacgccgatgcagcgccgggtgggcatggcggacagcgaggccagggggcggacgctcggcgccgtcatcaaggagaaggatgaggagctcgcgcttttcctcgagatgcgccgacgcgagaaggagcgcggtgctgctgcggcggcggcggcggcggcggaccagctcctgctctctggcgactccgtgacgggggacgggatgctgcttctcggcccgccgccacccgccgagcccaaaccggtggcgtacaaagtggctggtggcggatttaggagggcgcctggcggagcggacgatttcctccatgcagacgctggcgacaagaacgattacgactggcttctgacaccaccaggaactccactattcccatctctagaagttgagtcgaaaaggtccccggtgagccaagctggaacaccaaagactcgtccaactgccttaaaaatcaaggttggtccaacccatcagatcctcccatcagaaaccacctcccattgaggacnacatcatcga

SEQ ID NO: 143136 - DNA, 699 bp, Zea mays
  unsure (1)..(699): unsure at all n locations
  Clone ID: MRT4577_6201C.1
agtccagaagtgcggncagcagtttgcgcaagtttggcatgactcccgagggaaaagtggtatcgaanaataatggcaaaacccagatggttagctgtcgcattccagaacnccaaaaaatnccagacagccatcatggactgctcgcagaaccctcttaaccattgtaaagtaccaaaacgacnaaggaggtcatggatgttttcatgaagatatcacagatctttccccaaatcaacggctagctggtcttcactgcgggattgcagtcttgattttttttgtcggcctatcatcccctgtgtctggagggcctgctgcggtaaccatctttgaaggaaagggaacacctgttgggccgtgacgctctggatacaccatctgcctagattttgtgtcgaggtttttgtgtttcctatgtagtacatcgtgtgatgtagcggccttggtctagctatgagtatatgattgacccccctcttcccgcttcataaagtcaggctagtgagcgtagcagggtcaaatatttgttatttacattgcgtgggcagccagccggtctgcgctctgacgctgcatggtttatctcgtaggatgtgaaaggcacagcagacagacatggttcatatgatcgtatcagatcaattttgatatatactaattgctaaaaaaaaaaaaaagaaaaaaaaaaaaaaaaaa

SEQ ID NO: 143137 - DNA, 1827 bp, Zea mays
  Clone ID: MRT4577_62020C.1
ggccggccgggaaaaaaaaaaaaaaaaaaaaaaacggccgggctactctcactagaacagaaccctaaacccgcatcccgaacatagacgccggcgatctccgccgccaccgccatgttcgggaccccatccatcactcccgctttcgggaacccctccagcaccccggtttttggcacgccatccgccacccccgcatttggcgcgacgtcgtccaccccggccttcggcaccctctcgtcgacgcctgccttcggcaccccttcgtcgactcccgctttcggtaccccgtcgtctacgccagcgttcgggaccgcttccacgacccctgcgttcggggcatcgtcgtcgacgccagcgttcgggaccacttccacgaccccgccgttcggctcgctgaatttcgggacgccctcgtcgacctcagcattcggcacgccgtcttcggcgccggcgttcggcgcactcaatttcggaacaccctcgtcgacctcggcattcggcacgccctcttcggcgccggcgtttggcgcgactccttcgccctcgccctttgggttccagcagcaggcgacgccgtgcccatctccgttcggcttgctaggaggtggcggcgcgcaaatcaccacccagatggcccccgttgcgccgctgccgctctccccgtccgaccgtgacatccaggccattgtggatgcgtacaaagaggaccccggtaatccacgttatgctttcaggcatttgttgttcagcgtgacagaaccttcccaaagggtgaagccagttgctgcctcagatattatgtgggcagaagcaatggggaaacttgaatgcatggatagtgcagacagggagaggctgtggcctcagcttgtgcagggttttaaagacctttcccatcggcttaagcttcaagatgaagtccttgtttcggacactgatagattgagcatgactcactctaatgttaaaaagctgcaaaggcatttccaagctgacacgtatccttggatccagcgattgaagcaacaagagctggctattcagagacgtcttttaaggtttgttagaatagtggaggcattggagaatcggggctaccgctgtcctttaacaaaggaggaagctgacttgtatgaaagattggttgctatattaaagcggctaaaaggacataacgctgatctttctaagagggtcaatacacttgtttcgacgtcgcgtcttctggctagcagtggtggtgctggtggttccgtttatattcccagttctgcaaaagttgatgagcggagtgttacagagcttcttgaggccttacaacaacaaacagaggcagttgccaagctaggtaatgtgttgaagagggatatcagggacatggagatcatccagtcagaaggtacggatatggctgaagacaatgtggggagaagggcacagaaaatataagattgaagcacggtctttgtcgtaggctcgtagctaagtaataagcgggtgatggaagggatccatcgtcgctagaaggatctgagcctccaacttatttggagtaatgggccagggaaatgatatccctgtgtaactgctgcaggcaagcttgattctgcattctttgggaagctaaccatggtcaattagtagtggtatgtgtagattgtatgttgaactgaggcagtattcttagaactcagttttctcctcgtgccaactaaaaaaaaaaaaatcggaaaatcatttacagtgctgttttgttgctccccgtgattcgttgagctgttgtaaccccccggatggtgttgtggaatggacggagccctgcat

SEQ ID NO: 143138 - DNA, 322 bp, Zea mays
  Clone ID: MRT4577_62021C.1
ttcttacatttgaatcacattgggggggctttttaattcggagcaggaaagctctgggagggggatactttgtaagcgagacaaattgcgtaacggactataaaagctcagggtgcacaaacagagtgcaggacttcaatattcttgactcgtgcgcatgaaagtaaactccctcaatgaggatatagggaggcctgaatgctgacacagtggcttcactgaagtgaatgcatttatggtggataccactataggctaacctcagatgttcacagagacactacctgaaggtgcccccccaacattgctcagattatttgac

SEQ ID NO: 143139 - DNA, 538 bp, Zea mays
  Clone ID: MRT4577_62022C.1
cggacgcgtgggctccactagggctccataactggaccggtcgctacaccaccgtacccagccccctagacaacaatggccaccgcactgaggcagcccccgagcgccggccttcttcttgtcgtcgttcttcctccgtgcctcgctggcgcccaccgccgtggcgatgcctgcggccaaggcgggcatcatgggccgtatcaccagcagcaggggcaggctgagcgcgcaggtcacctacaacgtgaagttgatcacgcaggaggggaaggtggagctgcaggtgccccacgacgtgtacatcctggaccacatccaggaggacggcatcgacctgccctactactggcgctcgtggtgctgctcctcctgctcctgcaagggcgtctgcggctccgtggaccagtccgaccagagctacctccacgactgccagatcgacggcgactgggtgctcagctgccacgtctactgcaactctgacgtcatcattgagacgcacatggaggaggagatcaccgacgcataatcattcatg

SEQ ID NO: 143140 - DNA, 240 bp, Zea mays
  unsure (1)..(240): unsure at all n locations
  Clone ID: MRT4577_62023C.1
cggacgcgttcaagcgaccttatttcttatcgctgcccacatagcactggcgcggcatgtgtctaacacggtagcggcacgacatctcagggatagctgnntagtgaccaaacnagagtaagatgagtccagccgtgcttcttttactatagttgttatgccacacatctgngggcaatttgatgnccccnnctccccggcgcccgccaagagggaacctccttaaactacatacaagag

SEQ ID NO: 143141 - DNA, 806 bp, Zea mays
  Clone ID: MRT4577_62024C.1
ccattattttccacataaacttttgaagcccagcgggttgcttctctttcccttgaaacctatctctcttagatttgaaaacctattttccatcttcctgttgtagcttacatagaccaatttatttagcctctggttctctagtcggttcctcttctttgtatggacatacacgaaatcaacaagcaatagcgagttatattgctccatatgaaccaacaaaaattgtacttactgctgcaaattcactccagtttttctctcaaccaaatgctgaacaacggagtcttctaactctttgcttagctttttagttcatatgccagtcctccatatgcaaattcagtgtttggtgccaaagaacagaaatgaaaggaagccaaatactgacgagcagataagaaaaatgaagagcaaagagttacagggggggggggggtggaacattcagatgagggagttcatctcagggacggtgaacaggaactgctgctggcgatttggagaagaggccgatcagctgccggtgctgggaaacagaagcgttgagaggggttttgagggggcggccggctgtgccttttactctactgtagacgggccaaaaatagaagcccacaaataaaaccctagcccagtaaaacctgggtcagtttctcgcctaatcggatgactaattgctctgggtcgatgattagttggacgccaggacgacgaggacacctggtcgggtcaccgatccttgatcgggcccttccaggcgacctagacgactaatcgcgattgtttggatgacttgaaaacat

SEQ ID NO: 143142 - DNA, 1533 bp, Zea mays
  Clone ID: MRT4577_62025C.1
ctttatatactagatggctggccggccagacggcacacacccacacaccccgcttcacgttctcaataatggcgccgttcccacgtcgtcttccggccgccgtgccacttctcctcctcctcggcgccgcagtggccagcgccggcgcggaggacaccgatggcggcaactcccgccggcggcactcccgcttgctgttcgcgttcggcaactcgctcaccgacacgggaaacggggccatcttcccggtgactgcaggcgggccattcacccggccgccgtacggggagaccttcttcggtcgtcccagcggccgggcttgcaacggcaggctcgtcctcgacttcctcgtggaggagctgaaggtgccagagccgacgccgtacctggccggcaggacggccgccgactttgcgaagaacggggccaactttgcgctgggtggtgcaacggcgctcgaccaggcgttcttagcaagcaaggggataaagtcgttcgtgcccatctctctcatcaacgagacgagctggttccagaacgtttcgaagctactggacgcgtcacactacgacgagcgtaagatcatggcgaagtcgatcttctacgtcggggagatcggtgtcaacgactacttcgccgccctaagcaacaacgactccgtcgacgtcgcggtcagcctggtgccgcacatcatcgacaccatccgttcggccctgaccgtcatgatcgatgccggggcgaggacagtggtgatcacggggatgctaccgatcggctgcgagccgcagcagctggcccagttcgcaggcagcccggccggcgactacgaccctaccaccggctgcatcacgcggttcaaccagctcgccgagcaccacaaccacatgctgaggatgatgctgagggagctgcggaccaagtaccgcaggcgcaggcccctcaccctccactacgccgacatctaccgccccgtgatcgaggccgtcgcgtcccccgcctcgtacggcttcggcgacaggccgctggccgcgtgctgcgggggcggtggcggccccaacaacttcaacttcatcgccttctgcggcacgccggcgtcgaccacgtgcaccgacccgtccaagttcgtctcctgggacgggatccacttcaccgaggctaccaacaggcttctcgctcgtaaaatgcttcaggaactgctaagccgtggagcttacaatgttgcaatctgattttttctatgcccgcgagtcgtatcaacgtgtttcccatagcggatcggagctagcgtggaacctcttgtgcaataaaaaaataagtgtcatcacattcctcgcctttgacgagagaaccggatttcctttttcattatccaataaaagatacattaccgttgaactagtaaaaaaaaaaaaaaaaaaaaaaaaaaaaaaaaaaaaaaaaaaaaaaaaaaaaaaaaaaaaaaaaaaaaaaaaaaaccctgggggggggccccggcccccatttccccttatagggagtcgttttaccccccct

SEQ ID NO: 143143 - DNA, 192 bp, Zea mays
  Clone ID: MRT4577_62026C.1
tgaatgggagctggatgcttgttacgacctgaatgcttttgcagccaaggtagagggtgtggagtgtgaacacagggatcatacggactatattctcgatcttctgcgcaatgttatatgccaactgcaacatggcatgccattgtgggaagctcgctgggtatttgaaatgggctagtattgtataaagct

SEQ ID NO: 143144 - DNA, 622 bp, Zea mays
  Clone ID: MRT4577_62027C.1
ccggccgggagggagaccgcaggacttgttctatgctgcttatttcgcgcagggggtgtcgcctgtgatacacagactgtggtgacaggcagccgctgacctcgacgggactgactgcaacggggaccagagttattatacaggaggaggatgaccaaaccagccgagactggtagtatctatgaactaaagccagggcttgatggggtcactgtgcacgcgcttggagacacccaacaactgtatgaatggaaactgggccacacttgaatcatgatgccaaggatcatggtgcacggtgaagacgaggaccgacatgaacatcgatcttgactaatgtgacatgcgggagaagatggagatgataatgccaatattactgacagacatatacatcatgctggacctcactttatcattggacaagctggagatggacatgctgatccaaatgatgtatggaacaggagcacatgatctatgaaggagaactacaaatgcctgcggacgtggtgtctgctaacaaacttgagcttccaggctctatcaatgaacctgcgagcactcaccatatagggctgaattcagtacctcaagatgattgctgcatcaaaagcactgt

SEQ ID NO: 143145 - DNA, 694 bp, Zea mays
  Clone ID: MRT4577_62028C.1
cgcgtccgcaaggttgagtggtgagagtttttcacgcacaccacgcactacgttggcccgcgtacgagctgcaactggatcatggcagcagttggcagatcgtcgctgtcgctcgtgctggtgatggcggcggtgatcatctccggcgccggtggcgagcgggtgcctcctgccgcaaaggagccctggccgccggctccgcatgctgtggtcgtacagcaggcgcggctggaggagtgctaccgagtggctccggcgtgctacaccagcatcggacaagctctggctgaagctggcaagcttgtccccaaggtgaagcaccgttttgttgtactcatcaagaccggagagtacatagaacaggtgaacatcacgagacggaacgtcgtcctgctcggcgagggcagaggcaacacagtaatttctggcaacctaagcaacctaacgtctacggcgatggtgatgacggtcaccgtgaatgttgtagccgacagctttttgcaccagaacctgacgatccgtaacgaggccgggccacaaggaaggcaggcggtggctttgaggtcaaactccaaccggaccgtggaatctgggtgcgctatagaaggcttcgaagatagcactgtactccgaaaatggagtccaggagtacctggagacggacatatacgggaccgtggatattatattcgga

SEQ ID NO: 143146 - DNA, 137 bp, Zea mays
  Clone ID: MRT4577_62029C.1
atgatatgaattgaacggtggttcatccttgtatatgaggcggccactacgaccggggtagggtagtgagaggcttttgtctttccgacaccgtttcatcagcaacaacccgtggggggcatgggaggctttgcgtc

SEQ ID NO: 143147 - DNA, 358 bp, Zea mays
  Clone ID: MRT4577_6202C.1
ccaagatcttaacctcctgaactctctggaggaagggcggggactatgtcatcccattgaggggaaataagaaatgatcagaaagaagactcccacggcgatcaacatgactatctagatcttgacagggagcctgctacctacagctggacagaaaactgcatgtcgggtactgactcacacaatgaaatctgcacgcctgacaccccataaccacccaggccaccacacacgcgtatcaatatgcttcaagggtgcacaagtggtgatgagactgagaggctcaacaaaactaatgaggcaacatatgctgttgcatacacagcaagggataagacgacaagtgagattgctgcat

SEQ ID NO: 143148 - DNA, 470 bp, Zea mays
  Clone ID: MRT4577_62030C.1
gtgtgtgtttttttttttttttttttttttttttttttttttttttttttttttttttttttttttttttttttttttttttttttttttttttggaaaacaacccccggtttttttttgggtaaaaaatcgaaaaggggacaaaaatttaggggggggggggtacgttacacacgggggggaggctttataagattaaaagggtacaaaagggtttgggggcccacagcaccttagggggggggggaaaaatggggggcataaaactaggggggggctaaaacaaattaaggggggaaccaaaaacttcatccggggggaaccggaggtttttcccgggctgggcactcctttttatggaactcatttataagctccctttggctttggggaaaatccgggggaaccctgatattgaaggggacaaactgattcccaaacacgggggaggtcctcgcttttattccttt

SEQ ID NO: 143149 - DNA, 338 bp, Zea mays
  unsure (1)..(338): unsure at all n locations
  Clone ID: MRT4577_62031C.1
aggcaagacagaaggcgcgaaggacgcagcaacaagcccgacccgcgaggacgcggaagaggacacggaccggcgaaccccggaccagacgaccaccagagaggagcggggagagccaggccagaaaggaacagccgccgccgcccgcgccgcaagcagaagaagagaacaagngcacaaacccggagccgaggcacgccagcaaagcaccgccaggcagacaccccacagccaacacccgcgaggncaacccagacaggacgaccacacgccagcagagaggcagagacagacacaacaaggaagggcaacgggcacaacccacaacggaccaacaa

SEQ ID NO: 143150 - DNA, 1296 bp, Zea mays
  Clone ID: MRT4577_62032C.1
atgggcgcaccggacagtccgccgaccgttgaactcgaccgttgcgctggtgaccgttgctccgcttggcacactggacagtcaggtgtcacaccggacagtccggtgaattatagcggagggtcacctcagaaacccgaaggtgaggagttcgagttgatccaccctggtgcaccggacagtccggaaaggtttgaccctatttccctttcaggtaccaagtgggtattccgcaacaaacaagatgagcatggtgtggtgactaggaacaaagcccgacttattgccaaagcttattcacaagtcgaaggtttggattttgatgaaatctatgcacccgtagctaggcttcaatcaattcatatattacttgcctatgctacttaccatggctttaagttgtatcaaatggacgtgaagagtgtcttcctcaaaggccctatcaaggaagaggtgtatgttgaccaacctcctagctttgaagatagtgataatccttctcatgtttataagctctcaaaggagctttatgggctcaagcaagctccaagagcatggtatgaatgtctgagagactttcttatcactaatggcttcaaagttggtaaagttgaccctactctcttcattaaaactatcactaaagacttgtttatataccaaatttatgttgatgatattatatttgggtctactaacaaatcctcttgtgaagagtttagtaggatcatgatacagaaattcgagatgtctatgatgggggagttgaagtatttccttagattccaaatcaagcaactccaagagggcaccttcatctgccaaactaagtatactcaagacattcttaagaagtttggactgaagaatgccaaacccatcaaggcacccatgggaacaaatgggcatctcaacctcgacacaggagggaaatctatagatcaaaagaccagatattatgctttcgtatgcatgtgtgcaaggttccaagcaaatcctaaggaagttcaccttagagccatgaaaagaatcataagatatttagtttacactcctaagtttgggctttggtaccccaagggatctacctttgatttaattgggtattctaatgtcgattatgccggatgtaaaattgacaggaagagcacattagggacttgtcagtttttgggaagatccatggcgtcttgggcttcaaagaaacaaaactcagtagctctatccaccgccgaagccgagtatattgctgcaggacactgttgtgcacatactttggatgaggcaaacccttag

SEQ ID NO: 143151 - DNA, 728 bp, Zea mays
  unsure (1)..(728): unsure at all n locations
  Clone ID: MRT4577_62033C.1
acagttattacagagacagccgccaacgctcctcttcttcgtaatgatgtggctggatccgtctctcgtctctctcccatgccatgcctattccatgtngtgttacatttcatacgtgaaatgcacggaagcgtcatccgcatggtgggtgacccacgctcctcgctgtcctcgcactatccggttcgatcgcagttctttttttctcatctaatatttgtcgtgtaacaccagtcagcagcagacggtgacaagcgatttctgtctctggcttattaaagaatgatatcacgtgtggagcttctctacggaaaatggaaggagagcgaatactactacccctaccccacagaggcgtcataatcacagaaggcgatgttgctccagcgataaccgccgtcgtacgctaggaccaagtccgacgcacgcagggtatagccggatcgcgcggcgatgaggaatgatgccaagacgccgatcccatcagccggtagaccaggtacggatgcaacaagctgctggatgtccacctggtgcacgatttactgaggtgcagtacgctcctcggcgaacgcatgctgaaactgccccgtnctgaaggagaatgatacctccgcctacacctccacacctgcgacggagacgagtaagagctacacgcaggtttcgcgaatgattatggtaagtgacgtccgtatacccggggtcattgaccccgtctcaagtcg

SEQ ID NO: 143152 - DNA, 256 bp, Zea mays
  Clone ID: MRT4577_62034C.1
cttcggaaaagaacacggagcaacccaagcttggaagggacacacaatatacaggagctcaatcattctgtgctgggtggcacactgcctcaatcgtagaaccttctaagataggaccatatggaccgggatcatttaaatgccgactaaggtagccctagggctaaaaaaaccttgctgcgaacatttgagtatgcacagtcaacctgctgaggctttgagaataccatttaatgtaatgtgctgcacagggcat

SEQ ID NO: 143153 - DNA, 390 bp, Zea mays
  Clone ID: MRT4577_62035C.1
ttcttaagcagtggtaacaacgcagagtacttttttttttttttttttttttttttttttcttttttttttttttttttttttttttttttttttttttttttttttttttttttttttttttttttggggaaacaaaaaataacgcgggcttaacccccctgctttagattcgccccttggggcccctcaacattttgttgcgggggcccagttctaaaataagcccccagttcagggggtccaaaatttaccgcccgggttcaaagggggcacccgccatacaaacgttaagtggggcattttcttttcccccaaaagcaggtttccaaagggaatggggggaggaaaaaccaacccctcctcaggggtttcccttgggtgccctttt

SEQ ID NO: 143154 - DNA, 326 bp, Zea mays
  Clone ID: MRT4577_62036C.1
ccgcccacgcgtccggtggttcgtcttctactacccctacttttcaggttttgaaacgcgaggagctccggagggcagaggggtgcgttaaccgatcgataaggccgtgtcccaagtagagtaccgctgctcctacagcggctctcgcctgggccacagacgacccattcctccacaacgccttcaatacctacggcgaggtcctctagtccaagatcatcctcgatcgggagacgctaaggtcccgcgacatcagcttcagcaccttttctcacggaggatgcgacgcggaacgccaacgagggcatgaaccgcaaggacctgga

SEQ ID NO: 143155 - DNA, 283 bp, Zea mays
  Clone ID: MRT4577_62037C.1
ttttccattcgtccgcggacgcgtgggcgcaaatcacagacgcgcctttcttagtttgctgcactgccctgccataatataaatatcatatcggacgtgagcccggcctatagcgaaggataggcatgatttgttccaatctcgagacgctttttgcttggtcgtgctcctggtggcgaccgtggtggcttccccggccgaggtgcgcgcggtgatgtcttgcttcaccgtgttcagtacgctgatgccgtgcctgccgtctcgccagatgggtggggccatg

SEQ ID NO: 143156 - DNA, 232 bp, Zea mays
  Clone ID: MRT4577_62038C.1
gggtgtggggggttttttttattttttttgttgggataataaggggacgacttcaaatttcttccaaaattgaaaccaggacaacaaattgggctgctaatctgggtgcagggtggtgactaattttttttttttggtcaaacacatttgtggggggggggtggtggcaacacggggggccgcaatttgttttaaaccttgtatccacggttgttcctgctggtccgtgcct

SEQ ID NO: 143157 - DNA, 146 bp, Zea mays
  Clone ID: MRT4577_62039C.1
accagtaacagtaaactttacaatagacgggggtccagcatacattatccaaatttttttatatagagagggggttcggcttaacaaaccaaaacatcggtctcatctactggtaatactaacggacccctgggcggacccctggg

SEQ ID NO: 143158 - DNA, 104 bp, Zea mays
  Clone ID: MRT4577_6203C.1
cggacggggtcggtacgcgtgggctacgctttgaacatatgcccctgcctcactctagcacacacctgtagcgacgatctcggcctagctagccatccagcgag

SEQ ID NO: 143159 - DNA, 530 bp, Zea mays
  Clone ID: MRT4577_62040C.1
ggacctgcacgcaatgagttttgtggaacagtcctcaaaattatggagagagttttactatacactgacagtctttgtgctccatcactaacgccgactgatcgagcttctcatgcaatgacgcacccatccagatcgttagcccgaataatgcctagtatgaactggccattgaactagccgggcgcggtatctaagtacccgactggcctaaccacctgcacaaactcctaacgcactaattatacgctacctataagcagtattgcgtgaacttaacgctgtgagtacccaaccgctaaaagagaggggcagggacctatagaaagcgatcaccaagcactcctcagacgaccaggaagagcgccaccgcgtcgaactccgtactcaccactgccgtctgatatgcggctgctgccagatggacgttaactatgtgctgctcctggaggtaaggtgaaagacttgttcacctatgcggaatgccctaccggggatcttgaaccacctgccggaaccaacaaagccct

SEQ ID NO: 143160 - DNA, 359 bp, Zea mays
  Clone ID: MRT4577_62041C.1
tctattttagccctttttttacacaacccgggggggcgcttttaggtccaggcggtgtacaaccactacacaatggccagcttcaacgtctatttaacgactataaccgtcgacaccatgggcgtatactaccaacacatctactttacattctaaatcatgttcccgatgctgtaccaggacgagtcttaggaccttctgatcaagtggctaatgatcatcgcttgtatggttaactgcgtatacacagcctcgatcatattcttcctgtgcactgcatacttctagaaccaatcgttccgcaacaactggtaggtatgcaaccatatttacactaatcgcaagacctttcacttgca

SEQ ID NO: 143161 - DNA, 183 bp, Zea mays
  Clone ID: MRT4577_62042C.1
ttacttatctaaggagcggccggattcaaagatttttggggttcatataaccatctaaaattcaccagagcataacctgggggcatatgcataactactggtacaagtattaaattcaatgatgtcaaaactgtgatataattgttatgcattctaattttttttaatgcccttgttctcaaa

SEQ ID NO: 143162 - DNA, 146 bp, Zea mays
  Clone ID: MRT4577_62043C.1
tttttaattccgtacgaggcgccgctcggtcgccgcccgacaccgcctaacaagagcttactccgcgtccatgacgcttttcgcggtgcttcggggaacgcggtgttgccatctcgaggtaggccgcatgtttgctgttcccccgc

SEQ ID NO: 143163 - DNA, 486 bp, Zea mays
  Clone ID: MRT4577_62044C.1
acaacctacgcccacaccggggggcggtgccaaccacgccagccaatcccaagcgaacaaaaaggggcgggctccccaccaagcccatcgccggccaccagcagctcccctgccacaccgcggcgcaaggagggccgcagcctacagtgccagccaggcacgaccgagacggagagcggcggcttcaacggaccccgccagaaggacgcgaacggcgcaaacgaaccgcctgccgaacgctccccccgacgcccgaccaaggcacaacaccaccatggaccaaccaccacggacagacagcacagagcagcacacgaagccgatgagcgcacaaagccccgcagcagagcaggcaaacaagcatgcatcctgaaccaaacgttggccacgaccagcgcggggacgaaccaacacttgagcacatacggcaaggaacaaagacaggccagaacgttaaacggatgaacgcgacgcacgcgcgaaaca

SEQ ID NO: 143164 - DNA, 764 bp, Zea mays
  Clone ID: MRT4577_62045C.1
cgttccccccctcgggtcgacccagcgtccgctccggtcgtcaccgtctccgaggagccggcgccggaagcggcgaaggaggtggtgaagaagccggaggaggggaagaagcccgacgaggagggtgacgagaggaagaaggccgaccccgccgccgagaaggagaagaaggcgaggaagccgcggagcaggaagcccaagtccgccgggctgcaccacccgccctatttcgagatgatcaaggaggcgatcctgtcgcaggacggcgggaaggtcggggcgagcccgtacgcgatcgccaagcacatgggggagaagcaccgggacgtgctcccgcccaattaccgctgcctcggcgccgtcgagggaggcacgtaaggtgcgcgcgaagcgagcgaggaaggtggccccggcgcccgcgcagcccaagcccaagccagcccgcgccgccgcttccggtgccggcaagaaggtcaacaaggccagcgcctgattagcggcggccgtcctggtccccccgcgcgcgcctccgtgtattatactagccggtagtagcagtaggagttgcaagtactagcagcgtggtagtcgtgatgatgttgtggtcgtcgtctccgccggcccgatcgatcgggcgctctgttccgccgtgtggcagagttttgtaaataactagtctggtgtgatgcgctcatggcaataaagcgcgcgcttctagcttcccttgatgaaaaaaaaaaaagggcggccgccaccgcggtgga

SEQ ID NO: 143165 - DNA, 243 bp, Zea mays
  Clone ID: MRT4577_62046C.1
gtagtataggaagatctctcgcgaaatggccatccggccattgaatacgacgtctataaagggggttcttcttcgtcaagaggggagtatgctgattaactgctgcttgatgctgccctctatgctatttgtgctctcttctttcctagcgttgtagttgtcgtcgaccttgttgccgctgctgctgcttcttgttctagtgttctggtcagcggtatcgtagaccctagtcgtgttgtctat

SEQ ID NO: 143166 - DNA, 1156 bp, Zea mays
  Clone ID: MRT4577_62047C.1
atgacgctgagttccggcgcgacccgggtaggagcaaccgcttgcgtcagacgcacactgacggagagtgatcactgatttctggtcatgcgagtaggagcaaccgcttgcgtcagacgcacactgacggagagtgatcactgatttctggtcatggcaaccgtaactgaggaagttgctccggtcgtcaccgtctccgaggagccggcgccggaagcggcgaaggaggtggtggagaagccggaggaggggaagaagcccgacgaggagggtgacgagaggaagaaggccgaccccgccgccgagaaggagaagaaggccgaccccgccgccgagaaggagaagaaggcgaggaagccgcggagcaggaagcccaagtccgccgggctgcaccacccgccctatttcgagatgatcaaggaggcgatcctgtcgcaggacggcgggaaggtcggggcgagcccgtacgcgatcgccaagcacatgggggagaagcaccgggacgtgctcccgcccaattaccgcaaggtgctggccgtgcagctgcgcggcttcgccgccaagggccgcctcgtcaaggtcaaggcctccttcaagctcgccgccgccgaggagaggaagccctccaagaagaagccggcggcgggaatggccaagcgcaagagggccgccgcgccggccaagatgaagccggcggccgctgcctcggcgccgtcggcctcggcgccgtcgagggaggcacgtaaggtgcgcgcgaagcgagcgaggaaggtggccccggcgcccgcgcagcccaagcccaagccagcccgcgccgccgcttccggtgccggcaagaaggtcaacaaggccagcgcctgattagcggcggccgtcctggtccccccgcgcgcgcctccgtgtattatactagccggtagtagcagtaggagttgcaagtactagcagcgtggtagtcgtgatgatgttgtggtcgtcgtctccgccggcccgatcgatcgggcgctctgttccgccgtgtggcagagttttgtaaataactagtctggtgtgatgcgctcatggcaataaagcgcgcgcttctagcttccttgatgaaaaaaaaaaaaaaaaaaaactaaaaaaaaaagggcggccctcgcgatctagaactagt

SEQ ID NO: 143167 - DNA, 175 bp, Zea mays
  Clone ID: MRT4577_62048C.1
gggggctgctttatagaacccactcttatgatcccacccatgcgaaatacattgtccttttttgcgcaccctaaatacaaggaaaaccccgccgttttcccacttaatcctgttaaaaccatgccttttccccgcctttttgttttaccaaaataccctttccgccatgcgttta

SEQ ID NO: 143168 - DNA, 294 bp, Zea mays
  Clone ID: MRT4577_62049C.1
gatgctattgacactcctctaagccgcacctgatggattctatctttatccaggcattgggccgtcttggaaatgcacttactacgattacgtcaccactatctcttcgcatttgaatcatgtacaatgtcaaagagaaaccttgtcctcaggactgttcactgaacttagcatattatgcatttgcttaatcatcctaccattgtatgtgcctagcaagcccccatacctggtcccatacactccatcttactttaagcctgtcagaagtcacagtatctcaacatgaacctg

SEQ ID NO: 143169 - DNA, 166 bp, Zea mays
  Clone ID: MRT4577_6204C.1
agcatacttgtcattgtattaaaaaacatacgcatttggtgcattactaagcttgtagaacagggactgagacatgctgcataagcacgtattattagacgagtccgatcctcttattacttacgataggtacctgaacgtatacagcacttcgagcagcaccgtg

SEQ ID NO: 143170 - DNA, 271 bp, Zea mays
  Clone ID: MRT4577_62050C.1
cccatttttaataattttgcccggcaagaaaaccagagcaggggggtttttaagaataggcaccatgacactggaggaccactatgctactggtaagccaaagactagagattggtctaccctacatggaccaggggaaaaagcgttggaaaaatgaaaccaagggacaccgtttagtaacgcacacaaaatatcacaagttaacaccgtaacgcttaatcaattgcacctagccgctaagaaatgatgagctcgtttatcgccctggaca

SEQ ID NO: 143171 - DNA, 266 bp, Zea mays
  Clone ID: MRT4577_62051C.1
catggccgttttttttttttcgaaaaaccagacacctgctggggagggggcggatagcctaaaaggacttgaacacgaccataataatccaaccccgccagttcgcagtaaagcagcgtcgaacgctctggctgagagtaaacaacagctccatgagaggtcgaaacccaaaagcctgaccgtcagggcacatgttaacagctagcctgcttctccgggactcgccaggaaaggacacactgggaaaacttgggaacaatattacc

SEQ ID NO: 143172 - DNA, 1994 bp, Zea mays
  Clone ID: MRT4577_62052C.1
cattgggtacctcgaggccggccgggataccaccttctctctttccttcacacacgcagctcacgtacacgatgaccacaccgcgtcgcgacgggcagcaccacggcgacaagcgcaccgtgacacgagcagcctcccgaaacagcgacggacacggcgcaggcgacttgagcttcgggtccacggcggggcctcggttcgccgtcgccccgccgcgcccttgggcgccgccgcctgagcacgcggccgtcttcgtgcagccaccagacgatccgtcgacgttgatcatgctgtggggaccgcccggcgaggtgcccgttgccggcttcgctgcggcaccggaagggctaccggatgcgttcgctggcagcgcgtcgtgcctgccgctcgcgaggcaggtcggcctgcaagcggccggcggccagcagggggcgcgcaacttcgtggtgtcgccgctgtcgttccacgcggcgctcgcgctggtggccgcgggcgcgcggggcgagacgcagcgggagctcctgcgcttcttggactccgagtcgctgggcgagctgcaccgcgccgcggcgacggcgctggtcgccaggctcagcgacctcccgcagacgtccttcgcgtgcggcgtctgggtggaccggagccgcgcgctcacgccggagttcatggacaccgccgcgtcgcgctacgcggcggtcgcggagtccgtcgacttcttgaagaactccgaggcggcaaggcagcaaatcaacgccttcgtgaaaggggcaacgaaagggctcatcgacgacgtcctgcctcccggctccgtcgactcgtccacggcgctcgtcctcgccaacgccatctacttcaagggggcgtgggctcggccgttcgatccgtcgagaaccatcttcgcgccgttccatctccccgacggcggcaccgtgcgcgtgccgttcatgactacgactacgagtggtttcgaggaccagcgggttgccgtgttccccggattcaaggcgctcaagctgccctacaagaacgacggcggcgcgcagcaggacgcgttctacatgcttctactcctccccgacggtgagaccctaaccctcaatgatctctatgataaggtcgtgtcgtcgccgggattcatcaggaagcacacgccggtggacgaggtcccggtcgggcggttcatggtgccgaagttcaagttcacgttcgagtttgaggcgtctcacgatatccagaagctgggagtcaaccgagcctttcaaagcggtgacttctccggcatggtctccggtggaaacgggctcatcatctcaggagtgtaccacaaagccaccgtagaggtggacgaggccggcaccgttgccgccgcggccacggccgagttcatgtttatgtgtgcaagaatgcatccaccgccggtggatttcgtggcggaccggccgtttttgttcgccatcgtggagagaagtggcgtcgtgctgtttcttgggcatgtggtgaaccctctagttgggtgatgatatcagtgacagtgttggagacctttctcttccgaatatccttaaaaatatgattaattatctgtttttagtataatatggattactatagagagattcggcttcagaatataagttttgtttcatagcaaaggtatacaagatgaagatatagcctgaggatgataagaatgaacgctgaagttatagtcgaagagtaacaatttcggtttaaaatgatgatgaagaccaagcatgatgctgacctgaagagaaaaggactaattagttcctaatgatttatattatagttatggataaatgttgaggatataaatgtatttttactcgggatacgtcccatgtctataaatagatgaatagtaacaccaaaaaaaaaaaaaaaaagggggcccactctcgtatctttaccttcgaacaagccgaatgtatcaatgtaatataaattgtgttaatatttatgtgcgtattatg

SEQ ID NO: 143173 - DNA, 365 bp, Zea mays
  Clone ID: MRT4577_62053C.1
cggacacataaagctcatattccacactagctcacggcagtacctatattctgcgtcagtatgctggattgcaatatctaactatactgttatacatgacacaagaggccattgatgcaaggatcttatagctattatcattaaccctcaaatatcaatatgctctattgcaacaggcatactcagagcatttgaatcttacaagaatcgaggcgcaacagctactagaacagtagctacataaaattagttaagtagatgcagataaccttgatgactacagttagctacagcagattcattgattcaataaactaggtgacatgaactactgctatctagtggtaggcacaacagctactaac

SEQ ID NO: 143174 - DNA, 783 bp, Zea mays
  unsure (1)..(783): unsure at all n locations
  Clone ID: MRT4577_62054C.1
tccctcgcctcccgcacgccagtccctgctgccctgccctcttccgccgcgtcgtcccctcctacgttcccctctccctcggtccgcctagatctcgccagggtttgccgcgtctcgtcttgatttttgctccggaaccagggctccatcggggcagagaggcaggaggggtaggccatcccggaaagtggcggatctgggtgttatcggaggaagagcatcgtgtagcgtttctgtcggtggcaggcatcgacgaggtgtgatttagaaggcatttgtgagtacggcatggactgcgtcggagctgtggacagcagcggccagcattcccccgtcttactgggctgaggcactcaacaccactactcgtcttctcaacattttgccaaccaagacaccccgccccgctccgataccatgaaagcagatgaactgctgaatattgattgatgatatgagggttaaagcttacatatatatagggaggagatctgtgtggtttatggaaacagaaccaatcatgatctccttacatctctagctatagaaacataaccaatcagggtctctagctatagaaacataaccaatcaggatcccctcatatctctacatatctctagctgtcctaatcagaaccaatcagcagatggctgtccttatgtggctgatagggacagagatggcgccagcctgtanggactggctgcatggcgcagtncagactgctaacagtgccagtgggatacacttttcactgggctggtcatcagctgctatttt

SEQ ID NO: 143175 - DNA, 303 bp, Zea mays
  Clone ID: MRT4577_62055C.1
cccattcgtcagaccagatcacggtctgattgaaaaccgaggcaaagggattctgaacatgacgtcccaaggcaaaaaagaggggcaaactgacaaattagaattcccaagacaaagggcgtctgtccaaagaggagattcagaagatagtgcacgactctgagaagtacaaatcttgagacgaggagcaacaaaagaaggtggtggtctagaactactcggaggagtactacgtctacattatgcgcaacatgatcgaggacgagatcctctcgtcgaagcttgctgccgacgacaagaaga

SEQ ID NO: 143176 - DNA, 309 bp, Zea mays
  Clone ID: MRT4577_62056C.1
catgcgtgcggctgatcgaggacgacgagggcgatgctcgactaccggatgctcgacggctgcctgctgtgggtgctgacgacgactcgctcgatagacgcgcttgatagacatcaagcagggcgtgaacacagaaggatacaccatcctgtacactgatatgtgcgtacatttacacttacctaaataagttcatgcggaggcaccgcagcaacaactagaagatctgaacggccaccggctaggatcctgatgtacacaactcttgcagggcgtgaacttcgtccacggccgtggggtgctggaccg

SEQ ID NO: 143177 - DNA, 435 bp, Zea mays
  unsure (1)..(435): unsure at all n locations
  Clone ID: MRT4577_62057C.1
ttcgggnagcgagtggtgggactgtgcgtgagttgggaagaagcagcggtgtctatggcggtgcggtatggtggtgttgatggaccctgtcccacggagggttctctcaaggttgggggacacattgtgcttctgggcccattattacccctaccagcaccacatacccaccttcgcgggggggggggaaaccctatgtgccatccttctctccttattttagggtcgactccttgatctctgtctctagtgctactacaagaaacacttgctgctttactcacaaattatctgtccggactatgctcttctctgtgtctgatctattgccgctgtagttgtctgctgctaaccaattttttgtgtaaaattaacctttgaagcatcactgtggcgaataatttctcaaacccttcatgtgttttccctaatgct

SEQ ID NO: 143178 - DNA, 474 bp, Zea mays
  unsure (1)..(474): unsure at all n locations
  Clone ID: MRT4577_62058C.1
acgcctgcanntaccgttacggaatttcagattgtacccatgcgtccnattacccttatttgatacccattgataaaaaggattgctatgaagcttatccttcctttagaagggcaaaacgttttgttttaagacaaaatgtgattcttcacacctgatggaaatatttactaaaaaaagactcatcattgtggatgcataatggccgcgatgttttcaacatgttgaaaagatgtacctctccgagatacccaaattagggttttaaagaatttaagtgataccgggcgggtgacttagcctagaagagagtttaggggaattgtatttttctgagttgaataatgaccgtgtcgatgtatgcttgatgattgagaactttttaacatgccaacatgtcttgtgatgggtaagcgtttaccctggacagactaatactagaaagggtaacactctatgggagtggataggagg

SEQ ID NO: 143179 - DNA, 293 bp, Zea mays
  Clone ID: MRT4577_62059C.1
cttcctagtgttgttttttttttttttttttttttctttttttttttttttttttttttttttttcgggggaaagccattttttttttaaccacaaattacttgggcaattcgcttacaattgatactccattaagtgggggcaacaagacaaaactttttttggaaacgcaatttgtcttaccccagccgatttcaccttttttttttagaaaaagaaaaaaggttttttcctcccccttagtttaagcgattcccataaggaaaccttctccccgactgcgtttttttttt

SEQ ID NO: 143180 - DNA, 1961 bp, Zea mays
  Clone ID: MRT4577_6205C.1
gagccggccgggagtacctcgcggcgccgggattcgattgcccatgatcccatcccaaaactcccgtccctaatccccactggcctcctcccacgagtcggataccgaacctcggcggcgtcggcgccacgcgagcaaaaaccctagtgcgagcaagcgagaggcagagacctcagtgcctcgagcaacgcgcgcccggcccgacggcatggagagcctcatcctcgcctcctcctgctccgcgtccccacggctcccgctactctcctccgccgcccgcttccgcgggctgcccgtttccgtgccgccgccgtcttcggcgtccatcagcggtgccgcgaggaaagggccgatgaggcccaggctcttcgttgccgcggcggcggctcctcgcggctccggaaacgttttcgagggattgagagcaaaaggctttgcaagcatgtcatcttcgactggcaatgagaatatgtctactggaactggtacactacctcccatgccacccacatcatcatatattggttcacctgttttctggattggagttggtgtagcattgtctgtggcgtttaccacggtctcttccatgttaaagagatatgccatgcaacaagcatttaagtcaatgatgacccagtcagcaccaaactcatttggctccaactcgcctttcccatttagcatgccgccacaggcatctcctactgctccaagcacttatccgtacttggaaccaaagaaagatacttccccgcatgtgtcaactgttgatgtctcagctaatgaagtggaagccactggaacatcgaaagaggtggatgttactgaaacgccaaaaccttcaaagaagtttgcatttgttgatgtttctcccgaagagttgcagcaaaagaacctccaatcttcaccggagacggtagatgtaaaacatgatagtacatacagtgaaagtaaggaggatactgaggaacaagttcccacaattagtacaaacactgaaagtaaggaggatactgaggaaaaagttcccacaaatggagcatcttttaagctgaacgaaggtgctgctcatgggccaactgaatctaataactcggcatctatgctatccgttgagacaattgagaaaatgatggaagatccagctgtgcagaagatggtgtatccctacttgcctgaagagatgcggaacccaaattcattcaagtaatccaatgtaccgccaacaactacaggatatgctaaataacatgggcgcaactcctgatcaatgggataaccgcatgcttgatcaccttaagaacttcgaccttagcagtccagaagtgcggcagcagtttgcgcaagttggcatgactcctgaggaagtagtatcgaaaataatggcaaacccagatgtagctgttgcattccagaatccaaaaatacagacagccatcatggactgctcgcagaaccctcttaacattgtaaaataccaaaatgacaaggaggtcatggatgttttcatgaagatatcacaaatcttcccccaaattaacggctagctgatcttcgtcgtgggatagcacttctgatttttgtcggcccgtcatctccagtctggagggctgctgcggtagcatctatcaagaaaagggaaacacctttcgggtcatgacgctccgatataccctccccgtgtcaaggtttttgagtttcttatgtacatgagtacatcatgtgatgtagcggccttggtttagctatgagtaattgagtatgacccttgccagttcattaagtcaggctattgacatagcagggtccaagtttttattaagccagccaatcagtggaaaggtgcagcagagacggttcgtatcagatcaattttgatatataattgttattattaatctgtaatatattagagacacaatggcaatgcaagtaatctgttacgacatttcctgacc

SEQ ID NO: 143181 - DNA, 159 bp, Zea mays
  Clone ID: MRT4577_62060C.1
gggtgtgttacgtagttgtggtcgatactcctggaacattgacaggcatacctcttgtttttcaattttgttatgcatcgaattttaacagaacacgtagatccttaatgttctatatagtggatgatatgctgagatgtggttatcgatgaacacgat

SEQ ID NO: 143182 - DNA, 290 bp, Zea mays
  Clone ID: MRT4577_62061C.1
tctccccacgcagacagaggcagcacagccagctgccaactccatccatcctctttctcctcctcgcttcgcttcctcggcggattcctcctccctcgaccgtccccgtccccgtccccttccggcgcgcgagctcgcccgatatggctaacgcgagaccgggcgccgctgcgaatgaccagcgcctgctccagttcgccgagctgccgccgaacaggctgcaccgcttcccacctcccacgatggacgactagttcatggagatcgttgtggaccaggtcgcggatcgc

SEQ ID NO: 143183 - DNA, 236 bp, Zea mays
  Clone ID: MRT4577_62062C.1
cttcgccgactccgcaggcgcggccaccttcaacgacatcaaccgctgcaagacacgctgtggccggccgccctccccggcggcggcgcgcgcctggaccctggcaagacgtgaaccgtgcatgtgccggcggacacggcacacgcgcgggtgtgggcgcgcacggggtgcaaataagacggcagaggtcgcgggacatgccaaacgggagactgcagaggcacgctggcatgcac

SEQ ID NO: 143184 - DNA, 232 bp, Zea mays
  Clone ID: MRT4577_62063C.1
acgcgacgactcatcttatgttaacatccgcggattaaagtgcctacccttacacaacagactaaccatctttgcctatatcaagtcgtattatagcttggcataatcataagcatagctaattgctcagaaaaaccaatatcctgtcacaacataaacacaccataccagccgcaaacctaaatgtttaaacctctggatcctatatcatgaactacactcacattaatta

SEQ ID NO: 143185 - DNA, 247 bp, Zea mays
  unsure (1)..(247): unsure at all n locations
  Clone ID: MRT4577_62064C.1
gcttaaatgattaaagccaataaaaaaccattgttaaaatgttctttgaatgagtataaaccaaaagtaataatacttacgacaatcagagccactatccagttaagtgagaaattttgntttgaatcaatgtctcaagtcatttctgtaattttcctgagatattagttacagcttccttgagacattgattcaaacaaaattttcacattattggtatgtggcgcggatgggcgtnagtatcatt

SEQ ID NO: 143186 - DNA, 269 bp, Zea mays
  unsure (1)..(269): unsure at all n locations
  Clone ID: MRT4577_62065C.1
ttttnnnaagtttgtttttttttttttttttttgttttaannnnttttttttttttagggaaatatttttttgggccattttttgcaaattaatcggtttcattttcccccctgtctgaaaaccaccattgggcgagccccccactgatcacctcatatttggcccttttcccatggaagaaaaccacccgcccccccggatgggtggaccccatccatccctgccttttttccaaggagccaaagagggggaggggggaggagaatcc

SEQ ID NO: 143187 - DNA, 192 bp, Zea mays
  Clone ID: MRT4577_62066C.1
ttctgtttttctttttttgggcgacatcactcgggggtagttcaaaggagattcggcttattctgtgccggtctataagtagcaaccagcaccattcattgagcccattcggagtgaactcgttctgtagaggatgcatagaagcatgtttcaacaggttatatggaagtaacgtgcttaacatgagtttta

SEQ ID NO: 143188 - DNA, 400 bp, Zea mays
  Clone ID: MRT4577_62067C.1
cggacgggaacaaaactaaaaaaaattttttttttctttttttttttaagattttttttcttttcctttctttctttttttttgtctatttccttttctctgtctttctttttttttgtttccggtcttttttcctatctttttttttttgggggggggggggccccctcccttaagggggtatcccctcacaatggcgggcggccttcgagccgccagctcaagggccaagcctggggcgcctagtgagcgagctcactccctttaaaaacggtttgctactgccccctccccagtcttgaaccctgacgccccagggggaatactgagggggccaacgggcgggcccaggccgattacttattgggccctctttcccctcctctctcactgaaacact

SEQ ID NO: 143189 - DNA, 192 bp, Zea mays
  Clone ID: MRT4577_62068C.1
tttccccccaacccccgttacacacgagaatggggataatcccagcaagtaacccttatgcagggtccacattgggagctaacaatgtattaggcccggaatctagctgatctgataaagccaatcaacttgggaacaacccactacagccggtataagggaaatttaaaacataagcatgcccggggcaac

SEQ ID NO: 143190 - DNA, 338 bp, Zea mays
  Clone ID: MRT4577_62069C.1
gatgatttcgaacccagctggcctgctcggagggtatcagtcagcccagtgcatccgaaaaatccacctcaatcagggagctctgctgatgagactagatggatcaacccattgaatagggctcctattgctgcgactggcgccaggccggcttcaccttatgcgtcagagagaagcccagatactattctgtctccccctaggtgtacgactgcacagagcagtgttctgttgatgcaattactaagcatgatgttcctcatgttgagaactgcaacactccaactggagcactagtgcacaactctgaagcagatagcggagaaaggcgtatcaca

SEQ ID NO: 143191 - DNA, 2102 bp, Zea mays
  Clone ID: MRT4577_6206C.1
cattgggtacctcgaggccggccgggacagcgtgtcccgagcgcccgcccgagtcccgagagggctttggtttcgtcgtcaatcgtcatccattcccaaacactctccgtccgtccctcctctcctgttccctccccgagtcgatatctcaccgtcgtgcgagtaaaacaaagcctcgccgccacggcgccacgcgagcaaagacctagcgcgagcaagcaagggaggcagagaccttagtgcgtcgcgcaacgcggctcggcccgacggcatggagagcctcgtcctcgcctcctcctgctccccgtccccacggctgccgctactctccccctccgcccgcttccgccggctgcccggctccatgccacaggcgccggcgtccaccagcggtgccacgcggaaaggtctcaggaggcacatgctcttcgtcgccgccgccaccgcgactccttccggatccaggaacgttttcaaggaattgagagcaaaaggctttgcaagcatgtcatcttcgactgccaatgagaatatgtctactgaaactggcaccctgcctcccatgcctcccccatcatcatacattggttcgcctgttttctggattggagttggtgtagcattgtctgtggcgtttaccacggtttcttccatgctaaagaaatatgccatggaacaagcatttaagtcaatgatgacccaagcaccaccaaactcatttggctccaactcgcctttcccatttggcatgccaccacaggcatctcctactgcaccaagcagtttttcgtacttggaaccaaggaaaggtacctccccacaggtgtcaactgttgatgtctcagctaccgaagtggatgccgctggaacatcgaaagaggtggatgtgactgagacaccaaaaccttctaagaattttgcatttgttgatgtttctcccgaagatttgcagcaaaaggacctccaatcttcactggagatggtagatgtaaaacatgatagtacagaaagtgaaagtaaggaggatactgaggaaaaggctcccagaaatggagcgacttttaagctgaatgaagatgctgctcgtgggccaactgaatccagtcaatcaggacctatgctatctgttgagacaattgagaagatgatggaagatccagctgtgcagaagatggtttatccctacttgcctgaagagatgaggaacccagattcgttcaagtggatgctgcagaatccaatgtaccggcaacaactacaggatatgctaaagaacatgggtggatctcctgatcaatgggataaccgcatgcttgatcacctgaagaactttgaccttagcagtccagaagtgcggcagcagtttgcgcaagttggcatgactcccgaggaagtggtatcgaaaataatggcaaacccagatgtagctgtcgcattccagaacccaaaaatacagacagccatcatggactgctcgcagaaccctcttaacattgtaaagtaccaaaacgacaaggaggtcatggatgttttcatgaagatatcacagatctttccccaaatcaacggctagctggtcttcactgcgggattgcagtcttgattttttttgtcggcctatcatcccctgtgtctggagggcctgctgcggtaaccatctttgaaggaaaagggaacacctgttgctgttgggccgtgacgctctggatacaccctccctgtgtcgagctttttgagtttcatatgtagtagtacatcgtgtgatgtagcggccttggtctagctatgagtattgattgacccaccctcttcccgcttcataaagtcaggctagtgagcgtagcacggggcaaatatttgttatttacattgcatgggcagccagccggtctgcgctctgacgttgcatggtttatctcgtaggatgtgaaaggcgcagcagacagacatggttcgtatcagatcaattttgatatatactaattgctattgttagtgtgtaatacgtcagtgacacaatggcaatgcaagtaatctgtttcgagacttcctgaacaaaaaaaaaaaaaaaaaacccgcggccctcgagctccactgagaaa

SEQ ID NO: 143192 - DNA, 515 bp, Zea mays
  Clone ID: MRT4577_62070C.1
cggtcgcgtgggaaaaaaaaaaaaaaaaaaaaaaacaaaaaaaaaaaaaaaaaaaaaaaaaaaaaaaaaaaaaagctgtaataattcaaggaacaacacttcaagctgatctgtggcgcaattgtaatgtcagtcttgtgtccgctgattgcatcggtacctgccgttcgttagcgcggcggagccgccctggcaaccccctggcgtggcccacctggtggatcctgggctcggcttcctcttttgggccagctcgtgcgtcatcgcctgttcgcctcgcgtcaacacgctgtttcggtgacaattgcccacgccctacgggccggttgcatccgccgttatggccgttttgcctggggggtgaactgactcttattccccgccgttgccctccctgtccgctgcccttaccgccaacctgttttgccacctgcctttgtgtttcccccaacgcccgcggtgtggcgtttttccttttgtgcgctcttcccctttttgggtccctgactcgctgc

SEQ ID NO: 143193 - DNA, 279 bp, Zea mays
  Clone ID: MRT4577_62071C.1
attcagatgataaacggttttatataattactccgaccaaaacacttcaactgaagactggatgtgactatatccgggcgacttggattgaagcgcttgtaactgcatgaagcgtatatacttttaatggggatttatccggtgatcagaatgatgcatcattttccacagaaaagctcagacatcgcttgaatgctgaaggcgttggcgaggccgttattaaagactgtgagcagattattcattcagaattttcgcagtaccaaacacagtgaagca

SEQ ID NO: 143194 - DNA, 739 bp, Zea mays
  Clone ID: MRT4577_62072C.1
caagccagcccacgcggccgctcgtgcagaccatgttcctgtcaagataaatcaagaaccaaaccaaactgcacctatcaggagaatcggcctgctttctaggggacttggatggcttgacaagggcaagcagggaaggcagaattccaatgaaacatctggaggctaaactcatctaaagtccaggatgaagtcatagctcccaacaagatctggattgttcattaacgcttggattgcttgatcaccgtaagagtgttgaaatcagcatcgatacatgttttctcgggaagattcagctggtatattccatgaagttttgcaggaagtgtatcttgtatcatattgagttcaattgtcagataaagttttgttggtaggtcagaaaggcttctgcaagtcatcggtgtaaattttcttttattagttccattaagattgtcaatagttagtgttccaaataggagaaagaaaagaacacgacttactacacacaagaaaaatttctgttagattagttacagtatcatggagttgttctggagaagagcatgttttttttatctcttcagaaatgtcaaaaccaccgaagagattctctctctgtatttttgtctgatacgtgtggctcatacattcttcagtcacagttgacatgtttgatgtaaggcaattattgtcacgaggattctgattacgaatacaacagcagaaactccactatagggaggcgttttgg

SEQ ID NO: 143195 - DNA, 1265 bp, Zea mays
  unsure (1)..(1265): unsure at all n locations
  Clone ID: MRT4577_62073C.1
gtggtctctctcgcgaactgctgcgcaccggagcggctccctccgcctattccctcgtgtcatggcgcttctcctgcgcctcgctgctccgtcggtgccgccccggcggagctccggcctcagagcattgccgcgcgtcgtccttccggaggtcgtttccaaacaatcatttcttcgtttactagttgacagcactgcaagtatgccctgtcctattaagtgttctgcggctcggtgtgccccatcattgactgaacacaacgattctaggaataatggcatccatgcatctagtgtatatggacatgatctcatgaagtccatgtctgatctccaggaagttgtattttcctcctttagcaaagcatgtcttctcagtagttgtatcatatatggtctaccacccagttgtatagcagaaccatgtgagcaagaatactttctccctaacatgcctttgctgttcgcaatagccatggttggtgctactgttggaggtaagctcatcacactcataacttgaaagtttcaggcatggaatgtttgttggagcttgagaactggttgtggatttaagcatgacaatacacagtggacggtttccttctgtttttatgttttctaatcttcattaacatcatcttttgttacaaatgatttaaatatcttaacgccaaaagcacacattgaatcacttctaattccggcgaaatgcaggagtgtggctatgcactcttgcaatttaatacttattaaacacaactttttatgtcttcttattttttccagtttcttatttagcagtgcatttcattaaatttaaaacatatgcatagaaatgcatattcattattcagatgcaacaaatacgagtgcatagaaaattacatctaggagtatcctagttattatcatacctatgttcaattactttttccacagtttccttatttgtcaatgcatttttgttaaatgtaaacatatacacagcaactgaaacagatctaaatgtaacaaagaagggatgcaaagaaaattacattttggagcatcctggctatcttactgactcctggtttccttactttctgcacccagttattgtgagaaagacatctcattgtaaatatgaggaaaggggcacccaaatttgagttgaagaggactttttttttctcgaaagcgtaggagagctacacatcttatatacgaagaaaaaagtccaaaatagaccattacaaaaaaaaggggggggggggggggng

SEQ ID NO: 143196 - DNA, 424 bp, Zea mays
  Clone ID: MRT4577_62074C.1
ttgtcgggaaaaacccaaaccttttattttttaaaattaagggagccgtcaccgtttaaaattaaccagccaaagatttttttggaagaaatggggcgccaacgcccagcctgaaaatggttccttgacccttattccgaacccaagccttaacccttttctttttggggggtgatccttccagccagagccaaaccttagccattttacttttaccggcccttttctttgactgggttgaggaattttggttacccttttcacacttagcttgggaaaattaaattttcagtccacgaaggccctaacatttttggcctaaaggttttttttggttggacttacacaattattttttgagttgggctggcagcttcatggcctggcttccgatcaatgggaccaattattggatttctctggg

SEQ ID NO: 143197 - DNA, 519 bp, Zea mays
  Clone ID: MRT4577_62075C.1
aaggttttaagaccagcgggctattaaccttacctagcaggtgatcttggcccatgccagccacatccaaatgtcaatcttggtggtgctggctgaacacctgactctgctggcggattagaaagcccagaccggatctatgatggtgggctaccatattacttgactgaggctgaagtgcggtagtcgctcaagtgcttcgcacctctgcgtgaattccatcgtgcgaaggacagagatactgctgactgaagaggatatgccttgtgtgtataccaggatcttaccgtcagccacattgactgtggtgcccttaacgggatgaagacgggagtcaagactcttactggccggagggcgaaccaaggagctgattaggctaggccagagcaagatagcatgctgctgcaggcacagttgcacgcgcatatgctgaaactctgatacccagtgagatgagccctgcccacacaagctgtctgcctgacacaggcatagacagccaatgaactgatagac

SEQ ID NO: 143198 - DNA, 631 bp, Zea mays
  Clone ID: MRT4577_62076C.1
cctggccctggatccgcctcccgtctgggacctcctacatagccgccgccgccgatctccgtcatcggcccagcaatgcccgccgccacgccatagctcaccgcgcgatgcccgcgcccgcgcccaaggcgctgccccgtctcctcgccgccatatccgccgccgcctcctcggccactgacctccgtcgtctctccctcctcctcctctccccctccgctcctgtgccccccatccggtgcctcaacaccctcctcatggcgctcgcccgccacggcatgctctcggacatggagtcgctcgccgcccgcatgcctgtccgcaacctccacacctacaccaccctcatcaacgcctattgccacgctggcgacctccccgctgccaagcgccatctgtcctcgctcctgcgcgccggcctcgcaccggactcccacgcgtacacgtccttcgtcctcgggtactgccgcacggggctgctcgcgcacgcctgccgattgttcttgctaatgccgcagcgggggtgcgcgcgcaccccgttcacgtacgcagccctgctccaggggctatgtggcgctgggatggtgcccgagcgatggcggttttcgctcggatcgggcctgatggccgg

SEQ ID NO: 143199 - DNA, 746 bp, Zea mays
  unsure (1)..(746): unsure at all n locations
  Clone ID: MRT4577_62077C.1
ccggccgggatcgccaattgcaacaccaccaaccaacacaataatcgccatggctctcgtgcagaccgaccccgacgcgtatgtgatcaagccagcggcggctgcgcctgccatcgacaccagcgactggcctttgctgctcaagaactacagcgacctgctcgttcgcacatcgcactacactcccatccccaacggttgcgcgccgctatcgcgagacctcaagtcgtacattagctctggtgtcatcaacctcgacaagccttccaacccatcctctcacgaagtcgtgtcatggatcaagcgcatgctgagagtcgagaagactggtcacagcggtactctcgaccccaaggtcactggttgcctcatcgtctgcattgatcgtgccacccgtctcgtcaagtcccagcagggagccggaaaggagtacgtttgcgtcattcgcatgcacgacaagcttcctggaggcgaggcgcagtttgcgcgtgcccttgagacgctcaccggagctctgttccagcgtcccccgctcatttccgccgtcaagcgtcaactccgtatccgaactatccacgagagcaagctttacgagtttgacaatgagagggcagctcggtgtcttctgggtcagctgcgaggctggaacctacatccgtactctntgtgtgcatcttggtcttttgctcggtgtcggcgctcacatgcaggagctgcgccgtgtcaggtctggagctatggacgag

SEQ ID NO: 143200 - DNA, 1398 bp, Zea mays
  Clone ID: MRT4577_62078C.1
ctcgaggccggccgggaggactttcgagtgatgccttactcgagctccttcgtttaaacccaaaccctaattgcgacctccgttcccccaaaaccctacggccatggacggcggaggcggtggtgtagggggaggcggagttggggcaggtgtcatggtgggcggcggagtcgggccgggcggcggcgttggcggtggcggcgacgtggagctcgtcagcaagacgctgcagttcgagcacaagctgttctacttcgatctgaaggagaacccgcgggggaggtacctcaagatctccgagaagacctcggccacgcgctccaccatcatcgtccccgtcgacggcgtggcctggttcctcgacctcttcgactactacatccgcaccgacgagcgcgacgccttcagcaaggagctgcgactccagaccaaggtgttctatttcgatatcggggagaacaagaggggccgattcctcaaggtttctgaggcctctgtcaaccgaaaccggagtaccataattgttccagctggcagctctggtgaagagggctgggaagcattcaggagtgtactgctggagataaataacgaggctaccagattgtatgtcctaccaaatcatccaaatcagcaacacatggagccgccagagcgtcttcctggtctgtccgatgatgtgggtgctggatttatagcaggacatggtagccagtctgcttctgggccagaggtagatgtcgaacgcttggttgatctgcctcctcaagaagaaattagtggcatgggtatgtctaaggtgattagggcagatcagaaaaggttcttcttcgacctgggcagcaacaacaggggccattatttgaggatttctgaggtggctggagctgatcgttcgtctattatcttgccgctctcgggtttgaagcaattccatgaaatggttggtcactttgtagatataatgaaggacaggcttgaaggaatgacaggagctaacgtgcgcactgtcgagcccagccagagatgattacccttgactgtgggcctggcaagactgctgttatgcctcctgtaggtttgccatgtggtgtgtggtaatgtagatcacgccgtattaattcatctggtggggataataatgtctctttttctctttattttttgaattcagtggcgaggattgatttgtttgggactttttttctttctttcagtcggaggaataatatgcagtgtattgttcgtggggtggtataattgtggttgctgcagtgttagccctgttttcatgcttcgctgttcttgtttatgtaaaaaagatgtgtggtatgtttctggcattgagttctttctacacatgttagtgatgcgaaaaaaaaaaaaaaaaaagcggcc

SEQ ID NO: 143201 - DNA, 2280 bp, Zea mays
  Clone ID: MRT4577_62079C.1
atgcctgtcacctgcagcatatatagatccagcctccatccctccacgccatctgcatgcagagttgagaggcaaagaaagaaaaagaaaacaagcatgactcaagctcattcaaagtcatgcttccaacaattttgggatggagttcaagttaagaggaacagtggcagcttcaccatcgagctcctgccatctcttggcgcaacaataaaccaatctaacaagctgcggaagttcatcatatctccctacgatccctgctacagatactgggagctgttcctcatagtcctggtcatttactccgcctggttctgcccgtttgaactagcgtttttgcgggacttgccctctaagcttctgctagctgagaacatcgtcaatggcttcttcgcggttgatattgttttgacgttcttcgtagcttatgtcgacaccaaaacacaccttcttgtggatgaccagaagagaattgcagtaaggtacctatcaacctggttcatctttgatgtatgttcaacagctccatttcaaccaatcagccttctcttcacacgtaaggggaacggccttgcttttaagatactcaacatgttgaggctatggcgtcttcaccgagtcagctcgctgtttgcaaggctggagaaggacataaggttcaactatttctggactaggtgctcaaagcttatttctgttactctgttcgcggtgcactgtgcggggtgcttcaactacatgattgccgacagatatcctgatccagagaaaacatggataggtgctgtaatgcctaccttcagatcggagagcttatgggctagatatgtaactgccctttactggtcgattacaacactaacaacgacaggttatggggatctacatgctgagaacccaagagagatgctgtttgatatctgctacatgctgtttaatctgggcctgacagcctatcttattggtaatatgaccaacctggttgttcatgggaccagccgcacccggagttttagggactcaatccaatcggcatcggaatttgcatcacgaaatcagttgcctgataagataaagcagcaaatgttgtctcacttctgcctacagttcaagacagaggggctcagccagcaagctatgctaaattgtctcccaaaaggaattcgttcaagcatagcatacaacctattctttacaatcatacgaaaagcctacctctttcatggggtatctaataatttcattgcagaactggtaatggaagtacaggctgagtatttcccaccaatggaagacataatgttgcaaaatgaggcggcagcagatatttacataatagtttcaggagtagcgaatttgataacaacagcaaatggtaatgagcaggtgtacgaaaaagttgaagagggagacatgttcggagaggttggtgctctgtgtgacataccccagccatttacttgccgcaccactaccctatcacagctcttgagaataaggaagataagactgacagagatcatgcaagaacacaaggaagacagcaagattctaatgaacaatctatttcagaagctaaagctgcatgagagtttaccagaattaaaacaactagatcgaagattcatgcacaagtacgagctattccatgctcctcaagaagcatggttgttacctcagccttacctgcagtacacagagcacaaattggaagacattcggctcgagagacgatcccaaccttttgtggagattatggttcaacaaaactagcagctgaaacaaaccaagtgaggttgacacagcaaggaaacagccatgaccatggcgattatatggcgacggatgggatggcaggcgaagaaggcgaacgcaatgaggttcacataaactgtgaaaccaaagaagtttccattcatataaaatctgaagattgtgatgcagcaagccattggcaaacagaccatgaaacggtgaggctggggtcttcccacaatacatccgatggcataactatgagcgaaaaccaagacagcagtaacataaaatcatccaacaaaagggtcacaattcacacatatcctcataatgcagcaggttctttagtacagaacgggaagcttatcaacctgcctggttcactggacgagatcttcgaaattggatgccagaagtttccgggtctccgccctacaaaactattcagtggagactatgctgagatagatgacattagtgttatacgagatggtgaccacctattccttcttcggatgtaaa

SEQ ID NO: 143202 - DNA, 216 bp, Zea mays
  Clone ID: MRT4577_6207C.1
acaagaaagataaagacactcactattttttttccttccgaagcatggagggagaggaggaattaacatcgtaacagtgttgttgctcttacacaactgcgacagacgtcccaactaccaacacaaaccgctacaatagtagcaaaatatgctacgaacattcaaccattcacttatcgacagactgattgacccctctaaagcatgccgagaaaa

SEQ ID NO: 143203 - DNA, 260 bp, Zea mays
  Clone ID: MRT4577_62080C.1
cccagagccacagggtctcgtcggtgtaagtgcatgcttgagatgtagcggacggcgatgttcttgacttcaccggcgaccaacgctggcgggtgcctcgccaagatcacgatgaccgagccctctttgatgcgggatctcacctgcctgtagctcctgggctttagaccaccgccagcgccttgctcctgttcccgcttctcctcttcctctcggtcgtgcccgctctcactgcgccgcgacaacgcgccgacggagac

SEQ ID NO: 143204 - DNA, 885 bp, Zea mays
  unsure (1)..(885): unsure at all n locations
  Clone ID: MRT4577_62081C.1
tgcactcaggcacctatcaacctggttcatgtttgatgtatgttcaacagctccattggaaccaatcacccttctcttcacacatccggggaacggccttgcttttaagatactcaacatgcgggggctatggcgtcttcaccgagtcagctcgctgtttgcaaggttcaacaccgatccagctttctcaatatttcgatgacgaatgacaaatggcaccactttgatcgcctttcttctaccagcaggctggagaaggacataaggttcaactatttctggactaggtgctcaaagcttatttctgtaagtctttcagaaattcagaaacaaaaaaaaaatacaggacttacttctccgtaaaaaattgtcaaagcttgcaaagcgtctgtgtttgctgattggaagaaaccttttgataacaaaatgcaggttactctgttcgcggtgcactgtgcggggtgcttcaactacatgattgccgacagatatcctgatccagggaaaacgtggataggtgctgtaatgcctaccttcagatcggagagcttatgggctagatatgtaactgccctttactggtcgattacaacactaacaacgacaggttatggggatctacatgctgagaacccaagagagatgctgtttgatatctgctacatgctgtttaatctgggcctgacagcctatcttattgntaatatgaccaacctgggntgttcatgggaccagccgcacccggagntttgtatttttctcaacttattggcanagtccattaatcctgaactcgggtacttctgcctcactacaatcattcanggacacagatttttanttatgaagtgcatgcataagggacaacacattaaactgagccac

SEQ ID NO: 143205 - DNA, 1194 bp, Zea mays
  Clone ID: MRT4577_62082C.1
cccgttccgtcggcgccccccccggcgccgtcacccagcgcgatggtggcgcagcagatggtaccagtgtgtgtgaagagtgtaaggcgaaagaggaacaatattgtccacgcatttcttattctagcattattagctcaaaatcaatttccacaagatgcaacggtaaagaaaactgcaggaacgaagaaaaacacaaccaagaaaaaccctacaagtggtgacaagacaagcgaaaacaagaagcgcgaacccaagcatggactgaggaagggtaaaagaaagaatgctaaggctgctcatgcacccaatgacgatgcactaacggaaggacgtataggttctgttgacatatcaaatggtgcatgcaattcccctgcattgctaccgggttattaacaactcttacaacatcaggtgttgtaaaccacacaatacttcaggcaaatgaaccaaaaattgttagcaatgaacaatatatttccgatgaagaagcaggcacagtgcagctaccgaaccctgccaaacaagacattctggaagcggattctgcagtggaacaaccatatgttatcaacaacgaacaacagattatggaggaacaaccaggtgtggagaaccaacaaaatgttgcagttaatcagcaacacaaaccagacgaacaagcaggcataatgcaagaacaaaacattggaaatgctttagaagaaaatgtgccagaggatcctacagtttttgctgatatattcaactttccgctgaataatgaactcatggatctctcaaacattgaagacaatctggaggattcaacaggagttcaggatgaacaaactataatgaataatcaacaactgattccggaccaacaagcaggattagtgcaccaacagaaccctgaaaacgccatagaaaaagttgttgcagaggacgaccctgcagtactcggtgacatattcagctttcctttgagtaatcaacttatggacctggactaaggttctgcatagccaatcgccatgggaattgcgttgctgatttatttttttccaagataatgacatgaacctgtatttcaacattctctggtccaaatctgttttgttatcgtgaacataatgctgtatatacaagcgtatcgtcttctctgattattatatatacatggtatatatatatagatgttccagctgc

SEQ ID NO: 143206 - DNA, 321 bp, Zea mays
  unsure (1)..(321): unsure at all n locations
  Clone ID: MRT4577_62083C.1
tttttccccnggtttttttttttagcaacccccaacaaaattgcccctgggggccccaaacccaaaacaaacggaaccaagggggctttggaccttttaacagcccccaagggttaccccgggggtttaaccttccaacacggcaggaaccaccagggcttaatttagggcggggaccttaaagccggcccccgggtttgatttttttggggatttttcaagaaccccttggccgggggcccggggcccccccaaaaccttttttacccatactggaaccgggggccccttgttctggcgcccttcccccctgttttttgg

SEQ ID NO: 143207 - DNA, 298 bp, Zea mays
  Clone ID: MRT4577_62084C.1
caaagtgttgggaatctcaatggcttcaaaagagattcatatatatacgatcccaccaaaatcatagttgggcctgagatatcggaaaatgtattagaatctcacaaattaggtacaggcccctggggttaccactgattaccagtccgctaatcctttttagcgaccccaactcgtctctgtaaataggtggagggatggcggttctaacacgaatggggcccacacactttattagatcaatcacactgtttttttaaagaagctaacggtccccaacaaatttcattttttttta

SEQ ID NO: 143208 - DNA, 375 bp, Zea mays
  Clone ID: MRT4577_62085C.1
gaggaagccgggtatggtgacgcctggacctcctaggaggtttccgctgaggtccaggcgcctcaggcgccgcagggcggttatggaggggcttatctgcccacgcagccagtggttgccactgtcgtggtcgctgaagaagctgtcatgctgccagtagtcgttgcggaggtcgagcccgacgacggcgtggctcctgttgccgcaactcacgccacgccactggcagcagtcgtggccgcgccacgagcgcagccggcccgccgggtcgctggttatgctcgccttgaaggacagcagcgcagctctctcggcggggacgcagctgctgcggacaacggccaaggaagcggcaacggccgtcgtgctggtgaa

SEQ ID NO: 143209 - DNA, 585 bp, Zea mays
  Clone ID: MRT4577_62086C.1
cacgtctattaaacgcagccgcctcctgcttctcgccttccccaccaaatttccgccgaagcagaaaagcatcgtctctcgtctcgtcgaggaatcaacaaccatgggcggtggcaacgcgcagaagtccaagatggcgagggagaggaacctcgagaagctgaagggcggcaaggggagccagctcgaggccaacaagaaggccatgaacatccagtgcaagatatgcatgcagactttcatctgcaccacctctgaagcaaagtgcaaggagcacgccgaggcgaagcatccgaagagcgacctcgtccagtgcttcccccacctcaagccgtgatatctgccaaatcggacggagagagagataaaagagagagagagaagctgccgtaatccacctagtattatcatgttccgcaatgactggttgttgacctaagcatgggtctgaactctggtgtgctgctgtcccagctgctttggttgtgtgcccatctactatgtaatcgtcctctatcagcctgttgtgctacaatatcttaatcctgtgtggatttgctcctcgtgcttagtcagtatgctgtc

SEQ ID NO: 143210 - DNA, 196 bp, Zea mays
  Clone ID: MRT4577_62087C.1
ccagctgagagccgacctggtcagggtagccaagcccattccgttctctcccggcgtcttctccctccggaccggggctcctgcgatggcgggcgtgggctccgcgctgcgtctgctctacctctccgtctacaactgggtcggcttcttcggatgggcgcatgtgctgcactacgccgtcctgacactgcctttg

SEQ ID NO: 143211 - DNA, 874 bp, Zea mays
  Clone ID: MRT4577_62088C.1
ccgccgaagagaaaaagatcgtctcgtctcgtctcgtcgaggaatcaacagccatgggcggcggcaacgcgcagaagtccaagatggcgagggagaggaacctcgagaagctgaagggcggcaaggggagccagctcgaggccaacaagaaggccatgaacatccagtgcaagatatgcatgcagactttcatctgcaccacctctgaagcaaagtgcaaggagcatgccgaggcaaagcatccgaagagcgagctcgtccagtgcttccctcacctcaagcagtgatatctgcccaatcagacagagagagagataaaagagagagagagagagaagctgtcataatccacctagtattatcatgttccgcaatgactgattgttgacctaagcttggggtctgaactcggtgtgctgctgtcccggctgctttggttgtgtgcccatctactatgtaatcgtcctctatcagcctgttgtgctacattaaaaaaaaaaaaaaaaaaaaaaaacatcgacgcacaaagcatagacgagggcgaagaagagatggatccagccgagggccgaaggatactggtggccgtggacgagggcgacgagagcgtccacgcgctgcgatggtgcctcaccaacttcgccgcgcgcggcgacggcgagcttgccccaccggacaccatcctcctgctctacgtccggcccacgccgcccacctactccgtgctcgacgcctccggctatatgtttgccaatgaggcgaccgccgcgatcgacgggtacagccgggcggtggcggacgcggtggtggacaaggcgcagaagctctgcgcgctccacagcaaagagaacggcaaggtgaaggtggatgtgaa

SEQ ID NO: 143212 - DNA, 250 bp, Zea mays
  Clone ID: MRT4577_62089C.1
ttggtgtgggtgttggtcccggaggtagtgaaccaaattgacaaaggaaggcaatcactctacattctgtgccgacaaagttgcaagatgaagatgtctggagtaaagcaaggagttgagagcatgatcaactactattactaaaactaacagggtgtgaacagacttgagaaacaaggggagtgccaaggcacatataggcccataaacctaacgatatatataaaagtgaaaaggggactagcatcat

SEQ ID NO: 143213 - DNA, 207 bp, Zea mays
  Clone ID: MRT4577_6208C.1
aaaccaaaacagatttttaacatttttcacccttcaaacatgaaatcgaacattgtttttgatgtttagaggaaatgccaaatttgaacaaaaacattttgtttttggcaaccagttttttggagctccttccctagcctttttttgcatccttgtaaactaataaaccaagggcttgtgctgggctttaataaaaacaagctcccc

SEQ ID NO: 143214 - DNA, 301 bp, Zea mays
  Clone ID: MRT4577_62090C.1
gttggcatggagcacgactcgcgcccccgacaggtagctgcgcgccagaatactttcggcagaatggagtgtgacagtagaggctcgcgcctttgacaagggtgcatccacagatggccgtcctcgtgccccgggaagctgtctccgtgagaggcatattccatggggcgagcagtaagtgcgagacagctcatctggtagcacttaacaaagaaaagatcacgagggaccggggggacccaggggtagtggctacgtatgcccaacgagtcaaaactggaaggaaaaagtcggatcctct

SEQ ID NO: 143215 - DNA, 331 bp, Zea mays
  Clone ID: MRT4577_62091C.1
aaggcaccacacctcttcttcttcgtcctcctcctcctagcacagctagcgcctgctctccttcgcctgtgatcatgtcctgcagcagtggctagtgcgattgtggctccagctgcgcctgcggcagctcatgcatcggcatgtcccctaccgtggagaccgccgccgttagcatcagcatgaccatggtcctcgccgcgccgaccatcaatgccagcgcctgcggcttccacgccgcaatcgagggcggccgctgcgactgcagcagctggtatctgcggcagcatctgctgatgcacctgctgcagctgcagctgacccggtcaggcga

SEQ ID NO: 143216 - DNA, 690 bp, Zea mays
  Clone ID: MRT4577_62092C.1
agaagaatccaggatggatttgtgtataaatacacacacacgtgtataaatacactcttcgtcagtccacagtacacgtacgtacttgcaccgtactatatgacccctgcgaccggaccaggccggccggatccatgcctgttgccgctgcgggcctacacgcgccaccgacgacgacgaccgttcttgttggttattaatcggcgagcacaagcaggaggagcagctgcctgtgtagctaagggcaggccatggggaggctcgacggcgggctgggtgcggcgacgccgccgtcattcgtgcgcgcggcctggcaggcggtgcggtggtccgtggtggttccggcgctgcagctggccgtgtacatctgcgccgccatgtcgctgatgctcttcctcgagcgcctgtacatggcggttcgtggtcacggggctctggctgcgccggcgccggcgccggcgcgtcgccggtgacgggcagcgcatgctggacgacgacgacgacctggaggccgacgccggccgctgctgccccatggtcctcgtccagatccccatggcaacgagggacatgtgagcgagaccgcttattgattgttgcttgcagttgcagttcgtattctgcttctacctctcgatcgtactagctagctgctgattgattggtggcacacaataaatgtgcaccggt

SEQ ID NO: 143217 - DNA, 510 bp, Zea mays
  Clone ID: MRT4577_62093C.1
cggccgggccggggccgcaaccaccagatcacaacagaaatccaaagatgcgaaacggcgatgtctccgctgccccgaatcgagatgctcgccgtcgccgccgacgtgacctgcaaggtcacgacgaagaacacgtccttcattggagcgaggaacgacctactcccgaagtagggcctcccgaaggggatcataacggactccaccacctcctatcgtttcaacgagggcacgtggggcttcgagatacagcgcgcaggcacctgctaggaatagatcgggtcgcggctctctcaataacagagaaccataagcggaaagctctcgaagggctccatctcagacctgtgcacgcgcaacagagtcaagaaagtacgtcctctggtgctgacacacagggatgggagcgctactacaggactgatccgtccaggtcaagtcctgctacgtcacggacgcggtatcgcactctacgtgtgaccaagtgcgcagctgagaatacaaatatgg

SEQ ID NO: 143218 - DNA, 328 bp, Zea mays
  unsure (1)..(328): unsure at all n locations
  Clone ID: MRT4577_62094C.1
ggcatacaacnntacgtagcgctccttaaattgaatggttaatcttttccacatccttatccattcactaacaaacaagaccagtcctatcatataaatttaaccaccaaaccattaaaaagactcccaaagttcaactaattttagcttccttattctatattaaacaccccaccatcacacctaaacaccctcggaccacatccattgctaaaatttactaatacaatggccattgccaagcacgaattaatatcatatcatgcataagtccacacctattgatctcatatcacaataaacatgatgttcataaaactcatatctt

SEQ ID NO: 143219 - DNA, 504 bp, Zea mays
  Clone ID: MRT4577_62095C.1
ctccaaaaaaaaggggggcagccccatttattataattaaaaccccaggggccccaactatacaaaaaacccttttttttagctttggagagtttttttttctcgaacgcgccccattttttattttagagagaaaaaaaaatcctacaagaggaggattttgctgagcaaaatcatcacccaccccacatcgaaactgaaacaaaaattacttttgatcaaaagagcccaatccgcccgctttaagagtataaattatccctaaaaggctaaggggaggagccccagtcaaaaccaaacatgttagcttttttaaaaaactttggtgcaccttgttaacaggtggaaaatttccttaaaaaaccgaacaatttttttgccgccaaaggccccaggcctccaaaaaaaagcatgggtaatcccgggtctcttctttttatgcacatgggggctcacttttcgccacaaatctgcaaaggataagttaattctgactcggggggg

SEQ ID NO: 143220 - DNA, 257 bp, Zea mays
  unsure (1)..(257): unsure at all n locations
  Clone ID: MRT4577_62096C.1
cattgggaccctcgaggccggccgnggttttactaattcacagaatgcacacaataaggtagttcctgaatttgcatgaatgagaactattttctccacttttggtattagtgttcttcgagatttcatgggcattggtcaattggtgtttctgtataagatgcattttcttcttggcttcttgcttgtctggttgtgataaaagcaaaacaaagtacacaagatttgtagctaattagtttactatttgagttcac

SEQ ID NO: 143221 - DNA, 323 bp, Zea mays
  unsure (1)..(323): unsure at all n locations
  Clone ID: MRT4577_62097C.1
acccgacgtaagctcggaagtcggctcgagctctactcattcagcagatcccggcactcgctctccacaagcagagcaccgcaacagagcgaggaaggagaggctggccatctggcagaagcagggggcgcacgcgccgtagaacgcaacagcccccgcgccggcgcgtcgcccagcaagccccggaaccccgacgagatcctgcgcgacttncacggcgggcacccggccgccgtcttctccggctccttcggcggcggcgccgcgctcgcctgcgtgggccccttctgctccgccaccgacacctaccagcggatgttctg

SEQ ID NO: 143222 - DNA, 1061 bp, Zea mays
  Clone ID: MRT4577_62098C.1
gtcctcgctgatgtcctgaacgcagctagcgaggaacttgagcaagagccaagaggcgcccgtgtgcggttctgccacgtgtcacgtaatcgacgtttccccgccttccgcggttctgccgtcgtgcgcgcgtcacgccgtcacctgaccctcatgacagcacgaatcccaaagcagaaggccaaaaccccgtcatcccagggccacgcggcgggcccgggcggggtctaatcaatcccgcattccccattgcacgccgtctccgctagggttttactccgcagccacaccgcgccgccggagcagcgcgagacccgcgaggcgagccacgcgagagagatgaggctcctgacgcacaacatgctggcgtcgaacgtccggggcgcaaccaccggctacccgctgacgctggaggcgaccaactggtgcaccaaggaggtggagctcaactccgacttcatccgcggtctcctccccaagatcgactggcgcgcgctcgtcgccgccacccgcgcgatcggcctccccgagctcctccccgaggagcagccccccgaggaggagatcttcgccgagggcgccgccgacgtcgagggaagcgccatccgccgcatccaccacgcgctcctcgaggttcatgtccaggagggctccctcgtctgccccgacaccagccgctgcttccccatcaacaagggcatccccaacatgatgctccacgaggacgaggtctgattttgccgtgtcagtttcgccctggcctcttttgctcgcgcacctgctctacatggtctgtcgcgaagggtatcaggccttgtggacttcgtactcagattgtacctgtgaagtatggattgcagtcttgcagattgtgcccttataatatgatagatagccgtgtaatactcggaattgccgtttcgtgttgttaatttggtgcatgtcatgctttgttcttaactgtctgcgaattgtttgctgccctgtgcctgaggaaatcgaagaggtaaattacaaattgtgcacaacttttggcatgaaaattgcgggtgatttagtgg

SEQ ID NO: 143223 - DNA, 389 bp, Zea mays
  unsure (1)..(389): unsure at all n locations
  Clone ID: MRT4577_62099C.1
gggaggttcctccgaggnagaggntcgnncgtttttattaaatcagngntcgnngncacgcaccctcgcctccccagcgtaacaagtgtccttcctccatcttcctcctcctcttccgactggcctcatccactccactcccaagnnncccccancccnaancccggttttccactgcatcgtatgcttagtttcggttacgntccggtcaagaagaacaaaatgccatggtnagtgtaagtcgtcagcgatacgcggtaatgtccttatatatggtagttcacaaaagattagtggtctccacganatgcaatgttttatgctgccattatttcgtcaaacgtcttttttttttctgctcccccaacacgctcattgaatctcgaaaa

SEQ ID NO: 143224 - DNA, 358 bp, Zea mays
  Clone ID: MRT4577_6209C.1
ccctatattgagtctttttattacttgtcttactcagggccccaggggccccccggggaaaaccggcacccgcccacaaggccacacaactacccacccggaagcacaaaagaaaagccggggaagcctaaagagagagctaaccagagaaaaagcgttgcgctcacaaaccgcccaccaaaaaggaaaccggacaaaaaagctgaaacccggaggcgcccaaagcgcggcgaaagccaaaaaaagtggggggccccaaggggccgtttcccaagaccaaaaagacgggcaccagctgattaaccaaaaccgccagcccccgaaaaaggggcagcaagcaaacccccccgcgggggcc

SEQ ID NO: 143225 - DNA, 966 bp, Zea mays
  Clone ID: MRT4577_620C.1
atggccgcgagccgcgggtgcggcgagctcgccgggggcaccgtgcgtgcacgggccgcgccggggctccgcgcgcacgccgaagccacgccgggaccggggctgcgcgaggctgccgaggccgcgcaggggccggggcgagaccgccgcgcgcgccgagcgggggccgacgccgggccgcacgccacagccgcgccatggccgcgcgagctgctgcgccggcgcgccgaggggaggggcgggcggggcaggacccgctgcgccgtgggagggcgccggggccggcgaagccgggccgagcgccaccgtgccgagcacgggccggcgaggccggcggacgagggcgcgagggcggggcggagttcgccgcaccgcgcgaggatgccgagccgccatggctggccgagccgaggggaggggccaggacggggcgccgggccgctaggacggggcgccgggctgccaggccgccatggccgcgcgaacacggggtcgggggcgagcgccgcccacggcgcggggagggcgccggcgagctcggggaatggggagggaggggggaaaggaaggggagaggggagggagaggctcaccgtaggcggggatcggtggcggcggcgggcagcggttccgaacgatgggcgagccgggcggggaagacgcgtcgtgctaggggaaagaaagaaggaaaaagaaaaagaagagaagaaaaagaaaagaaaaacggctgacgggtggggtccacccgggatggcggcggtggcggttgtgcccacgcgcgcgtcgcgcgcggaactcggggagggcggatgggccgccgcgcgccgattcggcccaaggcgggggaggcagctggaggcggctgggccgccgaggccggctgggccgccgcgccaggcccgcagcgggggaaagggaggggggggcggttgggctgcccacaagggggagggggagctgggctga

SEQ ID NO: 143226 - DNA, 363 bp, Zea mays
  Clone ID: MRT4577_62100C.1
acgaacaaaagtccatgattgggaaaaaatttgaaactccccaagtacatggcctcccttgctatacgaaccggaccgggaccccctgagatacaaacctggtgagacactttagttcttgccttaacagatctaaaagggcgggctgacccaaacaactgtgaaattccatcacatccaaattggacagcgaaaggggttccctatgaacaaacctgatggaattctaactagatacggcctaaattgtacactcaaagcgaccaaaagaagcctttactggccttgactccacttgagctcgaacgccaccataggcggtccgtatgctcctccgacaaatacgagaaggcttggacccgt

SEQ ID NO: 143227 - DNA, 385 bp, Zea mays
  Clone ID: MRT4577_62101C.1
cggacgcgtgggtttctcgagaaaaatgtcttgctgtggaggaaactgcggatgtggatctggctgcaagtgcggcaacggttgtggaggttgcaaaatgtaccctgacttgggattctccggcgagacaaccacaactgagacttttgtcttgggcgttgcaccggcgatgaagaatcagtacgaggcttcaggggagagtaacaacgctgagaacgatgcttgcaagtgtggatctgactgcaagtgtgatccttgcacctgcaagtgaagaagcctttttaaataagcagagataatcgagtctctttaattaattaagttattcaataagtaaaccatatataggatggtgttttagggttggtttatgtgtaataatggc

SEQ ID NO: 143228 - DNA, 785 bp, Zea mays
  unsure (1)..(785): unsure at all n locations
  Clone ID: MRT4577_62102C.1
ggaccctcgaggccggccgggagatactcccacaagagagggagggaagcacgtattgtatgatctatcactatgtagcatgacgaccatggccttcctgtgctctgactccaacgctgacccttgcttcaggggccggccaggctctcgcagcagggtcgatcagggcacgggccttctgcagccgtcgtcgtttgcccgtcatacgtcgggncagagcggccagctcgccctacgctgggctgctcggtgtgccccgtctgccgcgcgcgagacgcgcgctggctgtgcgcgcgcgctccgtggtcatggctctgacgagggcgctgagtcgggccgacacgtccaccggcgtggtatcgaagatcgaaggcacagcggctaaaaggaaaggacagcgacaacatcaaataaaggaacttttttggctttgcccacaatgatgtgtgagaagaacatcacgcggctaaaggccgccatgcatgcaaaatatcacatgaggaatacctaaatccgccacgaaagacatactctataagcatcattgagacgggacaactacggcttatactgctagccgcatctatgcagaaggaaagctcagaaaaatcacaggctactaaagtatagctattcattccatgaatctagatctgtatgtactccgctcatcgatggatgatgatacatctctacttgtgttgctcacgtgtacaaaaaataatgcaagaaattaggtacgtacttgagagagaggaagaagaaggggaggcggccctcgagct

SEQ ID NO: 143229 - DNA, 342 bp, Zea mays
  unsure (1)..(342): unsure at all n locations
  Clone ID: MRT4577_62103C.1
aattaaagtttgggtttattttatttggaggaaatttattttatttttttaaatttatttttttaaattatattttatatatttnaccaaaataaaaacccattaaattttactttaacatttgcaacaaacaccaaaaaataaaaaaaaaacatacacacatttaaaaacaggagtacacaaaattttttattcacataaaaaaacattatagcagaaattattcttgaacgtaacacaaatagaagattcaatatagaaactaaccattggaaaacatggcattcccccccacataagacactaaaccttccgaactggtatttatgtctcggcactgcc

SEQ ID NO: 143230 - DNA, 483 bp, Zea mays
  Clone ID: MRT4577_62104C.1
gtctctcccgcctacgatcccggcctgcgacccgcacgacgggccagcaagcttgcagctcatcgaggacctgaccacccacgccggcgccatccagcagcgcgtcctcggcgagatcctcgccatgaacgccggcacggactacgtccgcggcttccttggcgccaacgacgacgacgaactccgccgagggacgccacgccgacgagctcgcggccacgttcaaggagcgcgtgccggtcgtggagtacgaggacgtgaagccgtacatcgagcgcatcgccaacggtgccccctcgtcgctcgtctcctccaagaccatcaccgagctcctcactagctccggcacatctggcgggcaaccgaagctgatgccgtccacagaggaggagctcgaccgcaagaccttcctctacaacctcctcgtccccgtgatgaacaaagtacgtggaaggcctggacgaagggaggtgcatgcacctg

SEQ ID NO: 143231 - DNA, 340 bp, Zea mays
  Clone ID: MRT4577_62105C.1
cgaatataaatgagctccttgcttccttgggctggtataaaaatccatctagttcccacatccctatacaaagaaaactgaacgtagggtgtagggagcgcgtattatttggtggggtatttccaacatggttgactctattcaggattgattccaccttactataagaagaaaacgtctgatttctctttttacatggaacagggaagaatatccatggagcattgcataacatgggcggtaacacacttctttttttggatcctttcttggccctcatcaatcaaaagccaagctttgggaccacctattactattggtttcccctctccgaccttca

SEQ ID NO: 143232 - DNA, 2167 bp, Zea mays
  Clone ID: MRT4577_62106C.1
gaagaagcagcagcaggactgcgcccggcccgcccgacgccatgtccatccgcaaggcactgggcgcggtgaaggaccatgcgacgatcggcatcgcgcgggtgacgggcgccgtggcgcccgacctggacgtggccatcgtgcgcgccacctcccacgacgacgcgcccccggacgagcgccacgcgcgggaggtgctccgcctcgcgtccgccacgggcgccgcccccgcctgcatcgcctcactcgctcgccgcctctcccggacccgcgactacgtcgtcgccgccaagtgcctctcgctgctgcagcgcctcgcctccgccgagggcgacgtggagggcggagccggcacgcggccgttcctccacgagctgctccgccccgccgtctcgggccgccgcgcgggagagcccgtcctcgcgctgctcctcgacttccgcgacgacgcacacccggggtcctgggaccactccgccttcgtccgcgcctacgccacctacctcctcgaccgcgtccgcttcctcgtcctgctcctccccgcgccgccgcgcttttccgacggccgcgtcgcgccgggaccaccgcaggcgccggcggacgacatggacgcggaggcgctcctgggccgcgcgcgccacctgcggcacctgctcgaccgcctcctggcgtgccgccccgcgggcgccgccggtgccagccgcgtcgtgcgcgccgcgctccacccgatgctcagggacagcttccgcgtctacgaggacgtggcgctcctgctcgccctcctcctcgaccgcttcttcgacatggactactccgactgcgtcaaggccttcgagacctacgtcggcaccgccaagcagattgacgcgctccgggccttctatgcctggtgcgaggacgccggcatcgcgcgctcgtccgacttccctgacgtcaagcgcgtcgacgacaagttgctcgagacgatggagcagttcctgagggagcgcggcagggcggggcgcgcctgggcatcaccgccggcgccatcacgactcgcacaccagcctgatgcgaacgcgcaaggcgacgacggccatgtcgacggcatgaacagcatcaaggtgctcccggcgccgtcaacgcgctccatcggcgctgagcctgccacacccagaccggcggaagaggccagtcagtccgacctggtggacctaagagaaactgctgctaccgcggacgaggagggcaacaagctggcgctcgcgctcttctctgcgccgccggccacgaacggcagctgggtcacgttcccatcgggaccggacgccgccccagagccagcggtgacctcggcgtggcacacgcccgccgcggagcccaggaatgcggattgggagctggcgctggtggagacggcgagtaacctctccaagcaggcggcttcgctgggtggcgggatggacacgctgctcctgggcgggatgtacgaccacggcgccgtgaggcggcaggtggccgcgccggggagcgcgagcagcatggcgctgctgcccgggcatcaggtggctccggtgctgatgctcctgggccccgacggcagcacagcgcgtcaggtggccgggggcgacccgtttgcggcgtcgctggcggtgccgccgccgtcgtacgtgcagatggcggagatggagcggaagcagcagctgctggtgcaggagcagcagatgtgggcgcagtaccggcatggtggcatgcaggggcagcccgccgggttcaacaacggcctcgccggcggcagcgtgttcgcgccgaacgccgccatggccgtgccctatggggggtatgggtactattaacgatgcgactgcgagccttgctaattttccgcgatgaatgatgaagtctttgtcagcaaaccagtatcagcagaggtaactgaagtgttgggccaggaagataaggctgaaagtgtccatgggctgaaaaggagcgacagatctgggccagagtggatggcgtgaggcaaatgctgcagcagaagatggccgtaatagtgtcgcttgagctttaagctagtgggctttgtgctggcatgtaataagtagtggaaaggagttggagaaaggcatcaaagattgtaactgaattctgtttcctaagattctctcggctgctgccgttcttcccc

SEQ ID NO: 143233 - DNA, 322 bp, Zea mays
  Clone ID: MRT4577_62107C.1
aggccaaaaatgtggccttccgccaaatcctcacaaggtgactatcctttatttacaggggggttaacctcaagaaacaatttgccttgggaaaatgaggttcccaaactagctctaaaaaacattatgttcaccttaaagtgcatatatgtttgctatagcacaaggaaatacattgatactcaccaaacatgcccaccctaagtattgctgggcccaaatggacatttaccttggacaatagggcccaaccgtgaccttttcagaccattaatattaccgagaggtgcatttatggagaccgtacctctatacatccact

SEQ ID NO: 143234 - DNA, 1204 bp, Zea mays
  Clone ID: MRT4577_62108C.1
cattgggtacctcgaggccggccggggaaatacttaacgttcaaaatcgtgttttctggttttatggttcgtcaatcgaaaacaattgaccaaaaatcttatctacccatatgcgataaaataaaatctttcaattacctgcttccggcagcggtacgatggccgctgcgagaatggcgctcgtctcttgcgcccgccgcctcccgtccttaccctctccgctcaccctctcgaggccccgcgccggcgccgtctcatttctggctgcccagccgtcgccggcgacggcaccgagatccggcaggaatcttgctctcttctgttctttatcaccgacgtcgccatcgctaactgaggccgccgtagcactgccgccaccgaaggctgcggtggaagagacgaagccccctgtgccgagcggggacgagaagggggaaccgactgtggaggagctagcgggcctgctggacgtccgggtgggccgagtggtgaaggcgtggaggcacccggaggcggacaccctctacgttgaggaggtggacgtaggtgaggcggagccccggaccatctgcagcggcctcgtcaacttcctccccatcgaagagctccaggacagaaacgtcattgttcttgctaacctcaaaccaaggaacatgcgtggcatcaagtcaaatggcatgctcatggctgcctctgatgcttcccatgagaatgtggagctgctcatcccttcagaaggttcctttcctggtgaaagagtatggttcggttccgaagaagaaaagaaccgtcaatctgaccctgcatcaccaaatcaggtccaaaagaagaagatctgggaagctgttcagcctcatcttagaacaacagataactgcattgcggttcttggtgataaacaaatgcgtacctctgcaggcctagttttctgcaaatcgcttcagggtgcaagagtgtcataaatctttatggccaacatctttcttgtatcatggaatcgtgtgtcatgtatcttccctgcaaataataactaactatatgaggagagcagcagggaaagaattttctttccaactactgagataatcactgtactggaaccattcacatttagttctcacttttcagtgttaaaacaacgtgcttcctgggctgacgcaataatcttgatgccttggggcgagttattaacaaaaaaaaaaaa

SEQ ID NO: 143235 - DNA, 226 bp, Zea mays
  Clone ID: MRT4577_62109C.1
cacctactcatctcgctcgtgccaccttatcagggggagcacctaggaggtgcctggtccatcatcagagtacagtgtctgtcggcctctgtctctcttggtcgctggttacaaccatcatggcgacctctactcctctggtgcccttgcttctgctgtgcctgggcctccttgagtcctgctccttcacggcgggcaacttggaccaggagctggacatcacttg

SEQ ID NO: 143236 - DNA, 107 bp, Zea mays
  Clone ID: MRT4577_6210C.1
catatggggttgccacaccggccataaaaccaactggggcaataacgatcggcattcctcgttacaaatggagcctgctacctttctgccaatcattcatgaaatcg

SEQ ID NO: 143237 - DNA, 391 bp, Zea mays
  Clone ID: MRT4577_62110C.1
ccggccggaaaaccgacagtaaaacagagcaggagcgaacccaccaccaccggatccacacgacaacgccgccttctcctcccccacctccccttcccactctcaagccgaagccgtaccaaatacacgctcgcgtctcatccgatggctccgctcctttccccgacgctgctagcggacacgcgaagcacctttcgatgggatctgatgaccacctctcgtgctcaaggcaatcgacaatgagtacaagcgccgatcatacactggtagacgaataatctcctcgcgactctttaaatcattaggctaatatcttgaggacgctagctgcacgcggacaaggggaagcacagcattgtgtcctggactttgtcccacttattcatgtgtg

SEQ ID NO: 143238 - DNA, 360 bp, Zea mays
  Clone ID: MRT4577_62111C.1
aggggtgggttgtttaaacaatattgaaattatctgtacatatttccctgggtggggcaccagggttggtgaacaaagacccacggggaggtgggttcacgacttcggaccgaagtactactttactgaaggaaccacggccaaatgccatggggcggtttaaccccagccccaaagataacggcccaaacctgcggatttccgcgggctcctaccacccatccaccgtgcgggtgggctcacttggaagggctaaaacggggggtaacagcgggggcagcttggttgggcgttttctcggacaccagaaccttcattggggtttgccttcccgagggcacccaaaaaccaaactttttc

SEQ ID NO: 143239 - DNA, 770 bp, Zea mays
  Clone ID: MRT4577_62112C.1
aaattcgcaaaccgcgcctccccaaaccctagttcgttccccgccggccgtcacctccatgtcccatggcgccctcctccgaccttcccgcgggttgcacgttcaacccacacgatgccgacctaatctccgcctacctccgccccatgaaccagccgccagcttcctgcactccgccgacgtctacgccgccgatccggccacgctcgtcgccggacacctgcccgcggtcctggcgtcgcccaagaccagcgacgagaggcgctactggtacttcttcggctccgccaaggccaggtccgtgcgcgacaagcgcaggtcccgagtggtcggcgacggcaagggccagtggcactccgagaagggcaggaaggttgtttccgatgaccagggacgaaacatcagaggatacaagcaggagttcacctataagcccaccaacgccgacggatctgaggaggaggtatggctcatggttgagttcggtgtggatcaagaagatgaggacgagaccggcaaatccatccccactctttgcaagatctatccaagcccgcgtaagcccaaatcatctacgcccattccgtcgacatcatcaacacggatgaggaataggaaggccagagatacgccactgccagcatcatctcctgtgactgagacggcggctgcttgtttcccctgcggcaccaattttgcgacaacgacttggatggcgtctcctgggacgagcttcttcaagatcttcatgtccggcctcacacccgaac

SEQ ID NO: 143240 - DNA, 1134 bp, Zea mays
  Clone ID: MRT4577_62113C.1
atgcatatatcttacgcattgcattcattagattgcaatcttgccgacggagagtacgtgctcatccccgagcaaggacctgtccaagaggaggaccaggagcaggcttcagagactgctattgaggatctccccgcagccccagcaattgaaggcaagccccgctatggtgggtacaagtgcggtcactgcacggcggcagccggggtcagtggagcattgtatgccaaggcggtaccattcaggaaatggttgacgatgaattcacccacccccgccagtggaggagactctcgtttcagttctgacttcctttctcgcgatggctttccttccatcttgtgggaagtgcttaactccgccggttaccctacgccccctttgtacacggtgcagttgtatgaggagcatcgggtacctcgttgtcgggtctggctgactttggaggctcatcctcttcagccgggttggcgttctcttgactctgagacgattggactcaggacggacgacaccgttgaagcagcagccatgaagactctgacgactttctgtggctaccatcccctggaaatggtgatgcaccccttgggactcttccctgctgagaagaaggatgatcccatgtggtgtaaccgcgtgagccatgtgaaggatgtgtgggtaatgtatcctgacttggttgggagggtcaccgttcagtgcatgagtgtgctgtaccgtctgcaggcccttcagagcgttgctatggcactccttgctaacaccgctcagactgccaagctcactctcgacagtcgggaagattttgtggtcgacctatccacagagttggtggagaaggatctgcaggtagagaggctgagccagcgcatcaccaccctggagcagcaggtggagatccgagacaacactattgatgtcttggagaatcagcttcacgatgtgcagagggaactcgaagaagcaaatgaccacttggacatgcaccacctggagatggaggccaatgaagcaggaagcgagggagaagaggctcccgaggagctaggaccagcccctggtgtcaatgggactacctccgcgatgcctccttcacccgtatccagtgtcgcttccaccactcagggttaa

SEQ ID NO: 143241 - DNA, 460 bp, Zea mays
  unsure (1)..(460): unsure at all n locations
  Clone ID: MRT4577_62114C.1
gggatcctctacatcggctgccctttttttttttnaacctttttatttttttgccaaaccacgcaccaaggggaccgtttattttaatttacgtatctgctttnccccaatttatcccatgacaaaatttgtggtcttttaacaagaaacaagataggttttatttacacagttgcttcctcccatattaactattttccaataaccagaagacgcgtacctacaataacttttggggtggaggcccggacaaattacgttgagcgtattacaacctttttatccagttacccgccttttttttgttttgatcattggatttcaagtcctttcaaatccactttgggacctttttgaagtttccttctgtttttaaaactttttttatatttttgaggattttatcttttttcttaatttttggctttttttttttttccagtaccatctttttttaatt

SEQ ID NO: 143242 - DNA, 648 bp, Zea mays
  Clone ID: MRT4577_62115C.1
atctcccattcatccctcacaatctgtccgactccggccatctctccggcaaccaccgtatccgcgcgtccacccttcgtagcgacgagaagatgagttctgccggcagcgggaggggcaagggcaaggcggtgtccaagaccgtctcgcggtcttccaaggccggcctccagttccccgtcggccgcatcgccaggtacctcaagatcggcaagtacgcccagcgcgtcggtgccggcgcccctgtctacctctccgccgtcctcgagtacctcgccgctgaggtcctggagctcgccggcaatgctgcgcgcgacaacaagaagacccggatcgtgccgcgccacatccagctggcggtccgcaacgatgaggagctgagccggcttctgggcgcggtcaccatcgccgccggtggtgtgctgcccaacatccacaccacgctgctccccaagaaggtcggcaagggcaagggcgacatcggctccgcgtcccaggagttctagaacctcgcagatcaaactagaactaatctaacaacgttctgggtcaatctggttcttgttattattcatcgtgatatgtcaacgtgaaaacatcttattgatgtctatgatgcggaatgaatggtgaaaacatgtttttact

SEQ ID NO: 143243 - DNA, 290 bp, Zea mays
  Clone ID: MRT4577_62116C.1
cccaggtgtatcgcaaagatataagagctggacactgagctgtgcactgcgaactggaaaactaagggatactctaatggatactccactgcagcgaccggtataccgagcgctctccgatggactaggcggagctggaggccgtggaggcactgcggtggtcatggcactctaggccggcgactacgtccgtcgtcgtgtccatcttcgtgctctgctcggcgctgtggtagccgatggagcaggacatggtgccggtgctactccaggtgctgctctactggccgttc

SEQ ID NO: 143244 - DNA, 398 bp, Zea mays
  Clone ID: MRT4577_62117C.1
cccacgcgtccgcccactcgtccgcccacgcgtccggttgttttgagttgttttttattatctgtagtacttgctgggtaaatctaaagaactggatttgtgtcaaaaaaaaaaaaaaaaaaaaaaaaaaaaaaaaaactaacaaaaaaaaaaacaaaaaatattacaataaaaaaaaaataaaacacattacatttggggcgccccttctataatatccaagcttacatccccgggcctcccaaaaaaaaccttttttatagtcccccctaaatccaatccacttcccctctttttacaccctacttacttgcaaacccctcgccttccccatcttatattgtttgaaacccttccccccttccccagaatgccgtaaaaaccaattgccccttccc

SEQ ID NO: 143245 - DNA, 350 bp, Zea mays
  Clone ID: MRT4577_62118C.1
agcccacccaattccctgcgacttctctaccctcgcctcctcgactccccgtaaggggtcctccttgattaattgagagacgaccgtctcatccaagttaaagaccacatggagcacaatcacgctgtgcgccatattctctagggacccatactctgcatcaataactgactctactaaggtcgcccggccaccatgagcacgtgctacaagtgccacagagagcacatcacgaagcgtgatcactccaaactcactggctcctctatcgacagcattgtgaacaacagcgacactcgaatagatccgcattgtgctgtcagcaacacggcaatacctgcaacccaagt

SEQ ID NO: 143246 - DNA, 169 bp, Zea mays
  Clone ID: MRT4577_62119C.1
gtctcacgttggaccaccagtgctctgcgcacgccctcctcacaaacttaaagatgaacctcctcctgtataagtgcctcacgaccctagaacgaactatgagcgggaccagttatctatgcccctggacaaaattatacacgcatccacggctgctgccatactggaa

SEQ ID NO: 143247 - DNA, 120 bp, Zea mays
  Clone ID: MRT4577_6211C.1
tcatcaggttttggcacatctatcttgtgcaacatctaaggggcccataatcatcaggttttggcacatctatcttgtgcaacatctaaggggcccataactgtggctgctatctccctt

SEQ ID NO: 143248 - DNA, 782 bp, Zea mays
  Clone ID: MRT4577_62120C.1
gcttaagcagccactcaccctgttctcaagataatagtaatggaagcagtgatgagtgcttcgagaattatgcagcagaggaagatttacaccagatcagtagattaaatgtgccgcagcagatttatccagagcatccatcacatatattgacaaactcgactagtgcaaatatcttggatttttccagttcttgttttggtgatgagtcagattggactgctcccagcgcaggaaaaaagctactctcacccttcttgctgtcaaatatgctggatctctcaggtgatctggagttgcacttggggtgccttcgcaaagttcagtaccacctggagtcattgtttgatgaactcctgcaggctgttgaagaagcatgtttagctgatgtgcttgatgaggattctttcaagatgtcggacattatcttgaagttgaaaactagcactagatcctcaagcctgtcactagtttcatctactgatagcgacagaaggaaactatctcatgtgtattggtctcatagcacaggagacgatttacaactatcacatgctgaggttcaagtggatatggtttggcagcagaatgtgccattgtcccccaacggatcaacatttactccatctccttcaaacaattcagataactatcatgtttcttgggtttggttctctcctacatcgcatggaactggcacatacattcccaacatgagttatcatacatacagggaacgtatgatgcttgaaagagaaaccatacgagcaagaaaacaacga

SEQ ID NO: 143249 - DNA, 1045 bp, Zea mays
  Clone ID: MRT4577_62121C.1
gagttccttacatctgcaaaagtgagtttccttgtattgattgaagaaattcgttgataaatcttctatgctcatcaaatagtggcgcgattgacacccttgcattgtgtgcatcacagggatctataagtggaagttcatgtcagctttactaacagataggatccgaggcttgagtgcttgacttctcttcctcttccctcctttgctgagcttcaatggttagctctcatggatttcttctctccctgcaagcattaaccatggtttccacaattatgacaaacactggagtgatagccactcaagggcaagccttctgtccttcttcctcctgtgcccacgcgtccgcccacgcgtccgctttccgtatgcaaggtgacccacaaggttgtggtttcccagaatacgagctggtttgtattgatagcaaggctataattcacatcaataatggacgatactttgtgactagcatctcctatagcaactctactttctgggtcgttgatgctaatttagataacagcagctgccccattcctgcgagcaaccaacgtccctatgtaaatggtttgccatccgaaggtcgcaccctgctggatcctgacacagtaacttgggcggcctttgtgagttgttcagagatgctaagtgacgtttcttccccgttcctcagttgctgtagtggtatttaccagcctgtcaactgccgaagtacgaagaattcttttgcttatgtcttcactaccacattctttcctatggttggagacatcaagccgtcatgtagatacttgcccatgattccttttggaagtcggcatgtcaagcgaccagataatgccagctatgatgatattgttaagtttatgaagaatggctttgctgtaaattttccttatcgcaatggacggtcgtatcatttggtcatcaacacatgccttgaaagatgcaaatgggttacttcaacgataaaatattctaacttcccgccttgggggaccaaaacattggcttggcggttttttggggaatccaacct

SEQ ID NO: 143250 - DNA, 344 bp, Zea mays
  Clone ID: MRT4577_62122C.1
agaactagctcatgcaaacgattcatataatccatagggcagacgtaatgatacagatcggggactatctacatctatccctgcagacagcactgaacggatgtatgatggcatgaaacgtgtgagagaaacctactggggataaacatacaatgaatcgtacaccgcatgagcatagatcagattgaacacttggcaaattgactaatgaacaactagcgtttgatagaaacaagaaacacttaactggcctacgcattcactatcaagattacgatatcagatgacgatatcgactatatatcttatgcagaactgacagattctgaagagcatattgactc

SEQ ID NO: 143251 - DNA, 345 bp, Zea mays
  unsure (1)..(345): unsure at all n locations
  Clone ID: MRT4577_62123C.1
gtgaaaatatggaatgttgatgatggttaatgngtgaagaaatttgagggtgatatgtnaagtgttttaagagnnttattnntttgatgtggaagtaagtttgtttnttgtggaagngatgggggagggaagntatggangataaaaangaatgagtgnattgttangtatgaaaagnangatgggaaggtttgggaattggttgttggnaaaaaaantgaaatgnttgttantgggggaannaattgtaatgttaangtttggganaattgngngatggaagaataaaaggaggatttatttaaaaaggaggaggaagttttaaaaggngaggaattggaaaat

SEQ ID NO: 143252 - DNA, 632 bp, Zea mays
  unsure (1)..(632): unsure at all n locations
  Clone ID: MRT4577_62124C.1
gtggcccgcatggcacatctctcaagtgccaactgactgcctgccatggtagtgtctgagttctgaacagagcaggcgcaggagaagtgaaacatttgttcacttgtgcagcccaggtgtatgttgtccagagataagcaggtgatggctgcgccgatggccgcggcggacggcgggctgaggcggctgttcgagaagccgctgccggagaacccgacgctgctggaggcgctctcggcgtggaaccgcaacgtgcaccaccccagcagcaagccgcccatcgacacggcgtccttcacggagatcttcggcgagctccatttccaggagaagcagcagcccgaccgaggcgccctcctgccgccgtcgccgtcgcccccgccgacgccgctccctccttcccgttccgggaggacggccggttcgtgctgctggaggtggtgatccccgggaaggagctcctgcaggccacgcgcgagggcggccgtctcaggctgcagttcgccaacgctgccgcagcagccgcaggtggtgtgggtgtcgtcnaccaggcggtgcacggaggtgacgacgatggcgacccccgtggtaagaacgcatgcatagacgacgacgaccaccatgacgagcgc

SEQ ID NO: 143253 - DNA, 1161 bp, Zea mays
  Clone ID: MRT4577_62125C.1
caaacatctgagtctagctcctgacagtcacagacctcaaaactgttctgcacatcctttcttttgcagttgcagacttgcagcccaggtgcatgttgtccagagataagcaggtgatggctgcgccgatggccgcggcggacggcgggctgaggcggctgttcgagaagtcgctgccggagaacccgacgctgctggaggcgctctcggcgtggaaccgcaacgtgcaccaccccagcagcaagccgcccattgacacggcgtccttcacggagatcttcggcgagctccatttccaggagaagcagcagcccgaccgaggcgccctcctgccgccgtcgccgtcgaccccgccgacgccgctccctccttcccgcacgctgtcgtggctcgacatcgcggccgaggccgagaagagcaaggacgactcgtcgctggacgcgctgctgaggcccaagccagcgaccaccgtggccacggtgaagaggagcgcgagcttctgcaccaagaagggctcctccgcgtcgctgctgctctgcaccgaggggctcggctccgagagcaccgtggacgctgacgacatgttcaaggacggcgacgccgaggccgaggccgaggccgaggccgccgccgccgcgctcaagggcacggacacggcgaacggcagcgacgccgaggaggcggtgaaggaggagaggcagccaaagacgttcccgccgccgataccgtccatcgggcgcggcggcaagccgtacgtgtgcttccggtcgttccgggaggacggccggttcgtgctgctggaggtggtgatccccgggaaggagctcctgcaggccacgcgcgagggcggccggctcaggctgcagttcgccaacgctgccgcagcagccgcaggtggtgtgggtgtcgtcgacgagtcggtgcacggaggtgacgacgatggcgacccccgtggcaagaacgcatgcatagacgacgacgacgaccacgatgacgagcgctaggtgatcgtcggggttcgttgatgtacttggcatactttatcacgatcgatatcacgatcgataattgtcctactactactgctacggatgatgatgatgatgcaatggtgaatcatgctgatgagaagcatcggctaactaattaattaatgtttct

SEQ ID NO: 143254 - DNA, 646 bp, Zea mays
  unsure (1)..(646): unsure at all n locations
  Clone ID: MRT4577_62126C.1
gggtaccctcgggtcctgccgggnaccttccccacccggacgccaccaccgcctgcgccctgctggctgccgcgatgctgccgtactccggtgaccaccagcgctctccgccgccgcagccaccgccacgagcggcgttctcctcctccctctccccatccgccgcgcccttccccgccgctgatccggtgggcccgggcccaggccccggccgtgatctgcccaccgccccgtccgtctacacggcgggcggggactggggcgccctgtcgtggatggagcctcccgcgagctacatggcccccgccgccacgccgccgggttataaaggcgaggccactccctatgacatatactcaaggaaccacttcagtaacttatttggtctacattctctgagatcagagagctcgaatttgacaagtgagaagcatccaggaaactggcaagaaagttcagagaccctcactaaagattttggaccatcagtgtttcatcagcagcagagtgcctttgtgagtaaattgcttgatcattcaggtgccgaagacacaggaccttatcccccacgacaagatttaaatcaggatccttttggttctacatatgacaaatacatgacacaactttcgtcatgttcaacaga

SEQ ID NO: 143255 - DNA, 317 bp, Zea mays
  Clone ID: MRT4577_62127C.1
ccggtaccggccattcccggggttcagggtgggttcatgattcttctggtcatcctgtgcggggcggtgcattgagtcagctgtgagacatgttctattgagacaggtttggtgcttggtatcagatgttatcttattattcaaacatatactaaactagctgttagtgatactctagttgacttggcttcagggtgtgcttggtatcaaggttaaggaggtgctggactgggatccaaagggcaagcaagggccaaccatgcctcgcctatgggtggggtcctcattttttttgtgtaatgtgcattattaacacg

SEQ ID NO: 143256 - DNA, 553 bp, Zea mays
  Clone ID: MRT4577_62128C.1
tcgaggccggccgggttcggctctatcttattacctcaagtataactagatatattttttgtccgccttttcaatttttccttttatcgtcctgcgtctcttcgtcgtcctcctgctgtggcggccgccggcgatccccgatcggagatactcacattctagttgtccattgtgctgcactgcaggagtagacaatcgtgtttttcagggttttgtctgtctctccttgatcgttcacatgcccgtacagcttaactgctatagctagctgtatatatctggttaaagaggactaatctagcaacaatgtcatcgcttcagttattgcaactaacagaacgggtgcgcaaccttttgtcttcaagaaggagaacacttgcaattgtttctggtgcagtacttgctgttggagctttaccatatgcgcagtcaggtcgatgtaaataaacaccagtaagcaaattcttgctgcgatgcaaactcacatagcatcaataacggaagaattactcagaacggcattgatggtagatcggtctctacaaggaaaaat

SEQ ID NO: 143257 - DNA, 180 bp, Zea mays
  Clone ID: MRT4577_62129C.1
aaaaaatcgtatttcaaacaactcttgagaaaagatcggaagaagatgagcgcaacaccgaagaccgttgggacactcgtgacccttgctgaggatgtgaagtgggaggttgttggaactctcgatggtgaagggagaggtgttttcgtttctttgctttatggtgatctgaaaacgaaa

SEQ ID NO: 143258 - DNA, 289 bp, Zea mays
  Clone ID: MRT4577_6212C.1
gacgatgacgacgacttggacaacgttcctctcgcactttccagggccaagaggggaaacgagaagcagaaaggcaacaatgcaatatgaaggcttcttcaaaagtcaagaaagaagtcagttctgatgatgattttgtcatgccaacggcgcaaaaaaaaagtgcaggtgctgctggaagtattgccaagacatccaaggttaaaaaaattaaagatgaaaatttggaagatctcaaggaggccaggaaaaggaagaaacgagtgggtgtcaaagaaaaggcaaagtt

SEQ ID NO: 143259 - DNA, 231 bp, Zea mays
  Clone ID: MRT4577_62130C.1
cggagggtccacagcttgtgaggtgcgggtggtggcgccacgaggacattggcatcccgtacgagatcgcaaagcgtcggtatctcgcgcaagggatgtgggggatgccgtgaagagagatcgagcctggggctctccggcttatcagcaagcgcagggcgtgccagggggagcctggtgtgcacggaggggcgggtggggggccctccatacgacaccaaaggtgcggcg

SEQ ID NO: 143260 - DNA, 270 bp, Zea mays
  Clone ID: MRT4577_62131C.1
attttatattagcgagtaaataaatggacctgtagtggtggagttaataaaaaagggaaaaaaaaaaaaatataaaaaaaaaaaaaaaaaaaaaaaaaaaaaaaaaaataaaaaaaaaaaaaaaacaaacataaaaaaataaataaacaattataataggggcggcccttctttgggttccaagctttcttcccccggcttgcgacgtgttatccttttttttgggccccctattttcatttccttggccgccttttttcacccgttggc

SEQ ID NO: 143261 - DNA, 175 bp, Zea mays
  Clone ID: MRT4577_62132C.1
ttcactcgtggggggcaagatcccacttcccctattacgcaaaactcttcgggtaagggttacttaaggggcagcaccaaggctatggctgcaggtgatgcggaatacctctactctaacatcgggctcgcctatgttcctactagcgagtggctcgaaaaacacttcatatcct

SEQ ID NO: 143262 - DNA, 710 bp, Zea mays
  Clone ID: MRT4577_62133C.1
gccatgaatccactcctgatccttacctttgtggcagctgctcttgctgccccctttgatgatgatgacaagatcgttgggggctacaactgtgaggagaattctgtcccctaccaggtgtccctgaattctggctaccacttctgtggtggctccctcatcaacgaacagtgggtggtatcagcaggccactgctacaagtcccgcatccaggtgagactgggagagcacaacatcgaagtcctggaggggaatgagcagttcatcaatgcagccaagatccagttccatcaatgcggccaagggcagactctgaacaatgacatcatgttaatcaagctctcctcacgtgcagtaatcaacgcccgcgtgtccaccatctctctgcccaccgcccctccagccactggcacgaatctccaatctctggctggggcaacactgcgagctctggcgccgactacccagacgagctgcagtgcctggacgctcctgtgctgagccaggctaagtgtgaagcctcctaccctggaaagattaccagcaacatgttctgtgtgggcttccttgagggaggcaaggattcatgtcagggtgattctggtggccctgtggtctgcaatggacagctccaaggagttgtctcctggggtgatggctgtgcccagaagaacaggcctggagtctacaccaaggtctacaactatgtg

SEQ ID NO: 143263 - DNA, 636 bp, Zea mays
  Clone ID: MRT4577_62134C.1
gcgggtgttgtagtcttttgccacatgcatgaagcgcatccattactattaaacaaataaatggaaccttaccaccatgtcactcgtcggtgtgccttgtccagacaaggcctgtagcgtttggtcattgatgtggtgcacccctgtcctgtaggagagttaccagtagatgagcagatgagatgatgcttgataggtataagcttgtggcccttgatgtgcataccttgcacttgagatttagttgtataggccggtctcaatgcaggcatgcaacgtcggctctagctcagtaaccttttcctttcacaaagtttagccgtgttgtctgttttgtattggtgatagtgtaactttgaaaaaattactgcttattgtacgttgtttgggttgaggatgagtgggatggaatggctctattctagtcttttaggatgggattcgagtctggtgtttggttggaggggaggacttgtcccagtttctgtatttgaatggagggacgatgagaaggaatttatgttgtttgtgactggttaggatatctgttaagcttgttcggttaggggtggattgatgagagattaaagatgattaaatcccaaatttgtataggagtgggttaaattgcctccc

SEQ ID NO: 143264 - DNA, 317 bp, Zea mays
  Clone ID: MRT4577_62135C.1
aaactccatatgatgccttatttttagtttcatttgggaaaacttaacccactttccaattcctttggcccttcccattacaaaatgttccccacaccccattgaacaaaataaagatttacttcattcacacacacctttaatttttttttaagggaaggcggtattaaatttaaaaaacaaaaatggccctttttattttgttcaccaacagggaggggacccgatttggacaaaaaaaaagaagatggggggtccattaggttttaaaaaaaacattgcacttgggcgcacactttacgccgccagggccaggg

SEQ ID NO: 143265 - DNA, 319 bp, Zea mays
  Clone ID: MRT4577_62136C.1
ttaacgacaacttgtaatattgtcaagtcttcatggaaacatttacaatgtatatgaatgtatgtaaaatttgaatatggtacaaatttaattccaagcaagagcaagctgtgtggctagtgcatcacgaaacatgtccatagttggtgcattaggcatagtcgtaaagccatcgaagcctgttgcaaatttgttatatctttctgggatcggtggaacataatccggatcacgatcaaattgagcgaagtccaagtcttctatcctatgctctcgtatgaaattatgaaggaccatcgtggcaaccacaatcattttt

SEQ ID NO: 143266 - DNA, 2938 bp, Zea mays
  unsure (1)..(2938): unsure at all n locations
  Clone ID: MRT4577_62137C.1
attaatcattcgaaagcccgtttaatcgagagcagcgaggagagcgagcgcaccaattcaccgggatctgagcatccgaccggccgcttgctagggtttcgtccgtccgcctccctgccacagcaccactccgcatccccagccctagcctcgctcggcccgggatcccgcgggggccatggcggctgaagcgccaccgtcggcgtcggcgtctctcctcctcggccccgcggccgcctgccgcggccgcctctgcctccggcggcggcggcggcggggcgcccgggtccgcggagtcgtacatcgggagcctcattagcctgacttcgaagagcgagatcaggtacgagggcgtcctctacgacatcaacaccgaggagtccagcatcggcctgcgcaatgtgcggtcctttggaaccgaaggtcggaagaaagacggagtgcagattcctgctagcgacaaagtttacgagtatatcctcttccggggaactgatatcaaggatttgcaagttaagtcatcaccaccacagccgccaccaccacaagcagcttccctgcacaatgatcctgccataatacagtcacattattctcaacctgcatcaacgtcatcaagtttgccttcagctgggggtgcagttttaccagacttcagctcccaggcagttcaatatgggcttcagaggccaacctttcagagtaaccttcctctctaccaaccagggaatactccgtggggctcttcagtggcacctccagcaggaaatgctccatggggctcttcagtggcgcctccagcaggaaatgcttcaacactttcagttccctcaatgtactggcaagggtactatgcaccttcaagtgggctgccgcatcatttgcagccacctcctttgcttcatccaacaccaggattgtcggttccccagaatctccaatatccaggactaaatccttctttgcaatctgggccgcaaaagctgtcagaactccaaccctcattgatgccacctattactagtcaaggtccttcatcaggtatcctgcctgctacaacagctcctgcttctgctacattattagctccagaaagctcaaagcctctgttgccgaacatgggatcgttgtttgctccacgtgcaacatctcttggtgcaacttttcctttaccaagccagccaactgccgtcgctgaaactagtgcaacagtgtcacagaacttaacttcatttggtagcagcaaggttcctgctcttccaggctcaacactggcataccaaaccgtatctcagtctgtttcttctactattgccccatctagctcagcccaagcggagatgcctgtgcctttgctggcaccatcaggtcaactattgcagaacacatcatccatcctttcatcatcgcattccatgcaggcaccattacagctggctagcaaagaagtcaagccagttgagcctaaggctaaggttgcagaaccgttactacctgaccctttgctaccagatccaccatcacgggctatgcctgaaattaaggagcctatattacctttgccgaaacagacgcctcagaagtacaatggatctggttcacgcaaccaccacaactttaggggccgtggaaggggtagagggagtgcgttttcacagtctgtaacagcattcactgaagaatttgatttcacggccatgaatgagaagtttaacaaagatgaagtatggggccatcttggtaagaaatcccagtcaagggacaaggatggtgaggtgggagatgatgtgtttgatgaagaactggaggctgaggaaactgacaacccagagctagctgttaagcctgtttatgtcaaggacgacttctttgattccctctctagtggaacgtttggacgtggagggccaaatggaaggggaagaccttctgaacggcgcagagtagacacagagacgtttggtgaatttccgaggcacaggcagccctaccgtggtggcggccgaggctaccgtggcggtgggcgttcccgtggttcatattacggtggcagaggctatggaaacacggggaggggtggccctgggaattcttatcctcactggggcaatgggagagattgattatagcagcagcagccatacttgcgggtgttgtagtcttttgccacatgcatgaagcgcatccattactattaaacaaataaatggaaccttaccaccatgtcactcgtcggtgtgccttgtccagacaaggcctgtagcgtttggtcattgatgtggtgcacccctgccctgtaggagagttaccagtagatgagcagatgagatgatgcttgataggtataagcttgtggcccttgatgtgcataccttgcacttgagatttagttgtataggccggtctcaatgcaggcatgcaacgtcggctctagctcagtaaccttttcctttcacaaagtttagccgtgttgtctgttttgtattggtgatagtgtaactttgaaaaatttactgcttattgtacgttgtttgggttgaggaaataaccaaaacttggcattcnagccagcacctctgtgcgcagtcgtgcgtgctcctgtcttacgtgaagttgaccggagtgctgatgcgcaaccgggagccagtggactgcgagaagaggtctctccgccgcgcgcacgcaaatccgcgcaggccttatccgcaaaaggcgttttcgccacaggcgagcccggggagaaaaaacagaccggaaggaggtccgtgggccggaaccgtgggcgagctcgacggcggagcgtcaagaacgtcgagaccgggagaagaatggcataagtgggatggaatggctctattctagtcttttgggttgggtttcgngtttggtgtttggttggngggggggccttgtccccgtttctgtttttgcctggggg

SEQ ID NO: 143267 - DNA, 137 bp, Zea mays
  Clone ID: MRT4577_62138C.1
ctagcgagttcggcagtagaaaccctacaaaaagacaccgccctacccttcgctagcggaaccacactcccctcgatggggtacgggtttcggggattgacgtccggaatgcgcgcgttctggaaacagctggaagt

SEQ ID NO: 143268 - DNA, 664 bp, Zea mays
  unsure (1)..(664): unsure at all n locations
  Clone ID: MRT4577_62139C.1
ggccggccgggactgatcgttgcgccgtcgcctccgacatcgctgcttcctccccacgagcaaccgataatccgccggcgttgagatgttgcgttatcaggatctcctatctggcgacgagctcctgtctcattcattcacctacaaggagctccagaacgacgtcctgcggcgaggccgagggaaagtggggcacccaacgacctgttgatgtggacattggtgccaatccatcctcccgagggaggcgaggacgaaagcgttgatgacacagctgtgcaaggagagttgatatatgatgacacattccgcctacaggagcaacctccttttgacaaaaaatcatttgtgtcttacatcaaaaaatacatcaagaatctcactgctgtgttggagccagagaaactacatgagttcacaaagggtgtcgagggangcaaccaagtttactcgcttagcaagctgaaggacctccaattttttgttggagagcccatgaatgatgatgcgtctgtgcgattcacctattacaatgatggtgccactaatccgagattcctctatttctctcatggtcttaacgacatcaagtgctacgcgcgcggcgaaattagctacccatgctgagaactatctatgaactattattatatcctaaactata

SEQ ID NO: 143269 - DNA, 135 bp, Zea mays
  Clone ID: MRT4577_6213C.1
ggggggggaccccttacaaaaggatgggatcctttaataggctagatagagcataaacctcatacattatgttacctttaacttaagagcaattcaaccattgtaacgcacatgacgtggggttttacacatccc

SEQ ID NO: 143270 - DNA, 298 bp, Zea mays
  Clone ID: MRT4577_62140C.1
cacaggtccttcctttaggtctggttgttgcacccactgcttggttggctggcagctgagagccctgctgtgggacagcgaagggggtcaaaggaagacttgaagcacagagggctagggaggtggggtacatttctctgagcagtcagggtgggaagaaagaatgcaagagtggactgaatgtgcctaatggagaagacccacgtgctaggggatgaggggcttcctgggtcctgttccctaccccatttgtggtcacagccatgaagtcaccgggatgaacctatccttcaagtgg

SEQ ID NO: 143271 - DNA, 287 bp, Zea mays
  Clone ID: MRT4577_62141C.1
ggccggggttgcgtctcaattcctggttgtgttggtgtaagctcccaagtttcttcttttcgcgtgaactaacttgaatgggatccccaagaaaaaagatttcctgccttcggaagccactgccggtgccgcaaccgattccagtgccgcaaccgcttccgaaggtgccagatgtaccccgaccttgttgaaccagtgaacaacaacaacaacaaccaaaattttattattggtggtgcccccttcaccggccggttccaagccggccgccacttatgaacctctcc

SEQ ID NO: 143272 - DNA, 300 bp, Zea mays
  Clone ID: MRT4577_62142C.1
ggcgcggacgagaactaactgccgtcggaaaaccctagagcgctcgaccatggatccgcagcagccggagcctgtcgggtacctctgcggagagggcggagctgagaacaccctgaatcccggagatgtcatccaagtgccgggaaatgtggctaccagtatcctgtaacaagaagcggacccgccgtattggttcaatatgaatgcgcgctgaatagtgaagacaagggaaaacactgaatatgggtgaactattactcggcacattacctaggtaaacaggctcacgggggaaatgaa

SEQ ID NO: 143273 - DNA, 1433 bp, Zea mays
  Clone ID: MRT4577_62143C.1
cactgttcatgcttaccctggagcttaattgtttgggtcagctctctctgtgagcatgcttagtttgggccagcaagtaattaagctgacgcatgtgggtggtaatttgtgacttgcaatacgctgaggtctctgcagctgctcgcccacctcgtcgctgtcgccctgtccattttcttcttgttaatagcggctggagtgttgctgttggtggatgctcttccttccctggccctgctggtagttgatttgagtagcagtggcagtgtcaacagtttcctttgagaggtaggtgctgtgcattattgctcgtctggcatggtatgctgatacatatatcagccagtcaatcacacaccaccacacatcatacccaaacaaaaagatatgggcacaccaagcagcaggcagctgctgctcgtcgcagccgtgtgcctcgtcgtcgtcgccgtggacacggcggcggcggcggcagcggcagcggcagcagcgatgcgcggccggcgtcgcgtgcacctgcgggtgtacatgcacgacgtgatccgggggccggggcagacggcgatccagctggtctggggcgtgggcccgccgcacgcgaccatgccggggcggtccttcggcgacacggcggccatcgacgacctcctcacggagggccccgacatcggctccgcgcccgtcggccgcgggcagggcacctacatgctcagctcgcagcgggaggcggtgctcgtcgtggacgtcacgctcgcgctcaccgcggggccatacaacggcagcaccatcgtcgtggccggccgcgaccgcgtacaggacgagacgagggagctcgcggtggtcggcggcaccggggacctccgcggcgcctccgggtacgtgctgtggaggacggccaaggtgtggtcggaggtgcacatggcgctggagatcgacgtgcacgcgtccgtgccactgccactgccggacgacgacgacaacaacgaccttgttcttggcagcagggatgagtgacgtgagacatgcatggttctctatctatctctgtctagtgtctaggagaacctccgattccatttatgattacataaatataaaaggagcttcaattttagctctgcatacggttctcaatgcatgagaaatataaacaccagtaccaaatttagaacttgatttaaatggagccaactaatctacgaggggcacagtaatgctcgtaccctcacaccatgtgttgagtttgtgatccaaatgttgtgcaacatctttcagcaattggtatatatagtgttcagccaatgtatattcttctaatacataggagtatctgtctattcaataattagtagatatagattcttcaaagctgtaatatatttctcatgcattgagaatatatagtctgagctgaaattcaagctccttttaag

SEQ ID NO: 143274 - DNA, 791 bp, Zea mays
  Clone ID: MRT4577_62144C.1
tggctccggatagccaaacaaaaagatatgggcactccaagcagcaggcagctgctgctcgtcgcagccgtgtgcctcgtcgtcgccgtggacaccacggcggcggcggcggcagcagtgatgcgcggccggcgtcgcgtccacctgcgggtgtacatgcacgacgtgatccgggggccggggcagacggcgatccagctcgtctggggcgtgggcccgccgcacgcgaccatgccggggcggtccttcggcgacacggcggccatcgacgacctcctcacggagggccccgacatcggctccgcgcccgtcggccgcgggcagggcacctacatgctcagctcgcagcgggaggcggtgctcgtcgtggacgtcacgctcgcgctcaccgcggggccatacaacggcagcacgatcgtggtggccggccgcgaccgcgtacaggacgagacgagggagctcgcggtggtcggcggcaccggggacctccgcggcgcctccgggtacgtgctgtggaggacggccaaggtgtggtcggaggtgcacatggcgctggagatcgacgtgcacgcgtccgtgccactgccactgccggacgacgacgacgacgacaacgaccttgttcttggcagcagggatgagtagtaacttaattagtagacgtgagacatgcgtggttctctatctatctctgtctaggagaacctccgattccatttatgattaaataaatataaaatgagcttcaattttaaaaaaaaaaaaaaaaaggcccctaaagaagggggggg

SEQ ID NO: 143275 - DNA, 213 bp, Zea mays
  Clone ID: MRT4577_62145C.1
atcaagctgaagcacatcgactcattttccaaatttgggcacggacgcttgggggctacgggggagaagcagaggtgctttggcaagctcatggcgtaaggtgctgcggcgcagcgaagttccatttcttaaaataatgaaactgggatacttttggttggtaaccttgctgtaccaagtgttggaggcatggtccatgcgtatatggattgg

SEQ ID NO: 143276 - DNA, 608 bp, Zea mays
  Clone ID: MRT4577_62146C.1
catcagctaaataatagtagaacttactgctaagtctatacactctgctacagtaacacgcctcgagtacctctgttgtcgacaccggaagtctcctacgcacccagggaagaaatcaatggatttagaatattacaaaattcactgatcaggagtctcctaattattaggtcaccaaaccagtcctttcttcagcttcatgtatcaaaactctcatcacatatgctctgacaacaaaatgatctgttcggcaacctgggctagaagactgtcgccttgtggagaatctatcagatgatccagttctacatgatctggatgaagcttttgcttgttagttggactacacaggtcactgctctcttcaggaacaacacgttgaggggtgctgttaatagacatacccttgcgctttctgcgattgaatgtgtatttgatgtgtctggcaccttcagcttgcatggaagctccagaagcctttgtatgatcttttttgttcagggagctgccaactgaaacatcatgtttctctaaagcttgcacgggaactccagaagacgccttcaaattttctttgtctagggagctaagagtcgaagcatcagtct

SEQ ID NO: 143277 - DNA, 125 bp, Zea mays
  Clone ID: MRT4577_62147C.1
atgaagcttcatgcatggaagctcgagcatatctttcaagatttggcatctagctacctacacttactcctaggatcagactctattaatggatgtcgtatccgtcctgcgatctgtgtctaaat

SEQ ID NO: 143278 - DNA, 153 bp, Zea mays
  Clone ID: MRT4577_62148C.1
aagaatgagaggggggcccaggtactgatcttggcccacatttaatccagaaggggcacccataatccatgcaaacgaaccaatggccacccccacctaaaaacgcccctaaggccaggtgctaatcacacaccatgcctacggtgagcttta

SEQ ID NO: 143279 - DNA, 1374 bp, Zea mays
  unsure (1)..(1374): unsure at all n locations
  Clone ID: MRT4577_62149C.1
aattcggcacgagggacggacggatcgcccagagaaatccctttctttctctcggcccgaggatctcccctgcctattcgccgtccctctctcctgcccgtccccgtccgccgccagcccgccaccccacggctcacccggccgacgcgccacctccttctctctgttccccgccgacgtggccggcggattgccggatccgcgcgggagagggagatctagacccgtctgatcttgacccgacccgtcccagcggcgcagttcggggaggttccgtgcgggggatttcgactcgggtggtggagctctgggtccttgtgccagacggttacctttgcgtaatctagtaggagtcgccgtgctcagcagttataagggatcgggggctccagattgagtcctgggagagggcggcctcgtgttgggggtaggattttctgttctcttgccgttggttccatggccagcggctctgatcccccgaagcagtacggaataactaagccgttgtcgttgctcgggcctgtggaggccgacctgcagaggacggcggaactagagaagtttttggtcgaggcgggtctgtatgagagccctgacgaatctgctaggcgggaggaggtgctggggaagcttggccagattgtaaaagactgggtgaagcaattgactagtcagagaggatatactgatcaaatggttgaagaggcaaatgctgtactcttcacctttggctcataccgacttggggttcatggacctggagctgatattgatacactctgtgttggaccttcatatgtgaaccgtgaggaagatttttttattgtactgcatgagatattagcacaaacagaggatgtgaccgagctgcagcctgtacctgatgcacatgtccctgttatgaaatttaagttccatggaatatctattgaccttctttatgccagtgtctccctcttagtagtaccagctgagttggatatctcccaaggatcagtcctttatgatgtcgatgaagctactgtccgtagtcttaatgggtgcagagtagcagaccaaatcattagacttgttccaaattttgagaattttcgcacggcattaagatgtctgaagtactgggcnnnnnggagaggtgcttactctaatgttactggctttcttggtggtgtcaactgggctttactggttgcgcgtgtctgccagctctatcccaatgctgtgccaagtatgctggtctcacggnnnnnnagagnnnnnacacaatggcagtggccaaacccggntatgctttgttctatagaagaggaagaacttggtttccctgtttgngatccacgcnnnnntcctcgagatagatgtcatcatatg

SEQ ID NO: 143280 - DNA, 369 bp, Zea mays
  unsure (1)..(369): unsure at all n locations
  Clone ID: MRT4577_6214C.1
gaggagcccagcaacatagcgcncaaganctacatttaaacaaaagaggaggcccaccccatgaacttgaaatcatccgtgccgatgaaaggaagaaccccccacagcatgcgaaggctgcgccgccggcgtcgcaaaagagaaagaagactgccagcactgaaacaagcagttttaaaagactaggtcgagtggaggaagccgacaatgatgcatgcgatatgaacccgtaccttgtgcacgaggaggtaccagcccgtgccccagggaagtaaaaaaaactgacacctatagctagaccaatgcaaccccatcccccgtccgattgggattttagatgggaacgtacaaactactgttttcgcctgc

SEQ ID NO: 143281 - DNA, 305 bp, Zea mays
  Clone ID: MRT4577_62150C.1
tctctttcggctagtacgctcagggggggcctattaaaaaactcgggggttttccaaacagcaaaagttgtagtggactacggccaaccgtgctatgcaactccagtctcaggggctgcagcggtttaggggagaatcgcacttcattggtactagacctatcagcgtaaggtgtcgctttacaccaagggagaagcttgcatccagtataatagccggttcaggtcaagctcaagcagctaggggggctgatacagacaatgtactggctgttgacgggtggtaaggagagacgtgctaggaag

SEQ ID NO: 143282 - DNA, 566 bp, Zea mays
  Clone ID: MRT4577_62151C.1
gatcacgcagtcacgtaaaactttattttgtattatagattatacagttcacaagtaatatttgaaataaaagatagaagacagccttactatcgttgtagtgctagtttgcttgttgctgtttctacgttaccttactctaggctcatcgtaatgcctgaaaaggccaactatcttagctagtattatctcgttctcgaatatttgtcaactgctagtttatttttaaactaaaaagcgacgaataaaaaaacagagggaatatcacgcaacatgagtctccatcaacgtagctcaaacggaacagaatagaatgggaaactggggctccaaaatctggccaggcgcatttccgcctcgtgccatagggaaatgatcacgatgccaagagctttcgttcatcctctcacctacgggtattcctctcagctagaaccgattttgttttctccagaacagcaaagaagatcgacccgccaatgccaatccatagtacccttggctcgatacccttaaaaaatgcgccagcaccttcctctcgcatgatagtttgagcacagtcaatg

SEQ ID NO: 143283 - DNA, 2696 bp, Zea mays
  Clone ID: MRT4577_62152C.1
aattcggcacgaggattttgtagtgtgcatggtatacatttatcgttctgttacccctggttgcactgtcttttgtttctctgctgaagtgaggtatctagtgggaacttttcattctagatattcctgaacttcgttttttgcaatactatttttgtgactttgagatgcatttgtatacaagttcttcaccatcagccttgattcattaggacaaacaggttaattttacaaacatcaatgcagaattccctctgctgttgattttgccaaatctttagtttctttgttgtgtccttaaatgtatgcataaaggtttacatgtttgtcctgcatcatgccgtattatgcaattatcttccttatgatagtgtctccctcttagtagtaccagctgacttggatatctcccaaggatcagtgctttatgatgttgatgaagctactgtccgtagtcttaatgggtgcagagtagcagaccaaatcattagacttgttccaaattttgagaattttcgcacggcattaagatgtttgaagtactgggcaaaaaggagaggtgtttactctaatgttactggctttcttggtggtgtcaactgggctttactggttgcgcgtgtctgccagctctatcccaatgctgtgccaagtatgctggtctcacggttttttagagtttttacacaatggcagtggccaaacccggttatgctttgttctatagaagaggaagaacttggtttccctgtttgggatccacgcaaaaatcctcgagatagatgtcatcatatgcctattataacccctgcgtacccatgcatgaattcaagctataatgtttccacaagcacactgagggttatgttggaacaattccagtttggtaatagaatttgccaggaaattgaaatgaataagaccagctggcctgctctgtttgagccttttcaattttttgaagcatacaagaattatctacaggttgacatcattgctgaggatgatgaagaccttaggctttggaaaggatgggttgaatctcgattgcggcaactaactttgaagattgaacgtgatacatatggaatgctacagtgtcatccttacccacatgaatatgcagacccttctaggcagtgtgctcattgtgctttcttcatgggcttgtcaaggaaagaaggtgtgaaaatacaggaaggacaacagttcgatattcgaggaacggtggatgagttcaggcatgaaatcaacatgtatatgttctggaagcctgggatggagttagctgtttctcatgttcgtaggaagcaggtcccagcttatgtgtttccagagggttataaaagacctcgcccttcaagacatgtgaaccatcagtctgataaaaatgacactgaagatggcacagcgaccaggtctccagacagtcaactgaagagaaagcatgattctgttggaactgatgatatcaggtatgcaaagaggtcatcgaccagcccagttcatccgaaaaattcacctcaatctggaagcactggcgatgagactagatgtaacaaccaaataaaaagggctcctagcgatgcaagtggtggcagtccggcttcacctcaggcatcagagagaagcccagatactattctgtctgcccctaggtgcacgacaacaggagcagtgtgttctggtgatgcaattagtaagcatagtagtgttcctcttgttgagaactgcaccactccgactgtagcagtgtgcacaactttgaagcgcgtagctgagaaagttgtttcagagctagttggaagtgaaaggctggggagcaacaacagtgcggaattgttggagagtatggaaaaggaggatgtccttgctgaaaatgttcgttttggcgggaatggagttgcgcaaggtggccttccagaagagttagagccaaacaataggattgaagcggtttcttgagctgatgcaggtatgaacaagtgtacattgtggaagtcgtcactgaggcatggtcttgaactcatcccttgtgcattcggtatctacattgccctgttttctttatactcggctgtttggtatttctgtgctgctttatggcagggttagtggcatcaaccacacaagattggggaaaaaatggtgtagagatggataagttctacccccttgctggagggaatggtaagtagctcaactcacaagtttccttctggacacagattcgcaattacgggggtttctatgatgatggatgatgggagattatcggatatcatgtcttgcacaacggcatggcaaaaaaaaaacgacgaagaagattttgtggaaggccatggtcgaatgtcatgtcttgctggtacactctagatgagcatgaaccttaagttttcgtttttttttaacttgttgagcagctgactcttgtgtatgaactgagctgcagcgggcttccctgagttgacttgtttgggtctgagatgcttctgccatgttctaggtctagaatagaactagatgcggtggtgtgttctctaccctaagtccccttttgtgccctttccttctgtaatataagatctttgactgtttcttgtgtgtcagtggtaccattcatgtgatgattctgatgagtttttaaggtcacattttctgctaaaaaaaaaaaaaaaaaaaaaaaaaaaaaaaaa

SEQ ID NO: 143284 - DNA, 1304 bp, Zea mays
  Clone ID: MRT4577_62153C.1
cccacgcgtccgcatcatcaagtcaaggaacacttaacctgaagaaaaccactattgcagcagcagtatagtcaacggtgtagcagtagctgcattgcgttattggggtagtagtgtggcagtgttggactgctggtcatcaggtcatggcttcttcttcttttacttccttgtcagtgatggtgctcttgtgcctagcggcggcggcggtggcctcggcgcaactgtcgccgacattctactccaggtcgtgtcccagagctctggccaccatcaaggccgccgtgacggccgcggttgcgcaggaggctcgcatgggggcctccctgctcaggctccacttccatgactgctttgtccaaggttgcgatgggtcggtgctgctgaatgacacggccaccttcaccggcgagcagaccgctaatccgaacgtcggctccatcagaggcttcggcgtcgtcgacaacatcaaggcgcaggtggaggcggtgtgcccgggcgtcgtctcctgcgccgacatcctcgccgtcgccgcccgcgactccgtcgtcgcgctgggagggccttcgtggagggtgcttctcgggcggagggactcgacgacggcgagcctaactctagccaacagcgacctgccagcgccgtccctggacctcgccaacctcaccgctgcgttcgccaagaagcggctcagcaggaccgacctggtcgctctctcaggcgcgcacacgatcgggctggcacagtgcaagaacttccgggcgcacatatacaacgacaccaacgtgaacgcggcgttcgcgacgctgcgcagggccaactgccccgcggcggccggcaacggcgacggcaacctggcgccgctggacaccgccacgcccaccgcgttcgacaacgcctactacaccaacctgctggcgcagagagggctgctacactccgaccagcagctcttcaacggcggcgccacggacggcctggtccgcacgtacgcgtccacgccgaggaggttcagcggggacttcgcggcggccatgatcaggatgggcaacatcagcccgctcaccgggacgcagggccagatcaggcgcgcctgttccagggtcaactagctagctacgtactcgcggctatagctacctgtgcgtacgtcccaagtgatccgacgatccaacggttcccatcagtgattatcactgtaataaggccggttgtgccattgtcagttgcgcctctgttttgcttgtactggttcaagaactcctctttctcgagtcagcaaaggtgggtgtgatatgactcgg

SEQ ID NO: 143285 - DNA, 1504 bp, Zea mays
  Clone ID: MRT4577_62154C.1
gtaaaagttatttcgtattatagattgtacagttcacaagtaatagttcaaataaaagatacaagtacagtccttaaagacagccttactatcgttgtagtgctagtttgcttgttgctgtactctgcttatcgtaatgcctgaaaaggccagctatcttagctagtattatctcgttctcgaataggttctcgaatatttgtcaactatttgtcaactgctagtttatttttaaactaaaaagcgacgaataaaaaaacagagggaatatcacgcaacatgagtctccatcaacgtagctcaaacggaacagaatagaatgggaaactggggctccaaaatctggccaggcgcacttccgcctcgtgccatagggaaatgatcacgatgccaagagctttcgttcatcctctcacctacgggtattcctctcagctagaaccgattttgttttctccagaacagcaaagaagatcgacccgccaatgccaatccatagtacccttggctcgatacccttaaaaaatgcgccagcaccttcctctcgcatgatagtttgagcacagtcaatgaatcctctatattggtttgtttgtccctgaatcatcaatcttgtcttcatgacatcgaggggtgttgttaaagcgccagtaatggcaccagcaaaagcaccaataattgcagtctctgtgtcgtgcaactccctcttagccgttaatcgataaccaattcggagttgctcatatatgcaaaattgaatggcatcaaatggcagatctcgcaggagaaaggaaccatagccagcataaagacctttaattccttcttgagcaaggataaggcgaacggcatcaggtgcagtcttgcactgactcatttgcattctttgtttcaccacctccgtgggaacacgaatgagagaagaagcagcccctccaattgctcctgcagtcaaatgagcaatagcgctcaaatttttaggaaacaattccagtagttttcttttagctggttcatatactccaacaaaaattgcagaagcgggaagaacaccgacaatatttccagctaacccatcatacatgcctttccattgaattttacttccgccttgtgcagcctgaagcctggtctttattgtatcaataggatataaagctgtttcaacaacaacaccagcagctcctccagccaaggccccctcaaaaaggacttggaggagatcgcacgattccccatttccacctccgcccatgcgcttgtcaagacttctctgcacggttcagtcggcaattacaaaattcgatgcaagaaaagagaggagatgccagcagattttgctgagtcgcccaccccttgtagatgctccaagatgcacaagaaatcgatcctaacggcaccgaatctggcggtggaaatgggggtggtggggatggcgagaaacggggattagggagggttttgccgccggaaaagtgggcggacgagtgggcggacgcgtggg

SEQ ID NO: 143286 - DNA, 2678 bp, Zea mays
  Clone ID: MRT4577_62155C.1
aaccgctaaaaagtctttgaaagcatgaggaagacttttataccccgacaaaggtgatttttgatattggagcagttgtcaacgagctgcaatcctgaacctgatgcgcatgcccctctgaggaaattcaagttctatggtctctctattgaccttccttatgccagggtctccctcttagtagtaccagctgccctggatatctcccaaggatcagtgctttatgatgttgatcaagctactgtccgtagtcttaatgggtgcagtgtagctgacccaatcataagacttgttccatattttgaaaattttcgcacggcattaagatgtttgaagtactgggcaaaaaggagaggtgtttactctaatgttactggctttcttggtggtgtcaactgggctttactggttgcgcgtgtctgccagctctatcccaatgctgtgccaagtatgctggtctcacggttttttagagtttttacacaatggcagtggccacacccggttatgctttgttctatagaagaggaagaacttggtttccctgtttgggatccacgcaaaaatcctcgagatagatgtcatcatatgcctattataacccctgcgtacccatgcatgaattcaagctataatgtttccacaagcacactgagggttgatgttggaacaattccagtttggtaatagaatttgccaggaaattgaaatgaataagaccagctggcctgctctgtttgagccttttcaattttttgaagcatacaagaattatctacaggttgacatcattgcttgaggatgatgaagaccttaggctttggaaaggatgggttgaatctcgattgcggcaactaactttgaagattgaacgtgatacatatggaatgctacagtgtcatccttacccacatgaatatgcagacccttctaggcagtgtgctcattgtgctttcttcatgggcttgtcaaggaaagaaggtgtgaaaatacaggaaggacaacagttcgatattcgaggaacggtggatgagttcaggcatgaaatcaacatgtatatgttctggaagcctgggatggagttagctgtttctcatgttcgtaggaagcaggtcccagcttatgtgtttccagagggttataaaagacctcgcccttcaagacatgtgaaccatcagtctgataaaaatgacactgaagatggcacagcgaccaggtctccagacagtcaactgaagagaaagcatgattctgttggaactgatgatatcaggtatgcaaagaggtcatcgaccagcccagttcatccgaaaaattcacctcaatctggaagcactggcgatgagactagatgtaacaaccaaataaaaagggctcctagcgatgcaagtggtggcagtccggcttcacctcaggcatcagagagaagcccagatactattctgtctgcccctaggtgcacgacaacaggagcagtgtgttctggtgatgcaattagtaagcatagtagtgttcctcttgttgagaactgcaccactccgactgtagcagtgtgcacaactttgaagcgcgtagctgagaaagttgtttcagagctagttggaagtgaaaggctggggagcaacaacagtgcggaattgttggagagtatggaaaaggaggatgtccttgctgaaaatgttcgttttggcgggaatggagttgcgcaaggtggccttccagaagagttagaggtatgaacaagtgtacattgtggaagtcgtcactgagggttagtggcatcaaccacacaagattggggaaaaaatggtgtagagatggataagttctacccccttgctggagggaatggtaagtagctcaactcacaagtttccttctggacacagattcgcaattacgggggtttctatgatgatggatgatgggagattatcggatatcatgtcttgcacaacggcatggcaaaaaaaaaacgacgaagaagattttgtggaaggccatggtcgaatgtcatgtcttgctggtacactctagatgagcatgaaccttaagttttcgtttttttttaacttgttgagcagctgactcttgtgtatgaactgagctgcagcgggcttccctgagttgacttgtttgggtctgagatgcttctgccatgttctaggtctagaatagaactagatgcggtggtgtgttctctaccctaagtccccttttgtgccctttccttctgtaatataagatctttgactgtgatcagcatggacttttagtttttagtttttacttgttgagcagctggcttcccagagttgacttgtttgagtctgtgatgcccctgccatgctgttttctagaatagaactagatgagatgctgtgtcccctaaggcccttttgtacctctcctttgtaatataagattttttttgactttcttgttagtggtacctagggatgaaaacggtcggaaacggtatttattcggttttctgttttggcgctcattgcgaataaataggatatggaatatacaatacaaatttctcgtctggcttctagccgccagcttgttaagattcataaaagataaacctcaaattcatcctacattttctcaaataatagatataaacttcggtaaaaaaaaaaaaaaaaaaaaaaaaaaaaaaaaaa

SEQ ID NO: 143287 - DNA, 560 bp, Zea mays
  Clone ID: MRT4577_62156C.1
cgtacgggcggaccggtcgcgtccggaacacatcaacggcgccatccccaggcgaggtcaacaaggatggacagatggacagcatcatcgacgaagaggatccatgaccgtgtgaagcttgggcagacaggccgctgcacacatatagttccgactgaggagggccaagaatgaccagcctgatcgcggatgcctcatagagcggagaggctatcatcaccatcaggcatgcattgggtcccaagacccccttcttgcgcgaggacaccgccctcgaaaccgaaactcccatcccatatgatgtggatcgatgatctcctaggcgaatactaaggtgcatggcccatctacctgcatgacttctacatctgtgataatctaatgcgtgcaaccttgctctctctgattgacatgatcaaccggatgtgctgttcctgtctgaagatatgccagtccaggcgctgatctgggtgtctccgctcgctttataccaggcacttgcatccgagagggactactggatatctttgcattattgctgtgtgaacgcacgctctgtg

SEQ ID NO: 143288 - DNA, 1339 bp, Zea mays
  unsure (1)..(1339): unsure at all n locations
  Clone ID: MRT4577_62157C.1
cggacgcgtgggatttggctcctagcgatgcaagtggtggcagtccggcttcacctcaggcatcagagagaagcccagatactattctgtctgcccctaggtgcacgacaacaggagcagtgtgttctggtgatgcaattagtaagcatagtagtgttcctcttgttgagaactgcaccactccgactgtagcagtgtgcacaactttgaagcgcgtagctgagaaagttgtttcagagctagttggaagtgaaaggctggggagcaacaacagtgcggaattgttggagagtatggaaaaggaggatgtccttgctgaaaatgttcgttttggcgggaatggagttgcgcaaggtggccttccagaagagttagagccaaacaatacgattgaagcggtttcttgctctgatgcatggttagtggcatcaaccacacaagattggggaaaaatggtgtagggatggataagttctacccccttgctggagggaatggttagtagctcaactcacaagtttctttttggacacagattctcaatttcgggggtttttatgatgatggatgatgggagatttttgggtatcatgttttgcacaacggcatggggaaaaaaaaaacggcgaagaagattttatggaaggccatggttgattgtgccgttacaacgcatccctttcacactcgtgtgcacctcccgcgatgacatttttatttggtagagaagccagggagggaaatgaatgtgtacaaagaaaaggactgacatgttgacactactttaataatggacataaacatactacttgtggtgatttgagcatgaacccaactagggatgaaaacggtcggaaacggtatttattcgataatcagttttttagtcgtttttctttgatcgcgaataaataggatatagaatctataatacaaatttgtattcttgtttttaacatccagcttgtaaagattcataaaacgtaaacatcaaattcatcctatattttctcaaataatagatataaacttcggtatggattcggaaacaaattcggtaattttttcaactttttgtgttgtagggagcaaataatacataaaaaaaattatgtaatattttattcatatttgtactaatgtgctagataacataagaaaaatcaacatcaaatttcatatatatctattttaaaatattaaatttgcggtcgcagttcggattaccactttcatccctaaacccaacaattatggattttggcggtgtgaaatggcaaattccatataagttggatgacctacaataaaattttnccattaaacatgttaattcgga

SEQ ID NO: 143289 - DNA, 479 bp, Zea mays
  unsure (1)..(479): unsure at all n locations
  Clone ID: MRT4577_62158C.1
ttcttattcctctaagctatcgccatgggcaaagacaagactcacatctacatcgtggccattggccatgtccactctggcaagtcgaccaccactggccatctgatctaccagcttggaggcattgacaagcgcgtgatcgagaggttcgagaacgaagccgccgagatgaacgagagggcgatcaagcacgcctgcgggcttgacaagctgaaggccgagcgtgagagggggatcaccattgatattgccctggagaagcncgagagcacacaagcactactgcacggtcattgatgctcctgtggaccggtgcacttcatcaagaaaatgagtactggtacctcccagactgactgcgctgcgcgcatcattgactccaccactggtggatttgaggttgaaatctccaaggatgggcagacccgttgagcatggcctccttgatttcagtcttggaaggtattatatgatctgct

SEQ ID NO: 143290 - DNA, 201 bp, Zea mays
  Clone ID: MRT4577_62159C.1
gctgtatgtattcaccgacccacctttgctgggtgatcagaggctcaattaaaactggaggtttctgttatctatcccatacctacaccggacgactacaatgagatcatcctatcctacggtcgagacgtgagtatacttaattgattgataccagcttagggctatgctataacattgcatacatatggaatcagcgat

SEQ ID NO: 143291 - DNA, 314 bp, Zea mays
  Clone ID: MRT4577_6215C.1
gggggggcgcgtgcaccaactcggataccctatagagcccgccccctttttttttttttttgtggtgggcgttcacaaccacaaacaattttatttcatatccccccttgtgggggctaccaaaaaacaagccccagagtcctccaagaacaccgtcccccccttatgggaggaagaaaaaaggggggtttgaggaaggcacagactccattggaattccaaatatcacctcttttacccccacacacctggcaacccgactccacccctaacacagtcgtaattacaccactcgcccccgcctactgagggag

SEQ ID NO: 143292 - DNA, 333 bp, Zea mays
  Clone ID: MRT4577_62160C.1
cattgggtacctcgaggccggccgggactaaccaccaagcgtccaagttcctagcccacaatgacgaagggaacttccagcttcggaaagcgccacaacaagacgcacacgctctgcaggcgttgcggtcgtcgctccctccacatccagaagcacacctgctcctcgtgcggctaccctgctgctaagacccgcaagttcaactggggtgagaaggccaagcgaaggaagaccaccggtaccggccgcatgcgatacctcaagaccgtctcccgcaagttcagcaatggtttccgcgtcggcgcacccgctggtgccaagggccccgcggcc

SEQ ID NO: 143293 - DNA, 275 bp, Zea mays
  unsure (1)..(275): unsure at all n locations
  Clone ID: MRT4577_62161C.1
attttgcagttttgagtagtatgataaaagagataagaattcaaaccattaagtacctacctaaatactacatgtaaggcactgtgtttntatttcattcagctgaggtataagcagctgtactcaaatgttcttaaaaatgagaacagtggggaaattgtttataatcattggaaatgaagaaattccaattggctatatctttacttcagcttttcttgaacaatttacagcattgattttcaaactgtgtctactggcacccttcccctttg

SEQ ID NO: 143294 - DNA, 285 bp, Zea mays
  Clone ID: MRT4577_62162C.1
gcggaacatggaggtccagaacttctccttctcctagcaaatgctggacctcctctactcgagggcgcgcccaaccaatcatgacgagcgcattatcctgatcgacatttgcgtacagaggggcctgtctaacaaatccatcgacccgttggaggacccttatcagttccgctgcatgaccctcattccgctttctaccatcttccacttcgtgtgcgacctctgctgcgccaagttctcggcgctctccgcaccccgttgcgccatccgttgtatgggttgcat

SEQ ID NO: 143295 - DNA, 485 bp, Zea mays
  Clone ID: MRT4577_62163C.1
cctcgaggccggccgggtgtacagaaggaaaacatatttactgaggactccttgggaatgggatggatatatatctacggctgacttgtttaaaaaaaaaataaaaaaaaaaacacagctcgatgcagcattggtccacctgtgagcattggcgatctgcttgctgaaccttcctctgttgccaaggatagaccagcagaatctgtgtaaccatagtacttctgttcacgcttttgtattataagctgtctcataaagggaaacctcaaagaaggctgtactctagagaaacttatgatgtgaaggatatatgtactctgtatatttactgttttttttcgtattagaagaataccgagcagaattgtttgttctttttcattcttgaccattcatttgctgattgtaatcaagtacttgaaaacttcggtgaaatgaaatgtttctaattatggcttaataaaaaaaaaaaaaaaaaagcggcc

SEQ ID NO: 143296 - DNA, 228 bp, Zea mays
  Clone ID: MRT4577_62164C.1
cctgcgtcccctgcccaccatggccacccaccgcctagtaatggtccgccacggtgagagctcatggaaccaagagaaccgtttctgtggctggtttgatgcagaactgagtgagaagggggcagaggaggccaagcggggggccactgccatcaaagatgccaagatagagtttgacatctgctacacgtcggtgctgaagcgggctatccgcaccctttggaccat

SEQ ID NO: 143297 - DNA, 450 bp, Zea mays
  unsure (1)..(450): unsure at all n locations
  Clone ID: MRT4577_62165C.1
cttcgccggaaatccacaaaatcttaaccctacccagctttcaaatagcacaaggaaaacccccaatagggatgggcttgggaaacaaaggcccaaagggaaggggagggggggggggggggggnaaattaccagaggtggggggaaactttggggggaccacaaaacttttttgttccccccggtttttcaggaacctaccccaggaggggccccggcgggaatacccgcctaattggcagtaaaacattgggcccccgggaatagtccctagtcttatcccacccaaaccgaccggggccttagggagaaaaaaaatttctcaacttaaaagccacctgtttaccaccaaaaaggagggctctccctgacccagggccccccctgttccgttcgattttcccatgggaccaacccgggccctggaaaatcccaaagcccccggcttcc

SEQ ID NO: 143298 - DNA, 1604 bp, Zea mays
  Clone ID: MRT4577_62166C.1
ggaccctcgggccgggccggggccgaaaaccagcactagaaaatcgatgacctaaattccatagagagagcgagagaaaaaaatcccaatccatccaccctcgccgcgagatcgccgggcgccgccatgtcgactccagccgccgcctactacgccgccgccgcgcgcaagcaatacttttgctaccaatgcaaccgcaccgttctcatcgcggcctccgccgccgccgccggggagctctcgtgccccgagtgccacggcgacttcctcgaggaggtcaccgtccctgcccccaccttcatcccgctgcccttcccgttcccctttgcccccaccacgatccccgccgccagcaccaccccggcccccgccccagcagccggctccggtgggtccccttccttatcgtcctcgtcctcttccgccgcgacctccccttcccagcccaacgacatctcctccatcctcaactccttcctgggactaggcgaacaacccatcagggtcggcggctctgcctcgcgcgccgccgccggcacggccacccccgagaacgagcccgagcccttcgacccggtcatgttcttccagaattacatccatagcctcgttgagggaggcgccaacatccaggtcctcctcgacgacgccagcgtcaccctcggctccggacccggcctcgggcgtatcggcggggcaagctttggggattacttcgtcggcccaggcctcgaacaactcatcgagcagctcgccgagaacgaccccaaccgctatggcacgccgccggctgccaaatcggtcctctcctcgctccccgacgtcctcgtgactcatgccatggtcgcagctgcggagggcgctgagtgcgccgtctgcaaggaggatttctcgcctggagaggtggccaagcagatgccctgcaagcacatctaccacactgactgcattgtgccgtggcttgagcttcacaactcgtgccccatctgccgatttgagctgcctactgacgatcctgattacgaggggcggaagggcactaatcctcagccggctgttggtgtggctgctgctgcatctgggagctctactgctgctgagggacagatggaggagaggcaggagaatccaagggtggttgagaggaggttcaatgtgtcgctgccgtggccattcagtggactgggagggcaaacatcgcagcaggatgggaacagtggaggcagtggtagcaactcacaaggaaatgcacaggatggtgacccacccagcaacaagaattgatcacaaatcagctggaggttacaccttgtggcgatccgttgagaagtctgcagtatttatgtgtcaccatgacttctatacctacaggaatttacagtctatttgttatggaacaatcgttttgttttacttccctttgtcgctgttggttaggtcatgtagacaaggcagcgaaagctgccctgcagcggaatccgcgcgttgagagggtcgagactttgtgtagatttattggttggtcctggtgtatgatgaaatggtgaaatcccaaatccatgccgtgcatgcgaaaaaaaaaaaaaaaaaaggcccctagggcc

SEQ ID NO: 143299 - DNA, 1234 bp, Zea mays
  unsure (1)..(1234): unsure at all n locations
  Clone ID: MRT4577_62167C.1
tctcgagttttgttttgaaaagtgaaaactatctatctcattgggtaaacaacatttatcactgttctgaacaacatgtctggggtgacagaataaataggggatatgtaacagcaaaattacagaccaacaaccacacgattcatctcaaactacaaatttacactcctgccgtggcgtcccacgaccatgtcggcgacgacctcgtcaagcagcgagcccagtacgtggttctccacctccacaccagcctcgaactcctccaccaggaagtcgacccatgtgcccagcccgctgctcatgtccttgtcgacaagctcatcctccgtccagtctcccatgctcttccagctggtgatctcactgcagacttgggcctcaacgccccggatcagcgctgctgctcccttgctccatgctgcatatcctgcccggaagtaggccgtgcgccttgtctccaggcactcatttacgcagtcgaacaacagccgcctgtaccctccacggcaaaagggctctttcccttgtttgttgtacacatgcatgttctccaatttctggaagagggacgagtccaaagctggtctatcctgatcgacaaagagtggtcccagttcatctgttgtcaagttgacactgcttaacacgtctgcaatgtagtccagctctgtgtgtcttgatgttttagaacattgggtgacatctgaaatatctgatgtatctacggatgcggaagaggctgagtctgttgttgtctttgcctcgatatcaactgatgctgggtcaatcaagaaattccctttggcattcttaacatcaaaaattgatgaataactcttacccccaccgctgctgcctgaacactcggaagaccagcaactctcacttagagaggttggttcaagcacagataggggacttagctcttcattttcatgttccttccttgcattacttatgctgctgcattcttgttcttccacctttattttactgcctcggaaaatttggccttttgctgaagggcagtaatcatattgagaaggtttgacttcagaagggctacagtcaaatactccactttccgagccccaattgctgcatgaagaggttggtggttcctccaaggtaaaagtagcaggcacaaatgtgtcacctctcgtaaaggtgattgatggatcaatttttgatgttagctccttcagctcttttntaggagaaggctcaatgcanc

SEQ ID NO: 143300 - DNA, 556 bp, Zea mays
  Clone ID: MRT4577_62168C.1
aatctcacggtggacgcgaaagagaaaccccctcaccacttccccagcctcgctaaagcgcccgccgctccctcctctcctgctctgttctgctctgggctccggccgctttcatcgtcgttgccagcgccgctgccgctccgatcgctgctcttgccccgccacagccccctccgtctccagattaccatgggttctgttggcactggattgctgaaaggcttgaggagagtcttagagcagcaaaggaaatcagttgatttatgcagaacatcacgagcttggagttctacagtttctttctccgatattgatgagaaggatgacatgggtgatgatggcgatttgaaagattcaaggagagagttagaaccccaaagcgtggaccccaagaagggctggggattccgtggcgttcatagggctataatatgtggtaaagttggacaagcgcctgtgcagaaaattttacgtaatgggcggacgataactatatttactattggaactggtggcatgtttgaccagagggtaattgggtctgcggatacaccaa

SEQ ID NO: 143301 - DNA, 668 bp, Zea mays
  Clone ID: MRT4577_62169C.1
ttttttttttttttttatttcctttttttttttttttttttttttttttaaacaggggaaagcgggtggttttatttcatatataatagtaatgtaaattggagtcctctctctctctctctctctctctctcctgtctgctcgctttcttctcgcgcggggcgggaaaaccggaaaaccgccgcctcagctccgtttcgccggggacccagctgtgacttaaggcaattattggaatatcgaggatttgctgatggctggcactatcataatggatgattctgctgcaagcaccagtggtttgggggatcacaatgtctctgctgattccctttctgagtggcgctcctgcgaacatgttgataatgggatcccttcaacatcccctcccttttgggacaccgatagtgaagacgatgatcctgggcctagaccttcagatttatttgggcggtatacttggaaaatcgaaaacttttcaaaggagaagaagagagaaatgaaaagtgaaccgtttgaagctggtggctacaagtggtatattctagtttaccctcaaggatgcgatgtctccaatcacttgtcattgtttctttgcgttgctaatcatgaggaacttctcccaggatggggccattttgcccagtttactatagctgtgggcaatc

SEQ ID NO: 143302 - DNA, 266 bp, Zea mays
  Clone ID: MRT4577_6216C.1
cgccatggctatcctcgccgttagctctccactcaaaagcctaaaccctatgcccggggagcacagccgctgccgcctctcctcttccctcctccagcttccgctaccagtgcacgatggcgccgcctccggtgctccgctcagtagagtgaggcggcggcgcagccacgtcgacaacgatcgcgcgtatcccggacatagcctggagcaaggagctctgcaactcggtgcggctcactgggactgtatgcaccgacgtagagctg

SEQ ID NO: 143303 - DNA, 513 bp, Zea mays
  Clone ID: MRT4577_62170C.1
aatacgagctcctctcccctgctctcctccacccctcccatggccgcccccagttcctgggcctccccgttccacgaaaagagagcttagcgctaccaagctctccgtcctttcgagttctcggctgctttctccgtcccggtcatcaatcttcgtcgagcagagagagagagaaggaggtggtcagatttgcgcgagatccatggggaagtacgtggagctgctggacatgggggtgcgcatcgccgcgcggttccactcccactgcccgcagacggcccggatgtactaccaccctcccgcctcctcctcggccgcccccggcgccggcgacgccggcgggatggtgcccggcgaaggaggcgccgtggccatggccatgatgaagaggcagcagcgggccgccatcgacgccacggagattattctctacaccgtcgtctaggccggctgctgctgcgctcatccggatgtatcccgccattgaagagagagagagagatgctatcttct

SEQ ID NO: 143304 - DNA, 610 bp, Zea mays
  Clone ID: MRT4577_62171C.1
ccccgcgtccgcaagctgtttgtttcatggggtgcggggaacgaggaggtcggggagctcgactccatcgacgcaatgaccatggagcagctcgccaaatccctcgccgacgagctctgggatcagcctgctactactactcatcatcaagaacagcagcaagtagaattatcggatgcaggggcggcaactcacgaacacgacaggattcccctttctcggagacatgagccgcaggtcgtacgccgaggctgacgagggcttcctcccgacgacggcggccatcagcgcaggcggcaacgacagcttgttctccttcaccggcggcaagtcgaagcagctgagcttcgcttctcgagagccgaagcacgaaagcaacggcggcggcacaactgcagctgggacaccgatggagagcagtaaaggagggcggagggcgagctccggcgtgcatgagcacatcgtcgccgagaggatgcgccggcagaagatgaatcaccagttcgcggctctggcgtccatgatccccgacataaccaagacagacaaggtgtctctcctggggagcactattgagtacgtgcagcacctcaggggcaggctcaaggcc

SEQ ID NO: 143305 - DNA, 291 bp, Zea mays
  Clone ID: MRT4577_62172C.1
atgcgccacgtttatgattgattggatccacgcgtcggaggagtagacgtatgtgagcatggatcgctgctacgcttgctaactcaccttactcgcctgtgctatggatcatgtgtgtagggtgcgcaatgatgtcattaatacctgccctaccggtctctacaaagggcgaatatcacgccactgacgacctgtgctagagaagtccgaactaaggcaccaaaactcggaagtaaggcacgcgtcatatggtcgttctctgcatagaactccgccactcctgtcacagca

SEQ ID NO: 143306 - DNA, 1043 bp, Zea mays
  Clone ID: MRT4577_62173C.1
gcggccgccggccgcccgtcctccccccccgcccagcgaaccaagagagcagggtgtgggcgaagagaccccagccagtcgatcgttcaagaaaaataccagcttaccaacaacagcagcagcaagcccacccgttcgacgacatggcccgcctcggcgccggcgccgtgttggcgctcctagtggcggtcgcggcggtggccgcgttcctcgcggtgccggcctcggcgaagtccggggagctgagcgcgatggggttgctggcggcgaagggcggcagcggcgcgggcccgcagaagtgctcgggcgcggtgggcgagtgcgacgtggacgaggcggaggagctcgggctgagcggcggcggcctcggctccgacgacgcggtgcggcggacgctggcgcagcggaagccgaccaaccggtacatcagctacgcggcgctgcgcgcggaccaggtgccgtgcaacaagcgcggccggtcctactacagcaactgcgaggcgcagaaggccgccaacccctaccgccgcggctgctccgccatcacgcgctgcgcccgcaacatgaactgagcccagcgctagctgctgccggggcgcgccgtcgtcgccgagccggtcggtctggtctggtctggtctgcctgcctgccaggtcacgcagcctggctccaccgatcgcacaccatacattgacgtcgtcgtcgcggccgtacgtgccgttggacggtggaggaggcggtggcgctacgacagtatatatatacacaattacacatacacaccccaaaaagaaaagaaaaaaactactgccattgctgtcgttgtgcgtagcttctctctatatatatacccgtatttaaattctcgacaaaatttgtttgaccacggtgatctgtcatatatgtcgtccattgatttgtgttaatttgacaaaagacgttgaaaagaagctgcactactctactgtgcatcaaaaaaaaaaaaaaaaaaaaaaaaaaaaaaaaaaaggaagaggcacaagaagaataagactttaagtaaa

SEQ ID NO: 143307 - DNA, 219 bp, Zea mays
  Clone ID: MRT4577_62174C.1
aaaaaaaaggaactaaattactctattatggggccccataagaagacttccgtaaacatggttacaacacactcgcagtaataaactgggtaaaaaatgctacttttcatgcatctcacaagttgccttcaggtacaaaccacaatcatccacaggggtcacagacttcctagaggacagaccaccgcccgagaactgtgtcgccctcggagctgtgtg

SEQ ID NO: 143308 - DNA, 365 bp, Zea mays
  Clone ID: MRT4577_62175C.1
ggacttctgtgttaggggggtttttgtatatggggggtttttttaaaaccgtacagtttggtttttttttttttaattaaaataacttttttacagggaggtattaaaaacaacccctatttttaaaagccctgggttggggggttccccccccacatttttttttaaagagggggggattttacaaggaagcttccaactcctaattcaaaacttgatctgttaagctttaagccccattttcaccggcggggggaattttgaaaccaaaaaaagtgccttgccacaccaaaccaaaaaatttaagggtaaccattaacctttttcggtttttaaaaaattgggggggggggaactttttttta

SEQ ID NO: 143309 - DNA, 462 bp, Zea mays
  Clone ID: MRT4577_62176C.1
gaataaacttgggaagagttgttttggacgatcctatttaacgactggcagctactatgtttgagaatggagatactactataagtaagctggagctttaagtattgcttgaaaggatcaaagaaaacaaggaaatactgaagaaaaccaaaaaaaagaaaaaaaaataacggggcccccccttttttttttttttttaaaaccggcgccaccaacataaatatccatgaaaaacataagcgttaaacacaaacataagtctgaaacgtcggaagctctctcataagttttaaacaaaaacatatcgtttatccataatttgtgaaggctaaaacaacgactcatggaggtggtcggtttggcccgggttgttttgggctgaacctttccggaaggttgttggatgcccccccaaattggccactattgtggaagaaaataggctcaactggggggaacaat

SEQ ID NO: 143310 - DNA, 268 bp, Zea mays
  Clone ID: MRT4577_62177C.1
gtgaattctctctcctactcaatggcttcacagcagcacactggagccaaggaaaacaaatttggggcaaatagcaacggaggaaagtacaatggagtaccaaaggcaagcagatggcaacagagaaaagtcttcacagatggatatctgaagtctcttttcaattgcaccacctctcggataaagaaacaaaggcgaactgaatctttatcttctccctactgaaaatgaatgattcattatttaacaaagcagaaatgatcatttc

SEQ ID NO: 143311 - DNA, 175 bp, Zea mays
  Clone ID: MRT4577_62178C.1
ggaacataggagcatattactggtggcgatctggagtctgaatgctgactaatgcctgatctttttgatagagctccggatttcaacggaaaaacactgacacagcagcttgataagagatttagagcacatgaggcactttatgagacgatgattgctgactatgctaaatcac

SEQ ID NO: 143312 - DNA, 443 bp, Zea mays
  Clone ID: MRT4577_62179C.1
ttactcgactcggagctctggagggagagatctagcggggcttcggtgcagccgatgcatggcaactcgcaagggctgagctgctcgacactggcgtaggaaagtgtgccagtgtcgtccaactgggagcgtgacagcagcgggaggcgccatggacagggacagcagcttgtcggtctcggcgtcggacgggagctcggaggcgggggagcgcggcgggtgctgttcgtcgccgccgccgtccacgcggagccttgtcgacacggcgggcaacctcagccgcaccgtgtccgacgcgtccacgtccctctcggaccggtgcagcagcgtcgacgtcgaccacagcgggccgtttcagcccgtcgactgcgtggccaagctcatcggacggtcgttccccgccgtccgccgtcgagtcgtttagactgttcaacattaagccc

SEQ ID NO: 143313 - DNA, 422 bp, Zea mays
  Clone ID: MRT4577_6217C.1
gaaaagccatggcgtgcactcctcccttacctcagcattcaattcgagcttatgctttgtaacaacattgtgaaaacataaggaaacaaagagtcaatgcagttggtgcattccatgttaataggcatctatccccattttgcccgatgaaatatgtccagggtttttgaaattatcagcattgtatgacaaatgatgccatttccctccaattttcttttgtttgctttcaagcaattgcatcggcatgtttcaatctattgctcttgaaaacataggatgcaatcatttttgtgtaatcatgaatcaaacttactgattcatcgacttgttattgatgtactagtcgatagttattcttttgcctgtttgagtttgtgtttgtacaattataaaatgctagatttttctgcagggctttg

SEQ ID NO: 143314 - DNA, 207 bp, Zea mays
  Clone ID: MRT4577_62180C.1
ggatttccagtacactcatccttagcgttaccaatagctccgtattcagttaaagagatattaacttaccatacctataacaccctattctcagaaggccttatttctccaagaagattcttactattcttagacacatgacttttccaacccaataaaaccttcactagttttcatcccacataaaaatcattttttctcttcttt

SEQ ID NO: 143315 - DNA, 284 bp, Zea mays
  Clone ID: MRT4577_62181C.1
ctcaaaactgctggggtaagaagggaggggccttcaccggggaagtcaatgctggggggcgcgtcaaccggggggggccctgggtcattcttggacactctgaaaggagagctctgctgggagaaacaaaagaatctggtggagacaagggggcgtatgccctggctcagggactaaagggcattgcatggggtggggagacacatgagcaaagggaggccggggctaccatggagggaggtgccgcacaaacaaaagcaattgctgagaagatcaaggaccgg

SEQ ID NO: 143316 - DNA, 247 bp, Zea mays
  Clone ID: MRT4577_62182C.1
cttccgcaaactcacaagagaggcagtggaaagctgcgctgacaagtcactagatgcatggttagtgaaagaatagataaaaacttccaaataaaagctgcacgctcagggaccagatgttactttcgttataagagatggatgggcagcacctgtagcattagggggcgattcacgatgcattctagagtgagctgaggattcagaactattaggaatcagcagatcatggacagtcatgctaatg

SEQ ID NO: 143317 - DNA, 475 bp, Zea mays
  Clone ID: MRT4577_62183C.1
caaacaacaagagccacaaatttaaccatgaaaaatccaaaaaaggacttgaawtctgtcccmacaaccaccatccacttctcaaacctatttgagattgtcgcttttcaaacatttgctagatrgctcagcctaaactagtccaaatgatcaaatagtttatcaaacttgggacaatttckccttgaggtctctgtaatagacgcccttttcgtggcagtractgataccatcaactmactgctgaaagagcctcctacttgttcgcttcgggagttttgctagcagcgatcttaatcaagaagtagaaaamacatgatctggaacaccacggtacacgtatmatatatgaaccaagaacaatagaagatagtaccaagaacccagttcttggtcagcctatggaaaggaataagacgaggcatgattaccatagagaatgtctctaggmgcgsatggacgtagaatgctcggc

SEQ ID NO: 143318 - DNA, 568 bp, Zea mays
  Clone ID: MRT4577_62184C.1
gcgcctacaaccgtttcccctttgagcccctacttcttgaaattactgggctgtgtgctaagacctgaaccaccacagcctgtatggccttaccataacgactaatggatatcatgctgctgctcttgctcgcgctaaacctgctgttggctgccaccccccatggttgccaacgatattgttccacgccaggcgtgccaataccactcagtcatgccgactgcgttgttgcatatccacaggcgctgcgcgcacgacatgctgaagatcaaggtgtgcgacaatgtgctcaggatcctgaaggtcatgatcgcgcacttctagcactgctgcccattgctccagaacctggccgaccttgacgacgaattgcgcctgtggaccgacgtcaaggcgaacgacctcgaggtccacctcagcgtgccccttatcctcaacctcatcctaaacaagtgcggcaagatttggccacaggacttgacttgccccaactaagcttgagatccctagcgtgctccatctcgcgattctatttacgagcatgtaggcctcttccaatattagcgaa

SEQ ID NO: 143319 - DNA, 2841 bp, Zea mays
  Clone ID: MRT4577_62185C.1
aattcggcacgaggagactgcttcgctgaatcgtattctcaacagttctcaccgcgacaccgcccatcctctctccgacatcgattcgcgccgagccgccgaccacctgccgccgtctcctccttagtcccagccatggccggcggcgacggcgatcggcatcgcgcgccgaagcggcacaagtcctcggcgccgtcgaaagcggccctggtggacgagagcgccgagttcgactacgctgatgactttgatgacgacgcccacgatgctgatacggaggttaagaagagggattttacgaagctcgagttgaaggtggaccacgcgagccgtccgctctgggcgtgcgccgacggccgcatcttcctcgagaccttctcgccgctctacaagcaggcttacgattttctcatcgccatcgccgagcctgtgtgcaggccagaatctatgcatgaatacaatctaactccccactcattgtatgctgcggtctcagtgggacttgagacaagcactatcatcagtgtcttgagtaaactatctaaaaccaagttgccccgtgaaataattgatttcatccatggatcaactgctaactacggcaaagtcaagcttgtcttgaagaagaaccgatattttgtcgagtctccatttcctgaggtattgagtacccttctgagggatgaagttatatctagagctaggatatctcctgaggattcccttggggcaccttcatttactgttagcaagacatctggccaaatagctagtggacatgaagacctgttaaatggaatggaaattgctgctgcaactgaagacaaggaaacacattcttttgagattgatccttctcaggttgagaatgtcaagcaacggtgcttaccaaatgcattgaactatcccatgctggaggagtatgatttcagaaatgacactgtaaacccagatttggatatggagctaaagccgcaagcacggcctaggccatatcaagaaaagagtctcagtaaaatgtttgggaacggacgagcaaggtctggaattattgtgctaccttgtggtgctggcaagtccttggttggtgtatctgcagcctgtcgtattaagaagagctgtttatgtttggccacaaatgctgtctccgtagatcaatgggcatttcagttcaagctttggtcgaccataaaagatgagaacattagtcgttttacatctgataacaaggagaagtttacagggatggctggtgtggttgttactacatataacatggttgcattcggtggtaaaaggtctgaagattcggagaagatcattgaagaaatccgaaacagagagtggggcttgcttctaatggatgaggtccatgttgtccctgcacatatgttcagaaaagtcatcagcattactaaatctcactgcaagctgggtcttactgctacccttgtgagagaggacgaacgtattactgacctgaattttctaattggaccaaaactgtatgaagcgaattggttggatttagtcaaaggtggatttattgcaaatgtgcagtgtgcagaagtatggtgtcctatgaccaaagagttctttgctgagtatttgaaaaaggaaaattcaaagaagaagcaggtactgtatgtcatgaatccgaacaagttcagggcttgtgaattcctgattcgattccatgagcaacaacgtggagacaagataattgtgtttgctgataatctgtttgcactaactacttatgcgatgaaactgcgcaagccaatgatttttggtgccacaagccatgctgagaggacaagaattctctaccaattcaagaacagtccagaagtcaatacaatttttctttcaaaggtcggtgataactcgattgatatcccagaagctaatgttatcatacaaatatcatctcacgctggttcgagacgtcaagaagctcagcgtctgggccgtattctcagagcaaagggtaaacaccaagataggatggctggaggaaaagaagaatacaatgcttttttctattcccttgtatcaactgacacacaggaaatgtactactcaacaaaaaggcagcagtttcttattgaccagggatatagcttcaaggttatcactagtttgccgccggctgaagaaggacctaatctgagctattacacacttgatgaacaacttgagctcttgagcatggcgctgaatgcaggggatgacatgattggtgttgagcgcttagaagaagattctgatggcaaggctcttattagagcacgacgctctgccggatcaatgagtgccttctctggagctggtggaatggtctacatggagtacagcactgggaagggaaagggtgttcagaagaaacacaaggacccgtcaaagaggcatcatctgttcaagaaacgctatgcgtagcctgttgtgctttgctagaaatgatttggttcatgacgaccttgttttggcatcaaagtcgttggtttaaacacacaagcccatgttatgcacagctgttgctcttggttaggaccatcctaaagcaattgttttctctgtttgagcaaggttactgagctactgtagcgaagaacaattttggtctcaggtttacacatgctgcttaaagttggcatacccggctttcgggcgggacaacaggacgtgtcttcttgaattgccttgtataaacaaacaaacgctaaatcgcaacgcttcttatgtgctgctggttctggcgtgctgtatttcacctgattagtttccgatcatcttgtgtatgatgcgggattgtctatggttcttcctatggttcagttc

SEQ ID NO: 143320 - DNA, 350 bp, Zea mays
  unsure (1)..(350): unsure at all n locations
  Clone ID: MRT4577_62186C.1
ggggcacaaaccaacacggggacatttttatttttccttttattggggggttacacatgacactcgatcaaaggacctggggctttttcagtaatttttacaacaaaatgggcagggatcacacacatatatttttaaatcttcnncattggatgttttgaatgcccgtgcaaaatgtcccaacaaaaaaacaaagcgggcccccccttttttttttgcccttcctggggtgttgccatgccttccaattattctttttttttggccatgcgggggtttttttccaaaggagtggagctttttaaagaggggtgagcgtccttttacctcttactttttctaggtgggca

SEQ ID NO: 143321 - DNA, 332 bp, Zea mays
  Clone ID: MRT4577_62187C.1
ccctcgcgtccgcgcacgcgtggggtgccggcgaggaatagtgtacctgatcaagcggcagcgactctgatctagaaaagagggtgctaacagagcttgcccggtcaggaagtccaggacgactctgaaggccagcggtacactgagatgccagaaggtgtggagttcggcgtctttggtgtcggattctcctgaggaaacatgatatgccactcctgaattgcatgatgacaccgagaaggtgatgaaacgcccgaacgaatcggacgatgctgcgaaaaaggcacagtatggttaagctgcacagcagccgcgttacgaccatgaccgac

SEQ ID NO: 143322 - DNA, 648 bp, Zea mays
  Clone ID: MRT4577_62188C.1
ctcgagttttttttttttttttttttttttttttttttttttttttttttttttttttttttttaaaaaaaaaaaaaaaaagcccctttcattttttaaaaaaaaagcttggcaaaacaccccaaccataggggtcctttaaattaaaactaaaaaccaccggttggccctaaggtaaaccctacttttttttataaataaaagcccccaccttttggggccccccaaattggaatttttttttaagttttccggcccaacaaatgggaaaaacctagccttagcaaaaggccccaagcagaaaaggcggccctggggcttccccctgttttggaggaccccaaccccctgggggttcccccccccagtcaccatgaccttgtggggaacgtaaaacttgggaaagcccatgattttgggggcccccaaaacgattttgagggggccgtggcccttgaggagcgggccggggtacgggtgggccccaccttcgaaggggttaaggggggggatgcctttttggccaaacggaaaaaacctccctttggaaagtttgaacattttggtctcacccgaagcggagcccatggaaatcggctcaatggtcttcagcccctaatatggacccttaaacatttttttataaaa

SEQ ID NO: 143323 - DNA, 290 bp, Zea mays
  Clone ID: MRT4577_62189C.1
caagaccctggcaggtcaggggccctggccaagccagatctggagctgctgctccctgctgcggagaccgcggaggcttcgcgttgaccaagttccttaaagaactggctgatggggcaggaggtccaggcctgggctctcgggccctcctagagggccattggagcttgcagctcagacccccactttgagttttatttatttaaatagtagttggatgcttggcacgtcgtcctgtaataggaaacccttgcctcatcagttttcctgattacaagtgcaatatttta

SEQ ID NO: 143324 - DNA, 520 bp, Zea mays
  Clone ID: MRT4577_6218C.1
ttaaaaaaaaacaaaaaacaaaagaaacaaacaaaaaaaaaaaaaaaaaaaaaaaaaaaaaaaaaaaaaaaaaatagttaaaaaaaaaaataaaaaaaaaataatgttttttcttttgccgcgccccccttttgggcgatttttgcagttttccttccccttgggggccgttcgacctttctttttgggggcccatttccccttttagtgggtcgttttccatttccttggccgcctttttacaccgtcgtgcctggaaaacccttggcgttccccactttattccctttgcagcccttccccttttccccagttggcttattaccaaaaaggccccccccgttcccctttcccaacatttccccacccttattggcaattggcccccccctttagcggcgctttaaccccggggggtgtggtggttccccccagtgtgcccgtttcccttgccagtgcctttgcccccgttctttttgtttttttcccttcttttttcgcccctttcgccggttttccc

SEQ ID NO: 143325 - DNA, 333 bp, Zea mays
  Clone ID: MRT4577_62190C.1
tgctctacgtcaacctccgcgccctcctgctgccggaggcggcgggcaataaccagttaccacccttcgaccaggctctcctctcccccacctccccgcacggtctacttgacgctgatgccatgtggttccaagcgccgagcctggcggttgctgaaccgtcgagcgcttgcgtgagcggcgctcaccagcatcaacaacacctgcggtgccaacaacaccacttcctcggaacatgtcgtccatggcgccgccaccgggcaaacatgcactgcccgaggctcagcagctgcccgagaggcccccgtcgccggacagaactccatacaaccc

SEQ ID NO: 143326 - DNA, 298 bp, Zea mays
  Clone ID: MRT4577_62191C.1
cgtcctgtctggctctcctttcctcctttgtcgcattctgcgtctgcctcggccgtctctcctctcattccaaactcagctcacccggtccgcgtggccctatgtggcatcgtccctggccatccgcctttcgttctcggagcggggtggttccaccagcccgctgtctgcctcacctgccacctccgccgcggaagcgtcggtccccacccggccgtagatgtttctgcctgacctatcatgggggctcttgccccactctcggcgcgcgcggtggttctgtcatcgtgacgtggat

SEQ ID NO: 143327 - DNA, 680 bp, Zea mays
  unsure (1)..(680): unsure at all n locations
  Clone ID: MRT4577_62192C.1
gaaattccccaatccgcacggccgccaactcatggagacttgacaagtccggtcgacggtggcagcgggccagatccggtccttagccgggcgattgcggccagtagtgaaggcccagatccagcacccgaccgtctcgtcgccggcggtctagctgccccgacggacctcccgtgttctaagctgcagccttgtgtggacaagttctccaaggtactctactccgacgtccagaggataacctcgctccatcctttgtcctacccaaccagaccattctccacatgttgcctgcacccctgcgactctagctccgccatctggtaacgcctgagaagaaaactacagctagccttcagatgcatgatgctctgactaccggaaacatcaggactacagatggatagaagaagcttttatcaaagtcttccctttctgacaattgagagaatttctctgcaagataaatttaagtctgttcttgatcatcatctgtatgtagctgcactcaactgaatatggtttgcttggtgtgatctttcctagaacaagaagcttcatgagcaagtagtagaactggagggaaaggctagagcatttcttttatgtactatcaagatattagtccttaatactctgtcttgctggccatgtactanaaatggtgctaccatgtctca

SEQ ID NO: 143328 - DNA, 267 bp, Zea mays
  Clone ID: MRT4577_62193C.1
ttttaatcttcaaagcgtgtgatgggacattttgggacatacaaataacacttcagcagaaggaaaaagccccctcaaggcccagaatgcactcaagaacatttataccaaatgtcttttcaacaagatacaaacctaatcccggctcttgaaggaaagcatcttcaagataccgtgcgtccacagacccaccgttaatgtgactgtgcgtgtccctcctctgaccgacttccagaggctgtggactcatctgcacccccaccttac

SEQ ID NO: 143329 - DNA, 384 bp, Zea mays
  Clone ID: MRT4577_62194C.1
gccgctcttgagtcctgccccaattatgacgatgatccccttatcctacttcaggggcctatctgccgaccacctgctgctcatcttctactctttcctgctgacaactcatgtcataaatatcaacacgaggaccgcctgactagctaacaaactgatgattaacgagcaagcttgaagagccagaatcagcgaggaggcgcggtacgtgccggtgcgcaagttgctgtaccagtccatgactcctgctacagctatgagctctacgacagcagaggcactgactgaagctgcatcgtacgagccgtacgaggtgagccacgcgtgcctgtgctgctcgccgtcgtcgtcgtcgatcaacggcagcagcagctgcgtatacac

SEQ ID NO: 143330 - DNA, 338 bp, Zea mays
  Clone ID: MRT4577_62195C.1
atggggggcaaaataaaagggtaactaaaacttatttagaagccgggttaaagtaaaaaaaagtaggggcaagaggaggtggtgcatttggagcatgggcaagtaagtttgtaattttaaggggaaaattcattcaactacaggtaaaaaatttgactccggggagaaggaggggttttaatccgtataaagggccaccttgtaaggattgatgtttgaaaaaaaaaacttttttccaggcttaattttattaaaatgaggaccaaccgatagaatttcacccataagataccttttaaaattaaaaggagatttggggggaaataccggaggggggg

SEQ ID NO: 143331 - DNA, 781 bp, Zea mays
  unsure (1)..(781): unsure at all n locations
  Clone ID: MRT4577_62196C.1
aggccctgttagatagcacttctctcagactcattgctatttattagattactcctccaatgaagtgttatctcatttttgtattgtgattcaggaagacgttgttcttttggatggagatacaccccatccagaatctgctaaggaaacatccaataactgggatgcagggaagctatactatccttcaagggaacacctttgttctgttgagatttcttctgatgacatcagatgtttccagcctgaatcattgctgtcctcacctataatgaacttttacatcatgtatctacagggaccaatgtcatcaattattagatcaagaggcgagtaccatatttttaacacgtacttctttagcaaactagaagccatagcaacaaaggtgccacagcagcaaaacgattacgattgtggcctgtttgtgctgtacctatatgcagcggtttattcaggaggcgcctgaaaggtttcggaagaaagactattctatgtttggcaaacggtggttcagacctgaagagccatctcagcttagagaccaaattcgccacttaatccactcgtgcagagaaactgagctgacgaaggatgncaacagcgtcgtctgggggagggccaacccaagattggtaatgatgggnacggatccgagcgatgcctctgagccaaaaacgccgaagcatctgagcgacagaactgggtaattgctgattctggnatgttgctgtaaagaggacgggcagcaattgtagtttctaaggtcgtgctacatatg

SEQ ID NO: 143332 - DNA, 703 bp, Zea mays
  Clone ID: MRT4577_62197C.1
cgacccacccgtccgcggacgcgtggggtcttcaagctacagctgcagcacacaaattcacagatacctacgtactccagctcgaagcagacagagcgtctagctagctagttggttagtggcaaagagcgtccgtgacctgtgagaaccgtctgagtgaacgatcatggcgtcggcgtctctgctaggctcgtacaccgggggcagcggcttgggcgggaggctcgtccacgctaggagcggcggccgccggccagctgcggcggtgaagcggctgctgtcgaggttgaggcgctcttggagaagacgcgcagcgcggccaaggcgaaccgcggtgaggttcgggtatgacctgcatagctactaccagaacttcgacgacggcagtgccccctgcgcccaccaccgcttgtagctgtgtacgtgcagcagtgcttatatgtttgctactgtactaattgccggtgactattactagctagctgttacagccatagactcaatgtacatgagatgctttagtgtggagctatatatttgaagcttggaatagaaatggatttctgtatattattataaactgaaggaaagcggccgctctacaggatccaagcgcctggcgcttacgtcttgtttgagactaacagtgattgagaggatcaaaatcacttgctattcaaaattgaatagtaactaattttgg

SEQ ID NO: 143333 - DNA, 164 bp, Zea mays
  Clone ID: MRT4577_62198C.1
gacggcctaaaagcgtctgactatgacataatataaggataaatgtcgggggctggactggacgtaagattgcacggtgtgataatgaatgttaaacgttaaagcccgggtaaccaaagcttgccattagaggtaagcttgagctaattaaaaggtggtaatac

SEQ ID NO: 143334 - DNA, 1006 bp, Zea mays
  unsure (1)..(1006): unsure at all n locations
  Clone ID: MRT4577_62199C.1
cccgggtcgnaccagcgttcgggcactctcatgcgtgtcgtctctgctctggccancgaccaggtctgcctgtgtgcgtgcgtaagatgaacacgtacatgtctctctccttggagcgaagcagcagcgtggtccgcgacgtcgccacgcccgcgcctccggcgaccagtggcgccagtgcgccgtatccacgcgcgggcgcgggcgcgtcgctctccctgcccggcgcagcggcggcgcacgggcacagccagtacctgcccctcaacgaggacgactccctggacatggtcctcttcgacgtgctccgagaggcatccggccccggctccgcctccgccgcggcgcccgacacctaccagccgccctcgtcgctgcctacgctcaaggcgctcgcttccggcgccgcgcgcaggggcagcaggaccgcgtacgcaccgaaggcggccacggcgggccaccactaccgcggggtgaggcggcggccgtggggcaagtacgccgcggagatccgtgacccggcgcggcacggggcgcggctctggctcggcaccttcgccacggccgaggaggcagccgccgcgtacgaccgcgccgcggtccgcatgcgcggagccaaggcgctgctcaacttcccgccgggggtcgcgggctgcgggagcgccgcaaccgctacggcgaagcaggctgggctgacggaagccaagtgaacagcgaatgcgatctcaaaggaaccagctgcgaaactgtgtaatgtaattgtgtggaatagtagtatataatgtaaatgtggatgaactagagagagatttccattcatcattgaacggaccacgacaaggattccaaggcgccgattcccaagatctgcacgcagctggtaggatgagatcatcccattacagttctgccacccatttattttaactcatggggataaaacaatttaaaaaacatgtttggtgaattcatagtatcaacgcaccatggtttatgttgttgtttt

SEQ ID NO: 143335 - DNA, 580 bp, Zea mays
  Clone ID: MRT4577_6219C.1
cattgggtacctcgaggccggccggggaaacattcgtgctgcctccatcttcctcgtccacttcactcccaataacccaccacccccaaccccgtgcactccgctgctgctcaggatgtcggttgctcatccgatctgttatattccactactaggtgcctgcaagggatgctgcctatgaaccaacgaaaacgttcttatatatacataatatcgacacacaaattcactcgcgcccaagccaagaaagcttactgctgcacttttctcggttcaggtcggactcatcagcatcgctataggatcgtgccatttcaagactgccactgtaacaagatgccttgaactatatcccctaaaaaagatgatggattttgattctgtttgaccaactaacatatcatctatgactgtgtatgatctattcctcgtcactgcgagctagctatatcgaatgacgaaacggtacaaaataactacatcgatgtacctggctgtgacagagatcatgatgtaaatcatagcagccttcaggtcttcaagagccacgaaggtggtagaattcataactgaacagaac

SEQ ID NO: 143336 - DNA, 679 bp, Zea mays
  Clone ID: MRT4577_621C.1
aattcggcacgaggcgaccgtcgtgatcccactatcgaaaaagccgaggaccttcctcaacggcgctagaaccaccccgactgccaaatgcacatccggggccgccttaaattcctgcggtgcacctccagcgcgatgcgggcaaccgcgcagccttcgtattctcatcgcctagtcccaacacacccccgcgacatgcacccgtgccctcaccaagcctttttctcggtcgggagagcgaatatgacaagcacgacccctctccgtctctgcacgagtggcctcctacaccgactggtttggagttatcgcatacttcacggcccaagtgcgagaccccggtcaacatatgcttcggatcggatcatggcgacgatgcaggagcgagatgcggcgcatccctaacgacggaagaggcgacgggaagaaactaagtggcggcggagcgcaaagtagacagaaactctctctaccgactatccacggttgctgaacaaggagaagaagcggttcatacaaaagtggtccaagaggatcaattttggagtataaagagcgaaagatcggatgcactaaatctacgcttgaaatagtggctggcttgagactgtacctatgctgccaaatggggccgagcaatttccaaatatctattagactattgctacttccttgacat

SEQ ID NO: 143337 - DNA, 364 bp, Zea mays
  unsure (1)..(364): unsure at all n locations
  Clone ID: MRT4577_62200C.1
ttnatanttttttttttttttttttttttttttggggttttttaaaaaatttggcgtgttttcaacaggtgccaagaaaaaaaatctttcaatttatatataaaaaaaccgccgtgcagtgcactttattttcacaatatgatatcgcgttacatgcatatgatagtggtagcctacagatctacgcattccaaatgcttaaacggagtccattattcaacatatttttctacccccacaaggaaatcattttataaccgggcctgaactttttttgtaggtgcactcaaaggaatcccttttgcagtctctttaactaggaatgagcagggtcttaaaaaacccccataccgctttgtccact

SEQ ID NO: 143338 - DNA, 1303 bp, Zea mays
  Clone ID: MRT4577_62201C.1
cattgggtacctcgaggccggccgggtctcacctcaacccggccgggaagactcgtcacacatccgcgttaccccctctcccttggtttcctctcccaccaccaacccccatcccggttatctccgccgccgcccgctttgggaaggcgcgacgaaggcaggcgagaggctccagccggacgaggaggaaagaggagcagcagggccggaggagagatgttcctgtgggactggttctacggggtgctggcctccctcggcctgtggcagaaggaggcgaagatcctcttcctcggcctcgacaacgccggcaagaccacgctgctccacatgctcaaggacgagcggttggtgcagcaccagccgacgcagcacccgacgtcggaggagctcagcatcggcaagatcaagttcaaggccttcgacctcggcggccaccagatcgcgcgccgcgtctggaaggattactacgcaaaggttgatgctgtagtatacctggtagatgcgtatgataaggagcgatttgctgaatcaaaaaggagctggacgctctcctgtcagatgattccttggcaaatgttccatttctcatccttggcaacaagattgatatcccatatgctgcctctgaagaggagctacggtatcacctaggccttagcaacttcacaaccgggaagggcaaggtcaaccttggtgactccaatgtccggccacttgaggttttcatgtgcagtgttgttcgcaagatgggctacggtgatggtttcaagtgggtctcccagtacatcaagtagggcccttgccgagccacatgctcagcccagtgatttttttgccttgttatttgttctggttggttgttcgtcacaggaacgatgagtatcatggagggtatgaagaggaaaaaacagtgcttaacattgaggaacatgttgaatctttagtgtcaaaacattttgttatgtcaatcaaactcctggaattcttttgcttttccgtaggacctttactaaggacttgcctgcgatgcattataagattattgattgcttaaattatgtgttataatatggtggtggattggtactgagtatcggtggttgcgttatcaaaaaaaaaaaaaaaaaaaaaaaaaaaaaaaaaaaaaaaaaaaaaaaaaaaaaaaaaaaaaaaataaaaaaataaataaaaaaaataaataaattaaataattaatttggggcggcccttttatagttcccaagcttactttcccgggtttgcgacgtatttttttttatttgggggcccctaatacaat

SEQ ID NO: 143339 - DNA, 349 bp, Zea mays
  Clone ID: MRT4577_62202C.1
ggcaaccatgaaattagtttcctccatttttctaaaaggttttttaacttacaagcaaagacctttcatgcccaaaaagaaactgtttgcaggggggctccaatttccatttttctaaaatgtttatcgcccgccatgatccaactgaatttaaataactgaacttaacaatgttggttgggaagacttcttaacgggggaaggggggacttcttaatttgtaggggcccttccaggatatcttttttacaacaaaaagagaattaccgggggccccaaggaacttttttgtctttgaagaaaaccactggggttttttgccctcttcatactggaaaggacttttttt

SEQ ID NO: 143340 - DNA, 1337 bp, Zea mays
  Clone ID: MRT4577_62203C.1
ccacgccacccagaccctgcagcagcagttaatcgtcacgcccccatccttccccagcaaacacaacacaagcagacggggagaggttcagatccactcgtcacacatccgcgttaccccctctcccttggtttcctctcccaccaccaacccccatcccggttatctccgccgccgcccgctttgggaaggcgcgacgaaggcaggcgagaggctccagccggacgaggaggaaagaggagcagcagggccggaggagagatgttcctgtgggactggttctacggggtgctggcctccctcggcctgtggcagaaggaggcgaagatcctcttcctcggcctcgacaacgccggcaagaccacgctgctccacatgctcaaggacgagcggttggtgcagcaccagccgacgcagcacccgacgtcggaggagctcagcatcggcaagatcaagttcaaggccttcgacctcggcggccaccagatcgcgcgccgcgtctggaaggattactacgcaaaggttgatgctgtagtatacctggtagatgcgtatgataaggagcgatttgctgaatcaaaaaaggagctggacgctctcctgtcagatgattccttggcaaatgttccatttctcatccttggcaacaagattgatatcccgtatgctgcctctgaagaggagctgcggtatcacctaggccttagcaacttcacaaccgggaagggcaaggtcaaccttggcgactccaatgtccggccacttgaggttttcatgtgcagtgttgttcgcaagatgggctacggcgatggtttcaagtgggtctcccaatacatcaagtagggcccttgccggggcgcttgctcagcccagcgatttttttgccttgttatttgttctggttggtatttcgtcacgtgaacgatgatcatcatatcatgacagtatcatggaggggtatgaagaggaaaaaaacagtgcttaacattggggaacatgttgaatctttagcgtgaaaacattttgttatgtccaaaaaaaaaaaaaaaaaaaaaaaaaaaaaaaaaaaaaaaaaaaaaaaaaaaaaaaaaaaaaaaaaaaaaaaaaaaaataaaaaaaaaaaaaaaaaaaaaaaaaaaaaaaaaaaaaaaaaaaaaaaaaaggggggccctttttaaaaaaccaaatttaacttcccctggattgaaattttaaaatcttttttatagggcacccaaatacaaattactgggccgttttttaaaaccgtgtactggaaaaaaccttggcttacccaaattaattccctttaaaacaaatccctttttccccacttg

SEQ ID NO: 143341 - DNA, 428 bp, Zea mays
  Clone ID: MRT4577_62204C.1
cttaaaaccataacctttatctactacaaagcgcacaaaaacccgatcgacagcatgagggtgttgctcgtagacctcgatctactggctatcgatgggagcgccacctacacgcatacaaccggcagatgcgggtgccaaccaccgtcaacggtttatctaccgacgccggtgcatctgccacctgcggttcacctgacacctgcggcgcatctcccaccgacggtccacctgacgccgacggtccacctgccaccgccctgccatgtgccatcaacggctcatgtggcggcggcaacatgcaactacactactaaaccggccagggctcaagctcatgctcagtcacacccatgcccgtgccaacaggcgaattcaagcccgtgccagctgcaaggaacctagggcgggggcagcacacggatcct

SEQ ID NO: 143342 - DNA, 1221 bp, Zea mays
  Clone ID: MRT4577_62205C.1
cattgggtacctcgagggccggccgggagcgcccctttccttccccagcggcaatcaaagagacggggagattcagatccacacacatccgcatccctctctcctcggtttcctctcccaccaccaacccccagatcgcagcgatctccgccgccgccctctctgggattccgcgcgacaaagtcaggcgtagaggctccaggaggaggagggaggcgcagcagggcgggtgggggagatgttcctctgggactggttctacggggtgctggcctccctcggcctgtggcagaaggaggccaagatcctcttccttggcctcgacaacgccggcaagaccacgctgctccacatgctcaaggacgagcggttggtgcagcaccagccgacgcagcacccgacgtcggaggagctcagcatcggcaagatcaagttcaaggcgttcgacctcggcggccaccagatcgcgcgccgcgtgtggaaggattactacgcaaaggttgatgctgtagtatacctggtagatgcatatgataaggagcgatttgctgaatcaaagaaggagctcgatgctctcctgtctgatgattctttggccaatgttccatttctcatccttggcaacaagattgatatcccatatgctgcctctgaagaggagctacggtatcacctaggccttagcaacttcacaaccgggaagggcaaggtcaaccttggcgactccaatgtccgtccacttgaggtcttcatgtgcagtgttgttcgcaagatgggctacggtgatggtttcaagtgggtctcccagtacatcaagtagggccctcgccgaggcgcatgctcagcccggcgaatttttttgccttgttcgttccggttggttcgtgacgagaacgaacgatggtcgctaggaaagtatcatggagggtatgaagaggaaaaacagtgcttaacattgttgaacatgttgagtctttagcgtcaaaacaatttattctgaaaaaaaaaaaaaaaaatgtcgaactctattctttcgcttttccatacaacgtttactaagtacttgcgatgcattataaaattattactctttaattgtggtgtgatgttcgtgcattgcaactgagtaggagtcgttgcattatcattgcatgttcttggtttgattatgttttcttaaagcctctatttgtattataaaaagtctagttttcttttgtc

SEQ ID NO: 143343 - DNA, 1645 bp, Zea mays
  Clone ID: MRT4577_62206C.1
ccggccgggatttagcatcgacacgatggttcaaagcaaaagggtctacatgctccactcccacgcttccccccgcctcgaatggtcacgccacccagaccctgcagcagcagttaatcgtcacgcccccatccttccccagcgaacacaacacaagcagacggggagagattcagatccactcgtcacacatccgcgttaccccctctcccttggtttcctctcccaccaccaacccccatcccggcgatctccgccgccgccctctctgggaagcgcgcgacaaaggcaggcgtagaggctccagccgaggaggagggaggcgcagcagggcgggtgggggagatgttcctctgggactggttctacggggtgctggcctccctcggcctgtggcagaaggaggccaagatcctcttccttggcctcgacaacgccggcaagaccacgctgctccacatgctcaaggacgagcggttggtgcagcaccagccgacgcagcacccgacgtcggaggagctcagcatcggcaagatcaagttcaaggccttcgacctcggcggccaccagatcgcgcgccgcgtgtggaaggattactacgcaaaggttgatgctgtagtatacctggtagatgcatatgataaggagcgatttgctgaatcaaagaaggagctcgatgctctcctgtctgatgattctttggccaatgttccatttctcatccttggcaacaagattgatatcccatatgctgcctctgaagaggagctacggtatcacctaggccttagcaacttcacaaccgggaagggcaaggtcaaccttggcgactccaatgtccgtccacttgaggtcttcatgtgcagtgttgttcgcaagatgggctacggtgatggtttcaagtgggtctcccagtacatcaagtagggccctcgccgaggcgcatgctcagcccggcgaatttttttgccttgttcgttccggttggttcgtgacgagaacgaacgatggtcgctaggaaagtatcatggagggtatgaagaggaaaaacagtgcttaacattgttgaacatgttgagtctttagcgtcaaaacaatttatgtcgaactctattctttcgcttttccatacaacgtttactaagtacttgcgatgcattataaaattattattgcttaaaactctttaaaaaaaaaaaaaaaaaaaaagcggccgcgcagaaccggacgctggcgaccgggagctgtcctcttttgtccagggcgctcctgctttcgcagaagggttgaaatcaagtctggtcgtgaaatggcagctgcatggaaaggtttatggtagctagttataggcaaagcttgtaagtcggtgttaatcctatatatgtaatgtggggtccactttctattctcattgtttcttggggtggtctaaccggttaaaaaaaaagcgatttcttccgggtcagctactagttatgtaattacgttacatgaaccagcgcattgttcgccaattgctttggtgtggtggacttctgtccgtgcaatggaaagcatcaggttttataaaagtaagagtgtagaataattgtgtaaaaaaaaaaaaaaaaaaaaaaaaaaagtacctgcccgggcggccgctcga

SEQ ID NO: 143344 - DNA, 166 bp, Zea mays
  Clone ID: MRT4577_62207C.1
actcgtcctcttcatcaaattagcatttttcatgctttatttcatcttaggctttgttcaaatttacattggatatggttatatataatctaccactgattccttactatccatatcttgctcatctatgcttgttttatttatttttattacttgtattttatca

SEQ ID NO: 143345 - DNA, 792 bp, Zea mays
  Clone ID: MRT4577_62208C.1
ccggccgccggccgggacgacccgacatcgacaatcggagcacggtaagcagacaaaatgacgatccggtacaaccagaagctcgtcaacaaccatttccgcaaggattggcaacgccgggttcgaacccacttcgaccagcccggtaagaagtcgaggagacgcacagctcgtcaggccaaggctgccgctcttgccccccgacctgtcgacaagctccgacccgttgtccgatgccctaccatcaagtacaaccgtcgtgtccgctccggccgtggtttcaccctggctgagctcaaggaggccggtatccccaaggctttcgctcccaccatcggcattgccgtcgacttccgccgccagaacctcagcgaggagtcccttgccgccaacgtcgcccgtctcaaggcttaccaggagcgcttgatcctccttccccgccgatctaacgcccccaagaagggtgacaccaagaccgacgtctccaaggtcgagaaggccgctcaaatcgccgctgccttccctatcgccgccaccgatctcgccgtcaaggagatctccaagagcgacatgccctccaacatcgaggctggcgcttaccgaactctccgtgtcgctcgtgccaacgcccgatacgagggtgcccgccagaagcgtgtccgggatgctgccgaggccgagtcggccaagaaataaacttgcaaaaagggaactggtgggtttgagggttttgctctttatgtcattgaggcatgggcaacgtcggttcgaggctctgatgaaaggcttggc

SEQ ID NO: 143346 - DNA, 1493 bp, Zea mays
  Clone ID: MRT4577_62209C.1
ctgtgtggggctcgcggcgggcgggaggaagaagcaagagactgagagaggcaggtaatacatacctgcgactgcgacgagtgatcagtaaagcttcatcttcttcctccttcctccggcctcttcctgagtgctgcacgcagtgcgcgcgtaggaaggaactcgcgtacgtgtgctagctagctagctagctcgaccacgcgcagcacgcaggcgcgtagtagctcgatcgatcgaccgccggccggaaatgtcgaccaactcgaggtccaactccagggccaacttcaacaacgagatccatgacatcggcacggcgcagaactccagcatgccccccacgtactacgaccggtcgctggcggacatcttccctccgcacctcctcaagaaggtggtctcggaggtggtgtccacgttcctgctggtgttcgtcacgtgcggggcggcggggatctacggcagcgacaaggaccgcatctcgcagctggggcagtcggtcgccggcgggctcatcgtcaccgtcatgatctacgccgtcggccacatctcgggcgcgcacatgaaccccgccgtcacgctcgcgttcgccgtgttccgccatttcccctggatccaggtcccgttctactgggcggcgcagttcaccggcagcatctgcgcgtcgttcgtgctcaaggccgtgctgcaccccatcgccgtgctgggcaccaccacgccgacggggccgcactggcactcgctcgtcatcgagatcatcgtcaccttcaacatgatgttcgtcaccctcgccgtcgccacggacacgagagcggtgggtgagttggcggggttggcagttggttccgcggtttgcattacgtccatcttcgcaggggcagtgtcgggcggatcgatgaacccggcgaggacgctggggccggcgctggcgagcaacctctacaccggcctctggatctacttcctgggccccgtcctcggcacgctctccggggcctggacctacacctacatccgcttcgaggaggcgcccagccacaaggacatgtcgtcgcagaagctctcctccttcaagctccgccgcctgcagagccagtccgtcggggtcggggccgacgacgacgagctcgaccacatccaagtgtgattcatgctcgatcgatccgagagtgcgcgcttgtttactcctcagtcctctcactctatgtatcggcaacactccctaggatatactagtggtccgtagtcatggtctatgtctatgtgtcgctcttctctcgatccatgcacgtccgtggcgcggtgtggatgggctcgctctgtcaaatgtgccaatgagctggagcttaattttgggacgaacactgtgccgtgtgctgtgtgcagccagtcgtactcgtacctctcctgctatcacttgttccaaaagctcttggtgcttacataaagatcatctgtgccttgcacgataaaaatctctattcttgcactcc

SEQ ID NO: 143347 - DNA, 375 bp, Zea mays
  Clone ID: MRT4577_6220C.1
gggtggggtttttttttttttttttttaatggccaaaaatcattgtttaaaatcaaaccccaaacttggaagggtcgcatcccaacgtactaaactgactgcccaatggggggggggaagttttttctttttacccacacagcaaaggcttttgcatttcatcccccccagggataatgctttgttacaaattcccaattgggcctgttacaaaccaaatttttttattggccggctttccagtttgttatccggggcggccaacccccttttttttattgaattcacaagctttggagctccctgtttttaaaaggtggggggatgtcctcccaccttgggaatttagcccaaaggcgctcctttttttgttcc

SEQ ID NO: 143348 - DNA, 1641 bp, Zea mays
  unsure (1)..(1641): unsure at all n locations
  Clone ID: MRT4577_62210C.1
cctcgaggccggccgggctcgaagagcaagcaagagaggcagacacagatagctgccagtagagcttcttcttcttcttcttcttccgcttcctcttgccgagcgcagtgctacgtaggaaggagttcacgccctcgcgcacgcgtcgtagctcgtcggtcgatcgccggaaatgtcgaccaactcgagggccaactccagggccaacttcaacaacgagatccacgacatcggcacggcggtgcacaactccagcagcctgccccccgcgtactacgaccggtcgctagcggacatgttccctccccacctcctcaagaaggtggtctcggaggtggtgtccacgttcctgctggtgttcgtgacgtgcggggcggcggggatctacggcagcgacaaggaccgcatctcgcagctggggcagtcggtcgccggcggcctcatcgtcaccgtgatgatctacgccgtcggccacatctccggcgcgcacatgaaccccgccgtcacgctcgccttcgccgtgttccgccatttcccctggatccaggtcccgttctactgggcggcgcagttcaccggcgccatctgcgcgtcgttcgtgctcaaggccgtgctgcaccccatcgccgtgctgggcaccaccacgccggcggggccgcactggcactcgctcatcatcgaggtcatcgtcaccttcaacatgatgttcgtcaccctcgccgtcgccacggacacgagagcggtgggtgagttggccgggttggcggttggctctgcggtttgcatcacgtccatcttcgcagggtaaatacataaacgcacacgcacgcctgcacgcgcacgcttagaactacttgattcaagtttaaaatagttgagggggctaccgtacgtcaattcgaatactaatccgccggtggccttccggcatgtcctagtagtaaacaagagcaaaatactaaacatgattaggacggacgccagctagccctgctggcctggcaatagataagctacnnnnnnnnnnnnnnnnnnnnnnngaactgagcactgagacgcgagggaaaaccgagtggtgattgcagggcagtgtcgggcggatcgatgaaccctgcgaggacgctggggccggcgctggcgagcaacctctacaccggcctctggatctactgatgcgtgacagtgctttgtggtggtggtgctcctcccatggttatctacagacaggtggtctaggaggtggtgtacacgttcctgctggtgttcctcatgtgcggggcggcagggatctacggtagcgacaaggaccgcatctcgcagctggggcagtcggtcgccggcgggctcatcgtcaccgtcatgatctacgccgtcggccacatctcgggcgcgcacatgaaccccgccgtcacgctcgcgttcgccgtgttccgccatttcccctggatcncaggtacgcgacaatgagtccaggatctggccgtcgtggccctcctcggagcgagggcagtggaggcagcaatggggaaccggcgaggagcgggggcggtggaggcagcaatggggaaccggtggcggaggatccaatggggaggggagatgaaagaagggagagagaaggggatggtggccncacacgag

SEQ ID NO: 143349 - DNA, 264 bp, Zea mays
  Clone ID: MRT4577_62211C.1
ggaaacaaaaaggtttttttttacgggacatgttgccggaagggccttgccggggaatgtaattccaggggggattagttttattttttttggaaaaggggggccttttttttttttttgaaagggcaaaggaaaacaaagttggggcaaaagagcacaaaatattttaggggaaaaaagttgcattgaaaaggggcatgggcgttttttcttaaacgcctaagggccccgagagcacccttggaatccaataaaaaactgggg

SEQ ID NO: 143350 - DNA, 2019 bp, Zea mays
  Clone ID: MRT4577_62212C.1
ctgaaaaaatgaagactagctattttatcatttatcaaggacgcatcacaagatatttgtgtgggcaaccggttttcgttctctaaacatatcttttgcatcatggacatggaggactccggccagttcatgcattgggcgatggctacgctacacctcgagcggcggggctacctttcttttttttagccattttttttccttcgaagggacgaaaagcgcagacaagagagaaatcggaatccaagcgcaaccaaaagagaagagggcagacacgagggagcgcgtggggggagagggcatggtctctctcgtcccggcagtcccgtctcaagcaaaagctctctcctcttcttccgctcagtgcaccaatcactgcaacatactggcctgaggtcattgagttggtgaaagggaaggagggggtatcatgggcatctcatccaagtggattaaatccttggttggcataaggaagcaagaaaaagcgcagaatgcagaaaagcaagaaaaagggtggaacgctgagagcagtgaaactaagagctctgctaatcaatcactgcacaaacggaaacattctttggatcccggagctgcacttgcagtcgaagaaattacagtacaaagtgaagcattgactgataacaaaagcgcacaaatggtttcaaattcatttttttcagacagtacaccgcttgatgtgcacatttctcaggctgaacatcatagtaacgaagatttggccgcaactgttgtccagtctgcgtttcgagcgttcttggctaggcgtgctttacgagctttgaaaggaatagttctacttcaagcccttattaggggccattctgttagaaggcagacagcagagacgcttcagtgtatgcaagcgctggtaaaagcaaaagctcgtgtccgagcaagacaagttcgtgttgccttagaaaatcaagtggcacggaaaaagattcctgaacaagatgatcatgagaaccatgtccgagaagtcgagggaggctggtgtggcagtattggttccatggaggaaatgcaagctaaagcactgaaaagacgagaagctgctgctaagcgtgagagggcaatggcatatgctttgactcatcagcggcaagctggttccaagcaacaaaattctttgagcctgcaaggtcttgaacttggtgagaaccactgggagtcaaattggttagacaggtggatggctgtacgtccatgggagaacaggttacttgactgtaatgccaaagagagtctgccaacgcatgaagataaggatgaggaagcaaattctcagatcacaccaaagggtaaagtgtcaacttcaaatactcctggtctgagcaagaagaaaggtgttaaccacaaaaagtcatattcagatgttagttgtacttcatttgcacgaccagcaaatgtattaccatccacatctttaggatcatccaaacagaaggcaaaggctgtgggtgaagtttttgaggaagtcagctcccagccaacagatataggttctaaggatgtgcacaattcaaaagataagcttgtgcaagtgaatggaccagccaagaagcggttatccctcccaaataatgttggcagagaatcagggaagggaccaacccgcaggaattcgcttaacaggtctgctccaaaagcacgggcggactctcctaaccagggtgatgagttagaggcctgataacacattcctccaatttgacgtcggcaagccatcctaaagtgtgcttctccaggtgtgcatgctacatgtgttgcccataacataacattcccaaacgacatcatgcagctagatttgggttgtggttcatatttctgttgtgtaatgttgtggtgtgttgtgccttgtgtggccttttattccgcatcgccaattttcttatgtttccagcttccctgtaagttgttctaactgctgaaactaaaagaaggaaatgtgctgtattgtgtttgtgtgttgaagtttctcgggaaaaa

SEQ ID NO: 143351 - DNA, 253 bp, Zea mays
  Clone ID: MRT4577_62213C.1
aacggagatttgatgtttgataagactccatgaggccgctagactggaatcataggacctgcaggagtgattactgagcaatgggcacaaaactgccccagttcacactgaaacgccaaattctaatttgaaccctaaaggaagagcagagccaagtcacagaccaagatcaccggcaaacagaactgaccatgcggaaagccttgagataagctggaaacatagcgggatccagatgcctggatggatgcgt

SEQ ID NO: 143352 - DNA, 264 bp, Zea mays
  Clone ID: MRT4577_62214C.1
gcgtccgccgttctccctccctttctgcctgaccatataggaccagccgaaccaccaatgcatatggcaccttcccacgggctgaggacctcccaataccaatacctcctcagtcatttaccacttgcttcacagggacaacgcctgactgacctactgacccaatcgtcttccctgtgaccaaaactaacggtaccgtgctcagattccgctttgccaatgtcaactacaaccttacggatcatattatacaggctaaggaaa

SEQ ID NO: 143353 - DNA, 1322 bp, Zea mays
  Clone ID: MRT4577_62215C.1
aaattcggcacgaggcaaggacaaggacggaggaggagccattaccgctgggccttggacaaactactggccggcgccctatcgcccaacactcacgtttctccagacacagagggcagagcgccgccgccgccgagtcaaggatgatgggcagtgggatgggcgcgtacggcggcgcgctgcgaccggtggagagcgcggccggggagacgatgctgctgtggggcctggggcagcccgagtcgcaccgcaacaacgcgctggtccgccaggcggcgcacgccttcgagctcgacgcctgcgggcggcgcctgtccctgctgcagtccccctcctccatggccaccccgggggtcacgggggcggtcgtctgggacagcggcgtcgtgctcgccaagttcctcgagcactccgtcgactcccagcggctgctcctccgcggcgcgcgcgcggtggacctcgggtccgggtgcggcttggtggggtgcgtcgccgccctgctgggcgcccatgtggtcctcaccgacctcgccgaccggctcaagctgcttaggaagaacgtcgccctcaatgtcgacgacccccacgtcccgggctccgctcgggtcacggagcttgtgtggggcgacaatcctcaccatgaattgctcgaggagccactgcccgatttcgtgcttggctccgacgtcatatacaacgaggaagctgtggacgatcttctgatcactctcaaccaactctcagggaagcacactactatacttctagctggggagcttcgcaacgatgctgtgctggagtgcttcttggaggcagccatggaggacttcctaattgcgtgcatcgagcaggaccaatggcaccctgaattccgcagcaaccgtgtagccttgtttatcttggtcaagaaaccagagaaacctagcgcagagtagtcgtctgttcctcgccttggtgtagaacaaggataggaggcatctgggttttccctttttccaattccaattatgttgttgcgatagccaaggttttagcgccggcttaagccatggaagtttgatagctcattgtatggtttgcttgcaacctattctgaaagtttgtacaagagtgaaagaaaggattttagataaccgatgtctgaaactgcaaatgatctcagtggtggcaacacctaaaagctgatatgtgagtttggacaaggatgtgcacagtggtagtacaaagatagttttgaaatgaatttaaagagaagtccagaaacttatgacagtacagaaagctcaataacgaattgtattcattttatttggtttatgctt

SEQ ID NO: 143354 - DNA, 467 bp, Zea mays
  unsure (1)..(467): unsure at all n locations
  Clone ID: MRT4577_62216C.1
tttctttcttcatttcttttgcgtggnaaattcgggatattacatctcaaattcgtctcgtcttagttggattttacaagcgcggggggtaataattagtgtcggggattgaacttgctaattgcgagtgaccgcaagtacaaaagtgttaccttagtccggacaagccagattagcaaagctgacagcggagtaaaaaaaaactgtaactggcgaaaccagtttttttttagtgtagcattacaacacgcagtaaaatcgcctcgccgcttcagtaggcagcatcacatactgctgtccttctgaagcagattcttgagatggcataatggttctggaggtttagtttagaaaactagcgcatatgggttttccagtaaatggacgcatcaagccaagaaccacccattccaactccaccattgcattattatattttgtcgnaaccganaggcaaggaccaatct

SEQ ID NO: 143355 - DNA, 113 bp, Zea mays
  Clone ID: MRT4577_62217C.1
tttctgcgatgtgatcgagcatttcctgcaagttgcgggaataagccattccatgcactgcgagtctggtggttatgccccgttctagcacgatggcaagtcttaacggtgct

SEQ ID NO: 143356 - DNA, 631 bp, Zea mays
  Clone ID: MRT4577_62218C.1
aatacactccccacccggccaccgcaccacaccccacccagcctccctccgggctccgcacctcaccgccagtaagccacagcactccccacccggtcttcctccttcttcatgcgctgatcgaccgcccgaaaccgcgcgcgcgcgagccaactccgaccaagaaagccccagcggcggccgtccaggaggggagccaccatgcactcccagaaccactggggcggggcgttcgacatcgacggcgcggaggacgaccagagccgcaacatggacatcgaccgcggcgcgctgcagcaccagcaccagctggacgagacgcagcagagctggctgctcggcccgccggaggccaagaagaaggaccgctacgtcgacctcggctgcgtcgtcgtcaagcgcaagctcctctggtggatgctctgggtcgtgctcggcgccttcgtcctcatcggcctccccatcatcatcgccaagaacatccccaagaagaagccccacgccccgccgcccgacaagtacaccgacgccctccacaaggcgctcctcttcttcaacgcccagaaatccggcaagcttcctaagaacaacggcatcccgtggcgcgggaactcgggcatgaaggacggcg

SEQ ID NO: 143357 - DNA, 218 bp, Zea mays
  Clone ID: MRT4577_62219C.1
cgacgaggctcggactcgaatttggggcggaacagcgcaaatctggtaggcacatgaggatgatgcggaagaggcgtaacgagagcatatgctgtgcttcaagaaagggcttgactcgacctgcgaatgtgattctggaggaagtggctgtggatgccgaggcaaatggggatgctgcaagagggatggaagacttcggtgctttagtgaaatgactc

SEQ ID NO: 143358 - DNA, 176 bp, Zea mays
  Clone ID: MRT4577_6221C.1
gccactcgtccgattacgcttcaggatgaaggccgggggctctactaccttcgtagggggcataatcgactcaatctctttcacacgttaacccctacgtactacgggctccagaccccggcttccagctgacatagtgcagatatttagacataagagccagcaccaattgacaa

SEQ ID NO: 143359 - DNA, 707 bp, Zea mays
  Clone ID: MRT4577_62220C.1
ggtaccgcggcctctcctcgagttttttttttttttttttttttttttttttttttttttttttttttttttttttttttttttttttgggggaccaaggtttttgacttttgacatttgttttggcttgtttttgattcacaacttttgaaaacaagggactaacatggccccactttgccgattgtttgttcctgtcaaaaaaaaaaccggccaaattgggttttggcaaacttagatccaatacaacagcccccccaggccccaaaaattccaactggtgctccagcagttaatcgacaggggcaaagcctgaccccccccacgatgccccccacaaaaaaaaacacagcccttttcgccccgatttaaacaatgctaaactgctaaccagaaaaaaaaaaaccctttccccctgtcccggggggagacaaccctttgttccgccacgtaccaccagccttgccatggccaaactcccgatccctaagaatcctaacgtaacgctcgggggggggcgctttttcctttacgggggcgttggacaccgggtcctcggccagtttaattggggccctttgggacacttaaaagttgtttgaagcctcctgcacccgaggggccgtttccgttttccccagttgttttaaagccacaagcaggcttttaaatttgttttgggccccgcctgtcaaccccctccccct

SEQ ID NO: 143360 - DNA, 733 bp, Zea mays
  Clone ID: MRT4577_62221C.1
cccacgcgtccgcccacgcgtccgcccacgcgtccggtgagatgtgtggtgttttccgtgagacctttgtcaaatctgccaaggatggtctgttaaaagatacagccgttgcagtgtcaagtgagcctaggacatctgctgcgtcaaaaaacgattctgccaaggcgccagtgaagactcgtgctgtaaattctgatggtgattctatgagaaagcatgctagcatgtcttatgataaagccaattccacgcagttaccatctgctggtagctcactaggtgctgaaaaaaagaagaaaacccctgtactttctgaagaagtacctgtggataggatagctctgttggcttccgatggttttcagtcaaagggtaaccagaatagcggggctagcagttcttcgcagaatgacaatgtgatccagaaactctcttctgacgtaggccagctaaatgtaaacaagaacaatgtgaatgttacgaaatcttgtttgcctgatgagtataagcctgagaagtggatgttagctgatctggagtcaagggcgttgagccaactgaaccttgcaatagtcggtcatgttgattccggcaagtcgacactatctgggagattactgcatctcttaggaagggatatcaaaaaaatatatgcacaagaatgaaaaggagtcgaaagaaaaggggaaggggtcatttgcttttgcatgggccatggatgagagcagtgaag

SEQ ID NO: 143361 - DNA, 109 bp, Zea mays
  Clone ID: MRT4577_62222C.1
gatccgttttctcaataagagacgactctcaagcagatgagccacccggaataacaagttgcctcctgcggcccctaccactgacacctccgtggtaggtgacgaagcg

SEQ ID NO: 143362 - DNA, 652 bp, Zea mays
  Clone ID: MRT4577_62223C.1
actcctccccacctcgcgcctcgcagtcgtacccaccagccccggccgacgcagatcccgcgatggtcgccacggcgaagatcccgcagcggcagctcttcatcgacggcgactggcgcgcgcccgcgcgggccgccctcaagaggaaccgcggccgcgactggtcccgcgcccccggcgccgtccgggccaagtacctccgcgcgatcgccgccaagatgattgagcggaaatctgatctggctaggctcgaggcacttgattgcgggaagcctcttgatgaagcggcatgggacatggacgatgtcgccggctgctttgagttcttcgcaggtcatgctgaagccttggacaaaaggcaaaatgctgcagttgctctcccggagaattttaaatgccatcttaagaaggaacctattggtgtagttgctctaatcacaccttggaactatcctctcctgatggctgtatggaaggtagcccctgctctggcagctggctgtacagctgtactgaaaccatctgaattagcttccgtgacttgcttagagcttggtgatgtgtgtaaagagattggtcttccatcaggtgtcttaaacattgtgactggaataggtaatgaagctggagctcctttgtcctcacacccttg

SEQ ID NO: 143363 - DNA, 138 bp, Zea mays
  Clone ID: MRT4577_62224C.1
acggttcgtcccggtgtacgccatgctgatgttcgacactgttgtcctgacctacgactttggggtctttgacgcgctcaccgtgaaagacctgatcaaccgcctgctcaacctgtgtttgatgatcgggttcgacga

SEQ ID NO: 143364 - DNA, 547 bp, Zea mays
  Clone ID: MRT4577_62225C.1
ggcatccaaaaagacaccagctgggcttcggccaggcatgaaccctgctgctattgccaaggtgcgtatggggttggcacagcaaagggcagcaggcatgtaccctggatggttggaatgcctggaagcagctcatcaatccttcctagttcagctggcttgtctatgatgggccagccgctaaacagaggcaaccttggccccctccagagggccatgatgtcgtctatgggccctccaaaaatgccaggaggtaactttcagctgaatgctcaacagcaaatacacctccagcatcagttgcagcatctccaacagaacccacagcagcagctccaacagctacagcaacagcaacaaatacaacaactgcagcagcagcagcagcagcagctccaacaacagcaactgcagcagcaacaacaaatgggatctccgttacagcaggcacaggtgggctcacctgctggctcacagcaatcgccgatgatgcatcagcagcagataagccctcatcagatgggacagcaggctgcaatgagccccc

SEQ ID NO: 143365 - DNA, 291 bp, Zea mays
  Clone ID: MRT4577_62226C.1
aggacaactggtttaatggatcctcgaatttttttttttctttggcacaacagggccagggaggttttgcaactgaggaccaggctgtgcttgctgttaaggctccaagcccggaaagaggtaccctgacctggaggggacgggccccgccggccaggcaacggaggtcctagcattgtccccgaataggaaggccagccccgatttcttcaaggccgccatggattttttgcgggcctccaatccttgcggttgtggaggcagctgcaaaggcggcccccacagctgttg

SEQ ID NO: 143366 - DNA, 444 bp, Zea mays
  Clone ID: MRT4577_62227C.1
aaaccaaggatcaatgtgagaaatctatatatgccccatacaaactacggtgatggccgatgcctgcaacgtgacataccatctgaagaactcgcatgcatgattatcccacgggactgaacaccatgcactctcatatacgccgggactgcactgggctgaactgaactgcactgcacgaaagactgatgcttgacttacaactgctgtccatgggtctacagccaaaggaaaacgcaccacgatcctgagctacctcacaagctccaacccctgactgaccattggatcggatgctcacgctgcgtgctgtacagttccggccggacagctcctcagggcgacagaggactgactgaccagcgacccgtagggctgcacgatgccgtgcaggtctcgattggcggtctaccaggacgacacggaggctttcatgcggatcac

SEQ ID NO: 143367 - DNA, 133 bp, Zea mays
  Clone ID: MRT4577_62228C.1
aatgaattactattttaatgactggggttccatttgactgtttgcattgagattgcaatgtgcgcaattttatttgtagttgtggcatcttgttgacatcgaatatgactttgataataaataccggttcctg

SEQ ID NO: 143368 - DNA, 216 bp, Zea mays
  Clone ID: MRT4577_62229C.1
gcgtcgagaaagtgtggaagaaccaccaagagctgttgcggcggaagacagctattctgccagattgattctatggaacaaaacgcaaggtcgtgggcgtggcaggaaaggagagatcaggatggcacgtgatcttacaaatttgcgtactgttactaagcacactggtgattgatgagattgtgatgaccagcttgatctaatgtctgtttgaac

SEQ ID NO: 143369 - DNA, 1743 bp, Zea mays
  Clone ID: MRT4577_6222C.1
gtgagagaggccgtggaaaggaatctttcagctcacacctccctatccctccttcccttctcctcctactgctactgctcgccaggtcccctcgctcgctcgctcgtcgtcttcaacctcacacaattatttgtgctcccgctccttccgtccgtccttcctccccccttcccctctccctcttccaaccgccgctcctgctgccttgcctctcagcccagggacgccaaggtctctgccaggatggtgtaggccgtgcctctcgcgcattatgaggtgtggtggtgagggatgggcgatggcctttgcagatgaaggagcgacagcgctggcggcctgaggaagacgccgtcctgcgcgcctacgtccggcagtacggcccccgcgagtggcacctggtgtcgcagcgcatgaacgtggccctcgaccgcgacgccaagtcgtgcctggagcgctggaagaactacctccgccccgggatcaagaagggctcgctcaccgaggaggagcagcgcctggtgatccgcctgcaggccaagcacggcaacaagtggaagaagatcgccgccgaggtgcccgggcgcacggccaagcgcctcggcaagtggtgggaggtgttcaaggagaagcagcagcgggagctgagggacagccgccgcccgccgccggagcctagccccgacgagcggggcaggtacgagtggctgctcgagaacttcgcggagaagctcgtcggagagaggccacagcaggctgccgctgcgccgtcgccgctgctcatggccgcgcccgtgctgccgccctggctgtcgtccaacgccgggccggccgtcgccgccgccgccgtcgcgcacccgccgcccagaccgccgtcgccgtccgtgacgctcagcctcgcgtccgccgcggtggcgccgggcccgcccgcgcccgcgccatggatgccggagcgcgccgcggccgacgcggcgccgtacgggttcccgagcccgcctcagcacggcggcgccgcgcccccgggcatgacggtcgtggacgggcaggcgctggcggagctcgccgagtgctgccgcgagctggaggaggggcggcgcgcgtgggcgacgcaccggcgggaggcggcgtggcggctgaagcgcgtggagcagcagctggagatggagcgcgagatgcggcggcgcgaggtgtgggaggagttcgaggccaagatgcgcaccatgcggctggagcaggcggccgccgcggagcgcgtggagcgggaccaccgggagaaggttgccgagctccgccgcgacgcgcaggtcaaggaggagaagatggccgagcagtgggccgccaagcacgcgcgcgtcgccaagttcgtcgagcagatgggggcgtgctcccgttcatggtcctctgccaccgacatgaactgttgaactggacaaacgagccgctgaccacaccgtcgctagctatcgcgtgctacgtgctccggttcacggctttcttgcattctgggacgcgacttgtaaacgccatggattttcttgctcacgttcacttccgctttctttctttctttttttcttttctttttatttacaactgttgttacggtcggttcagtgcttctctctctatctactagtagttgatcagagtcaagaaatgtaatgctgccgttactgtcgtagtttcatcctctctaaacatgcgttctgtctgtttttgatcatgccaagcaaaaaaaaaaatcaa

SEQ ID NO: 143370 - DNA, 343 bp, Zea mays
  Clone ID: MRT4577_62230C.1
tcgtctatttctcgatggtagatggcgacttcatgaagtttgaaggaaaatggtccataagatctggtcctagcaggtcctctagtgcagttttgctgtatgaagttaatgtgataccaagatttaacttcccggctatatttcttgaaaggattataaggtcagatcttcctgtaaatcttcgtgccttggcttgtagagctgaaaagatttatctggaaaatcaaggatgtggttcaagaaaattttctgttgaggacttgaagccatcatatacttctcagcttaataactaccatagtacgacagttgagacttctaagtttaaacaagcgcctcccag

SEQ ID NO: 143371 - DNA, 356 bp, Zea mays
  Clone ID: MRT4577_62231C.1
acttttgtttttttttttctattgcttattaccaaagttgtacagttccatctggatcatataacagtacatgagtgcttgacagacttgtcaatcttgacagggctcgcacgcttgcgcatctgctccatgatggtgacgatcgcggtgatcttcatgggcagattggaggacatgttcccatacaagggctgaatccccgagtgcctgtgccttcgagaccctctccactgttggccggtcaaccggactgagccttcaccaggcaggaaggggagtccaccacgcggacagagaccacaaccttgtccaccttgtcgcccagcacctgcttgatcaccctgagcagggcctcg

SEQ ID NO: 143372 - DNA, 341 bp, Zea mays
  Clone ID: MRT4577_62232C.1
ctcgctatcgttatagctcggacagggtgggaagctgcaagcctgcaacccgagacaccaaagcgcctattacataacataatacatgaccaacgaagcgcctacgttaaatatatctcatctagtctagataccaacaacacattacaggccatcgtgtcacatgagtttatgttcgcccagatggcttgtccccaggtcacttcgttgcttgggcttgctgtcagttgatacacgatccgaacaaatgtgtgcgaatatttcccttgtgatgtcaggatctcaataaaagcgttcttgtgtacgaagagatgcattctggtctgacgctcatagacgag

SEQ ID NO: 143373 - DNA, 413 bp, Zea mays
  Clone ID: MRT4577_62233C.1
gccgcttggagtaccgcgtgctggagtccaagaacacgccctggagggccaggtaccgttactgcgcttgtcactgctcaccacacacgagactagtgagtgcagaccacggccaacgccatacgtggagacatgggatgctgcttcagcatgaagtgcaagacccggccggcggccggagcctctgccttccagtaccgcttcgagcccgacgtccgcgactaggcgcagctagacgagaccgacaaggaggtgctctcggagacaccgaacactaaggcgagggccgtgtctgagctcgtctgctgtggcgtgctgctcgacgcggaccagcaggtattggtgacggcctacaagtacgacagcatcaacgccgcggtgagcgcgctctgtggtgtgctgtcgtctctctc

SEQ ID NO: 143374 - DNA, 580 bp, Zea mays
  Clone ID: MRT4577_62234C.1
gggtacctcgagccggcgggagacattccaaaagtcacactcccaagcagattcgccccctacgtgcgagcagtcgcacgcaagtgtcaagagacgaaacggccgactggctcgcacgcaagctgccggagcgctcgtcgtggtggccgcgttgctgctgctggcagcgtgggcgaccacctcgtaggccgccatcacctgggggtaggtgaggtccgccatcgcgccctgcctctcctacgcccgcggaacggtgaccagcccctccgcgtcctgttgaaacggcgtcaggaacctcaagagcgccgacagcaccgccgtcgacaggcgcgccgcctgtatctgcctcaagaacgccgccaggggcggcagtgggctcaacgccggcaacgacgccagcatcccctccaagggcgtcgtcagcataccctacaccatcagcacctccaccgactgatccagggtgaccgaaaacctagaccgacgcgagaagacggccgccttgatctgatccactaacctttccgtcgtcaccgccagcacgctatcctcgatcgtcgtcctgatgatttctatcaat

SEQ ID NO: 143375 - DNA, 307 bp, Zea mays
  Clone ID: MRT4577_62235C.1
gggaattaaacctttccaaaccaactttttgataattaattctagaaaggggggggacatgaaagctttgaaaattcaggggccagattgtacccccagtttttgttttgttgggtgggtgccacacccaaaaaccccttgcacgttttatcaaaagccagcttaagccaggtgattgtctcggtagcaatcctttggggatacactttttttccgatttaagttgaaaaagagtggggttccgtctccaaagccaaggatgttacttggggccaacattctttagggggcgatttttttttccccc

SEQ ID NO: 143376 - DNA, 502 bp, Zea mays
  unsure (1)..(502): unsure at all n locations
  Clone ID: MRT4577_62236C.1
ggtaccctcgggttcggccggnaaccaagcagtatgacttctctgaggagaggcctgctcgtaattcctcgtgggagcgaggacgtgtacgccttcgtgacgcaaaaaaacagaagcatcactagagttataccggacgggaaggatcatgcgcggtgagaacggggaagagactcgacaaccatgtctccaatctgtgtgccccggtacagctcgatgatcaggagcccaagctttgcctacgacgaccctatggtctactttggatccgactaccgcagaggattactgcatggaagatcggaccactggggatcgacggactgccgcgggagaacactcaggatttagagacagacctgagctaccagagtgttagcgggctccccgctgcaaggggcgttacagggctacctcgtcgggctcttcgaggacaacaaactttgcgccattcacgccaagcgcgttaccatcatgcccaaggtcatgcagctcgcccgcc

SEQ ID NO: 143377 - DNA, 454 bp, Zea mays
  Clone ID: MRT4577_62237C.1
agccgccaccaggtgcagagtcttctctcatctcttctccctcatctcagcccccaggcgcccacccgatcacttgttaatccttgctgaggggggaaggcccgtctctttggcaaacctcaactcctaggcagggcttacaaagctcgatgagtaccttcccactcgcagctacatcactgcctaccaagctcgcaaagatgacttgcatgtgcacacttcggttcacgggtgctccctcgtccaagtatatcaacgcagcacaggtgcctcaaccacattgttgcgctcgtgaggctgaccgtacctactgcagacggcccaggtgtcgaacgcagactcctccacacgccccttcaggcccaactccagatgcagctgcagcacaggctcccagttagccgaggagggacgcaaccacccctggttcaccttcttgggcgaaggaggccga

SEQ ID NO: 143378 - DNA, 254 bp, Zea mays
  Clone ID: MRT4577_62238C.1
agccctttctcttttttttttttttttttttttttttttcttttttttttttttttcttcctttttcgcttcttgttgccccgaggcccctctcaaggaaaaaccgcccagcgcgggcccgaaaaaggcgggagagccccccccgtctcaagcaacctgggaaggccgcgggaacacctctctggggcgagaggctgccagtgggccccaaccctgcccaccggagccccctcggggggcgaccccccaattgg

SEQ ID NO: 143379 - DNA, 736 bp, Zea mays
  unsure (1)..(736): unsure at all n locations
  Clone ID: MRT4577_62239C.1
actccatagggcgaatgggatcctcgaggccggccgggctcctccctcacctcctccagcgcttccaccatacaatctactcctgctcctctccatcagatcgttaccatcaaattaaccaagaagaattttctcttatggcgtgcgcagctgcttccttatctccgaagcaacaaactcatgcgcttcctcgatggatctcaacccatcccgcccgcaatggttcctgcgtcaacaagcgccggtgccgaactcattgtcaacccgacctatgagacctggtatgatcaagaccagcagctactgggcggtcttctgtcctcgatgacggaagaagtacttgctgatgtccagtccgcgacaacggccaaggaggcgtgggattctctcctgcgcatttatgcctcctccacgcgggctcgcacggtgcaaatccgtgttgagttggccaacatcaagaagcgggatctcacggccgcgacgtacttcgccaaggtcaaggcgctcgctgccgagatggcagccgcgggcgccccttcttggtgatgaagatataatctcataatttgcttgcaggacttgccaccgactacgatgcctttgtgacctcgacaccactcgaagtgatcgctttcccctggatgaggttattccatcttcatggtgtttgaggctcgactccacgcaacaagncggagatgcagatgcatctcaattctcgncaactacgctcgtc

SEQ ID NO: 143380 - DNA, 277 bp, Zea mays
  Clone ID: MRT4577_6223C.1
tgaaaaaaccataacacaacaatgttaataagaaaaacaacataacaggacaagcataaaaagtttgggatcaacgatggtagaggcatcagactcacatgttcaacaagataattaatggcacacaaaagcattaccggatacaggacttgcaaattggaatgactgcattttgcataacaaataagtcttggttgaaacagaaaatgcaagccaatctcctgacaggtaataccattctgcacagctacatttgcacgcgaaatataatcaacaa

SEQ ID NO: 143381 - DNA, 428 bp, Zea mays
  Clone ID: MRT4577_62240C.1
atggcaacgagctagcggcagaggaggtgcaccatggcaccatggatgtctggcgtgacgtgatgcacaatcacgctgctagctgttgatggcagtagctgctgcaggaagcatcgaacgtctgtgctcactcgctagtatggctacacttattcgtcaatcactatgaccatcaagatgttccgtgtgcgaagatgcaatgcgaattggatacatgatccaacaggtactggtagctactattggacatgtgtaactgttgctcgtacgacaatcatcatccatattacatacaatgcattagacgcttagattgtgacgacacataccgtcgcaacgactgccactgctcgtgctaacgctgcttgatgcatactgtgatgcacaactgactccggaggtgcatttggtggcacgaagcataccgg

SEQ ID NO: 143382 - DNA, 341 bp, Zea mays
  Clone ID: MRT4577_62241C.1
cccaatctggctgtctatcttcccgggaacccttatatagtgggggcctccatattatcctagcgcggccctgccttcagacgccaatgcccttcccttcttggacggggaccatttatatttttatcatcggggggaagcacgcataggttagaattttctttacccacacagggcccctcgctaactgttccacaccataatgtcgttagcacgtagtattacttgtcatatagcgttaggctcatagcctctattcttgaacaaacggacatgtcccgcatggcttccggaaaactccagggactcgttggccttggttaccaggggggataggaaac

SEQ ID NO: 143383 - DNA, 309 bp, Zea mays
  Clone ID: MRT4577_62242C.1
tcgtattcaccgtcctggtggcgcccccaccgtcccagctggcacggacccagccaccggcgtcgtgtccaaggacatccgcgacggtcccgcctccgcgcgcgtctacctccctcccggcgccgccggcaagatcccggtggtcgtctacttccacggcggcgggttcgtggtcggctcgccagcgcggtcgggcacgcacaactacctcaacgacctggtcgcccgctcgggcgccatcggcgtgtccgtttactaccgtctcgcgccggagcacaagctgcccgcggcgttcgacgacgcgtgggc

SEQ ID NO: 143384 - DNA, 384 bp, Zea mays
  Clone ID: MRT4577_62243C.1
gacaaaacataatttaaggggaggtttttaaacaaggggtggaacataacaagcaaaacggtgctgtgcagtatttgcaaccaagaccgccgcctgtgtcaacttggacgggatgatgactccaccattcacgcgttaacatactcgataccaaaaaccccaccagctcgagcgaaagtagcagcgggcgcgaacacttccggcccccgaacacagttcaggctggcggactcggacggctgcaatggaccaagaaaacgcccgcgaccgctgaccccctccgcaggacgggaccccgtccctcactcgccaagaaagttgaggcgccctcggcacttagggcggccttctcctttagcaaaagcttgatttttacaacaaact

SEQ ID NO: 143385 - DNA, 492 bp, Zea mays
  Clone ID: MRT4577_62244C.1
gaaccattatttttcttgccccaccgtaaaacagacgggcgttgtctctagcctaggtatgcccaccaaacatgtgggagcatatatacacacataggcgggcgcgtaaacacacaaattacaacgtgggcctgtggtacggccagctgccatacatccccctaggacgactctgggaagtccaaccctcagcttgacatattcaaatacggttgggagactcccatgaaaacattacccaaaacccaagagggccaccgaggggcggatatatccatagctgcgaatgcggtgatgcactgaatcagtctgtccttcaccaaccttcagaatgaactgctctggattgaccttgaacttcttgcctgcaatggtgaacgcaatgtgaagcatggacgcaagactgccacaatacacgggtgattctgccacaggactaagaatacgctcgaaaagctgaccaatgtatttcaggattagctccttcgtctt

SEQ ID NO: 143386 - DNA, 309 bp, Zea mays
  unsure (1)..(309): unsure at all n locations
  Clone ID: MRT4577_62245C.1
annnngaccatnnagagccnnacangancnangaggcggcacgannaggggcacggcnngaggcanangcacnnnanganccagagancgggnaccggcaaggaangagngancncngncaccaanaanngcagncanggaggaagancangaagcgnncnggngcnnngngggnnncangaggaaagccagacacaacnncaggcnngacgaggnnggganaaaaagacagcngaaaaccgncncgcagancaacaagcgcaagganncacaccncnacaggcaccngcagaaaccccaggcggaaga

SEQ ID NO: 143387 - DNA, 776 bp, Zea mays
  Clone ID: MRT4577_62246C.1
ggataaaggcattattgaatacccaatttgcagctgcctcaggcacagcaactaagagcaacatcgtcgattgggcagagaagctgtatgggcagtccattggcgctgtgaagaatctcttgtcagatagtaggcagctggccttgacaagaacagttgaagctcttatggaagggaaaccaaacccagaggtggatgactaccttttgtttgatccacgggctcctaggtcaggaactagtgggcagtttaaaggacccttcagagaagccgttgttttcatgatcggtggtggaaattacattgagtacaagagcttgatagagctaaagcaacgctcacagccttccaaacatgttatatatggtgcaacagaaattcttagtggggccgagtttattcaccaactggcagaattggggcagaaagcagggttgggtggtggcagcagcaacataccaccaggttcagcacaataggtaggatgctcttacaagaccttttaatgttaaggagtgattcgagcttcagggactacgggtggcgtaatatataaattcattttgtgtgttggggatataagtttattacttgttttatctacaatagttggatacttggattgggaaaatgcattgtagcaatggcaagctgaaggtttgtgccactggttctcaaaagttgatttattcatgcgaatggaatctaaacatcttttgtactgaagcgctgcgattaaataaaggctatcaatagttaataaaaaagaaaaaaaa

SEQ ID NO: 143388 - DNA, 264 bp, Zea mays
  unsure (1)..(264): unsure at all n locations
  Clone ID: MRT4577_62247C.1
gagacgaacaagaggagcgaaggccagagcacaagcacgcggggagggaaacgaaaagaacacaaaaagagacaggcaccgcgcaccacccagacagccgggcccngacaaccccngagccaccgaggccaggagcganagaggggcnnaagcgcagcgcacccagcagaggngagacacacagggggagagccagnacgaggaagaggggccagcnggcccaagaggaggancgcgacagngcgaggaacaacaagagcggca

SEQ ID NO: 143389 - DNA, 491 bp, Zea mays
  Clone ID: MRT4577_62248C.1
aactattgatagcctttatttaatcgcagcgcttcagtacaaaagatgtttagattccattcgcatgaataaatcaacttttgagaaccagtggcacaaaccttcagcttgccattgctacaatgcattgtgccaatccaagtatccaactattgtagataaaacaagtaataaacttatatccccaacacacaaaatgaatttatatattacgccaccctattgtgctgaacctggtggtatgttgctgctgccaccacccaaccctgctttctgccccaattctgccagttggtgaataaactcggccccactaagaatttctgttgcaccatatataacatgtttggaaggctgtgagcgttgctttagctctatcaagctcttgtactcaatgtaatttccaccaccgatcatgaaaacaacggcttctctgaagggtcctttaaactgcccactagttcctgacctaggagcccgtggatcaaaca

SEQ ID NO: 143390 - DNA, 2775 bp, Zea mays
  Clone ID: MRT4577_62249C.1
gtagttaatgatgaagttggcgattctttgcatcgaagcatccagccgaggaaatcaacggttacaattggatggttggtccgaccacaatcaatcttagtcgcacaacgcgcctccctgctccagttttccattccttgcgcccccttcagatccgatctgatccacgccggcgagacaccggaggaccgccatgacgctcagcctccgtcgcaagcagctcgatgttatcgtgcggatgctgcacctgaaccagcagcagttgccgaacggcggcgagggacagggagaggacgatgcgtacaagatcctggttatggatccgccctgtatctccatcctctcgcctgtgctcaagctcggcgacctccgccaccaaggtgtcaccctcaccctcgccatcgatcgtccgcggcaggcggtgcccgatgcgccggccgtctacttcgtccggcccacccccgggaacgtggaccgagtagcggccgacgccgccgcggggctctacgggtctttccacgtcaacttctccacctccgtcccgcgacccctgctggagcgcctcgcaaccgcctgcgccgccgctccgcccgcgtgtgcgggccgcgtggcgcgcgttgctgaccagtacatcgacttcgtctgcatcgaggatgacctcttttcgctagcgcagccccgggcctacgtcgcactcaacgaccccgccgctgccgacgccgacatcactgccctcgtcgacgccgtcgcgctgggcctcttctgcgtagtcgccacgctcggtgttgtgcctgtcatcagttgtgcgcgcggcgggccagcggagatggtggccggcgccctcgacgcccggctccgcgatcacctactcgccaagcccaacctcttcacggaggctgcatctgccgctgtcacgtcattccagcgccctgtgctgtgcctcttcgacaggaatttcgagctgtctgtaggggtgcagcacgactggagctaccgcccattggtgcacgacgtgcttggcttgaagcagaacaagctgaagttgccggcagagaagtacgaattggatgactctgataaattctgggtggcaaacagctggtctccattccccaaagttgctgaggaaatcgaagcgcagcttgccaagtacaagcaggatgtggatgaggtgaaccagcatactggtggtggcaaggttggggttgagtttgatggtactgatctaattggcaacactaagcatctcatgaatgcggtgaactcactgccagaactgacagagcggaagaatatgattgataagcacaccaatattgcaacatctttgcttgggcatatcaaggagaggtctctggatggatactgcagctgtgaaaatgatatgcttgtgagtggcactgtcgaccggaatacactgctgagtctcatcagagggaagggtaccaaggaagataagcttcggctagctgtgacctacctgctgtcctttgcgacaccaccatcatctgagctggagcaggttgaggccgctctgcgggaatcggaagttgacatgtctgcatttcagtatgtgaagaggataaaggcattattgaatacccaatttgcagctgcctcaggcacagcaactaagagcaacatcgtcgattgggcagagaagctgtatgggcagtccattggcgctgtgaagaatctcttgtcagatagtaggcagctggccttgacaagaacagttgaagctcttatggaagggaaaccaaacccagaggtggatgactaccttttgtttgatccacgggctcctaggtcaggaactagtgggcagtttaaaggacccttcagagaagccgttgttttcatgatcggtggtggaaattacattgagtacaagagcttgatagagctaaagcaacgctcacagccttccaaacatgttatatatggtgcaacagaaattcttagtggggccgagtttattcaccaactggcagaattggggcagaaagcagggttgggtggtggcagcagcaacataccaccaggttcagcacaataggtaggatgctcttacaagaccttttaatgttaaggagtgattcgagcttcagggactacggtaaatacgctcataccccacattttattttaaggagcgttccaggctgcatagattagtgatatcaaatttcatgaaaagtttatgccccttcgattgattagttgtcaatacatagctttgttgtttcaatttgggttttgatattgcccatgtatgactatttttacttttctgtactctatttccttgcccccctccctttattttactaagaaatttttcttggaattctgtttgcacactcaaagaaatcagttcatgaatatttgtaacagaaacctagttctgatgtttggataatttgattttggttgaaatcttcatagttccaggatgttacatcttttacttgtagtgcatggccatatgtgggttcttgaaaccccatatatatgactaaccatctcaataatatgtatgcagggtggcgtaatatataaattcattttgtgtgttggggatataagtttattacttgttttatctacaatagttggatacttggattgggaaaatgcattgtagcaatggcaagctgaaggtttgtgccactggttctcaaaagttgatttattcatgcgaatggaatctaaacatcttttgtactgaagcgctgcgattaaataaaggctatcaatagttaatagccaaag

SEQ ID NO: 143391 - DNA, 1316 bp, Zea mays
  Clone ID: MRT4577_6224C.1
tcgcccacgcgtccgcggacgcgtgggcagaggattgctgcctaatggcaaagagattgctgtaaaacaattgaaacttggaagcggccaaggagagcgtgagttccaggctgaggttgagattatcagccgagtacatcacaaacatcttgtgtctttggttggctattgcatttctggaggcaagaggttgcttgtctatgagttcgtccccaacaacacattggaattccacttacatgggaacgatcgaccaacaatggagtggcccactagattaaagatcgctctgggtgctgccaagggtttagcttatcttcatgaagactgccatccaaagatcatccaccgcgacattaaggcatctaacattcttcttgacttcaaatttgaagctatggttgctgactttggacttgcaaagttcactactgataacaacacccatgtgtcaacaagagtaatgggcacctttgggtatttggcacctgagtatgcagcatctggcaagctcacagaaaaatccgatgtattttctttcggagtcatgcttcttgagcttattactgggcggcgaccaattgacacaacccaaacatatatggatgacagcttggttgactgggcaaggccattactgatgagagcgctcgaggatggtgaatatgatgctttggtggatcctcggctcggaaaggacttcaatcctaatgagatggcaagaatgatagcctgtgcggctgcgtgcgtacgccattccgcacgtcgtcggccacgaatgagtcaggtcgttcgggctctggaaggcgacgtgtctttggaggaccttaatgaaggtgttcgacctggccatagccgcttctttgggtcatatagcagctctgattacgattccgggcagtacaacgaggacatgcagaagttcaggaaggcggcgttcaataacaacacctacaccagcagccaatacagcgcgccaaccagtgaatacggccaggtgccgtctggatcaagcagcgagggccgccagacgcaggagatggagtcgggtgcagtgaagaaaggtggatacagcggctacagctcaggatacagcggtgcctcgtgagcgaattccctccctctctctttttgctctttttacttctgatgcttttcgttgctgcgtttgtaaagctgacttccgcgtgattgatgtatctaagtttgacccagtatagttgtatgtagctgcaatcgtttattctttcgtgaaaaattgttcttgaacaaaaaaaaaaaaaacaattcaacgagagctaagctaattgactgct

SEQ ID NO: 143392 - DNA, 589 bp, Zea mays
  Clone ID: MRT4577_62250C.1
atctcctcacaaccactgttccacatcaagaacatacagaaccagagccccaaacccacccaccctcacacaacaaaaaagcagagcttcaagagccatggcaccgtcctacgacaagaccatcgccacggcggcctcgctggcggcctccctgatgctcgtccgcagcctggcgagcgagctgctgccgtccgaggtgcgcgacgcgctctccgcagccctcaacagcctgcgctcccgcatgacgtggcagcacaccatcgtcatcgaggagacggaggggtggtcgggcaaccgcgtctacggcgccgtcaaggcctacctcgccacgcgcatcaacgccaacatcgacatgcagcgcctacgcgtcagcagcaccgaggaggacgccaagaagatggtcgttagcatgggggcgggggaggagatggtggatttgtacgagggggtcgagttcaggtggttcctcgtgacccgggaggtgaagggggacctgaacaacggcggcggcggcgcacgggaagacacgtcatatgaggtgcgcttccacaagaggcacaaggataatgccctgaaagagtacctcccg

SEQ ID NO: 143393 - DNA, 351 bp, Zea mays
  unsure (1)..(351): unsure at all n locations
  Clone ID: MRT4577_62251C.1
cacccccaattaaatactcgccncacnacacccaacccccaagggggggggagtctaaaacngaaaaacaacaaccccgggatacaacggaaaggaccacaaaaccaaagaaagccacaagcaacaccaaaagtaggcccgataaaacccggggacaaaaagggcacgccggaccaaaattaaacaggacaacagcagacaacacaacgcccggggacagcagcagacgggcgcccctacaacccaccaagggttgggaacagagcacgacccacaagggatggagcaacagcagccgggccaagactggaaccccccccgaaaccgcccaaaaaccaccacgaaccccac

SEQ ID NO: 143394 - DNA, 296 bp, Zea mays
  Clone ID: MRT4577_62252C.1
gacgccgtacagcacagactccaacatttaccgactattccagttcaaagaaattactgctcattgctaaaatttaaaaaaaaaagcacaatcgtcaatcactagctcattgctactacacaaatttaacaaattgaacaacactcgccacttggccggctcgttggctagcagttcttgtcgggcttgtcgagcttgcatttgaccttctggaagacgacggctggcgtccccggcggcgcgagctgcagcttcagcgggcacgtcgcggccagcttgcacttggtctcgtgccg

SEQ ID NO: 143395 - DNA, 823 bp, Zea mays
  unsure (1)..(823): unsure at all n locations
  Clone ID: MRT4577_62253C.1
ggnccctaggggcctttttttggccctttggacaaaaatcatgtatttttttataaataaattgtttgctttgagatctatgcatattgttcgagggccagacaagcaaaattccatataataaaacactgaaaaaaaatacagtgcaaaggtactttattgtagacatatcccagacccagggattcaagggggcttcatacatactacatccacgcatacatgcacacaaggagccgatgaccaaatcagcacagaatgagacgaagcttggatcaagtcctcaagcatccatgctctttattcacgcaggtgctgttgcagttgctgttgcaggcgggaaagcaggactggaatataccgcccgtgcaagactggcaatcgatagtggtgtcgtggacggattggcaggcattgtgggcttccagattgcagtcacgggtgcagttgccgtagcagcagaaggacaccgtgcacgcctgaaggacctgcctctcgcacgactgcctagcagccagggggttctcacagtaactcctgcaggaggtggcgacctctccggtgcagttcgctgtgcacagcgatccacagtcgctgcataacggcccggtccttgggtgccccagcgaagacaggaccataatggcgaaaaccgcaacggcggcagcggcaccggcgccagaagccattgctggagatggacacacacggcaagcagctttgctagctagcctacctagagaggaggagatatgtaggatgtcaatgcaacgagcgactcagattagttgtgtccccggcccggccggcctcgagggtccca

SEQ ID NO: 143396 - DNA, 140 bp, Zea mays
  Clone ID: MRT4577_62254C.1
acccacgcgtacggcaggtgggggacttgagcagcgagcgccatttatctcgatccggaagcttccgagcgaatgcttacgtcctcctcgcagtgagccatggcccgctcctcctcgcagtcgcagtcctccgtcggtgg

SEQ ID NO: 143397 - DNA, 293 bp, Zea mays
  Clone ID: MRT4577_62255C.1
ccatcgaaccattgtgtgccaggcggcgagcagcatctccgccgaccgcttccccgacatggataagcgtaagctgatgaacctcctcctcctcggcgccatctcgttgcccaccgtcggcatggtcgtcccctacggcgccttcttcgtccctgccgtctccggaaactcctgcggcggcacctacgctaaggacaagctggacaacgacatcacggtggacgcgtgtctcaacactcacggtcccaacgaccgcactctcccacaggttctcaagggtgaccccacgtacc

SEQ ID NO: 143398 - DNA, 354 bp, Zea mays
  Clone ID: MRT4577_62256C.1
ccaagaagatgtcgtatgacagacacaatgtgatcaaggatggaagtggtgtggagttactagagaataacatagcggctatagagcaaggtgaggatggcatctctctatcagatgaggataatatggtggaactatatacaagtgatcaactgagagcaaccctggatgatcatgctgcagcaaatcaaaaggtggtggagcaagaaggtgacattgttgaaagggttgtgaccacagatggtatttctattgaagactatgagaaggaagtagagcaatctactggtgacgaatcaaggtcaaccaagggtgtgaactttgcggaagataacgagaatgtggatccagaag

SEQ ID NO: 143399 - DNA, 649 bp, Zea mays
  Clone ID: MRT4577_62257C.1
cattgggtacctcgaggccggccggggtatttcatgtgacgtgaactcctttcgctcgctgcgagtgcttagaaaggggagatcgacgcacccgcaagtcgaccggccacggaacgcgccgccgccggcatcacatcacagaggcctcggcgtcgtctcggatattccccgccgcaggacctatttccctccaggtgtcggagaccatgtcgaccggtctggacatgtccctagtacgtatcctcatcatgtagtccaatgtcccgacccaacgacaacccggcgaccttgacggggtcgtgcccgacctgacgcgccacaccccaccgcgcgaacgcgtcactacccatcggccgctcccaaggtccgggccgtcgccgactcgccctatcgtcgtgtactccacgcacgatcatcgcaatagcgccgccccctgtggacaaactaggggctcttgagacgggaacgaacctgcacatctctgaccttgaatccgtggtcaccatctagcgatggccagaaactcttctcggaagatgttaagctcagacggtattctatgaatgatgaagatgatgggagatcgtaaaggaggctcgcgagacaggtgtactttgcaacgagagagcctgccttggatgctatcaag

SEQ ID NO: 143400 - DNA, 399 bp, Zea mays
  Clone ID: MRT4577_62258C.1
ccggccgggccgggatctaaagctagcatatgactctcgtctatctatatagccaattagacccttgaaaacgatataacaaatactttcctgtgtgttatgttgaacagatgacgtttcaggggtgctgctgaagatactcccgtggagcaggctgcgtagcattgagacgaaccacctccagctatccggatgcctgctaagctgctggccctcgaatcctcgctggagaagatgttgatcattccattcgggtccatcaaaattgaatgtagagtctcacatacatgatggaactacagtccatcgctatgctgaatgcatgggctcaacctgatatgtgcgtaggctccctatgaatggtgataatcagatacctgcatgaagaagatcctgatg

SEQ ID NO: 143401 - DNA, 326 bp, Zea mays
  Clone ID: MRT4577_62259C.1
gatgaggcaaaggtgcagaggttggagtatgatcactgtctttgtgacgagcggtgtagtgactattgaactgaccgtagcgctcctgttatgtggatgaagtggaatgctgatatggggaacggacttcatcacctgcaagtgcaaattgatatgcatggtatgagctagctcaaagtggatgggagtgatggtacattctacatgtgcaatgaaccctgttgaaaacgacagcattgttgctgagatgctgcggagatattacgactctgttgaactatttgatgtcactaatgaactaactgaattagtccgtcgtcctggac

SEQ ID NO: 143402 - DNA, 247 bp, Zea mays
  Clone ID: MRT4577_6225C.1
aattaatcctacgacttttagttgatttgagagaggaatcagccacatgggagatgagaacaatcccacgcctatttttttttgcgaaagaaaaaatagtgttgcagcagtagggaattttgggcaatacacaaacgtgtgacctggcaatctagtggaaatgatgaagactatggcagtcgctaaatttgatctcgaagcgtttagattaaaggcattcgcacggaagccatggccaatacatgtg

SEQ ID NO: 143403 - DNA, 424 bp, Zea mays
  Clone ID: MRT4577_62260C.1
ccaataatcccttttttttccttaatattaatttaaaatattctctgtgggggttacaggcaaccaccggtccacatccaggccaggaagaacctggagacacaaaaaacccccgaaaaacacagccctaacaacagacgcaaagggaactagggaaaaaaaaacactccacggggggcaaaaaaacaacccgaggggggcccgcccctttgggccaagggggagacccccccaaacaaaaaagaaacaaccctctttaaaaccaaaaaggggagtgcctacaaaaaccatcccaaaaaacaggcccccccaaaaaaggggaaccccccgaacggccaccaccggtacaatttcctaaggggacaggaaaaaacccagggccaacgttgaaggggaacccttaaagggcgcgggaggggaaaaa

SEQ ID NO: 143404 - DNA, 571 bp, Zea mays
  unsure (1)..(571): unsure at all n locations
  Clone ID: MRT4577_62261C.1
tttctctanaagtttgagcccaacanagtgatgatgtaaataaggtggcaaggtgatgtatgtacaagttttttttctatataagcacagtggtactcataagctgtgccaatatgcaactcttaattatcttggcattggatcgcttctaaaatttcagtatgaatagtaccttttgatatcatatggcagtttaactacacatcttaacgctatgctttccagccattagcagtctaccttttcaacaccaaagcttctaagttgatgaataatgaggccaggcaagcaaagattgtcaagttctcagagtccatttggaaacttacctactatgcttctgttcaagcatgggtcctcatgataataaagcaggaaccatggtcattggatatgatgcaatactttgatggctggccgaaccaacccatcgtgggcacgtcttgtgaccttctgctaaaaatgggctatacaaacttttgatctgtgccattcaatgtcagcaccaccaaacaccatcnaatgctgactgaatgccttagattgggggttgtgatccttttatacttat

SEQ ID NO: 143405 - DNA, 637 bp, Zea mays
  unsure (1)..(637): unsure at all n locations
  Clone ID: MRT4577_62262C.1
cgcatgtcacgccgtaccgtaagtcttggnatcctnctagnnagcggcccgcccgtttgttttttnnttttttttnntttttttnntttttttttttgtttnnttttttttttttttttnttttttttttttttttntggcagaaaaaaaaacacattttttatgatcaggcccgagggcggacataggaatcgacgacgacgggaatcgtcaaaccgggggacgggggggatgaacaaccccaggatcggagacggggacgaggccggcgaccatgcatgaataatgggggggcccccccccagttgacaggatcttatttaaaccccgctacatagtttaaaaccctggggggggggtggtggctttggctcctccttcctcctcgggcgccatcgccgggatggctcaattgcagctgcagaaactgcagccgcagctgctgccgcacttgcaggggttgcagtcgcagccgccacccttgacgggcgccttaaacccgccggcgctggccttgggggtcggggcaacgagcaccatgggctttatgccgacgggggggggggtctccatgtgaggggacattttggagccgccgaaaccggtgccgcactggcagccggagccccacccccaa

SEQ ID NO: 143406 - DNA, 228 bp, Zea mays
  Clone ID: MRT4577_62263C.1
ttttttttttttaagagtggcttattatggagaggaggcattttggtgggatatacccaacatcggtttgattcacagaacctacagtatgtgcagaggcactctgacactcgaacgaatggaccggcatacttagctgcacacattgtatacgatacgagacgcctttgttcgaccaacccaaccgttttcacagacgcagggtttactacacaaagctgcgagtat

SEQ ID NO: 143407 - DNA, 305 bp, Zea mays
  Clone ID: MRT4577_62264C.1
gtgcacttcacctgagggcgctctcggattcccaccggatttgatgcgcgcaccttcagcttcaaattctcggcctttttgccgcctggcaaaagctgctgtgtcatagcttttgtttcttcttaaggtggacgagatcactgtgcgcccgaattatttccgcacttgtttaacccacgggctgttttatgtgttgcttttgaattgctcgatcccttttgctgctcctcgtcttcttcatgggaatgtatgtttcctctgctcggccttgctctctgctgtgctctgctgtaacggacgcagcc

SEQ ID NO: 143408 - DNA, 634 bp, Zea mays
  unsure (1)..(634): unsure at all n locations
  Clone ID: MRT4577_62265C.1
ccagttttttgtttacatttttcatccttaaaatactgacacgagcgatgcwcctctcattcatctaatcgtctwtccgacactgacataagtgtatctgtttagaacagttctatctctataaaaaagtaaatctgaatctrgatatcactgcagagtaactacatctcctacagtwsccmtctctagtttttaaattctgttaccatttcgtgtgaacactgcaatgtttatcttatgttatcttacaggtatgtgagctttctagttgacagtatatgcatagaattaatagaaatttggatcagacagaggscctgtcaagatacgrtctgtataccatactcatcattgtttaaagctagccccctctcattttaatttgaatgcaggygcasgcnccgggtgtccaaggaggaaatatactacaagataagatagtaaaaactatacaaagggtgaaaagccaggttcactggataagatcggtgatcctgaagtaaaattatttatagagaaatgtattgctaaagccactggaagactagaagtgaactgctgctattttgactagaagtagaaggtaaaaatggctttaagattgaattctcaaattagctgctacatttaaytc

SEQ ID NO: 143409 - DNA, 337 bp, Zea mays
  Clone ID: MRT4577_62266C.1
gtttagcttctgcccgctggaggaaaaaaaatgtttggcagagccggcccattgtcctctttttttcttaacttggccaccgctctaattcgtgctcgaagtgctcatgtggtgtcccgcattttaatatggagttcataacttgcggatcaattatcattacatggagctcgatcctctgaggcacatcgtcaacgtagttctcggcgttgacaagatccgtaaccctcttcacgaggacttgaaagtcgtcatacgacttgaggaggctcaccctcttgtaccggctgctagcgccttaaccagcgcctgaacgcgtgatgatcccggccttgag

SEQ ID NO: 143410 - DNA, 285 bp, Zea mays
  Clone ID: MRT4577_62267C.1
cggcggccgccctccttttttttggtttttttagagaacacatcatttttttcttgccgagatgaacccatgtttcggtacaggtcatttccattcatggtacaaacagggaccagttctcgctcacatgcatgcgaacacctacatttccgtatccccgaacaattttgggtggaaattgcaaccactaactttccaggcactctggaggtggcatatgactatgcactgcatatgtcggggtcctccaagatgacggagaggttctggagcgggccctttgcg

SEQ ID NO: 143411 - DNA, 1030 bp, Zea mays
  Clone ID: MRT4577_62268C.1
cattgggtacctcgaggccggccggggttaagatgattgagataactctgataggggccgtgaggtaatcccgcagtgcaggtgagcgaccggcgcctagcgttctgtggccgccgcccttctgccgtccgaccggaccaggtcgccgacgtcgcccctatcccgcacgcgtcatcgcagcgcctccgagtctccgccaagatctgcctcggccacggcgcggcgccgctggagctgcagccgtccagccgactgccttccgccgaccaccgaccaccgaccactggccgagccgccgcagctagctgcgctttgaagcatgggtcgttttgaacaagttactccagaaggccctgaaactaatcagcatgatgagcagcgctccatacgtttacatgcattttctgatctatcacacgtccctgcagccacttttatttatctcttaaaggactgctatggatatggtacgaacaaagcaacctcaaagtttaagatcctcatgcagctggtaaaagtggcattgcataatggtccacagccaggcccgttcacatatgttgtccagtgtatgtatattgtacctctgctggggaaaacttattctgaagggttcagccatatgttgacatcctctttaaagcacttgaaatctgtggaatcagcacagaaagatttcttggaggcaaagcaccttgccgcacaacttgttcttgatatccttgattctattgtaccccatgagaaccgcatattggtcaagcttcttgagacatttgaaattgagttgagagacatggcccgtgctttgtatgattcagagttggacgatggtgatctaatgaaagcacgtgaacatctcagacagcaagttaagcgctgtatggaatcagaatccaatgcacttgctgtgactctaataacacatttttccatccaatgctgtgatgagtccttcatcatataattgattaaaaacaatcatttagagattgcagagcaattgtgctattttcatgggcaaggaaat

SEQ ID NO: 143412 - DNA, 359 bp, Zea mays
  unsure (1)..(359): unsure at all n locations
  Clone ID: MRT4577_62269C.1
ccaaattcgttttgtaccgacggccacaccncgggcggggcccacggtcgtggtggggaaagcaaccccaccacccatctcaaaagccaaataccacagcaccacagcagcaatactccacaccgactccggcaagaacacaaccacccaaccacccgaagcacaagcccagacacatccacactccaaaaaatcctcaggcggaaggcgagaccgctgaacaaaacaatcttctccatcaactattcttgtctcctaccacacccgcaccataaagtnttagaagggaaaaaccacagactctggaacgcgaacanatgagaccaccaattactatagctccagctcttacacanaaa

SEQ ID NO: 143413 - DNA, 338 bp, Zea mays
  Clone ID: MRT4577_6226C.1
gagtctctgatagtgtacagcggccgccctcgcggacactacgcttttctttttttttaattacggatcgcaggtaggatatgcatgtgtataggtacaataacgctttaggtctggggttagaacacatgggcaatcaaagtgcatgcaagacccgcgatcaaaccgccctgaaataaacagaacttctacctaccaacgctattttgtttaaagcaattataacattggctactggttattggactacatttgagggtccacaaggggctgattcttttacaacaagggttgggtcaaggcatacctccccgtgtggtgaagccaattcataatac

SEQ ID NO: 143414 - DNA, 307 bp, Zea mays
  Clone ID: MRT4577_62270C.1
cggacgcgtggcgagacgcgtgggcgcgtcgcagcagcggcggcggcgcgagcggcgtgccgttcctctcactctcacgggcacgtgaaacggaaggcacggcaatcggcaaggggggctgtcggaggatgtgaatatgcctgcaggcgaccagctggagatgccgattccacgcagacgcagggagggacggccacggcccagaccaggccaattgaaccggctactacctcgggtgggtggactatagaaatgcatggtcatggagctgcgcgcacatcttcgatctacccgtggtggtgatgct

SEQ ID NO: 143415 - DNA, 328 bp, Zea mays
  Clone ID: MRT4577_62271C.1
cgcgcgtatcgactcctataggggcgattggtgacctagcgggccgccccggcccccgattccgcccacagccatcgcagtacttccacaagtacatgccccagccgtacccctgcgacccctgcggctgtagataccggatcgactgccagcatgacgcctcctacacctgcaacatcgtgtgattcgttcattatcaatatcctcccttgatgaatctaccgcccgagtgcccaccatgcccttaattaccattatacccaaccccacccctataaaaaaaaacccccagtatggcgtctcatcatccctccgtacctcctcctgt

SEQ ID NO: 143416 - DNA, 381 bp, Zea mays
  Clone ID: MRT4577_62272C.1
ccaaactcgtgagcactatgtactagtgacgcacaagccacgatatagccattatacagacatggactccaacgacaccggatcatgaagccaagggaaagaagggagcggacggccgcaaggactgcaatccaaggaagaagtcagagtcggaggccgtgaaggctatacttcaattgcacgtatgccgcatcgtacgctacttgaagaaaggccgatacacgcaacatgtcagcacctgcgccaacgtctacctcgcagctgtactagaatacctcgccgctgaggttctggagctcgccggtaatgctgccagggacatcaagatgactcgcattattacgagccacgagcttatggcgatccggaacgacgaggagc

SEQ ID NO: 143417 - DNA, 716 bp, Zea mays
  Clone ID: MRT4577_62273C.1
tgggtacctcgaggccggccgggatcctagttccctcacctcactcactcgtgaagagccagagaacccacccaccctccttcatctcctacatccgcatctatcccagaaggccatgggcgacgccgagtcaggacctcaagagcgggttccagaagttcaagaccgacgtgtatgacaagaagccggagttgttcgagcctttcaaggccgttcaggtccccgagtacatggtgttcgcctgctccgactcccgcgtgtgcccgtcggagaccctgggtctgccgccaggtgaggccttcaccgatgcgcaacatcgccgccatggtgccggcctacgactagaccaagtacaccggcatcgggtccgccatctgagtacaccgtgtgcgccctcacggtggaggtcctcgtggtcatcggccacatgtgctgcggagtaatccgggcgctgctctccctccatgacggtgcacccgactacttccacttctgatagtgctggggcaagatccgcttccctgccgaggtcgaggtgaagaaagagtacgcctccgtgcccttctatgaccagtgctccatcctggagaaggaggccgagaatgtgtccctggagaacctcgagacctaccccttcatccaggaagggctggacaaggggaccctcaagctggtacgggcccactacgacttctggtccaggaacttcctcgtat

SEQ ID NO: 143418 - DNA, 1031 bp, Zea mays
  Clone ID: MRT4577_62274C.1
ccacgcgtccggtgaagttcgttgtaatcactgtatttgtaggattgacatttgcaagcatagcattatctactagactgcaaccaggattggagcagcaaattgttctgccacgaaattcctatttacaggattattttgatgaccttgcaaagtacatgaaagtaggtccaccattatactttgttgtgaaggacttcaattacagctctgcgtcggtggatacaaatcaaatatgttcaatcagccagtgtaattcaaattctcttttgaatgagatatcacgacaatcattatcccctgagactagttacattgctaaacctgctgcttcatggcttgatgacttcctaatttggatgtcccctgaagcatttggatgctgtagaaaatttgtgaatggaagttactgccctccagacgatcagcctccatgctgccaactcgatcaggtttcaggctcttgcatgacaagcaaaacctgcagtaactgtacaacgtgcttcctacactcagacttggataatgggcgtccatccacaacccaattcagagataaacttccatggtttcttgacgcacttccatcgagtgattgttctaaagggggaaaaggagcttattcaacaagtttagacctcagtggttatgaaagtggcattatacaagcttcggcattccgaacataccatactccccttaacaagcagagtgactatgttaactcaatgagagctgcccgggacttcagttctaaaatgtccagagatttgcagatgaaaattttcccatattccgtgttctatatattttttgagcaatacctgagcgtgtggaagacagctatcatgaacatatgtgtttgccttggtaccatttttgttgtttgcttcatagttaccagcagtttatgggcttcagcaataattttaactgtgctagcaatgatagtcttggatatgatgggggtgatggccatccttggtattcaactcaatgcaacctctgttgtaaaccttgttatgtcgata

SEQ ID NO: 143419 - DNA, 475 bp, Zea mays
  unsure (1)..(475): unsure at all n locations
  Clone ID: MRT4577_62275C.1
ggccttgttttttttttttttttttttttttttttttttttttttttttttatgtagatgcggaatcaattgacaattactacagtccatgtacagaactttcccatctacgcaaaagactccaatattccagctagccaacatgatttatccaggggggggggaaacaaacttgaaccatcttgatacatacaacagatccccaggaaacttgacattgtacaggggactctcaggacagccttgacttactcctaaaaaccgaggtagacccagtagggctgttcatcaactcattatgggggggggaaatagtcgcgttacaagcgggtgcccgtcttcaaaaaacagtaaacacccttacaggcgagagccggggatgaccttcatgtcaacggggagctcacgagcaccggngntgaggaccaggaccccgacggaaccaccgccaaactctataactttttttaggggg

SEQ ID NO: 143420 - DNA, 437 bp, Zea mays
  unsure (1)..(437): unsure at all n locations
  Clone ID: MRT4577_62276C.1
atacgaacggctcccacagtcagaactaccaatacgccgaaagcatcgtgactcccagggtaatcgtnacgcgaccaccgccacgccgtcgtcatgtaacgcaaccccgcgcgtgcacgaggtcccgccggaagtgccgcaaggcagcacttgcactggccccggtcctccgagcagctcgcagtgctcgtgtccgcgtggatatacgacggagctccgatacaagcacaatgtgcgttccatttcgatatgcaaggacgaccaggcgcaggtcgtagcgatccacactacaaggcccgtgaggttacaagcgtcgcatacgtaccgccgatcgctgactcatcacacgttgagtggatctacccgcgagataggtgatagggctcaagcgtgaacgtgcacatcctgccttccaaagtgatgagtacaaagctgaa

SEQ ID NO: 143421 - DNA, 328 bp, Zea mays
  Clone ID: MRT4577_62277C.1
ggaccaaaaggaccaggagccaaaggggccggactaaaaaaattgactactcgttcaaaaaaagggggcactgggtaaaaaccccaaataagggtactcgcccttgttatgaaaacaaaacaacctaattatttattgcacaacaattagaaaactaacaaaaacattttgggacattttttttttgtatttaaagaaggggcaaatgtgcaactaggttatcctcaaaatgggacaaaataagtttcccgggcaccaaaatttttccaccccctcgggaacctatgatttttggattggaagggaaaacttgaaccggacccgtggg

SEQ ID NO: 143422 - DNA, 743 bp, Zea mays
  Clone ID: MRT4577_62278C.1
ccacggcgtgcggaccaaggctgattcattcaaacaacagcagcctgaacaaggaactatggaaagaaagagagcatgaggggcacaagtttattgcgagatgggcctataatcatgggaaattgctagtatacgatgctgtgttcacattttaaaattcatgaactttgaactgaacacattttaaaattagacttcattttttaatcattggcaggaatacctttcaatgcgtgtgacaatgatgagttcaagcaaatgtgtgaagcaattggacaatttggaccaggacttacacctccaactcaagatgcctttcgaggtagtttgctggaacaagaatatgaaagaaccaagtgtgtgctgcaggaacgtgaagccgagaagatgaaaaatgggtgctctattatgaccgatgcttgggcagataggaagaggagaagcataatgaatatatgcactaattgtgctgatgggacctccttcatcagctcaaaagagatgtcagatgtgtcacacacaagcgaagtcatttttgaattagtggacaaagcaattgaagacattggtgaagaaaatgtggtgcaagtagtcactgacaatgcctctaacaacatgggagcaaagaagctattgcttgagaagagaccacaaatattttggacctcttgtgcagctcacacaatcaacttgatgctccaaggaattggcaaattgcctcggttcaggaaagtgattgacca

SEQ ID NO: 143423 - DNA, 3174 bp, Zea mays
  Clone ID: MRT4577_62279C.1
aattcggcacgaggatttttttttggggaaggtgaagcgagaggagcaggaggagagaaaggggaacgaggccggccgcgaatcggaggggaattcggggggcggggctcggtccggccggaaattcgcgcgattcgggcgcgggttagcggaaggggagggtgagcgcgcgcgcggaggcgccgcgaatgtgaagatctggtgctcggcgggatgacttcttcggcggcggccgcggctgctgccgcccaggtggcgggaggaggtggaggcggcgagggggatgccgccgctgcggcgcgaggcggaggcggaacggaggacggcatgtacacggagctgtggaacctctgcgccggcccgctggtcacggtgcccagggtcggggacaaggtgtactacttcccgcagggccatatcgagcaggtggaggcgtcgaccaaccaggtggctgagcagcacatgcaattttacgatctcccgtggaagatcctgtgtgaggtcatgaacgttgaattgaaggctgagccagacaatgatgaggtttatgcccagctcactctgctacctgaatcaaagcagccagaggagaatggctctagtgaggagatgcctgcttcacctcctgctgcacttgcaaggccacgcgtgcactccttctgcaagacattgacagcctctgataccagcactcatggtggattctcggtgctgcggcgccatgcagatgagtgtcttccgccactggatatgacccgtcaacctccaacacaagagcttgtagccaaggacctgcatggtgtggaatggcgctttcgccacatattcagaggtcaaccacgaaggcatcttttgcagagtggctggagtgtttttgttagtgccaaacgtcttgttgctggcgatgccttcatctttctaagaggtgatagtggggagcttcgtgtaggagtcaggcgtgccatgaggcagcaagcaaatgttccgtcttcagtaatatcaagccacagcatgcatcttggtgttcttgctacagcatggcatgctgttaacactgggaccatgtttactgtctactacaagcctaggacaagtccagctgagtttgttgttccctgtgatcgctatatggaatcactgaaacgaaattaccctatagggatgagatttaaaatgaggtttgaaggtgaagaggctccagaacaaaggttcactgggaccattgttggaaatgtggatcctgatcaagctggatgggctgaatctaaatggcgttacctcaaggtgaggtgggatgaagcttcctccattccacgtcctgaaagggtttctccctggcaaatagaacctgcagtcagccctccccctatcaacccacttccagtgcacagacccaagagacctcgctctaatgctgtagcttctctgcccgagtcttcagctccaacaaaagaagctgctccaaaggtcacattagagactcaacaacatgccctgcaaaggcccttgcagacccaggataatgtggccccgaaaagtgtttttggtgataacagtgaattggactctgctcataagtcctccctgcgaccgtcaggttttgatctggacaagagcaccattggcatgcagaggaagctgggttcagatatttggatgcgaatgaacagacctgatggttacagtgaaatgttatcgggatatcaaccacctaatgaaggtgcacggaattcgcagggtttctgttctttacctgatcagattgccgctggacgtcctaatttctggcacactgtaaacgctcattaccaagaccagcaaggcaatcacaatctgttccctggttcatggtccatgatgccttcaagtactggctttgggatgaacagacagagctatccaatgatccaggaagtcggtgggatgtctcagagttgtacaaacaccaagtttgggaatggagtttatgctgcactacctggccgaggcattgatcgatacccatctggatggtttgggcacacgacacccggtggtcgcgtggacgatgcccagccacgcgtgattaagcctcaacctttggtccttgctcacggcgaagctctgaaaatgaagggcaactcgtgcaagctttttggaatccatctcgacagcccagccaaatctgaacctttgaagtctccgccaagcgttgccacaccggcagctgagaagtggatggcagacggaatcgacgcagacaaaagccctgagccgcacaagacgccaaagcaactcggtgctacacaggtggatcctgtcccagagagatgcccacaagcttcaaggggcacacagtgcaaatcacaaggcgggtcgactaggagctgcaagaaggtccacaagcaaggaatggcgctgggcaggtccgtggaccttaccaagttcaacggctacacggagctggtggcggagctggacgagatgttcgacttcaacggcgagctgaaaggctgtagcaaggagtggatggtcgtgtacaccgactacgaaggcgacatgatgctggtcggggacgacccctggaatgagttctgcagcatggtgcacaagatcttcgtgtacacgagggaggaggtccagcgcatgaacccgggcgccctgaactcgaggccggaggacagcggcctcgccaattcgacggagaggggctccgcatctactgctgctgctagagaggcacccggctaccagtccgcctcgtcgcttaactccgacaactgctgatgccttggcagctagctggtcgtcccaagtagtagagaacaaggcaaatgtatccatagatctccttgtagcggagcttaatgcctttttttcccctttctaatatgcattggatgagcccgtagcgcaccgtagtagtatctaaagctggtgttctgagttggttggaccttcctgcagttttggtttctccttctgatgtggcaagttttagctggtcgcacctacctaatgtatgcttagcaaacgaagtcccactaagcgctgtacataactgcccctccctgcatcaactctaatatatcatctgcttaatcgtcaaaaaaaaaaaaaaaaaaaaaaaagaaaaaaaaaaaaaaaaaaaaaaaaaaaaaagggcggcccggacgcgtggaggcacacaaagat

SEQ ID NO: 143424 - DNA, 1100 bp, Zea mays
  Clone ID: MRT4577_6227C.1
attgcatttctggaggcaagaggttgcttgtctacgagtttgtccccaacaacacattggagttccacttgcatgcgaaagatcgaccaacaatggagtggcccactagattaaagatcgctctgggtgctgccaagggtttagcttatcttcatgaagactgccatccgaagatcatccaccgtgacataaaggcatctaacattcttcttgacttcaaatttgaagctaaggttgctgattttggacttgcaaagttcactactgataacaacactcatgtttcgacaagagtaatgggcacctttgggtatttggcgcctgagtatgcatcttctggcaagctaacagaaaaatccgatgtattttcttatggagtcatgcttcttgaacttattactgggcggcgaccagttgatacaacccaaacatatatggatgacagcttggttgattgggcaaggccattactgatgcgagcacttgaggatggtgaatatgatgccttggtggatcctcgtctgggaaaggacttcaatcctaatgagatggcaagaatgatagcctgtgcagctgcatgtgtacgccattctgcacgtcgtcggccacgtatgagtcaggtcgttcgggctttggaaggtgacgtgtctttggaggatcttaatgaaggtgttcggcctggtcatagccgcttctttgggtcatacagcagctccgattacgattctggccagtacaacgaggacatgaagaagttcaggaagatggcatttaacaacaactacaccagcagccaatacagcgcgccaaccagtgaatacggccagataccatctgcgtcaagcagtgagggccaccagacgcaggagatggagtcaggcgcaatgaagaaaggtggctacagcggctacagctcaggatacagcggagcctcgtgagggaaattccctttctccttttgttttatttttcttttgatgtttccattattgcatttgtaaagtctggccgaattatatgaccaaagttgctgacttgcgcgtgatgtatctaagtttgaccgagtatagttttatgtagctgcaatcgtttattctttc

SEQ ID NO: 143425 - DNA, 435 bp, Zea mays
  unsure (1)..(435): unsure at all n locations
  Clone ID: MRT4577_62280C.1
gcgtccgtcaagtttgaggctggctgctgctggtcttgctcagccaaatcaacagaagtgggcggagggtgagttcatacataatgtgagcaaaatcaacaaattaatttgaggctggctgctggtcttgctcagcagaagtgtgcggaggcggctatggactggcggcaaaatcaacaaattcactgtcaagtgtcaacaaattaattcactgtcagcagaactgggcactggcggcggctatgggcactgggagctgtgggcggaggtaaaagggaggagggaggagggggccggcnaccggcggcgtacctggcggctctggagtggcggcggctatgagcactggggcactgggagctgtgggcgccgacagaggtagcgggcaacgcataccacagaggacgtcggctgggcggctggacgtcggctgga

SEQ ID NO: 143426 - DNA, 786 bp, Zea mays
  Clone ID: MRT4577_62281C.1
gcggccgcggctgctgccgcccaggtggcgggaggaggtggaggcggcgagggagatgccgccgctgcggcgcgaggcggaggcggaacggaggacggcatgtacacggagctgtggaacctctgcgccggcccgctggtcacggtgcccagggtcggggacaaggtgtactacttcccgcagggccatatcgagcaggtggaggcgtcgaccaaccaggtggctgagcagcacatgcaattttacgatctcccgtggaagatcctgtgtgaggtcatgaacgttgaattgaaggctgagccagacaatgatgaggtttatgcccagctcactctgctacctgaatcaaagccagaggagaatggctctagtgaggagatgcctgcttcacctcctgctgcacttgcaaggccacgcgtgcactccttctgcaagacattgacagcctctgataccagcactcatggtggattctcggtgctgcggcgccatgcagatgagtgtcttccgccactggtagcttgctggattcttgacttgatattgccagtgcatcagttgtaggtttgctatttgttgctttactggtagtggtaatctttgctttggctttctggtcaggatatgacccgtcaacctccaacacaagagcttgtagccaaggacctgcatggtgtggaatggcgctttcgccacatattcagaggtcaaccacgaaggcatcttttgcagagtggctggagtgtttttgttagtgccaaacgtcttgttgctggcgatgccttc

SEQ ID NO: 143427 - DNA, 407 bp, Zea mays
  Clone ID: MRT4577_62282C.1
ctatatttataaaaattttttttttttttttttttttttttttttttttttggggcagatatgtacagcgcttaatgggacttcgtttgctaagcatacattagggaggggcgaccagctaaaacttgccacatcagaaggggaaaccaaaactgcaggaagggccaaccaactcaaaacaccagctttagatactactacggggcgctacgggctcatccaatgcatattaaaaaggggaaaaaaaggcattaagctccgctacaaggagaactatggatacatttgccttggtctttactacttgggacgaccagctagctgccaaggcattaacagttgtcggagttaaacgacaaggcggactggtagccgggtgcctttctagcaacaacaatagatgcgga

SEQ ID NO: 143428 - DNA, 614 bp, Zea mays
  unsure (1)..(614): unsure at all n locations
  Clone ID: MRT4577_62283C.1
cgtcctgcccacgcgtccgcattatatatgcctcaggatcaacgataccggtcgggaacgcttggcttgcgggcgcggtaccaacgatgaggnnacgtcgtcgtcggtggtgatacttaggtaccctggctccaacnngccgcgtaccgtcgaagaaancnncagtgcaatacccaagcttcaagctggnaggnngcggcgaattgcgccagagtggaggggaacatnnggtgataaacacagnaatgnngggtaacttcttactcgcccttgcctccccatcacgngagtattgaccannggccttggatgnnaggagagcttaaacccagggngagcaggtagnggacgacganttctctcttgttcatgttaattatactataaaaccttcgcgcttacacggtttaaccgatgttttcagatcttcgagaagctggtttcgggcatgtatctcggcgagattgtgaggcgggtgctgcttaaaatcgcgtcgcagtcttccatcttgggcgatgtcagccacaccaacctcaaaactcgcttcagtcttaggactccggacatctccgcaatgcaccatgacggcacgcctgacctgagagtcgtggcgg

SEQ ID NO: 143429 - DNA, 261 bp, Zea mays
  Clone ID: MRT4577_62284C.1
cggacggtgggcctcgacctagccgacatcgtcgacagcagcatgtacgtgccgacgaacgaggctgatgcgcccgtatccgggctctgctcatcgaaccggccggcggaggattactccagttcggccgagggcgccaactcctgttccgaggcggtggttccgtcgccgccgccgcctccgggcgtgacgacgacgacgacgacgaacatggtcatggagaggacccgccgcacgaagctcaacgagaggctctacgcg

SEQ ID NO: 143430 - DNA, 224 bp, Zea mays
  Clone ID: MRT4577_62285C.1
cccacgcgtccgtgcaactcgaacaacacaccacgcctctaccgccagcatggactcgcttgtcaagcgcagacatggccacggtgcttaccgcagcagcaagccccagacgaggtaccaccgccagaccaccgagcccgtgaccaccgtcgccacggcccacctacccgcctgacaccaaccacaagccctaccacggcggcggccgcggcgcgcacaagcag

SEQ ID NO: 143431 - DNA, 500 bp, Zea mays
  Clone ID: MRT4577_62286C.1
gtgatattgtgtttcgatgaaaggttaaaatgcaaaaaattcggctacggcgtcgcccatccggccagcgtatcgtgccaccgccccgccacggccagcgccgccgcctacgccttcttggtcgcggcctcacgccgacgaggtcaacctccatttggtcctcctctcgtcgtcatcctcctgctgctccctctggacccggccctcggccttggccgcggctgcgtgcggtgcgacaccgacgctgatggctgtcgcgagggcgggccagcgtcgtagtcctcggcgtcgtccacggggcccgctgcgccgggttcctcctcccatggtgctggcgactctggcggtgagtcctactcctcgacggccgcctcgaacggatccttcatggaaaacgcgcgcgtggtggcggtggatgcacgagaggccgaggaacggatgcagagaagattggatctgacgagctgggtccggaagctagatggggcttgatattataa

SEQ ID NO: 143432 - DNA, 283 bp, Zea mays
  unsure (1)..(283): unsure at all n locations
  Clone ID: MRT4577_62287C.1
cccacgcgaccggganggctncgagcggnncgctcaaggacaccngaacactcggggcncagcgacacaagacggcggaacggcaaacaacgcaggagcgancngagancncggaagggancnggncgacggaccaaagcgcacccacccgnngccgccggccangacggcaccngagaccacaccagagcaccacanngaggacacacggangcaggagnggaacgccaanagaccgccaacaccaaccaggggccgcccncaagcgcccaacaacgaccga

SEQ ID NO: 143433 - DNA, 229 bp, Zea mays
  Clone ID: MRT4577_62288C.1
acaacgaacagaggctggggcttgcccaaaagttatggtaagggttgaaacaagaaaggatcatgtgcaggtaaaacgccaatatatccttttcccaggtaattcaacaccatcctgaagggacgatctgggtaaattcgggaaaaagccaaggcaacttagaaaggggtcagaggaactctgtggaactttgcgtaatggggtggcaacccacggagctagctgagag

SEQ ID NO: 143434 - DNA, 357 bp, Zea mays
  Clone ID: MRT4577_62289C.1
cgcgtccgcgacgatggcccggccgcgcctcctcctcaggttcatgctcgccgacggcggccgtgctgaccacggtgcccggcgtcgcgctcgccaagtcgaagctcgccaatatgagcgacgacgtcttgaacgggcccctcctgaccgagaagatctaggcgaagaacacgctgatcgtgaggccggacgaggagttcaagaccgtacagtccgccatcgactcggtgcccgccgggtacgcgcagtgggtcatcacctacgtcagctctgggctgcacaggggcaaagttgtgatacgggagaaaaacccttcatcttcctgaggggcaacgggaaaggccgggactccatctc

SEQ ID NO: 143435 - DNA, 812 bp, Zea mays
  Clone ID: MRT4577_6228C.1
acgggcaaattttcatgagtaccattctcactgttataagattttcatgaggcaggaagcaaagccttgagctagcttgtttgcatatggaaaggttcatactcctgactccaacagatattggattgctaattcatacgaatatagattcatatctggccttgaacctgaaaatgttgataaggagtttttaaggctttggttcaagaacaactgcaatccatatgaagacacagttctgccagaagctctagaagagttggtatgttagttggcctagcgatatgtatctctataagtttctgccgttgtttctcacttcaaagttgatactcatgaggccttatcgtctgaaagaagaaatggtcatccaaagatcatccaccgtgacattaaggcatctaacattcttcttgacttcaaatttgaagctaatgtcgctgactttggacttgcaaagttcactactgataataacacccatgtttcgacaagagtaatgggcacctttgggtatttggcacctgagtatgcagcatctggcaagctcacagaaaatccgatgtattttctttcggagtcatgcttcttgagcttattactgggcggcgaccaattgtcacaacccaattggcactgcttgctataagcacatatgtacttccatttgcatgttgtataatactaataccaattgcaaaattatagttattttttctacccttgttagttaataagcatatttctggtcaataggttgtattcttattcttgtaaccgtgttaattaatgttatatacttgtagtctcgt

SEQ ID NO: 143436 - DNA, 197 bp, Zea mays
  Clone ID: MRT4577_62290C.1
ggggcggggggctatttttttttgtttgggaacgactacctgccacagtttcaaatgacttatatggataacgcacacttctggtcctgacacggacacatcatgtggggagatcctcatgagccacgctgactgaattatcaccaactcactttcctggtattttggggtcgcccaaaggctacgcaaacggatct

SEQ ID NO: 143437 - DNA, 548 bp, Zea mays
  Clone ID: MRT4577_62291C.1
gccggccgttccggcctctttgctccatccattagttttaaggtataacaatggtcacccctgccgttaagcacaccatcgtcaagaagcgcactgctcacttcaagcgtcaccaatctaaccgtttcatgcgtgttggtgaatcttggagaaagcccaagggtattgattgtaacatgcgtagacgtttcaagggtcaagctcccatgcccaagatcggttacggttctgccaagaagactcgcaaccttttgcctaacggtttccgcaagttcaccgtctccaacgttcgcgaactcaacttgttgttgatgcacaaccgttcttacgccgccgaaatcgcccacaacgtttcctccaagaagcgtgttgctctcctcgaacgtgctgctcaattgaacgtcaaggttatcaacgctggtgctcgtctcagatctcaagagtaaatttattagctacaatggattaaataatcacttgcagttgatttgtttttctgataaagtaacacctttaacaaagaaaaaaaaaaaaaaaaaaggccccta

SEQ ID NO: 143438 - DNA, 350 bp, Zea mays
  Clone ID: MRT4577_62292C.1
gggcacgttctatcctataggaatttaactataggaattcgatagagaaggaattcgatatggaattgagttgttggtatggtaagcataacacggtggcgcattaaaccgaggactgatttgccaagtccatggttatggtgcactctgtgctagatatagggcaacccgtaccctaatctttattgcacaagagttaaagtgcttcccctttgatagtttgaatggaaatacctaaattctgagaagatatatctgttgacggccatgtatggttcacaggagtatatattttgtgtatcgaagttctacataggaaatgggagtacggacagatcctccacaaaagg

SEQ ID NO: 143439 - DNA, 352 bp, Zea mays
  Clone ID: MRT4577_62293C.1
ttctagacggctacttttgcagcatgccccccccgggcgcggcacattacgtgctgtgcgcggcaccaccaagccccaaggagctgtacaacgcgctcaaccactggttacaaggtactagctggtgcttctgatggaatacatcatacccaaacacaggcatgggaagctttttggagataccgcatgtgcactgaacgctgagcagactgcacattgcaagtcatcttattcaactgaacacaacatggaccaattggtgcatgaaacgaggaaaactgtaaagcaatataacaactgttgcattaaccaacatacgcacatctgacacaacaacctaacattctagaat

SEQ ID NO: 143440 - DNA, 267 bp, Zea mays
  Clone ID: MRT4577_62294C.1
tgaagcagcgcagatcgatgtgcccagcctccaggtgatcaagctcatgcagaactttaagtccagtgagtatgttagggagacttctcctggcagtactactactggtatctcaccagcgatggcattgatcacctacgcaactacctgaacctcccgtctgagatcgtgcctgccacgctcaagaagtctgccaagccacctggccgcgcatttggctctggccctcctagtgaccgccaaggggcccaaggtcgtttgacggcg

SEQ ID NO: 143441 - DNA, 442 bp, Zea mays
  Clone ID: MRT4577_62295C.1
ggccgcttttttttttttttttttattgtttttctttttgtttttttttttttttttttttttttttttttttttttttttttgggaaaaaaaagggaatttaaaacagagacggggtcatcgaaaaacaacaacaacaacaacaacatgcgatagacgacttgatgcagggccatatatataaggcggcgggatatattttttttttcggacggaaactagcaggtgggagaaattatttagcctccaaatcgatcgaccgcggggggggggatagtcaaaagcactggaagccccaggggacccgcccgccccaaaaattaacaaggaggcttaggttgatgggcaagttgaggttgatgcccaaaaagttggccctgggggcggggcaaaggaacaccgcggccttcagggcccccagcccctgggaaaagggggaaaa

SEQ ID NO: 143442 - DNA, 407 bp, Zea mays
  Clone ID: MRT4577_62296C.1
aaaaaaaaaaaaaaaaaaaaaaaaaaaaaaaaaaaaaaaaaaaaaaaaaaaaaaaaaaaaaggaaaaatgagaaacaaaaaaaaaaaaaaaaaaaaaataataaataaaaaaaaacataaaaaaaaaaaagggggcggcctttttaaaggttccatgttttctaacccgtctttccaaacctatttttttttttttgggccccctaatttaatttcatgggccgggtttttaaaacttgggccttggaaaaccctttgcttacccaattttaattcttttgggcaaattccctttttccccaattgggttattaagaaaaaggccccccccatttccttttccaaaaacttgtccacttttaatggcaattgggcccccccttttacctttctttaaaccccggggg

SEQ ID NO: 143443 - DNA, 230 bp, Zea mays
  Clone ID: MRT4577_62297C.1
gagcttgcatgtcttattagaagtatataacacgatgaaatacgtacataacgatccacacattatttcgactacaaggataacgtacagtagttcaacaaccagcgtcattttttagcgatcaatgtcgctccacctgtgccctgacccacgacttgtacctctccttgctggcggtgaagaaggcgacaagctcgtccctgttcggcagggaccggttcacgacctta

SEQ ID NO: 143444 - DNA, 541 bp, Zea mays
  Clone ID: MRT4577_62298C.1
cccacgcgtccgcggacgcgtgggggagaagcgtgtatccttttctaaataatcttgtgtttcaaatcttagttgatttacaaatttcatgcatattgttagagatatgtatagacttgtatatttttgtactgaccttacacatcaagccatacaaccttgtataccaaactgtacaaactataatgaaaggtcatcccccacaatgggcgtgttgcgtttccctaattctctacatggtatcatgagtttgggcctaaacctagctcttcccctccgctgcccatctgaatctgatcccatagtcgccggccctttccctaaggcgctgttggctcccctccgctctctatttgttgaccccaaaccctagggcatcattggcctctccctccctccatactacatccctgatcacagccgtgggtctcctctcctaggtactgattggcgctggtccatctcctggttgccatcacccttgttctgatggcaccaccaaattccagtgactctcatcacacgttcatgacagaggatg

SEQ ID NO: 143445 - DNA, 341 bp, Zea mays
  Clone ID: MRT4577_62299C.1
gtggtaggttttaacccccattttcaaatttttcattttattaatccagggccggtttaaaaaaaaattgaaacgggctcccaacaaacaagggaatacggcacccaacaaagacatggtaatctatcgaaacccctgcgcaaaacataaaaggggcaagggtcctggtaaaacagggttgcccttaactcggaaccttctaaagattcccaatttcaaacggggacttccatatttcaacaagaaggggtgtttcaaataacaagaaacatatcctaaatataaaaggagcccgccagacatgggagtcccatagccccaaaaaaaaacttacttggggg

SEQ ID NO: 143446 - DNA, 841 bp, Zea mays
  unsure (1)..(841): unsure at all n locations
  Clone ID: MRT4577_6229C.1
cggccgcgtgggcggccgcgtgggctttggcaaattttctttgcacttttcttgttcgaactggcaatccacaaccaagtaccttgcttgcaccaacaaaagtcccttctactgtagggcaatccatggatttattgcttgtcctgaaatttgatagaggcattcatgatatcagttgctcgttaattccatttgtttcttgttctcttgtgcattgttatgacatatttgcaccttttgcggggaacgatcgaccaacaatggagtggcccactagattaaagatcgctctgtgtgctgccaagggtttagctcatcttcatgaagactgtcatccaaagatcatccaccgcgacattaaggcatctaacattcttcttgacttcaaatttgaatataaggttgctgactttggacttgcaaagttcactactaataataacacccatgtttcaacaagagtaatgggcacctttgggtatttggcacctgagtatgcagcgtctggcaagctcacagaaaaatttgatgtattttctttcggagtcatgcttcttgagcttattactgggcggcgaccaattgacacaacccaattggcactgcttgctataagcacatatgtacttccatttgcatgttgtataatactaataccaattgcaaaattatagttattttttctacccttgttagttaataagcatatttctggtcaataggttgtattcttattcttgtaaccgtgttaattaatgttatggacttgtagtcttgtattaaaaaaaaaaaaaaaaaaaaaaaaaaaaacggctnacaacaaataaggaaacttataggc

SEQ ID NO: 143447 - DNA, 1528 bp, Zea mays
  Clone ID: MRT4577_622C.1
atcctctagactcagatattacatatccgggtacttgagtgcgtaatttattattacatcacccagaggcaaaacaccctccctaaatgaggtcacaaggagtgataatcaattttccaaggaaaggaatgcatcaattgtttagcacacaactcctattacctaatgcatcatataaggtgataaagattttaaatcaacaaggaaagggataaatgcaccggggcttgccttgggttgtaggaggttcaggatccactccgcaaatgtcgaagtaaaagttgttctccgctggaggattttcagcttgggagacaacctcttcttctaccacagtttcttcctcgtgttctatacatgacaatacatgtacatgaatgcttatgtgatgtcatgaatatggagttacacaatagaaacatcctaagttgttccatacataaacaaaccatgaaataaacatacaagcaacattaaaaagaaataaatcaccacgcaatttagcgatcaatgtttacttgttttaattaatttttagtcactaacatctacaggtatgttcaggctataagatttgatagtgatccttgctctatagcgacccaccgctagtccccgacgacatctatagcgaccaaccataagttgttaaatttctagacttttagtgaccaaccgaccgttgctacaaaaggatttagcgactgaccgtcggtccctaacctttagcaaccaacagttggtacctaataagggtcgctaaagatcaaccgtcgtgtagtggggagctagagaccgagcacggcgagatggacaggactgagctcagcaggagcgtgcgcgcactggtgaaacaccggcgagccggagagctgcacggcagggatcgagctgagggaggcactgtctgatttgggtgagctcggggagcggcgcgcacggcgcgcaggccgagccagggacgcggcaggggagcttcaacggcgagcttggagactgggcagagcgccggccgagggagctgctcggcgcgtgcagggaagacagagcacgcacggcgtgctgacggccagcggacaggcgcgcgccatgggaaactcgccggcagagacgagagagatgggagggagaggagcgcgcgaactggaggaccgcagggacgtgaggaacaggggcgcgagcaagaacgcggcacaggaactaggcgccggcgttggagaccgcttcggccgggcgcgcgcggccagaagggaggcagagagggagcggcaagggagaccgagcagagaggagggagaaagagaaggacgcgagcacagggagaaacttgggtgcgccatggctgaaacttcaaatccggcgcgcggaagccgaagatgacgccggtagactccgtccaggccatgtgcaccaggaatcgccgcctgcacgcgaccagcagcgaggtgagggagccgggcgagcggcggtggagagcaagcacgaggaagcgcgggtagatgaagataagggaggcggctgttggaaa

SEQ ID NO: 143448 - DNA, 372 bp, Zea mays
  Clone ID: MRT4577_62300C.1
tgcagttcttaacttcattttctgagttgaaatatgaaataatctcatcagtttattgtctttattcttgaaacattatgaaaagcgtaccaacttttgagttatcttgatctatttgcaactatgaagggacaaaaatcaacctttgttttgtggaattttaaattaactatgttgttttctttctcccggtgtctgtgactctatttattcatgttcatgtgcttgtttgtgcaaacgagtgattcagtgtagagtgtggatagacaggataacttgtaaagtggtgtaagattaaggctgtaactttgctgtgtattgatgaacgtttgcctgtgaggcttttaataaattatctatatattcaaaata

SEQ ID NO: 143449 - DNA, 281 bp, Zea mays
  Clone ID: MRT4577_62301C.1
cggacgcgtgcgctgtcacggaatatgtacatatgtttcacaggggtatgccagcgcgggtaagcatctgtgctctgtgcgagcgatatgctggcatgagcagctgcaatgccttgagaccctatcttgaacgcaaattccttgtccgagctcaagatggctcacgtatatgacacgtcgatgagtaacattgacgtagctcatgccacatgtagcgtcaacatggtagaagcatatacctctacgtcggacaatatgaaagaactggatgtcacaatgcc

SEQ ID NO: 143450 - DNA, 235 bp, Zea mays
  Clone ID: MRT4577_62302C.1
tacgcagtgaaagctgttgacttgtgaccacaaggtcctgtgtctgagttgtgggaagctttttgcaattccaggaaaaggccgtgtactataggacctaattaggtctgaccctttcctgaaccccgaacaattggggttgccctaagttgtgttttttccatggctatcttgttgttcaccattcaaaaatcgacctacagatactgagtgtaagggagttctcatgtcatga

SEQ ID NO: 143451 - DNA, 218 bp, Zea mays
  Clone ID: MRT4577_62303C.1
gaggtgttagattgcggcggcttggcggtaatcagtggtcaatagcttgtgttcactgtggtgaaacttgtgtatccagctcacatattccacaccaacttaccgagccaggaagcatacaggtgtaatagcctgggcgtgcctagatgaggtgagactaacgtcacgattaatttgcggttgcgcttcacttgccgcgtctttccagctcgggtaat

SEQ ID NO: 143452 - DNA, 153 bp, Zea mays
  Clone ID: MRT4577_62304C.1
gcccacacaccacacaaaaggacaggggtgggcttttagaaccccgttccggttaaaacaacccaatgaccggatgccactaaacttgcttctcttcactcttaagcaaacggaatagtgcaagatgcagcaccccgacacacatgctacgaa

SEQ ID NO: 143453 - DNA, 514 bp, Zea mays
  Clone ID: MRT4577_62305C.1
gtcagtatatgccttacggcgcatatgttggtgggccccccccccccccccttcccccccccccccccccccccccccccccccctctccccccccccccccccccccaatataaaaaaatgcttgccggacttcctcttaaataatttcaccgccacctctcccggaaaaaggtcccgaacttttttaagccccaaatatttttccaaaccaaaaaaaaaaaggttctttcgcccctacccggatgaaagggcccgcctgatttctgggggaaagaatggttcacctgggaaatttttttcccattaggcccacctaatgccgggtgccgaataaacttatgacctgaagagaactgctgaccctgcggccaattggcctggtaaaaaatattttttggttactggaggccgtgtccaacgagcaatgataaccctactttaaagttgtttaaaattttcacctaaggaacccgggcgggggattataaatctcgataacccacgattttttt

SEQ ID NO: 143454 - DNA, 921 bp, Zea mays
  unsure (1)..(921): unsure at all n locations
  Clone ID: MRT4577_62306C.1
tgggtacccttcnagtccgtgccggnaaaaatcagaggaatacatagccgagacccgacggcctgatcgggggtgcatgctcgaccgtgctatcttcttcccgtacagtgccagccaacaggccatcttccccagcaggctagtgctgcctgcccgtaacctaatggacggctgatgcttcgttgtgcgctcatcttccccgagcagcgcccaccgaagatccgtatgcgcaacctccgatctcatcgacgggtggtgtgctcggcgtggccgtgccgcagcggcgcaagcaagcatggcacttgccctaacagcggcgccggcgcgctcgctgaagcagcagccgaccatagcgcctgaatgctggctttcgtccccgacgccgacgcctgtccgtgggcttcttcttcccgaccatcccccacgtctagagcgagcagccgcgcctgaccggctttcgtcttcccgagcagcaacgccggccgaagccccctcccgacggcacgcgacttgctgaatcatccctcggagcacgctgcacgcgacggactgtctccgacgccggcgcgaatgtgcagatctccggcattcaggcatgtgaagggtcgcctccacccccaccacgcgacgggccggagctgccgcgcactgacgtcagtaggccttcttccccgagccgcgcactaacgtcagtaggcccggagcagccgtcgttggggctgttgaacatgtgctgctgaaactttctgttgtgcctactgaaattgaaactgaacctgttgaacgtgtgctgctgtaagcttgcttctgcttactgttcttcttactgttttgctgttgctgtcactgctgaaactgaacccgtgttcaggtgcatatgctgctaatattgcaagtaagcttgctattttgctgctattg

SEQ ID NO: 143455 - DNA, 1674 bp, Zea mays
  Clone ID: MRT4577_62307C.1
atgtcgctctgcaaccgatgcctcgccgccggggtcgacgcctcggcgcgcctcaccgcggccgccggcaacgaatccaagtccctcaactgcttctacctcaccgtgctctacgcggccgggatctccagctccgccggccccgagtcccccgtcactgcgaggtgtgccctcggcctcgctctctccacgcctcccccaacctcgtcgccaacctctagctccgccacccacaccaccaacatcgcagtagccgccaccgtcccgatcgcctcgctcctgctcgtctccctcgtcgctctcctcgtctggaggtataggcacgagctctccaaggacaggcggagcatccaaatctcggaggagcggcgctcgcgcccgcggccaaacaccggctccgtcatgttcgacatctgcgagctggcgaaggcgaccggcggtttcgccgagcgcaacctcatcggccgcggcggctttggagtcgtgtaccgcggcgtgctcgtggacggcaccgtcgtcgccgtcaagaagatgctcgagcccgacgtggagggcggcgacgaggagttcaccaacgaggtggagatcatcagccacctccggcaccggaacctggtgccgctgcgcgggtgctgcattgtcgacgccgacgccgaccccgaccccgacgagggcaagcagatgttcctcgtgtacgactacatgcccaagggctcgctggaccagtacatcttcgacgacgcccaaggcaggcggcggccggcgttgtcgtgggcgcagcgcaggaccgtccttctggacgtggccagggggctcgagtacctgcactacggcgtcaagccggggatctaccaccgggacatcaaggcgacgaacatcctcctggacgcggacatgcgcgcgcgcgtggcggacttcggcctcgcccggcggagccgcgagggccaatcgcacctcacgacgcgcgtcgccggcacacacggctacctctcgccagagtacgcgctctacgggcagctcaccgagaagagcgacgtgtacagcttcggcgtgctggtgctcgaggtgatgagcggtcgccgcgcgctcgacctgtccgacccgtccggggtcgtgctgatcaccgactgggcgtgggcgcacgccaaggctggccggccgggggatgtcctcgcccaggcgctgcggaaggagccgagcaccagcgtggcggccatggagaggtacgtgcttgtcgggatcctgtgtgcccacgtcacggtggcgttccgcccgaccatgccggaggcactgaggatgctggagggggatatggacgtgcccgacctgccggacaggccgcagccgttcggccagaggatcgcgttcgacgaaggcgaaaccaatttcagcgcctcatcgattctgagcggcggcggcccattcgtggactttggagacatgctcaggtgatgcacgatggcagcggcgacgatggctgcgtgcaagatgagtatatccacagttgcacatgctgtgccacactatcgcaagtgtatgtgtatggttaactggatttcagagtgatgtatagcgtttcagctaatgtaaatggattgtatgcaacatatagtgaaaagctaaatgcgtgtcaaaaaaaaaaaaaaaaaaaaggcggccctcgcgatctagaac

SEQ ID NO: 143456 - DNA, 469 bp, Zea mays
  Clone ID: MRT4577_62308C.1
gggtccccgcccgcagggcaaaaaaaaccaggagggaataaccaacaccaaggtatttggtttccgaaaacccccccaggaaaaaccgccccacggatattggaaaaaccccagtcccagtttcccctcgtccttttggggaaaaaaaaaccaagggggggggggggcaggccaaaaacaaccccccccaagcggccccatgggggggaaaggggacttttaccaaaggggttaggggccctgacaaaaggggtggggggatttaaaccagaaccaccccctcgacataaagaccgcgttaggccatccccacaggaggggggcgggtgggggcttgaggagttacggggaggggggcggggagaggagggggggcccccggggtggggtgggggggggtggggggtgggggcgcggccgcgggggggtgggagggggtggggcgaggggagggggaaagggggggggg

SEQ ID NO: 143457 - DNA, 311 bp, Zea mays
  Clone ID: MRT4577_6230C.1
gcaaaggctgaggatgattataagactggagataacgagaagatgatgaagcacatgcgtagaggtctctcatgagcgagcatgtgccaacgagctacagcccatatcgcatgggcacccagaacaaatcacacaagaacaatctgctgactgctataatatcttgaccaatgactgccaggaacatttggctatgaagcacttcgtcttaataaatcaactggactttaaaggttgactacatgatcctaacatgtgaccctttgatctctgtgacaccaaaaataagcttaacaacttcaaactatatg

SEQ ID NO: 143458 - DNA, 435 bp, Zea mays
  unsure (1)..(435): unsure at all n locations
  Clone ID: MRT4577_62310C.1
tcgcggacgcgtggctgctgctgctatcgctggttggccaggagcacaccagctgcttgctgtgtcgccgtcgtagaagcagccgcgcgctgtcgtccgtctctcggccgtgacgcgaccactccggcgctgctgctcccctttgctggcgaccacggcaccttggattttgacaacccatacggagcgccgtgtcgggcaccgtggaggtgaccgtcctgaatgggggggttaatatggggtgtctttactaggcgcttgttttgtttttgttgatataccttcttttctcgnnnnnnnnnnnnnnnnnnnnnnnnnnnnnnnnnnnnnnnnnnnnnnnnnnnnnnnnnnnnnnnnnnnnnnnnnnnnnnnnnnnnnnnnnnnnnnnnnnnnnnnnnnnnnnnnnnnnnnnnnnnnnnnnnnnnnnnnnnnnnn

SEQ ID NO: 143459 - DNA, 369 bp, Zea mays
  Clone ID: MRT4577_62311C.1
ggcgatggagtaaatgatgcccctgccctaaagaaagctgatattggtatagcagttgctgatgccactgatgcagccaggagtgcatctgacattgtcctgacagaacctggcttgagtgtgataattagtgccgttcttaccagccgggccattttccagaggatgaagaactacactgtatgtcagaaggaaacctaacgaaataaattttcaaaaaatagttgctttttctgatccaccttcacctttgcagatctatgctgtttccatcacaatacgaattgtgctaggatttatgctacttgccctcatatgggagttcgatttcccaccatttatggtacttattattgcaattctaaatga

SEQ ID NO: 143460 - DNA, 198 bp, Zea mays
  unsure (1)..(198): unsure at all n locations
  Clone ID: MRT4577_62312C.1
cctacacctttatatatttttttacaaagaanaccccgggggggcaagcacaaaagctttattataacaatatcgcggggtccacaatgacagtcatgacagaaacatttttccaggcccaggggagaaaagaaaatctagttgggaagggggcttaaaacaacaagggaggccctgggacagcccccaacgcaatcc

SEQ ID NO: 143461 - DNA, 229 bp, Zea mays
  Clone ID: MRT4577_62313C.1
tttgtttttttagccaccatgagagtgcaatatactgtgatccaagctagagtacataaacagtacaagaccgtgcgtgatcgcgctaccagaggctcatgtgacatccgtagattggttcaaacataggtcgcagggatacatgcttttactattagaacaatgattccatagagaaaaaatttgacagaaaggtgcttctactgcccgtgcgatactactgcccatg

SEQ ID NO: 143462 - DNA, 816 bp, Zea mays
  unsure (1)..(816): unsure at all n locations
  Clone ID: MRT4577_62314C.1
ggaattacaccacctggaccagacctcatgagcgggggcaccgcagcgagcggcagcctgcggacagccttctcctactgcgtccagcaggtgcgcagctatgactaccacaactacctctgcctgctccacctgccccccgccatgcgcaaggccgcgttcaccttccgggccttcaacgtcgagacggccaaggccatggacgtcgtgtccgacccccgcaagggcctcatgcgcctcctctggtggaaggacgtggtcgacaaggtctgcgccggcaagaaggtcgagcaccccgtcgcgctcgcgctctcctcggtgctctccgagcagaaggtcagcaagcactggctcaagcggtcgctggaggccaggatcaacgacgggaaccgggatgaggacgccatccctgagaacgtcccggagctggagaggtacgcggaggacacccagtcgaccatcctgtacatgacgctgcaggccggtgggatacagtccactgttgctgatcatgccgcgtcacacatcggcaaggcgagtgggctgctgctgctgctcaaggcgctgcctcaccatgtgagcaagcaggggaagataccttacatcccggcgagtgtggccgaggagtgcgggctgcttgcgcgggagggtggccggacggaggtcaggatgggtgacgcgctcccggatgcagttttcaaggttgcgtctgttgctgaggctcacctgcagaaggnccgggagctggccgctctgtgcccagcggaggcggtccccgtgctctcccagncgtgccggccccaggtcttctggact

SEQ ID NO: 143463 - DNA, 203 bp, Zea mays
  Clone ID: MRT4577_62315C.1
gtcccagatcgattacgatccctcttttccacagctggacgctgaccgcgagccgtccgagctcatcaccgttatcacttctggactcttctccgtcgcactctacagacaatttgtcacgtaaatatctcggcagccatcattacagacaccatctctgtgtcctgcaagacgacagcaccgctcgctatcgcctcgcccta

SEQ ID NO: 143464 - DNA, 1176 bp, Zea mays
  Clone ID: MRT4577_62316C.1
aacagaaaactcattcctttatataataatatatatatacatattactattattaaaaaaataaggcatggctctgtctggaacgcttgccaacctacgtgccccacggcaaaccacaatcattcacgtgcacccagtataaaacaattgtgtgttttttaatcaagcgtccactgcctgctccctacgcagctacgctttactcccttcccctgcttcgtcctcgtttctcctcgaacccacccagcagcgccttcttccttcttcccgcccaacctcggccatgcccgtagcggcgctccgtcctcccccggtcgctgtcggcgcgggacgccgcagcgcccgactccaggcgcggttcgccctccgcgcgagctccctcgaggcgtcggcggcagtgacggtgacagtgaacgggtctgcagaggccgcggtggagaggaaggagaaggtgcaggaggataaggacaacgagggactgccggtgaaggaggagcaggagagggggctggaggtcctctacgacgacggcttcggctccgtgaccgtcaaggactacttcgcggcggccaaggtcctgtgccgggacgacggtgggccgccgcgctggttctctcccgtcgagtgcggccacccggccgtggaccaagcgccgctgctgctcttcttgccaggaatggatggcgtcggcacgggactcatcctgcaccacaagtctttgggcaaagtgttcgaggttcggtgcttgcatataccagtcaatgatcgtacaccatttgaaggactagtacaaatcgttgaaaatttgatcaagcacgagcatgatttatccccagacagaccgatatatcttgtcggagattcatttggcggatccctggcactggcagtggcagctcgtaatccgcagattgatttggttctcatactagtaaacccagctacatcatttgcaaagactccattgcagccagtattgtctttactggaatcaatgccaagcgagtgtcatgctacagtgccgtattttcttagctttgtcatgggtgacccactgaagatggctgtagttagcattgaaaacaacctatttccttcagaaactctacagatattgtcaggacagcctcacatcaatgcttactttgcttttaaaaactgtctgtatattatacc

SEQ ID NO: 143465 - DNA, 469 bp, Zea mays
  Clone ID: MRT4577_62317C.1
tttgattgcataagaaataagttgatctgattttgtcttcgctgtgctgtacttcttaagattccaaagcatgtttgttcttctccccagggtttagctgttcaaagtgctcagtcatcatagaccattttgttggcaaattttctgtgtctgcagttatcttcttgacgtatcatatatgtgctgtgattattgaatgcctatattttttacactaatgagttttccaaatgcatgtgctgccattgattatgaaccaatggatctctggcttcctttctcctctggcttatttttatacaaccaagcttgtcgatgttccagaggccattctggtttatctgctggaacggaatgtttcgttaccagacaataccactgtaccattccagagtataatgaatgaatagaaaatatatcattattatatttataataaatgtctttttggcacaatatttggatatgt

SEQ ID NO: 143466 - DNA, 420 bp, Zea mays
  Clone ID: MRT4577_62318C.1
acgcccacgcgtcggaccacgcgtccggaccaagttaaatttaaaactggtcataggtagcactagctaacggtggcatgtcattgcaccaaggatgactacatagatgctttggcctcctatggagaccagacactctgattattccgctgctacttatgaataatgctgatcattcagtccaagcaagacaagcgcgcactctcgtgtcaaagctcatcaggctaaccccctaaatgcacaggcaaggaggccggcccgaggccgcgcatgcaaatgctgcacccactctcgcaatttatgtagcttttcctccatgctcgcatgcactatctcataccgacactacacctgcatccaccgttcctacttgcgcggtctcttaccgtacacacctcattcgccaatagctagctgatc

SEQ ID NO: 143467 - DNA, 330 bp, Zea mays
  Clone ID: MRT4577_62319C.1
cactttgctcttttcctatcttttctttatttttttgacgaaaggaccttacagtttatttaacaggcgaggaccgaacccactctttaaggtcaaaaagactcaagaacaaacaacaaaagagcttaaaaaggcgaactctagagaattaagggggccctttttgtttttgaccggcgccaactttacgttcgctgaagacacttggtttggacgaaacctcgagccccaagggctttggtacgtccggagggctcgcgcaccttatgagagcccagttaacgccctcgaaaaaggggagctgctttatcttggaaggaccacccttgg

SEQ ID NO: 143468 - DNA, 2329 bp, Zea mays
  Clone ID: MRT4577_6231C.1
ccacgcgtccgggttgctccatgggagaaggaggtcataaatgacccctgtactccaaaacctaaccccaacccgttcacttatgtgcctgaaccaaagtcagagcatgttttccaaactgttgatggcgttatccatgtttatgcggataaagattgtacggagagcatttatcctgtggctgatgctacaaccttcttcactgacttgcattatattctccgagtaacggctgcagggaacacaagaactgtctgccataatcggttaaatcttcttgagcataagtttaaattccatctgatgttaaatgcggatagggaatttcttgcccagaagactgccccacatcgtgatttttacaatgtcaggaaggttgacactcatgttcatcattcagcatgcatgaatcaaaaacatctgttgaggttcataaaatccaaactaagaaaagaacctgatgaggtggtcattttcagagatggtacttatatgactttaaaagaggtttttgagagcttggacttaactgggtatgatctgaatgttgatttgctagatgtccatgcagacaaaagcacatttcatcgttttgacaaattcaatctaaaatacaatccatgtggccaaagtaggctcagagaaattttcctcaaacaagataatcttattcaaggccgtttgctccatgacttcctgaagcaggttgtagggttggacctggttgacgatgaaaggagggcagaaaggcgtccaacaaagcacatgcccacacctgaacagtggaccaatgtgttcaaccctgcattttcatattatgcgtactactgctatgctaacttattcaccctaaacaagctgcgtgagtcaaagggaatgaccactatcaaattccgtccacatgctggagaggctggagatgttgatcacttggcagcgacatttcttctctgtcacaacatatcacatggaattaatctaaggaagtctcctgtgcttcagtacttgtactatcttggtcagattggtctggcgatgtccccattgagcaacaactccttatttcttgactatcatcgcaacccttttccaacgttcttccaacgaggtctgaatgtctcattatttaccaatgaccctaagcaaattcacctgacagaaataacaattatgaaattccgtccacatgctggagaggctggagatgttgatcacttggcagcgacatttcttctctgtcacaacatatcacatggaattaatctaaggaagtctcctgtgcttcagtacttgtactatcttggtcagattggtctggcgatgtccccattgagcaacaactccttatttcttgactatcatcgcaacccttttccaacgttcttccaacgaggtctgaatgtctcattatctacggatgaccctttgcaaattcacctgacaaaagaaccattggtggaagaatacagcattgctgcttcgctgtggaagctcagttcttgtgatttatgcgaaattgcgaggaactttgtttaccaatttgggttttcacatgctctcaaggcgcactggattggtaagaactacttcaaaagaggacctgctggaaatgatattcacagaaccaatgtaccgcacatcagggttcaatttagagagatgatctggagaaatgaaatgaaactagtgtactctgacaatgagatcttaataccagacgagctggacctgtaagatgtccagcctcgtgtataccagacgagttgcgttgtagctgctatgggaattatacttcatgttttggtatgctttccttatctatggcaaattcaacttcgaacttcaaaaaaaaaaaaaaaaaaaaaaaaaaaaaaaaaaaaaaaaaaaaaaaaaaaaaaaaaaaaaaaaaggattttgctggaagtcggcaaagtgatcggcactgtcaccaagcataccaactaccaagggatgcaatactacctccattctcgaatatttgccgtccgctagtttatttttgaactaaaacatgacaaataaaaaagaacggaggaagtaatacggcaaagtgaagcaacagatgcttgtgtaggagttgtgttactatcttcaaggcttgtgcaagagttgtgttaatgtctcttactcactcttatctcttatcttaaatcttactttataagtgttttttttttgcatgctcatagctagtattgcctgaacaccccccctcccctcgaattgtaaccatgtactcgaagtgcttgcactctggttggatcctatacggtgagtaaggtgctatcggttgttatgaagcccaaaa

SEQ ID NO: 143469 - DNA, 428 bp, Zea mays
  unsure (1)..(428): unsure at all n locations
  Clone ID: MRT4577_62320C.1
accacgcgtccgcgcgcctctgcctgtctggccatagccatccacagccacgcaagggcgccacgccgcaggcttttgcatgcccccgcgcgtggaaattcgaatgcgcagagcccaggcgccgcggctccgtgtcggcggcgttgcccagcggtccgcctccgcctccgcttccctgtagcacgccgccgtgcgcctggaaatattcattggcattggcaatgcaaccacgatgacgccctgcctttttgacgcccccgcatctgctgctggcgcctggctggctgcttcttcacaccacatctcgcccggccccggcctatctagttcccatgcgtgtagagatgttgttactgctcccgctggcccatgggccggcatggaccatggggatgcanatgcaattgtggccagcgatgcgtgcgtac

SEQ ID NO: 143470 - DNA, 239 bp, Zea mays
  Clone ID: MRT4577_62321C.1
tgttaataatcttctaatgcagatccaggtaaagaaaatgacctcttctctctattcacatacaagcacttatgacttatccatgtatcttaggaattgaatttgtggtcaattatactaacatgttttcagtacatgttatttttgctccaaaaggccatgctttcagttagtgcttttgtatcgttggaaatggacgaagttgatgctaactctccgtacttctctcctattaagat

SEQ ID NO: 143471 - DNA, 949 bp, Zea mays
  Clone ID: MRT4577_62322C.1
ccgcgggaaaccttggatctcgcgcgcgcacgtaggggagcgcagcggagcaagaggaaagccatggctacgccggcggcggtgatgaagttgtacgggtgggctatctcgccgttcgtgtcgcgggctctgctggccctggaggaggccggcgtcgactacgagctcgtccccatgagcccccaggccggcgaccaccggcgcccggagcacctcgccaggaaccctttcgccatggtgccggtgctcgaggacggcgacctcacgctctttgaatcccgggcgatcgcgaggcacgttctccgcaagcacaggccggagctcctgggcgccggcgccggcggcagcctcgagcgggcggcgatggtggacgtgtggctcgaggtggaggcgcaccagctgagcccgccagcggtcgccatcgtggtggagtgcttcgctgcgccgctgctcggccgcgagcgcgaccagacggtcgtcgacgagaacgtggagaagctcaggaaggtgctcgaggtgtacgaggcgcggcttggcgagtgcaggtacctcgccggcgacttcctcagcctcgccgacctcagccccttcaccatcatgcactgcatcatggccaccgagtacgccgccgccctggtcgaggcgctcccgcgcgtcagcgcctggtgggagggcctcgccgcgcgccccgcggccaagaaggtggcggagttcataccggtcggcgcggccggactgctggagcaccctcccaaacaacaggattgatgcatgatgaagcaagcctgcctaatgtgcctgttgcgcttaatactttcccacgtgtactttcccacaacgttgacagaagttattcaataactagtctctatgtaacgtaatggtgtggtgtgcacttcaatgaataccatgaggtggctggttcaaaaaaaaaaaaaaaaaaaaaaaa

SEQ ID NO: 143472 - DNA, 317 bp, Zea mays
  Clone ID: MRT4577_62323C.1
tggggttttttttttttttggtacctctctaactaggagaaacgaggtctatgagaaccagctggtccatgaaatcaacaggcctaaagcgaggggtgagaaaagaaaagcactcgctagtcagaagaccatttcgtgacattggcgggtcttctcaatagcaaaagtcatacagaactatgacagaatgggggacacctccatgcatgagaggtcttacgttaaggatccagtactcggttatatggtctggaatgacatacagggcacaaggaatacagacaagtgttttgagactatgccggtggcccttgcac

SEQ ID NO: 143473 - DNA, 475 bp, Zea mays
  unsure (1)..(475): unsure at all n locations
  Clone ID: MRT4577_62324C.1
cccacgcgtccggtagaacagtgttaaaattttgggactagaaaatacaccaaatcagcaagggtgggacatgaggcattcttctacgcggaaacagtaggatagttccgtagtagttgtggcccaggtatgatgctacctagaaatggtggaatgaccattgctgctaggaggcggctgtaaatatgaacaattatagaggatgatttattcagattctttttttagggggtgtttgaatgcactatagctaatagttagttggctaaaaatttgctagtgaaattagctagctaactattaactaatttgctaaaaatagatatcttcaactaattttagcaattaactattagttttaatgcattcaaattcaaatacccctaaagaatatgcatggtggttgnaaaaaaaaaaaaaaaaaaaaaaaaaaaaaaaaaaaaaaaaaaaaaaaaaaaaaaaaaaaaaaaaaata

SEQ ID NO: 143474 - DNA, 346 bp, Zea mays
  Clone ID: MRT4577_62325C.1
gttactcgactaaatctatggcatgctgtgccccctgccggaaccgggccagaattaattagagaattgacaggctcaattgtctgcggccggccttctcacgcaccttttatcaccccgcacatggaataagcatccatcagggagccatgatccatgggctgtaaaaataatacactcattaattcttacctacccatggttactagtgtagaaatcctacttaaatcgagaagcctggagactatgttcttcttggcatgtgcttgacgctatgcaaaacgactcacggatctatccatggggtatggttgcatggccaggaccaacggcgaccgataatcta

SEQ ID NO: 143475 - DNA, 500 bp, Zea mays
  unsure (1)..(500): unsure at all n locations
  Clone ID: MRT4577_62326C.1
gccnggcccggttctgcgngatacacggtacctaccaccactgctcggatgattggaacgaagcctacgcatggggcactgactctgcggcagcgcgtgctggatctatgaacgttgatagctgataggagcctaggcgctgaccactcctactcgcggccgaatactctggtcagacttgccaagagccgatgactctatctcttgcgcatctgactagacgtgctatcagtattggttcaaaccgtgaggcccctatgcgacgatatcgctcttcaactagcgcctccccctgagttcaagaattccacatacttattatctgtaccgtcaacctcccctctcgagccgccctccaactcaccttatggtgggattcactacacgcgctgcactgcacagtatagtctaccccctcatcgtatgctagaactctgatctataccctacacacatcatcttgtgatgcatatccccttcgtctcatatcgaaatacttg

SEQ ID NO: 143476 - DNA, 327 bp, Zea mays
  Clone ID: MRT4577_62327C.1
ctccgcgtccggtctagagaaaggagagacacaatcggccggaagagcgattgatttctcccgccgccgccgccccgtctcttcctcgtccgccgctgcgcccgccgcgcacaagaggagggtttcagtgttagggttctacccccgcctgcgctggtatcagcagccaaatgagaatgcttgctgtgtttgattgatcgtcagatccttacttacaacccaccaggtcttgtggtacctgccacctcaaagtcacgacagatggccgcatataacaacccctggagggtccctatgccaccgctgcccaatgttcgagctggattt

SEQ ID NO: 143477 - DNA, 105 bp, Zea mays
  Clone ID: MRT4577_62328C.1
tcgccggcaccttggccgaaccctggccgacccctggtggccctttaaaattctgaggccccgggcccttcggcttccttttcgggttcccgtccccaaggccat

SEQ ID NO: 143478 - DNA, 162 bp, Zea mays
  Clone ID: MRT4577_62329C.1
aacgacgatggctgctccaccgtgagagatgatactccagaggaaggtaggcgctgtagatgccgcctcgtgctctgcgcggaggcggccatggcaccatatcagcaggcgaggaacgagcggtagacgtaccacctgtacaacccggcgcagaacgggggg

SEQ ID NO: 143479 - DNA, 675 bp, Zea mays
  Clone ID: MRT4577_6232C.1
ggttttcacatgctctcaaggcgcactggattggtaagaattacttcaaaagaggacctgctggaaatgatattcacagacccaatgtaccgcacatcagggttcaatttagagagatgatgtggagaaatgaaatgaaactagtgtactctgacaatgagatgttaataccagacgagctggacctgtaagatgtccagcctcgtgtataccagacgagttgcgttattcggctcatgggaattatacttcatgttttgttgctggaagtcggcaaagtgatcaagagtgtcaccaagcataccaactaccaagggatgcaatactacctccattctcgaatatttgccgtccgctagtttatttttgaactaaaacatgacaaataaaaaagaacggaggaagtaatacggcaaagtgaagcaacagatgcttgtgtaggagttgtgttactatcttcaaggcttgtgcaagagttgtgttaatgtctcttactcactcttatctcttatcttaaatcttactttataagtgttttttttgtgcatgctcatagctagtattccctgaacaccccccctcccctcgaattgtaaccatgtactcgaagtgcttgcactctggttggatcctatacggtgagtaaggtgctatcggatgttatgctgcccagat

SEQ ID NO: 143480 - DNA, 240 bp, Zea mays
  Clone ID: MRT4577_62330C.1
aatcccatcataatcacacaatgctcactatctctcactggctctatttcacagaacctcactccaactactacaatgggcttcaaacacccagctatacaaacctatacgctacaacaagcgcttgcaagcaacgtcttaaaacaaccaatttcccaatttcaacaacaatccttggcacatctaaccatacataccatttcaaacgcatcatctacaaacaactgagccaccttttac

SEQ ID NO: 143481 - DNA, 797 bp, Zea mays
  Clone ID: MRT4577_62331C.1
tttctcttgttgaataatcaacaagttttcatttgaatgtaattaattttttgcttttgttgtgtgttttatttcggcgacaatgtttcgtcaaataaatcaaattattttggtttgtgctgtttttgctgctgctaattgctttccagatggtggaccagctgacacgtgtgttaaacctgaaagatttaatcaaccaaatcatggacaagcaagaactcaaccattaaatacgctaccatttgatgtaattgccaccactgatcaatatcaacctggacaacaaatccaagtgacaattcgtggtcgtgactatttccgtggattctttattcaagctcgtgatgctgaaacaaatgaatggattggatcatggcaagatagtcaacatacaaaaacaattcagaatgtgcttcaattactcatgcagataacagagataaggaaggagcaaatcttatttggaatgcaccacaacataaaagtggtcgagtttatttcaccggatccgttgttaaaaattattcaaccttctgggcagatattgtagctaaaatcccaatttatcaaagataaacaacctaaaaaaatcatcatttttttttatttcatgtaattcatttttaaattgttaaaaaaaaatttgtaattataaatcgatcaaaatttaagatttattgaaatttcacttcattttttactattaataatttgaattttattcaaaaatattccaaacgttcatgttgatgctttgtttatacaaaataatctaatttgtgcaatatttgaatgaa

SEQ ID NO: 143482 - DNA, 166 bp, Zea mays
  Clone ID: MRT4577_62332C.1
agccttcggacaacttctccccttccttttaagggaaagaaggcaccaaacccccaaatgaggcgtgctaccgttaccaaggaaatggaccggccggccccggtatggagctccaacacttcaagggtcaacctatttccgtggcggaaacccaagggcccagccc

SEQ ID NO: 143483 - DNA, 567 bp, Zea mays
  Clone ID: MRT4577_62333C.1
ctagttctagatcgcgagcggccggaatgttccacgccgatgctgtggcattctgttgctttcaagtaaaactagtcaatgttatgtaccttcatgttattttttggtcctgtttctgtgacaaaaaaaaaaaaaaaaaaaaaaaaaaaaaaaaaaaaaaaaaaaaaaaaaaaaaaaaaaaaaaaaaaaaaaaaaaaaaaaaaaaaaaaaaaaaaaaaaaaaaaaaaaaaaaaaaaaaaaaaaaaaaaggggggggccttttaaaaagaaccaaatttaactaccccgggaatgcaaagaaaaattttttttatggggccactaaaattaaattaattgcccgtttttaaaaaacgtcgaaattgaaaaaaccttgggttaaccaaattaaatccctttgaaaaaaatccccttttccaaagttgggaaaaaagaaaaaaggcccaaaccaatcccctttccaaaaatttcccaaccttaaatggaaaagggaacccccctttaaccggcaaataaagcgggggggtgggggggttaaccccaaggttaacctttaaatttgcaagg

SEQ ID NO: 143484 - DNA, 391 bp, Zea mays
  Clone ID: MRT4577_62334C.1
aacacccgtcccgccgagtccacagcagagatgggcagtacgacctcccgtgccacttatattatactgcttgcctccacccaccgggcggcacgcggttgttaagcaggaataggacctcgagcttttttgccttttaaaaagaagacagaaatgtctccactcaggcctgcccactcttcaagttcatccagctagactcgatcgaactcccgggcaaggactttagcccaaactacccttgatgctgaactctgtgcagaatccgaaaaatctggtgaaccctttgattactccaagtggtttgaaccacaacgtagcactccaccttaccattaagcgccatctgtaaaggttatagcctacttgccatcattccaaagaggaaagc

SEQ ID NO: 143485 - DNA, 559 bp, Zea mays
  Clone ID: MRT4577_62335C.1
aggcgaagctgccgggccaatccagcgtctgcgcgcggagccggaggtgaggggagggccgagggcgccatggcggcggcggcggcggcggcgaaggacgcggcggtgacgctgagcagcgggcaccggatgccggcggtggggctgggcgtgtggcggatggacaagccggacgtccgcggcctcatccacgccgcgctccgactcggctaccgccacctcgactgcgccgctgactaccaaaatgaagcagaagttggtgatgcactcgcagaggcatttcagactggacttgtcaagagggaggatctgttcatcacaaccaagctttggaactcagatcacggccatgtgcttgaagcctgcaaggatagcttgaagaagctacagctagattatctcgatctctatcttattcacttcccagtagctaccaggcatacaggagttggcacaacttctagcgctctcggtgatgatggcgtactagacattgataccactatctcattggaaaccacatggcatgcaatggaaagaaccttggttccatggggac

SEQ ID NO: 143486 - DNA, 352 bp, Zea mays
  Clone ID: MRT4577_62336C.1
aaacatctttgtacagcacaatatgcttctatgcttttagattgtagtccctacaccccctaaaatcatatgtttcaccaattattctcacaagtagtgcatattctggtgttccatgacatacagtaacaccatgcattccaaaagaatgcactagtaaaaatagccctgatgatattttactgcactctgttggttccattttttaaggcatattttggtcaagcacaagaattaggtgacaaacaaagataatgtgaagtgacatgtctgggatatccttagtgttaaatctcttggagcacatgatagtagatacaatggttaatgtggctggtattcataaatgctg

SEQ ID NO: 143487 - DNA, 447 bp, Zea mays
  Clone ID: MRT4577_62337C.1
gaaagaaaaaaaaaaaaaaaaaaaaaaaaatttaaaaaaaaaaaaaaaaacaaaaaaaaaaaaagaaaaaaaaaaaaaaaacaaaagaatacaaaataactaactacacaataaagacaactaaattaaaaatcaattaaccggactttgacaacagtacacactggtaaaaccctgccttaacccaactaaatgtcttttcagaacattcgcctatcccaagatggtataatacctaacagacccgcacctatggaccttcccaaaacttgctcagcctcaatggctaatgcaacactccctgtacatgctcttcaaacccggctggagcggtagttactcccagagatgcacataaagttgccaatgacctaggaccaggatcttccgctcacttgccttacttaatcgccacgatcccattgctttccctaccaagctctaaat

SEQ ID NO: 143488 - DNA, 796 bp, Zea mays
  Clone ID: MRT4577_62338C.1
cattgggtacctcgaggccggccgggccggggcaaaagcacttcaccagttcacccactcggactaggagcaggagaggggagagaaaacctcgccgtcaatgtcagcgttcgttcccaagggcgctagggtttaaccccccaactgttcggtctctctctctccccgaatccaattcagcgtcatctagtccgggagcctgcgacatggggtacctccaggaggcccgggagaatcacgtcaagaagaaggtcgaggaagctctgaggagcaaaatgaaacaaaaggctcttcaggaatgtgatttctattgttcaaaatatgctgagtgtgcacggggaagaacattttctgtggtatggcaatgccgcaaacaagcaaaagagttgaatgagtgccttcatcaatacacaaatgatgcaatcctggaagaaatgaagaaggcttatatgattgagcaaaagagcaaggagataaatcaataagcaaaaatccattgcacaatgtgcatcacgatcaccctgcttgtatgtatactgttgcctttgatagatactattcatgggtagtgttgcaaacattgttctccccacatgcataacctgatactagtattgggtggcaaactggcaatcttgctgtttctgtcgaacatgtgatataagttgttttcttctgttgcaattttcatcccaaatagattttgtttggatgcagataacacaattgtatttttgttgccctgctaccattagctctagttccaccaagagaaaaaaaaaaaaaaaaagcggcc

SEQ ID NO: 143489 - DNA, 445 bp, Zea mays
  Clone ID: MRT4577_62339C.1
aaaccacgcgtccgcccacgcgtccggaacgcgtcggtgggtcgttcggtcggtcggtgaagagcacgacaagacgggatgttggtgtacaaagacgcttttacaggtgatgaagtatgttccgacgccatgaaaaacctccatgaagaggaaaacggtttgctgttggtatgtgactcgtacaacatttccaaaggaggggaagattatgggatagaagtaaacaacgatgaagatgaagaaggaggaggaggaggagcagataatgcggtggaacaagtgaatattgtggtcgagtcgtttggtttacaaccttttcccatcagcaaaaaggactttcaagtaactatcaagcgttatagcaaacgagtcaaggactatttggagaagaacaaccggatagagtggaaaagtttatggaaggaatgaagtcgtggttgcccaa

SEQ ID NO: 143490 - DNA, 807 bp, Zea mays
  Clone ID: MRT4577_6233C.1
cctcggaattcggctcgagaaatgcggatagggaatttcttgcctagaatactgccccacatcgtgatttttacggtgtcaggaaggttgacactcatgttcatcattcagcatgcatgaatcaaaaacatctgttgaggttcataaaatccaaactaagaaaagaacctgatgaggtggtcattttcagagatggtacttatatgttgttaaaagaggtttttgagagcttggacttaactgggtatgatctgaatgttgatttgctagatgtccatgcagacaaaagcacatttcatcgttttgacaaattcaatctaaaatacaatccatgtggccaaagtaggctcagagaaattttcctcaaacaagataatcttattcaaggccgctttcttgctgagttgacaaagcaagttttctctgacctttctgctagcaaatatcagatggcagaatataggatttcaatctacggaaggaaacagagtgaatgggaccaacttgcaagttggatagtgaacaatgaattgcacagtggaaatgttgtctggctggttcagattccacgcttatataatgtgtacaaggaaatgggtatcgttacatcattccaaaatcttcttgacaacattttcgttcctctttttgaggttactattgatccagcttcacacccacagctccatgtcttcctgaagcaggttgtagggttggacctggttgatgatgaaagtaaaccagaaaggcgtccaacaaagcacatgcccacacctgaacagtggaccaatgtgttcaaccctgcat

SEQ ID NO: 143491 - DNA, 653 bp, Zea mays
  Clone ID: MRT4577_62340C.1
ccggccgggggccctgacaagatattgcatggagtatcatgaacaagtcctccgcgacagagagagtgctggcacttcaatcgacctccgcatgatcgtaagaattgccgacgaagctaggcaaaatgcgctgccatgcattcctctctcgtcactcttcgccactctctgtgcctcacgcgcgctatagccgcgactcgtgcatatgggtaacaggactcaagaacgccatcctgcgcgaccaggctctagcagctccacggagtcttctgcgagacgcgtcagggaactagtgatcttgaaaagtgcctgaccgagccaggatcaagcttgagtggaagcgagagcagctgcatataacatgtagcggtgaccgctacgatctgatgcctctcgcgcattgtcagacgggcattgctcacttcccaacgctaagttcacatgaataaggagatgtcctccaagatcgctcatgacagtgatgtcctgatgaactttttgacttgtcacaagacgatgacatctgatgattgcttattcaaaaaaaaaggctgcgctatatgactcaggtttctgtgaacacctatctgttttagagagtatgagaaacgtgctctatttaagtggcgaaaaaaaaaaaaaaaaaagcggcc

SEQ ID NO: 143492 - DNA, 1270 bp, Zea mays
  Clone ID: MRT4577_62341C.1
cattgggtacctcgaggccggccgggaaagagtgcgtgataatcagagaggaggaggaacacggcacgctaacaaaaaccagaccacgcggaacggcaacagcaagctgcctctctcccttgcgcgcgcgtgatttcatcttcgtccgatcccatcccaccccaccccaccccacctcaccggagtccctctccccctgactcctccggcggctgctccgatcccgaaccgtgattcgctcgatggcggcaaccgcgggcggcaacaagatccgcaacgccaagctggttcttcttggggacgtgggcgccggcaagtccagcctggtcctccggtttgtgaaaggccagttcgtcgagttccaggaatccaccatcggcgcggctttcttctcgcagaccctggcggtgaacgacgagacggtcaagttcgagatatgggacacggcggggcaggagcggtaccacagcttggctcccatgtattaccggggcgctgcggctgccatagttgtctacgacatcacgaacgcggcctcttttacgcgtgcgaagaaatgggttcaagaacttcaagcacaaggaaactcgaatacaatagtggctcttgccgggaacaaggctgatttgttagatacgaggcaggtgtcagcagatgaagcaaaggcgtatgctcaagagaatggtctcttcttcatggaaacttctgccaaaacagctaccaatgtgaacgacgtgttctatgagattgcgaagaaactgcttcaagggcagcaggttcagaacccacaaggcgggatggttctcaaccagagaccacctgagaggatggtgagctcttcttcctgctgtgcgtgaagcgcaagatgggaagtgtggatcacatgtcccatggcctggactccaggagtattatgtgcgcggaggcggcgaagaatgttgccgaatgttgtgaagtggttgccatcccagttgctggaatcctgtacttttcactgcttgttcgttgccgtgttccttgtaaatgtgaatacttgttactttggagactcacgtcacgtgttcttacggtgcatgatcgtgcttgtctttctatgacttgagagaacagacatgatcgtgcttgtctttctaagacttgagagaacagagtgaaactagacattcgtttgattcacttataccaatcacacaccaatcacacgatgacaaatttatgggttttaaggcttcttaaaaaaaaaagaaggcaggtcgaccgctttaaagga

SEQ ID NO: 143493 - DNA, 155 bp, Zea mays
  Clone ID: MRT4577_62342C.1
tcccgggtggttcctcttccttttcatttgtctgcatataaatacaaactgactggccatgggatggtattcttcttcgtgggaagtgttcacgggtccttctctttaaaaagttgtttctcgctcaccatctggaagtttattttgaatagtat

SEQ ID NO: 143494 - DNA, 312 bp, Zea mays
  Clone ID: MRT4577_62343C.1
atgaccctatcaaggaagatgtgtatgttgagcaacctcctggctttgaacatagagggcaccttcatctgccaaccaaagtacattcgagatattctcaagaagtttggaatgaagaatgccaaacccatcaagactcccatgggaacaaatgggcatctcgacctcgacacgggaggtaagtctgtagatcaaaagggatctacctttgatctaatcgggtattctgatgctgattatgccggatgtaagattgatagaaaaagtacatcagggacttgtcagtttatggggagatccctggtgtcttag

SEQ ID NO: 143495 - DNA, 226 bp, Zea mays
  Clone ID: MRT4577_62344C.1
aagcactcagctatactcttcttctgaaccgattgtgtgactagaaaacaacaagccgggagccatgtctgacgaggacgggcgaaccggttacggaaggtccggacccggcaaggactacaacagaggttacaacagaatggctggtactgatgacaccggccgaggtgaaggcgacaacaacaagttgggctggtattgactactacggccataacggcggtaa

SEQ ID NO: 143496 - DNA, 832 bp, Zea mays
  unsure (1)..(832): unsure at all n locations
  Clone ID: MRT4577_62345C.1
tccagaaccacatgatgtggggcggtacatccaagctgaagtcaaatctgggggccaaatctcaatcccaaaaactgccggttcaatagatcctgctgcaggattggttgaatatgtagaaactctcgtgaggaatcctgaaactgattataatgtagtcattattcaagtaaatggagttgctcaggctgcagactccgttcacgttctttgcatcgggagattgcggatgagacttgctaaagaaaagacggtcgttgcgaaggagttctattcctcgtcaatgcagttgtgtggcgttagaggaggtggagacgccgctccccaatcgatcttctggcaacccagaaagggcctcagctttgtgctggcctttgagacaactagagaacgcaactcggcgctcatgctcgcccggagattcgccatcgactgcaatatcatccttggtggtccaggggacaaaacgtcatggtgaagtgaaacaaccagcgcactctggaacctgaagcctgaccgattcttgaattgcacatactgtagttcgattgtcgcatctgatcactgagagtagctgagctcagtttagcgttgtatgtacgtagtgccaggtattggcaccgattcattttttttaagtttaggactcgttgcgtgtactcgccggttgtgtagtgtagtagttatgtatccttgtgttcttgatgaagagctgaactacgagtgcctagatgtcatgatgcatccatgcgcctgtctctttgcctgatctttcctcccgaaggaagccaacgattttggtgacattntctcccttcttttcccgtttctg

SEQ ID NO: 143497 - DNA, 2199 bp, Zea mays
  Clone ID: MRT4577_62346C.1
attcggctggagccgtgggaaccggccggcagctggggagggcaaacacgcactagacccaaatcctcgtagctccagacatccagaacggcagaaccttctagaccaaaccttcgacccatcacctcgagctccagccatgtcgctctcgtcggcgcgccagcgccgggccactgcagcgtcgccaccgacagatgatgggtacgccaaggacgccaaggacaggaggcggcggcccggcggagacggggacagcgaggacgagggtatcaagtggttcctcccgttcctggcgctcgggctcctccgccacatgagcgcgtcctccaacctgatccacgactgcgacgaggtcttcaactactgggagcccctccacttcctcctctaccgctccggcttccagacatgggagtacagttccgactttgctcttcggtcatatttgtaccttttctttcatgctcttgtagctgggcctgcttcattgatctttggtgagcataaggttcgtgtgttctactcagtgagaatctttcttggtctcatttcaactattaccgaaactgttctggtggttgctctttcaagaagatatgggaagcggcttgcttgttatgttcttgcaatgctatgcttatccagcggttgcttctttgctagtaccagtttcttgccaagttcattctccatgtatgcagtaacactttcgtctgcactcttccttcttgagaaatatgctggtgcagtctcagttgcagctgctggagtgatccttggttggcctttctcaattttggtcttcctccctgttaccgtttattctctaattagaggatcttttagaagggtttttctatctggatttgtgacttcactgtgctttcttgttctttcgtttgttgctgattattactgctatggtcgattgacattctcggtgttcaatcttctgaaatataacgttattggtggcggcgaaagtcacttgtatggaaccgaggggttttcattttacttcaggaatggattcaataatttcaattttgccttcatcctggctcttcttttcttgggggttgtaccatttgcaagaaagaaatatgctcctgatctcctgatagttgtctctcctgtctatatctggttggctttcatgtctttgcaggcacacaaagaagaaaggtttctctatccaatttattcattgatatgtgttgcagctgcagctgttattgacagtttacctgattttttccatgacaaatattcatctgatcagtctatttttgaaaagatagcgaagggtctgcgtcctttgatacttggttttattctgtgtgcttcccacagccgaacattttccatgttaaatggatatggtgctcccctgcagatctatcagcatctagaacatcatgatgacactggacccgggtctattctgtgtgttggaagtgagtggcatcgctatccatcatcgttcttcataccctcttatatcagtgaagtccggtggatagatgatggcttccgtgggttacttccatttcccttcaacgagacactgggtgggaccactgcagctccgtcctacttcaataacaagaacaaggcggctgaagggcaatatctgaaagacattggagcatgtaacttactggtggaacttgatctaagacggccttacccctcgcgcgggagtgacttgtcgacatgggaggcattggccgcactgccgttcctggacagagagctttcccctgcattatatcggtccttcttcataccataccgatggcaacaaaacaatgtgttcggcctgtacaagctactgaggaggttgcatcctgaccatgcgtaatcaagggaaatgtggggtttgcttcaatgagcttaatcacgtgatttcttttaacaaacagcttgcagatttttactgccatagattttctgatcccaatgtgtaatggcgtacctatttttgtcccactgatccttccatcatacaaattcatcacgagatgacgaggatgagagtgctcaactgctgatgtagggagggatgttcgaggagaatcatgttgtgaaacggctgcttcgccagttgttacctttttggattgtttgttgaatattagccaatgacagactgatagatctatacctttttatagtgaacaaaaaaagcggccccgt

SEQ ID NO: 143498 - DNA, 620 bp, Zea mays
  unsure (1)..(620): unsure at all n locations
  Clone ID: MRT4577_62347C.1
gcgaagggtctgcgtcctttgatacttggttttattctgtgtgcttcccacagccgaacattttccatgttaaatggatatggtgctcccctgcagatctatcagcatctagaacatcatgatgacactggacccgggtctattctgtgtgttggaagtgagtggcatcgctatccatcatcgttcttcataccctcttatatcagtgaagtccggtggatagatgatggcttccgtgggttacttccatttcccttcaacgagacactgggtgggaccactgcagctccgtcctacttcaataacaagaacaaggcggctgaagggcaatatgtagtttcctttttccctgaacttcaacaaggcaatcgtctaataatacactgagtgcaacctgtttttattttccggtgcagctgaaagacattggagcatgtaacttactggtggaacttgatctaagacggccttacccctcgcgcgggagtgacttgtcgacatgggaggcattggccgcactgccgttcctggacagagagctttcccctgcattatatcggtccttcttcataccataccgatggcaacaaaacaatgtgtncggcctggacaagctactg

SEQ ID NO: 143499 - DNA, 636 bp, Zea mays
  unsure (1)..(636): unsure at all n locations
  Clone ID: MRT4577_62348C.1
cctcgaggccggccgggccgggactagacccaatcctcgtagctccagacatccagaacggcagaaccttctagaccaaaccttcgacccatcacctcgagctccagccatgtcgctctcgtcggcgcgccagcgccgggtcacggcagcgtcgccaccgacagatgatgggtacgccaaggacgccaaggacaggaggcggcggcccggcggacacggcgacagcgaggacgagggtatcaagtggttcctcccgttcctggcgctcgggctcctccgccacatgagcgcgtcctccaacctgatccacgactgcgacgaggtcttcaactactgggannnnnnnnnnnnnnnnnnnnnnnnctccggcttccagacgtgggagtacaggtagcctctccgacctcannnnnatagacccgcctgcgcctgccatttcggctacttgatgctcctgggcgtactggcagtggacttgtgctctgattcggagtagatggtttccggggaagcttggacaagcaatcgtgagtggtttgaggggcattggaagatctacgccgtcattaaacgtgttttgctttaggctgtgcgattgggtggctgtgggtacacgaaggatggtttggcttggag

SEQ ID NO: 143500 - DNA, 387 bp, Zea mays
  Clone ID: MRT4577_62349C.1
caccgactgagcagtgggtgggggatatttagcggttcttgatcctgcaagaaagggggccatggcgcgagcggctagcatgccagcggcaactgcggtcgggatcgtggtcgtgatgcttctggccgtcggcttccccctcgcggaaggtaaatcgtgcacgaacgcgttgcctggattgacctcacacacggagcgcgctgaggctcatttgcaggcagcggcgccggctacggtgctccagcccatgattcaccgacaccgacatggtcacgagcaggaccttaccccgacggacgaatacacctggatgtagctcatgccacacccggcgcttcagttcgaggaggcgttcgactggcttatgctctaccgtgagctacgggg

SEQ ID NO: 143501 - DNA, 323 bp, Zea mays
  Clone ID: MRT4577_6234C.1
ggttggtttttttaaaaaaatttttttttttttttttttttttttttttttttttttttttttttttttttttttttttgggaacggatcaaaaatccaaaagtttgactttttaactaatttaatttaaaaaggataaaaatggggggggggggttatatcctaatctaatctaattcttaaatttcaaaaggaaaaattttaaggcccattactacccctatccctaaaacttaccccgcataaaactcccactactccgtgggcaaagttttaacgttggacaccttttcttcacaattttaccaagtccatcaaggtaa

SEQ ID NO: 143502 - DNA, 358 bp, Zea mays
  Clone ID: MRT4577_62350C.1
ggtgttcttctgataagagctgcacctgcgcctgcgccttcttcaaagggagatcatggcttgtaagaagaggggtgtcatctgcccgctagaccatctcacttggctgctggaggcgcacgtggtgaggggagtggacctcggcatccaagacctccgatccagcgacccctacttcatccttaggatttgcttggcgcagcaagtgacaacgcatgtggtcaagaatagcctcaatcctgaatggaacgatacacccaccctttctattgaagaccctggcgatgatatgagactggaagtatttgacaaggacacttccatcgatgatgcaattggttacacggaactagacatt

SEQ ID NO: 143503 - DNA, 353 bp, Zea mays
  Clone ID: MRT4577_62351C.1
gggcgttccaggggacccgaggggggggcgggtaagggggggggggggccagggggatagccgttttctgtgggaaaggggtggggggaaacagggccaaaaaataggcaagccggaagcattaaagggaaaagcctggggggccaaaagggggaacaaaaagaaatgaattacttaaagggaacggccgggggtccaaaagggaaacctaaactgccaaaagttttaaggaatcccccaacccgcagaaagaggggaaacgggtatggggcccaaaggaaaaaaaccttccaaccagggggagggggaaaattggaaaggggtcaaccggttggcccttatagagccgaaaa

SEQ ID NO: 143504 - DNA, 363 bp, Zea mays
  unsure (1)..(363): unsure at all n locations
  Clone ID: MRT4577_62352C.1
gatctatcgccgacccctcnatcaacgggagtggccctccgtcggggggggggcatggacacccantcctttcancatgggagctcctcgtcgtggcacaccacaggcgccgggtcgtgtggatcctctcatcatcataagcgccatctgtgccatggttcttccagcgatcaagctggttccagctcaaatacttctctgcaaatatcataaccataaccccaacaagtccaagaataagacgattactatatggaggatgattgtgatnatgattttcatggctaccacgaagatcattattacttcgatgaatctgactttaaccagcaccttgctgataaatttgatgatttggatctt

SEQ ID NO: 143505 - DNA, 348 bp, Zea mays
  unsure (1)..(348): unsure at all n locations
  Clone ID: MRT4577_62353C.1
ttcaccacctcctaanaataattatgggacggatctttttaaaatattatcagcccatttaacaacacacaaatactcaacttcatcttcaaactactataatttctcttataacttccactcttcacaaccattacctcattcacataaaaaatattcttccaaaccatcataaatcaatacccattctacatctctaatataatacttatttaaatactcaccatctctaccattatcctcatctccatctttttcccaatttaactctaataattatatcatcactttctttcataatctatttttttcactccaatattttatcacctttcnctacccatcaac

SEQ ID NO: 143506 - DNA, 1106 bp, Zea mays
  unsure (1)..(1106): unsure at all n locations
  Clone ID: MRT4577_62354C.1
ccggccgggaaaaaggagccacagccctccccgctgttcccctcgtctcgtcgccgcctacgaaaatggctgcgctcgcgacactcctccgccacagccgccgcagccatgcccacgtcctccccatctcccgtgcgctctccaccaccaccccgaccaccggcggcaccgatcccgttgccatcacgttgtcggacgccaagagacaactcctccgcgagcgcgatccggaccgcgtggtctccatcctcgacgccatcgacacggcgtccatctccgctgcttccacccggcacgcgctctccctcgccgcgcgccgcctttctcgctcccgccgcttcgctgacgcggaggccctcctctcctcccatctcaccgcgtccaccaccgaggcccacctcgccgccgtcctgtgctcctacgcctccgccaacctccccgagaaggccatcgacgcgttccgctccgctgcgccgtcccttccaacccccaactccccgctccccttcaacgccctcctctccaccttcatacgatgtcgccgctacagacgcgtccctgtcctcttcgctgagctctccaaggagttttccatcacccccaatgccacatcctatggcatccttgtcaaggcctactgcatggcccgcgatgatgctaaggccaagcaggccttggatctaatgcgcgagcaaggtatctcgccgaccaacaggatctacaccacgttgatcgattccatgtataagaggaagatgaccaatgaggctgagtctttgtggaaagagatggtagaaagtgaatgtgagcccgatgtggcaacttataatgtgaaggccatgtactacgcgctccatggaaagccagaagaggttatggaggtgatgacagagatggaagcggctggtgtgaagccggacaccaccacctacaatttcctcatgactagctattgcaagagtggcaaattggaggatgctaaggttctttaccactccctagctgagaaggggtgctcggcagatgctgccacgtacaagcacatgttagcagaactctgtgcctatggagactntgatgctggnttgggcatcttcaaggatagc

SEQ ID NO: 143507 - DNA, 214 bp, Zea mays
  Clone ID: MRT4577_62355C.1
gctctatgcttgcaattacaacttcgacttcgtgcgtagcgtgcccctcgacaccggcggtcgggtcgagtgggcgccgttggtcagcatctgaagcgatcgtgcgtacggtgcaaggcggagctagatagagaagagatgcccgctacaacaaacataacggggaagataataaccaaacaattaagcagctgtatatagcctaagctaacca

SEQ ID NO: 143508 - DNA, 777 bp, Zea mays
  Clone ID: MRT4577_62356C.1
caactacacggggacgccgcccaccaacacccaacgttccaacggcaccaagctggtggtgctgccgtacggcacccagcgtggagctggtgatgcagggcaccagcatcctcggcgccgagagccacccgctgcacctccacggcttcaacttcttcgtggtcggccaagggttcggcaacttcgaccccgccaaggacccggccaagtacaacctcgtcgaccccgtcgagcgtaacaccgtcggcgtgccggcggccgggtgggtggccatccggttccgcgcagacaatccaggggtgtggttcatgcattgccacttggaggttcacgtcagctggggcctgaaaatggcatggctggtgctggacggagaccgccccaacgagaagctactgcctccgccatcggatctgcccacatgttagacgacacgaggaattgctggcctagtcgtcgccatcaacggccgtgattcatcggcccggaccatcttggaacagggattgcgtgctctctaatttgcacaggatatcttaccgtcttttgcttgtgctggggttggtgttatgcttccatttagtggtgtgctttttccggcttgagtcgtcgtctggttagctgtgtgagagacacgggcaggaaggtccgctgatgctactagacagacgccatttttttttattatacttatgagttactaccatcttttgtactgcctcggtcctaaaataattgacattcttgttttagaaaaaaaaaaaaaaaaaagcggcc

SEQ ID NO: 143509 - DNA, 301 bp, Zea mays
  Clone ID: MRT4577_62357C.1
gggcgccccacacttacatttttgctctctcgtgcgccttctatttctggtccgttctgcctcgacgcctttgcgggcgccaaccccttcgtgcagggcgattagctcaaggtctttgatcttgggagcttgaaccgtcgtctcttgcttcaagttcatgttttccccctctctgcggtactctccgtgagcttggtccaccgactgtcagaagggtccggtcgtcggattgtacgaatttcttccgtgttctctacgattggtgtaaaacccaagcccgtcggttcgtttgtgttaagct

SEQ ID NO: 143510 - DNA, 265 bp, Zea mays
  unsure (1)..(265): unsure at all n locations
  Clone ID: MRT4577_62358C.1
cctgnggtttaaatcacctatacgcaatgaganacggaaccattccagttgttcatggcactggaggactcagaaatacgtttgaaaaattcaacccttatgcagatggtgtagctggtactggaacatggtgggtcttcactcccttgtcgaaagaaaacaaggtctcgtccttgatgttggctgcatcaacttacaaagagtattaacagtcatggtaaggattgatgaaaaaagtaatgaccctaaactactcttgggaaaa

SEQ ID NO: 143511 - DNA, 221 bp, Zea mays
  Clone ID: MRT4577_62359C.1
agaagaacgaacctgagtctgctaagaagctagcatctgttgctgacctttatgtcaatgatgcttttggcacggcacacagagctcatgcttcaccgaagagttacaagtattgaagctgctgttgctggctctcatgcagaagaacttgactacctgtggagctgtgccaaccaagaagcatgcgtatgtgtgaccagccagagatggcatgagcgtct

SEQ ID NO: 143512 - DNA, 811 bp, Zea mays
  unsure (1)..(811): unsure at all n locations
  Clone ID: MRT4577_6235C.1
accgatcgatctacatacatatataaattccatggcgggcgaccggccggagatagcagcagcactcacccccagctaagcagctagctgagaccatcggccggcgaggcgaatgaagatggggagaggagccggccgcgctctgctgctcgccctggcgctcctcctcgcggtgcacgccacgccggcgtcggccgccaccaagtcttacttggtgatggcgtgccaacggccggcctcttggtccgatctgctcaccccaatcaccagccagttccggatattctacatcttcgacgccatcaaggggattgcattgcagatcgacagcattttcgtgccagccctcaaactgctcccaggggtggtcgtgatcgaagacaaactttaccaggttcaaacgacgcactcatggggtttcctcggcctcggggggttagacggtgagccgatcaacgtctggaagaacattgccaacttcggccaaggagtcatcatcgccaacgtggacacgggtgtatctccaatatctgcaagtttcagggacgacggcaccttgcccaaaccggatcgctggagcggtggatgccaacaaggcttctccggctgcaacaacaagttgatcggcgccagggttttcaacgagggcatcaagttgctgagcaagcagagcggcaagcagctgaacgagactgaggtgaactcgtcatcggactatgaggggcatggtacgcacacactgtccacggctggncggcggcttggtgcctaatgtcggcgccttggggccacgggacgggcacggccaagg

SEQ ID NO: 143513 - DNA, 266 bp, Zea mays
  Clone ID: MRT4577_62360C.1
tttaattaaaggttacattttgaaaggaaatgctaaagtaaaataccagccgggcaggctgaaaatcgtcttaatttacttttaaatcaatttatcaaaacttaattaaccgaaatcatctttaactatgcgtaaaattgcatcaatcagcttttatatttcacttcagtttaattattattttctgactatgtatttttaaatcgcttgcaatcgtttgaagccatcttttatcattttaaattacaaaaatcactttgactgct

SEQ ID NO: 143514 - DNA, 299 bp, Zea mays
  Clone ID: MRT4577_62361C.1
gatctccagatcgaccaagtcatcgagaagagaggtgcatttggtggtcgcccgttttggtaagaagttgaattcgaacctgaacctctgttgccaaagtgccaactttagcctactccaccgatttccagcgcggacatgctcttggcgtatttgctagtatatgctagtatatgagatcgaaggcccgtggttaagctatccgaggatgttcttttattttcaaaaaaaaaagaaaaaaaaaagaagaagaagagaaaaaataaaagaaccataaagagaaagaggaagagtaagaa

SEQ ID NO: 143515 - DNA, 597 bp, Zea mays
  Clone ID: MRT4577_62362C.1
tagaagtgcggtacccagagtggagttgcatcatggcgtaattgtggaacttcagtttccagaatcttgaggccatgtgtccgtgatacaaccttccacaagagcttaacctgcacctgggctctcgcgtctccacctacaattttccttgaatcaccaggcactgataaatttcagcagcgctgtaactgaagttccaccgtctcaccgcattgatatttcaccttccaactgtaagcgggttagttcagacggagctgatttgtgaggccgtggttcttgtcccccagacatggcatccaaaagaatgatgctcctgagttagtttttgtagctgtattccctggtagaattgaagagagatgtttgtacaaaagctaacctgattgttcttaccaagactcgtcatagacaggattgatgtacgtagtgggttactctcaagaaccagcttcagtactgcagtatgttcctaatagtgcagtatgggtatggcctcccacaccgccgctgtgttggggacataaacactttccagatacttgatgaatgactcgattatgaggattgattgattgattctagttggtgagttcc

SEQ ID NO: 143516 - DNA, 285 bp, Zea mays
  unsure (1)..(285): unsure at all n locations
  Clone ID: MRT4577_62363C.1
cattnnnnnganacacggcacacggggtaggacactgaagggagaggccgggcagccacaaaacaggcggaggacanacgagggcgcataccagaaacanagaacaggaaaaaaaaaggcacaagaccncccagaaacaaggcaaccaaacangcaacaagagacgaacgaaaggacgcaagaggagcgcacaacangggcgcacagagaagcaacnaaagcangagcacngaaaccaggcaacgagnaggacccacccagcaagcgccacaagaaagngacacc

SEQ ID NO: 143517 - DNA, 611 bp, Zea mays
  Clone ID: MRT4577_62364C.1
tttttaattcctttttttttttttttttttttttttttttttttttttttttttttggggttttttacaattaataatgaccttgcttaaaaacggacagggggcccgaacccaggggacacaaggccggcaaataaaccgcccgaaagagcccaagccacccagaaggggccaccaaccaaacaacccaaaacaacggaaaaacacaaaaggcctgaacgggaaccaaaatttaccccccaaaaaactggggaggaaccaaaacacccgcacgaaagccaggccatggaggccagccgccccaaaacttcttcggagaccaagaacagctgggcgggggcccggaacacggcaaacgaaacgatccccgccccttcggcgcccacgaacaacgccttctccggggcaacttaaaaaatcccaccgacaaaggcgcggaacccccccacggggcccggaaagttgaccagcccgcccacccccgaggggcggcccctgaggaaaggggggccccgggaaacgcccacccgaggccaaccctggcgggccgcacccggcccccggaatccggcgggacggcccgcccccggcgcccccgccggggggccccc

SEQ ID NO: 143518 - DNA, 261 bp, Zea mays
  Clone ID: MRT4577_62365C.1
aaactcacctaccctggcatgcgacgaaagaacatgttctatatagttacgtctacagcattctacttgatgtgaggacacatcgttcaggctgtcacaaccctgtctgcacataactaaaacgcgttgtttaacatactatgtttaagctgatgctatgctaaccaatatgcccgcacagatcgatcctcctaacagatgctcactctgcaaggacacaggctactcaccctgtagacgagacataaaacgaacctacac

SEQ ID NO: 143519 - DNA, 735 bp, Zea mays
  Clone ID: MRT4577_62366C.1
cggcgggcgggatttctacaagaacggaggaacgtgcctctcccctaaataggaggtggcacaatgatgaaaccacctacgatatattgcgggctctctgctccccaccactctacgagcagaaagtctgatacaatatcgtccctccccatcatcgcgcttcacccatcgaaggctcgccaagtgatgcatgcgcgcagtctgcctgtacccatgcgccttctacggatacattcagacataacggaccacaacattcttatccaggctatcttaacactaacgtcttccgcggagacagaacaattgtatgactcatatcgagacaaaatatgtgcacttcgcatacctgatttccgtgttgttgtgctgagcagagaccatatgtgagatatatacaatgccctagaatatgttacgccaagatagagaacatctcatggatatactctacgtatgtatcgacttcatcttctagagggacaatcaaccaccggtgactacatgacttctacgaaagtcgaagtcaggatgcattaaatagctgtggacgagcgactgcaaattacgcaagaactacactctgtactactatatgcatcctgtgaatgagacatgaggactgcgacgaaaccgtgaggacgatgataagcggtgccgttgagacatgacacgatatcatgactacgcagccctctgcggctatgtatacagcggaggcgattgctgatgcat

SEQ ID NO: 143520 - DNA, 208 bp, Zea mays
  Clone ID: MRT4577_62367C.1
cccactcatgcagttaccattaagctggttagatgccctgtaactaatgctgggataccttaattacactgagctttgcacggattgttcgatgttctcttgacctcttagggccctgccacggatacatataaggaaaacgcggagcctgatgagcgtgccaagtagtcggtgagcatctacgagttgctgactcctgctgaaggag

SEQ ID NO: 143521 - DNA, 213 bp, Zea mays
  Clone ID: MRT4577_62368C.1
aggcagcacagctccctacgaactcgatgctcctagctgtatctcctcttgttaaggggtgtggtcttggtaggagtaacaatagtttctggcagccgtcttcctcctcgctctctaccctaggagaggagaggagaggagaggagagaaatcctgatgctaatcttctcaagacgcataaagcgtgcctatatacaatcgactaaacacaga

SEQ ID NO: 143522 - DNA, 256 bp, Zea mays
  Clone ID: MRT4577_62369C.1
cccaagcgtagattaaaaaaaaaaaaaaaacaaataaaataactaacaaagaaaactcattaaaacaggcgatgagtaaacgaaatgtaaacccatcaccatgggtaggcagtgtgagcaatgacactgaatgaaccattgaaacggaaaggactgatggggcaggaaaaaagatgattggaccacggggcggcggacaagacgccctcttacggggcccatttctccccggcgggggcgcctcttccggggacgg

SEQ ID NO: 143523 - DNA, 291 bp, Zea mays
  Clone ID: MRT4577_6236C.1
atttggtggcattttacccacagggtgggggaaacattaatggcttcttgcaacaacaacaattggttccattctacccacagaatgtggcaaacattggtggctttttaccacaaccaccattggtggcatttaacccacatgctttgaccaattcttacaacttattggaaccggccaccattggtgggggcattttcttgaatttttattaattataccggaataattaaggtcttatgcttgtttttgccaacttttaattattaaggatttgagatctattttttt

SEQ ID NO: 143524 - DNA, 520 bp, Zea mays
  Clone ID: MRT4577_62370C.1
gcaggtggtcgtggacaagctcggcgagcccaacctcacctacgacgacttcgccgccaccctcccagccgacgagtgcaggtactgcgtctacgacttcgacttcgtcaccgaggaggggtgccagaagagcaagatcttcttcatcgcatggtccccggacacggcaaagattaggagcaagatgctgtatgcaagctccaaggagaggttcaagagggagcttgacggcatccaggtggagttgcaggcaacagatcccactgagatgggcattgatgtcatcaggggccgtgctaattgagtgtccggatcggatactgtctctatttaggctgtctccaataggagacctatttgggaatccaaacccaaaatgggtctccaacacaatacctatagcctccaacagagtacccttacaaaagatctattttgggttttgggtatcaggagaggcataacccaaatttggatatcctctctccttgatacctatttgcagagagtgttgtctttt

SEQ ID NO: 143525 - DNA, 581 bp, Zea mays
  Clone ID: MRT4577_62371C.1
ctctaaaacaccgcccttggggtgtgtggggtttttaaaaaaaaatttttttttttttttttttttttttttttttttttttttttttttttttttttttttaacaagggctttttttagtcccccttcttaaattttttttttttcaacccaacccaagtaaacaatggggggggggggttaaaatcccccccccaaaaaatccaacccccgggaaaaaattaaaaaaaacactgtaaatccaattccccatttaacactttttttaaagtacattattctccctttttgttcaattccaaattcaaggccccccaaattaaccgaattcaaggcaattttttcacttttaaaatttttttttttccccaatcctagcttgattcctttttaaaaaacaacttttttttcttgggattaaatttgggcctttttttaaaccacccccccctttttttccctcctttttattttaaacaacctttatccaatgaccaccaaaattaaaaacccaatccctaaaggcccaacaaggtaatcatttccctttttaacaatggttttagccaaaaaaccccttt

SEQ ID NO: 143526 - DNA, 163 bp, Zea mays
  Clone ID: MRT4577_62372C.1
gccatagaccacaataggggcgtggggatctaggtgttttgcaggtgttaaccatccccacagcgacctagtttgcttacagccagtacatcatgtgaccatggtgaccatgcaacccgagtactcttctcaccgtggccagaaaacgaagaagagatcgaag

SEQ ID NO: 143527 - DNA, 382 bp, Zea mays
  Clone ID: MRT4577_62373C.1
acttgcaagatggcgggtgaaaaagttgagaagccagatactaaagagaagaaacccgaagccaagaaggttgatgctggtggcaaggtgaaaaagggtaacctcaaagctaaaaagcccaagaaggggaagccccattgcagccgcaaccctgtccttgtcagaggaattggcaggtattcccgatctgccatgtattccagaaaggccatgtacaagaggaagtactcagccgctaaatccaaggttgaaaagaaaaagaaggagaaggttctcgcaactgttacaaaaccgttggtggtgacaagaacggtggtacccggtgtggttaaacttcgcagaatgcctagatattatactactgaagatgtgcctcaaagct

SEQ ID NO: 143528 - DNA, 430 bp, Zea mays
  Clone ID: MRT4577_62374C.1
agccatccgggtttcaaaaagccttcaataattcacaaacccctcccatcgatagcaactattctcggggcaacagaaccccaatggtctggccccaattagtagctaaaaaacgggccaaaaataggattctggccggggtagatttaaatcgaacagaacaatacgggaatcccacaaatcccaaaaaacggcccttggctctacccaagcgaaggaaatgatccctctcaggcagcacggggcccagtacatctcaccataggcgactgggggggttttcaaccacccaggccgagtaatcaccccaagccacactaaacacatttttcaagcagcagcaggtttgcccaactcactttccccatgggcaaaggggcccccgtctccaaaggggcaggagcccttggtgaagttcccccacaacctg

SEQ ID NO: 143529 - DNA, 190 bp, Zea mays
  Clone ID: MRT4577_62375C.1
tgttgttttttaaacaacaaccggtgggttcattaaaagatacaaaatgcaagttgccttaacgttgcatataacatgcttgctggaaatactaaccaaccctttttacttatttttacgggaaacaagactgacaggtgtaacggcatcccagatggaacccagtaacataccttctgaagccacaaaa

SEQ ID NO: 143530 - DNA, 368 bp, Zea mays
  Clone ID: MRT4577_62376C.1
aaaaaacaacttttattaccagacttttttatttccctttttttagcccccacagattcataatttttttagaccacccgggtccggggatttttcgggtcatgccctcagtcttccagggggataacaggaggggttttaaaaaagcaaaaacaccccaaatttttttttatgtgggggtggccgtccccggcctaatttgaaaaaaaaaacccccttttggatactttccgccagttttttttttgccttttccaaaccaaatttttgaaactcatttaatggcccaagggggaggatctcctaaatgccacatcgccctagccgaactttggatgcaaaaaaaggcaactttggaacctaaaaag

SEQ ID NO: 143531 - DNA, 220 bp, Zea mays
  Clone ID: MRT4577_62377C.1
gagcaacaaacgatacatctgttcgtgttgctatgctaactccaactggggggggtgatacattcaataaggacagccctcccggtctcgaattcggataatcctccgccgaggtatgaaacatgaggcgggcaccaccatagtggttacccaggaggacgttctgcaccactacaatgtgcctgcaccccgtcgctaggacaatccgtcagcactggct

SEQ ID NO: 143532 - DNA, 405 bp, Zea mays
  Clone ID: MRT4577_62378C.1
ggaaaccccatgggtttttttcttaacaaagcccaaaaaaactaaaacttagggaattcgttccgggggggggggggttaagttaaacacaaaaaggcaaccggggccaaaaccagggggggtcccggggccaggggccccggtcaaattttttttcagcataaacaagcagaaaaaaggggtggggaccaaaggccatgggggaccacccttgatggggggggaaaaatatttttttttacgggggcttgaacatgggggggatcagggccacaacccggttggtgtacccccacttggtggcgtcccaaaaaacaaccttgaaaaaaggggcgttaagggcaatcccggccttggggtcaaaaaactcaccctgttgtcaccggggaaatcgggggaaaccaa

SEQ ID NO: 143533 - DNA, 175 bp, Zea mays
  unsure (1)..(175): unsure at all n locations
  Clone ID: MRT4577_62379C.1
gcaacgtcgtccgtagaagagtgtcagccctcgctngttgcctttcctcactcaagtagccgatnggtggatctactcttgaggtacgtgcgtaccggtggtcgcaatgtgacggcgcagaagggcggtctaagaacctagtccttacctcaaggtagcttacttactcggtgca

SEQ ID NO: 143534 - DNA, 542 bp, Zea mays
  Clone ID: MRT4577_6237C.1
catacgttggaggagttccacgcctgcctcctctgctcccacggccgcaacggcaccacgacgcgcgtcgtcgggagccaccaggatgtctgctacctaccccttctcaaggagtagctctccgagccatggactggcgcgagtgaggcaccgtcatcgagatctcaaaattccggagaatgtctcgaagtgcatagattgaaaaaagtagcataagaagaatggatttgtggaattgattattttcacaagactgcaaatcagagtagatgtttttcgaccatgctttactctaaacgctttatgaagcatctcagcgtgcgtttcagctctacagttctataatccatccaagtatccatgtatgtatgctcaacaacatctatttgctcgatcgatacttgttgggtttttgaaactgggagcatgtggatagatgagaaggattggaatcattatgttttgcctatttggtggtaaatcagtactacatttctatgtaacattgtttttatatacgtgtagctctgtttggctttggc

SEQ ID NO: 143535 - DNA, 1106 bp, Zea mays
  Clone ID: MRT4577_62380C.1
cccgtacgccgacgctgccattcggcgcgttcatctcgcccgtacgccgacgctgccgcctggctcgcaccgcccgccggcagtgcctcagtccagatcaagcctccctcttcccagatcgggtcctagttgggctaccgcagccctacgccaggtgccgagtccctcgccgatttcttcgccggcgaagagtgcccaccagatccgcccctgatggacaacgtcgagtctgcccctgactcgccggcgcaggcgccgccgtcatccgcctcttctctccccaaggagcaatcgcaggtggagttggagctgaggctgcttcaggctcttgagttctaccctccatcaaaactcaaaggcattcaccggcattatgttctctagggccttcatggaatatttgcgaaaaagccttgaccgaccagttctaacctgacagaggtgctaccagatcttgatgagatggataactctcgtaaggcctaagaattttcgttgccagagagttttctcaacaaggaagaataatatctagtaacctcgtactttgggtgtcctctggaagagaaatcagaaggctggttcttagtgattccctatttcttgtagcattgtcatctggaacatcttgggtcacaactcacaagttttacttatgatgatgatttataaatgaagaaaaaaaaagatgatgagaaggataacttccgtcagggcgaagaattttcgttgccagagagttttctcaacaaggaagaataatatctagtaacctcgtactttgggtgtcctctggaagagaaatcagaacgctggttcttagtgattccctctttcttgtagcattgtcgtctggaacatcggctgcggggagacactgaacactgaagtaaagaaacacatttcctaaggtgtggttgtctttactgactgtacagctagcttttgtagactagtgtaatcgaaaataggttgaactgtgtggttgcctggagcgtgaacaaaaagcaaggaggggcaattacaaaagctgctgctgttttacctatcaaacttctctgatcatgactataggtgcagttctataaagcatccataattccatg

SEQ ID NO: 143536 - DNA, 1122 bp, Zea mays
  Clone ID: MRT4577_62381C.1
cggccgggccgggtttttccttcgttcggtcgttcccctccgggactatcctcctcgcgttcatctcgtccgtacgccgacgctgccgcctggctcgcaccgccagccggcagtgcctcagtccagatcaagcctccctcttcccagatcgggtcctagttgggctaccgcagccctacgccaggtgccgagtccctcgccgatttcttcgccagcgaagagtgcccaccagatccgcccctgatggacaacgtcgagtctgcccctgactcgccggcgcaggcgccgccgtcatccgcctcttctctccccaaggagcaatcgcaggtggagttggagctgaggctgcttcaggctcttgagttctaccctccatcaaaactcaaaggcattcatcggcattttgttctctacggcctcatggaatatttgcgaaaaagccttgaccgacagttctcttctgacgaagttctacaactcttggaccgcttctttaacctagaaatgctggtatctggaaaaccaatatcggaattactttgttatatttcccttctgtttttgtcttatattgtctggacaatcggagtatattaaatctatctctgcattaatttaccacgatttcaaattctcatggaaatcctacagtttggtcacaactcacaagttttacttatgatgatgattaataaatgaagaaaccagaggatgatgagaaggataacttccgtcagggtgaagaattttcgttgccagagagttttctcaacaaggaagaataatatctagtaacttcgtactttgggcgtcctctggaagagaaatcagaacggtggttcttagtgattccctctttcttgtagcattgtcatctggaacatcggctgcggggagacactgaacactgaagtaaagaaacacatttcctaagctgtggttgtgtttactgactgtacagctagcttttgtagactagtgtaatcgaaaatcggttgaattgtgtggttgcctggagcgtgaacaaaaagcaaggaggggcaattacaaaagctgctgctgttttacccgaaaaaaaaaaaaaaaaaagcggccccccagactctcacactctttggtctc

SEQ ID NO: 143537 - DNA, 925 bp, Zea mays
  Clone ID: MRT4577_62382C.1
gggaccatttccttcgttcggtcgttcccctactatgctccgggcgttcatctcgtccgtacgccgacgctgccgcctggctcgcaccgccagccggcagtgcctcagtccagatcaagcctccctcttcccagatcgggtcctagttgggctaccgcagccctacgccaggtgccgagtccctcgccgatttcttcgccagcgaagagtgcccaccagatccgcccctgatggacaacgtcgagtctgcccctgactcgccggcgcaggcgccgccgtcatccgcctcttctctccccaaggagcaatcgcaggtggagttggagctgaggctgcttcaggctcttgagttctaccctccatcaaaactcaaaggcattcatcggcattttgttctctacggcctcatggaatatttgcgaaaaagccttgaccgacagttctcttctgacgaagttctacaactcttggaccgcttctttaacctagaaatgctgaaaccagaggatgatgagaaggataacttccgtcagggtgaagaattttcgttgccagagagttttctcaacaaggaagaataatatctagtaacttcgtactttgggcgtcctctggaagagaaatcagaacgctggttcttagtgattccctctttcttgtagcattgtcatctggaacatcggctgcggggagacactgaacactggagtaaagaaacacatttcctaagctgtggttgtgtttactgactgtacagcaagcttttgtagactagtttaatcgaaaatcggttgaattgtgtggttgcctggagcgtgaacaaaaagcaaggaggggcaattacaaaagctgctgctgttttacctatcaaacttctctgatcatgactataggtgcagttctataaagcatccatgattccatg

SEQ ID NO: 143538 - DNA, 754 bp, Zea mays
  Clone ID: MRT4577_62383C.1
gtcagcgacggcggggccgatagccctgcctggctgcccggagaactgcggcggcgtacaagtgccgtacccgttcgggatcggccgtggctgcttccacgaaggcttcaacctcacctgcgacgaggcgcagcacccggcgaagctgctgctgggggacggcgtcgaggtgctcgacatctccttgccggactgcacggcttgtttgtgttgtcccctataggaccccaatcgtcagacttcagatgcctaagctcaaacagtttctcctatactattattggaaactacgatcgaagacggtgcaactgttctcacggatacgagggcaatccttatattgctgatggatgtcaagatattgacgagtgccagctgccagatatttacccatgtcatggaacctgcatcaatgtgcctaggacatacagatgctcatcaaagaaaggcatcaagagccttctaggcttaattgctataatagcactaagtgctggttttggcctactattttcaattcttggtgtttccaacatcatcaataaactcaagcaaagaagggcaaaacttctaagacaaaagtttttcaagagaaaccatggtttgcttctacaacagttaatatcttcaaataaagatatagctgaaaggatgaagattcttagctttgaagaactagagcaagcaaccaacatgtttgaccagaatcgcatcattggtgatggaggtcatggaacagtctacaaaggcgacg

SEQ ID NO: 143539 - DNA, 363 bp, Zea mays
  Clone ID: MRT4577_62384C.1
aatcaataataatgcaatcgaaagcgagctgttcatacgcaaaaaaaaaaaaaaaaaaaaaaaaaaaaaaaaaaaaaaaaaaaaaaaaaaaaaaaaaaaaaaaaaagaaaaaaaaataaaaaaagaaaaaataaaaaaaaaaaaaataatatataagagaaaactaaataaaattaaataaagagaagaaaaaaaacgaaaaaaagtgggaaaacctttgtaaatagccaaacttaatgaacctagcaaaataaaccccttatggacagcttgcgtaataaccaaaaggcccacaccgggcgcagttccaaaaagttgcgcattctaaaaagctaatgggacccaaaatgtaatggcacataa

SEQ ID NO: 143540 - DNA, 400 bp, Zea mays
  Clone ID: MRT4577_62385C.1
gtcaatcgttgggatcatgcaaagacttagaggttgaacctgcgagggattgctgatgaacagatcaagccaacggagatggcgactgctctgctacaaataactgacagatcctacaccaggacaaaagctctttgtgtatcaagctctgaccagcagcgaaccgtcaaagtaactagtgaagcaatggagaaggacgtgcacaagaaagggtatacgatggtgacgacaaacgtgatgctgtagtgagatgggttatgactgcaatctaaggaagaccttgcgctgccgcagacaaaaacttgtatgaccggaagacagccttaagggatgacgtaacatatgcgttgcttacactaaagggatcctggaggatattacacaaagttataaggatacc

SEQ ID NO: 143541 - DNA, 375 bp, Zea mays
  Clone ID: MRT4577_62386C.1
attcggctcgagcaaatactcatgcaaagtaaacggtgacttttgttatatgactgcatgatggtgcaacagtaatcgttggacttgtatatagtattgaatgttagctgcatccatatgttgcacaggttaaacacatgcactggtatcaggttggagatacagtttcaccctgtgagtgtcgatgtagtagggctcgattgccacctagcaggtatacaatttttactatgctgcttgtgcggccatgttgcactcatgctggatatacttttctgtattaatcggaccatgcgaattagtccttccaaacatgatttaaatgttgatgaggcgatggtatgagcacatgccttaaatttgaaacctttaggt

SEQ ID NO: 143542 - DNA, 416 bp, Zea mays
  Clone ID: MRT4577_62387C.1
gtggtagacaaagccaggaactccaaaggtgggagttcggattcggaggccgacccacaccactccaccacaccctactcgagcgaagcgagccagcaatggcgcatcgcatccgcgggccgtgaccggcgtcgccggagactggaacaacaatggctgccgtggcgcgcggcggtcttgcgatgcccacagcagttgtgccggcggctgcggctgccgcggatgaagagattccggtggcggcacatagacagcgtcctgagcacggtgtcgttcgggttcgtggccaccgacatcctcgtgtccatgttcctcgccatggccatcctcgagcactttcttcgccccagggcccatacgcttgggcacacgccgccccggtggatccgccgccaactccccttttttctcggccg

SEQ ID NO: 143543 - DNA, 641 bp, Zea mays
  Clone ID: MRT4577_62388C.1
acaatgtagacatagcactatagcacagaattcattaaaagttgaaacaaacgccatggcttctctagttctttttcgcaacacaggtcacaagataccattgtaccaccaccaggactccagaagtaacacaacaagaaccatcaccgccaagaagagcgaagacgcctttacaccttgtgctgctcaagctggtcacggcttatgtcctgcagctggttcactgtctgagcatggttgtgctagttctcttcacctgaaccacatcctcacaaggctctgcttcagtgcacaaagaaacaataactagatccgattggttgacagaacttgggtttgcccaggaattctctgtaacttaaacttaaacaccttggagcctggttggccttcgctccagcaatctacaacattatatagcccgtcatatgtgaatattgtggtttctttggccatcgaatggttgccttcctctctgtccagacatttgaaggtgtgaattactcggacaggactttttgttcggatgcagttcttcaaggctagattacccctctcaagcttttgatccccctcacccttgttaccagaaatctttcctccagaaccggtgtataccaattcacccaaccgagatagct

SEQ ID NO: 143544 - DNA, 112 bp, Zea mays
  Clone ID: MRT4577_62389C.1
caggacccgacggaccaacccaagatgaaaccaacgagggccatggcccttgggccacgcctcggtttaattcgggtcttttgattcatccggactttaatccgcggggcct

SEQ ID NO: 143545 - DNA, 706 bp, Zea mays
  Clone ID: MRT4577_6238C.1
caccactctactcacgcggcactacccacaaggatctcccacacgtatatgatgctcttagctctgccgaaataggaaccgacgacgtctcctcatcattcaaagatccccatcattgtagacctgacagatatcttgactaatgcacacctcaaggacaacgtgctgatcgcgctcaatacctgcgatcggcttggacctcaccagcaatctcgaaatccctcctctacaatgtaggccagttcctcgaacaagaagtctactgccagcttatcatctccgacgtcctggactctacctgcgtacaccatcgagaatatgcgcgccgaagcgagcctgaagaagtgcttgcttaatcactcgacgtttctgaccaacgaaaaccaatatctctgcaccttccactgtcatatgaacaaacaaaccatctcgattgtcatcatcatctacaacaaccacgcctctaagtgcttcctcaagaccatcacacttaacgaagtactcggccacttcactcatcgtgttcgtcgtgaactcatggatctacccgaagtccaagcagcgatacgatcgtgtcttcctctccatggatacgtacctccccacccaggatgtcgacgaagctcaagacataccgttatcagaagctcctgaatctgatgaccgcagaccaacaggactcggagcactatcacgagcgcatata

SEQ ID NO: 143546 - DNA, 399 bp, Zea mays
  Clone ID: MRT4577_62390C.1
attcggctcgagcccggtccggaagacgagtttgttaacgtccctctcctctccgcgtcccagagcctcaacctctcgcgtgaagtgggcctgcctgaccgcctgcacaaaggagcttttcacggcctctaagagcatcctcatggacctgaaggacctgtttatggacccccccacattatgcagtgcaggttcagctgttcaggacatttcacattgtcaagcaacagttgtgggaccacctgacagtcacctatgctggtggtgctttttatagctaacatttatatggccccagattaccgactcaaacctccaaagatttttttcaggacaatggccttccattctaatatcaacaggaatggatgaatatgccttgacattgataaagagcag

SEQ ID NO: 143547 - DNA, 301 bp, Zea mays
  unsure (1)..(301): unsure at all n locations
  Clone ID: MRT4577_62391C.1
nnnnnnnnnnnnnnnnnngangngaccgggnacgccnaaannnnaacagancaaggagaanccaagagangcaagggacagaacacancnacagagggacagacanncnccagccnnncaaaccccacaaaancgnccncccggcccncaacaacaaccanccancacacaaggccannanacnnncncccaacaacgggcacaaaaacaagcncacnnnggnnncaaccaaacaaaagggagaaggcgaaccccaaaaaaaaacccagcaaancccagnaaannaacgaaccaaaccaaa

SEQ ID NO: 143548 - DNA, 497 bp, Zea mays
  Clone ID: MRT4577_62392C.1
gggggggggggttttttttttttttttttttttttgtttttttttttttttttttttttttttttttttttttcctagcccctccccgggaggatttcattcccctggcccacccttttttttttttttttgaaggggggagagggagggggggggggggggaagaggttctgaaaggaaagctaaagcgcttgaatccccaagcccccaggctcgagattgttccagggggcaaacagggccgtttcccgcggctggggggggtttacagggtccagggtccagccttcccttaaacggattcaatgaaccccccgggcattcgtctcatcgcctttttttggggggcgcttttgaggccggggcaaaattttgctcggtaaccttttttttaagattcacaggggaccgcaacctggcccacccgctttggccttccggagtctccacaagcaactggtgggaacccaaatccctgctctgggacgggatacggg

SEQ ID NO: 143549 - DNA, 1065 bp, Zea mays
  Clone ID: MRT4577_62393C.1
gtacctcgaggccggccgggacgagccgggaatccgctcgaagcgagccggaaatatcaaaatttccggaatccgccgccgccgccgccaggctgaccaatggacctctccgtcgtgccatccctctccctctccccgcgccgtgcccttccactcccggccaggagggctgcgcggcgtccggccttcgtctgccgctgcagttgctccctggacgcgtccccggtggccacccggcggttgttcgcctccctcctcgccaccgcagcagcggtgggggttggcgtggccggaggcggaggggaagccggcgcggtgtccacgagcaggagggcgctcagggcgtccaagattcctgagagcgaattcaccaccctgcccaatggcctcaagtactacgacatcaaggtaggaagtggggctgaagctgttaaaggatcccgtgttgcggtacattatgtggccaagtggaagggcatcacattcatgacaagtaggcagggtcttggtgttggtggtggaacgccatatgggtttgacgtaggcaattctgagagaggcaatgttttaaaaggattggatcttggggttgagggaatgaaagtcggaggccagaggttgataatagttcctcctgaactggcgtatggaaagaagggtgtccaggaaattcctccaaacgcaactattgagctggatgtcgagcttctatcaatcaaacagagtccattcgggactcctgtgaagatcgttgaaggatagctttgcatagagttctgaaagaaatggtacatatctgcatggacagtagagttgttgctattgaaaaaggatagtttactaaaatatgctggttgtattcaattgatagtacactcttgtaagatttcgattttactgaaacatagattttttttttcaccgcttatattcaacagttatctacgtgtctaaatcttaatttatggcttctgctatgtttgaacttcaatctactcttaacttatttgagagtaaaagatttttgttattgatgttatatttaataatgtatccttccaaaaa

SEQ ID NO: 143550 - DNA, 1279 bp, Zea mays
  unsure (1)..(1279): unsure at all n locations
  Clone ID: MRT4577_62394C.1
caaaatcccgcgccggccctgctaaaaccctaaaccgtgcccctccgtcccacccgtccgctccatcgcaccctctccgccgccaagaccatcctcgcatccgggttgccagctctccttgagcccagaagcacaccgcgcgccatgcgaccaccgagagggcgaggcggtggtggccggttcggcggaggaggaggccggggccgcggcgggggccgattcagcggtggtggccgaggtggcggcgggggccgcttcggcggcgggttccgcgacgagggcccgcccgcggaggtcgtcgaggtttcgacgttcctgcacgcgtgcgagggggaggcggtgacgaagctcaccaacgagaaggtgccctacttcaacgcgcccatctatctgcagaacaagacccagatcggcaaggttgaagagatcttcggccccatcaacgaatcctatttctctgtgaagatgatggaggggatcattgcaacatcgtacaatgaaggcgacaagttctatatcgacccaatgaaattgctgccgctctcacgcttcctgccacaaccaaagggacaatctcaaggagcacctagaggtggtgggcgtggtggaaccaggggtggtggccgaggccgtggtggttcgttccgtggtggaagaggaccaccaaggggtggtggccgaggtccaaggggtggagaccgtggtggttttagagggcgaggaaggttctaggtgtagtttgagtttgatgatgtttttccctgttgaagcatcatagctacccaattggaaacttccatgttcttgtaacctgatatgtttaaggtagcagaacattttgtttgtggaacttggattctcaattgaaacaaagggtttgtacctgttccgttcccaatggccattatgtgcttccttgttctgaattcaacttggactggtcatgggcatgcagttacagtccttggtttatgagggcctgggggacgtacattttcccgtgagcacctnctngcctncctggtctaaaaaaaactactctnttttacgtcctcgtgggtactcgaggttgtggtgcatttctaatgtggtaagagcaataatattggcgtagcttgttgaaagtgttttgcttagagacggtgaggatttggtgcgcgattttgcatannnngaggcctggagtgaggtccttgttgtaatagcagtgcaccaagattttgggatatgttgccacatttgtacttgaaaacgacgacaccgagcatgatattctgat

SEQ ID NO: 143551 - DNA, 332 bp, Zea mays
  Clone ID: MRT4577_62395C.1
tcccgggcttctccttcccatgcggttgcgggttgggatacgtgagggtcttcggcgttgggctaggcgggggagcggatgacgatggcaggccgagagctggtgagtaccaggtggtgtagagatggactaccgctgtgccaccgacaaacactggctgcacaccccctctaagacttacggcgaggccgtgtttttttgaataggtgcatattgcattgcaacttgcaagacgcagtgtgaatctctaaccggatgttgtatgactttaagattggggtggactttttaagcatgtggcgtttttgtgtgagctgtagagggcattttgt

SEQ ID NO: 143552 - DNA, 356 bp, Zea mays
  Clone ID: MRT4577_62396C.1
aacttccgcgcaagttaggctttaccacacaattttataactaacaatggatctcttttatcaaacaacctctctttgcgctttgcacaggggatgtagttcttgagaacacaagaaagagaagaaacccaaactgaaaataaaaaatttaaaaagccctccaccgggggtgtttgaaccaccacacaacatacacaaaaacacatctcctctccagagggggccggggggcggacatcttaccaagatccatgacgaccgccggacacctagcaggtagacactccaatcactcgagctgagcgtaccacaccccctggatcttgacatccttgggcgccttggccccgaagacg

SEQ ID NO: 143553 - DNA, 144 bp, Zea mays
  Clone ID: MRT4577_62397C.1
tagacggacgcgtgggcggacgcgtgggatttgttcccaactaatggtacctagtactcacaattagttgggaacaaattgtgagtactaggtaccatttcctgatttttgagtcacaacaggacctctgagttctcccggatg

SEQ ID NO: 143554 - DNA, 338 bp, Zea mays
  Clone ID: MRT4577_62398C.1
ccctttaataatttacctgtccacttaccttattttttgggtttttttttttcttttacctgggttaccaccaaaccaaataaacggaggtctgctcaaaacaaaaaaacatttactgttgggacaaaacaactatccagcaacccaaagttatcaggggggctgacggaaaaatcgcgaacgaacacattggattatctcttcatgcccagtttttcggggaacaggcagaggcgctaaagccaacaccctgtgagtacgtatcacctggtgaaccccgggaacctacaatgcgtaatcatggtcggagctggtttctcgagccaagaaatgggcca

SEQ ID NO: 143555 - DNA, 252 bp, Zea mays
  Clone ID: MRT4577_62399C.1
ggcggcttgccctgcccgccgtcttggcgccgcgcgcgccatggccaagagcaagtcatacgccaaggccggccccccgctcctcggcaagtacgagctcggtcacctcctcggccggggcaacttgcgcaagggataccacgcgcgctgcctcggcggaggggaccccatggccgggaaggtgctggacaaagccgggctgaccaccactggcatggccgcgcggggtcctgcgcgaggtgtctcccatgc

SEQ ID NO: 143556 - DNA, 174 bp, Zea mays
  Clone ID: MRT4577_6239C.1
ccggccgggggcaagttgaatatgaggaaggaagcgccacacgtgagtgaaccgagctgagccaaggtggaggcatgggatggcatggcgtgtcgtgttgagtcgatacaaaaaatatgtgacacatacacgctcaacgatgtaaatttcgaaaaaaaaaaaaaaaaagcggcc

SEQ ID NO: 143557 - DNA, 242 bp, Zea mays
  Clone ID: MRT4577_623C.1
cttgtaaccggacgccctactcccttcccgtcggtcccgacctttacgtacttctaatatgatccgacgcgggctccccgttcgacccgaccgtgtgctcaattaacctcccttactgctcatcctcatgcggtactaactcccatacttctgttcaggaggcgcgcatgcaagctggcacgatccagggggcatggtctgggttcctggtctaatgggcgcgagccggctcgatgttgaga

SEQ ID NO: 143558 - DNA, 501 bp, Zea mays
  Clone ID: MRT4577_62400C.1
tctgcaatgccaactctgatatgtattagaaattaatctcgattaaatcacaatagctaagaggaaacaataggtatgacaaagatgttgagttcaagttactgaaatagataaatgcattagccataccaagaaatttaggatcaccataacaatccagttagtcaaaccattagcaaaatttagaacacaataatcataaacacacatacagttcttgcaacatttactcattaatgtggttcatggattctgaagctcacatgatttgataataagatgtcttggacttcattggacaagatctacttagagcactgatacagatacatttcttaacctgaaccagtttatattactatgcaaggtctctataatggtcaggtatttacataaataatacctgaacttttgatagatggctagttgctaccttttcattgtagtgtagggtggcgttgcaacctgatgggcttttctagcaacaattcttggtggaga

SEQ ID NO: 143559 - DNA, 473 bp, Zea mays
  Clone ID: MRT4577_62401C.1
gccccaagttcctcttcgctagtagcctcaatacatttcagccaaccgtcatttggttcgtcaaaccggtctctgtatctgaaggtatatttcaaacaaattaatccaccttgactggaccctgcagcagtctcctttggcatctaccagttatccacaagtggccataccctataggctatgtgctcttggattaggtctcttgtaccaatgaaagcacagacattgctgaaagccttttgacatgcttcgacatgattttcaattgccacggtcggccttcgaaggctcgaagcgagaccagatggggcgttggatgatcccctttatgtcctccttttcaatcagattattcttaacataaaaccattcctccatacaggaccagggccaccttttccggaacgttggaaccggctagcttgcattagagcgagcaatgaatccataacaaccgcagttattgtgatact

SEQ ID NO: 143560 - DNA, 234 bp, Zea mays
  Clone ID: MRT4577_62402C.1
ccaagaaggggacaagggcctctcttgagttttggtatgtcagcctcatcatattctcaatgactggactcaacgccaaaaaggggccacaaaaaggatataaaggactcacacccttaaagggccccctagaaaaaaacgcatctatagacacaccataaacaaaatttttctttcctataaacttgacatttaaaaagttctctttgcattgtatatcccacatgtttaaaa

SEQ ID NO: 143561 - DNA, 235 bp, Zea mays
  Clone ID: MRT4577_62403C.1
gtcacgcgtgggcccccggttcgggtgggctcgatcgtgcaacaagaagggcccttacttgcccttgagccgtacgtttgttaggacctgcaagtatgatgagtatggacgacttttggagcctacgagccacaagtacaactctatgacagtgctattcaggtgtaaagactacagacagtctggcttcatcatgggctcagaggcaagaactgcatatggagagcacgctctg

SEQ ID NO: 143562 - DNA, 318 bp, Zea mays
  Clone ID: MRT4577_62404C.1
acgatctgacccaagcgagggttacacctcacccaaggacctatccaatcctatggagggcggcgactcgtacggcgccgacgccagccgctccttggtgtaccgcgcggtcatcgccaacttcatcgccacgctgctctttctctacatgaacgtggccaccgtgatcgggtacaagcaccagacggacgcgttggcgtcgggccccgactcggcgtgcggcggcgtctgcatcctcggcatcgcgtgggccttcggcggcatgatcttcatcctcgtctactgcaccgtcggcatctcatgtgggcacatcaaccc

SEQ ID NO: 143563 - DNA, 385 bp, Zea mays
  unsure (1)..(385): unsure at all n locations
  Clone ID: MRT4577_62405C.1
ngctgnaccagcagaggcaaaacgaggcccagtgtgtgatgaaggagaaagggccgccgcccgcaccgcaaaagacgaaaggaggaggccagcaagcgcagaccggagagcacacggcagcaaagggagacacacaccagcagcaggccacacacgaccaggacggggtgaaaaatcggcaaaacgcatgccaagacgaccccagagacaattccaacaaaaaacccacacaagtgagacgacgaccggcacccgggcgcacggacacggcacagcaaacngggcacagcagccccggggacaggacggaacaacaccctgctcgagccaacccacacaaaggaccacagaccaaacaacgcaacagggccgagcatcagccaac

SEQ ID NO: 143564 - DNA, 119 bp, Zea mays
  Clone ID: MRT4577_62406C.1
gtgacatatggaacccatatgacagtgagatgatcatgaataaaaatgaaaagcgaaggtgtcttaaacaccttagctaattagctccactgggggagacgatgtagcgaaactatgct

SEQ ID NO: 143565 - DNA, 842 bp, Zea mays
  unsure (1)..(842): unsure at all n locations
  Clone ID: MRT4577_62407C.1
aactccaattccagatccaccgtgcgccacgcccccttccccaaaaacctttcgaaaaccgccgcgccaaccgccacccagccccgtccaagaaaccgcacgccaccgcggacgcgaccccccgccggcgccaagatggtgcggctaagcaacacggtgatcgggatcctgaacgcggtgaccttcctgctctcggtgcccatcctggcgggcggcatctggctgcgggcgcgcgccgacggcaccgagtgcgagcgctacctggcggcgccggtgatcgcggtgggggtgttcctcatgctcgtctccatcgcggggctcgtcggcgcctgctgccgcgtcacctgcctcctctggttctacctcgtcgccatgttcctgctcatcgtcgtcctcctcggcctcaccgtcttcgccttcgtcgtcacgcacaagggcaccggggaggccgtctccggccgcggattcaaggagtacaggctcggggactactccaactggctgcagaagcgggtggagaacgacaagaactggaacaggatcaagggctgcctccaggacgccaaggtctgcaagtcgctcgaggacaagacggtcgaccagttcatgtcctccgatctctcccccatccagtccggctgctgcaagcctccgatcagctgcggcttcacctacgtcaacagcacgcaatggaccggccccgccaagtcgacggagcccgacctgcggcgcgtggtccaacgacggngcgctctgctacggctgccagtcgtgcaaaggccggcgtggtggccaccctcaagcgcaattggaagcgctccgccatcatcacatcgtcttcc

SEQ ID NO: 143566 - DNA, 1757 bp, Zea mays
  Clone ID: MRT4577_62408C.1
cggacgcgtgggtcccgactcggagtccagtagcctgctagctatctatcagtgatccctcgcgaacgatgtgggacgggctggagagcgcggcgaccgtggcgcagctggtcggtctcgacgtcggcggcctcatcaccatgatcgggcaggcggcgcggaaggctcggcagaacaccaaggactgcgagcacctagcccgccgcgtcggcatgctcgcggagctggtcccccacctgcaggacccggaggccaggcgggcggtggccgggctcaaagatgcgctcgtggaggctcaccagctcatcacatcctgccagaggagggggctcacgtcccagctgttctcggcgtccaggcaggccgacaggttcagggacgtcgagcgcaagatcgaaacctgcgtgtccatcatccctgtcatcggctacatcggcataacaagacgcctcgatggttcgcaatcccagtcccagctgtcggcgggaggggctgaggatcgggagttcacgctggcggagatctccgtggccaagcgtcaacttcgccgttcgtgctcagcaacgacgccgacactggcaccaaggaataaaaaggaaggctccagaacgggccctgaggtggacgtcaagcgcctcgatcgcgcgcggcggggagcggaggacgccattcttcgcggagcagcacatcctctcgccgctccgccacgaccgcatcgtccgcctcctgggcacctgcgccgacgacggcgagcgcatgctgctcacccagtacatgcccaacggctcgctccacgaccacctgcacgggcaccacctgtcgtcctcgtcggcgtcgccggtgacggcgtcctggaggactcgcgtccaggtgctgcttggcacggcgcgcgccgtcgagcacctccactgccacgccgtgccgctcatcatccacggcaacgtcgcctcctccaacgtcctcctggacgccgcctgggcgccgcgcctggccggcttcggcgcatcggtgtggcgcgcggccggcgtggactcccagcccgtggaggtcgccggcgccgcgtcgtgcggcgggtacgccgacccggagtactgcggcacgggccggatcaggccggcgagcgacgtttacggcctcggcgtgctgatgctcgaggtcctgacggggcaaccacctgtggtcagtgtctgggacgcggcgaagcagggcgtggtggccgtgaccttggcgtcgttcgcgctgccgagcatccaggccggccggcttggggacgtgctcgacaggcgtccggcgccgcagcagctccagccgctgcagctggtggccaacatggcggcgcgttgtctgcatatgcaggggggtagtcgcccggccatatcagacgtcgtcgccaacctcgagcaggcactccgcctcatatgaaagcatgtggacatctttgcttgtacacaagtgaacttgcttgtcgttcagctagctatgatgctcaaactgtgtctgtgtgtacgtttggtccgtgcgagtcctcctagtagaccatggtagacttgcaacatttgcccaacatctcctactagagaagcagcagggtgcatcaatgatggtgcccaaatatcgctgccagcgtccttgcattgctccaccattacccatgattttcttgattgctttgtctcatcaaataattgtacgagcaattcaataaaaaaaaaaaaaaaaaaaaaaaaaagaaaaaaaaaaaaaaaagcgtacgggtg

SEQ ID NO: 143567 - DNA, 143 bp, Zea mays
  Clone ID: MRT4577_62409C.1
aaaaaaccaccaaacccaccattttcccggaaagaccccgggaaacccaaaaacataccccgctgcaattcccccagggaacccggagtaacacattgcaagggctgtttcccgtgggaaacaaatttcagcgctcaaataaa

SEQ ID NO: 143568 - DNA, 1207 bp, Zea mays
  Clone ID: MRT4577_6240C.1
aatagcaataattttaacatataatatttctcaagtatacacaggtaaatttcggtaacaacagtttgaggaagaaagaaaaacgtaatggacagtttactcgttgcagaacataaaagaaacagtgaaaactgaaaataaaaaagtaaaaggataaagaaaacaaattcctgcatgcatcaaactgactattcttcatgtcacttgccgcatgacggccaagttctctgtttccatttttttactcctctcttgtaacaaactaccccactgtacagtagtagccgcatgcacaaaaattaccgcagtaacagtgaaaaacacccactgcatcatctgccacctgtctctgtctccttgttctctttaaccgctcgatcgatctcttattacccttcacgtgccgttttcaccgcatcgattcaaccactccgtgaagaccccaagcttttgagggttcttattaattaccctaacgaatcaataaataaccatatcaccaccaatattttttttactgtaacatctaagagggcgaccactgtaactagcgcagcaacgaatggagaaataggagggtgggcaacagcgacgacgacacgacatggatcgaggtgtggctacgacctgcatgaagaatatggagaatcgccggagaatagagaggagagggggatagttgttgtggttttaggatttgtggagtagatcagatatatggacgcgagcatggaggcgacaggtaggtagatacaaatgtcacaagcgagagaaagaaaagaagccatcggcaagaggaggatagagtagtcatcaccgggaggaataatgcttgggatacgcgtgtggatggatcgatcactggaccatgcccaagaaagatccggctgttgttgtcggggccgcagccgtgctgggcgcggcggtgccgggcgggttgccaccaccggcgccggcgttcgacctgacaacgtttggatgctgctggtggtgctggaactggatctcgtactgcattttgttgccgtcgtcatcttcatcgtcatcgtcctcgtcgtagtcgtcttcatcgtcgtcgtcgtcgttgctgcccgcgccgtcgattctgttgtagtcgcctaccaccgcctgcggttgctgcgactgcggctgcggttgcctctgctctactctctccttcatgatttcatctggatttaaatgtgca

SEQ ID NO: 143569 - DNA, 699 bp, Zea mays
  Clone ID: MRT4577_62410C.1
cgtgcgccacgcccccttccccaaaaacctttcgaaaaccgccgcgccaaccgccaaccgccacccgcccccgtccaagaaaccgcacgccgacgccggcgcccggccaagatggtgcggctgagcaacaccatgatcgggatcctgaacgccatcaccttcctcctctcggtgccgatcctggcggggggcatctggctgcgcgcgcgcgccgacggcaccgagtgcgagcggtacctggcggcgccggtcatcgtcctgggggtcttcctcatgctcgtctccatcgcggggcttgtcggcgcctgctgccgcgtgacatgcctcctctggttctacctcgtcgccatgttcctgctcatcgtcgtcctcctcggcatcaccgtcttcgccttcgtcgtcacgcacaagggcaccggcgaggccgtctccggccgcgggttcaaggagtaccggctcggggactactccacctggctgcagaggcgggtggagaacgacaggaactggaacaggatcagggggtgcctccaggacgccaaggtctgcaagtcgctcgaggacaggagggacacggtccaacagttcatgtcctccgatctctcccccatccagtccggctgctgcaagcctccgatcagctgcggcttcacctacgtcaacggcacgcagtggagcggcccggccaagtcgacggag

SEQ ID NO: 143570 - DNA, 407 bp, Zea mays
  Clone ID: MRT4577_62411C.1
gcggggcaatccgaattctatttatagggccagggtcgcagactgaataaaactacattcatgcccttaatatttactatgggctcatggctgaaccattgtaaccgacctaacctttcggcctctggtatcaaactactttatcccccatgggacgacgctccattacttgtttattgcagagctaggtcacccttgcactaagtcatgcctttttcatcgcgctttggatgaatccaacaccaaccgtacgtgttattatgcgacaattgaaaagactcggaggatgatgctgttgaagagtttcaaccaacaagggctcacggcaattcatctgctccatacgggtataaccattttttgggatcttgtgctgattctcgagctcactaccagaccgactatcg

SEQ ID NO: 143571 - DNA, 249 bp, Zea mays
  Clone ID: MRT4577_62412C.1
cccacgcgttcggatacgcgttcggacactcgtccgagcacgcgtgcgaaaaagaataaagaataaacagataaagacagaagataaaaaaaaataaagaaagtgaaaaataaataaaaaaaatgggtggcagctatataggttggagaatgatgttaggacatagcagttatagaggttcaatttagtaaaacatatataaaatgcagtgactgtagctgttaacagtctgattgggtaaataatgga

SEQ ID NO: 143572 - DNA, 279 bp, Zea mays
  Clone ID: MRT4577_62413C.1
cttctccaaacaggcaaaaattctgaacatcatggtagtttctgtttgcaagtttcactattaaaaagcaggtcgcgtcacttgagcggagttaaggactggaccgaggcagtattattattttctggataagaaaaaacaaatacttatggaacagactcaacacacaacaataaaaccaccatactatacaaactctacctgggcgagatcttcacaggcatactcaccatccattgcaatgctgaaactgtggatcacctgtccggcccagacttg

SEQ ID NO: 143573 - DNA, 456 bp, Zea mays
  Clone ID: MRT4577_62414C.1
atggcaagggcggcggcacgcgtgcgtccaccggcgacggcaagcggcggcgcgggcggcggcagcggacggcaccccggcggcggcgacgaccgaaggcgatggcgagcgcgggtggcggaggcgcacggggaaacggggaaggaaaggaaaggggagggagtcctcaccggagggggcggcgacgaccggcgacgaggagcgacggagggaggtcgacaagcggtggacggggtccgggacgacctaaagaacgaaaaggaaaagattagagagggagagaggggccatagaaggcgggaatgccggccgaaggcggtggacatggcggctctcaccatcgctcggcgggaatggcgctccggcggcgaacctcgacggaggaggggtgaacggggtggatctcggccactcgaacccaacgtcggcgacggcgcggtgtggcggcgagcctag

SEQ ID NO: 143574 - DNA, 849 bp, Zea mays
  unsure (1)..(849): unsure at all n locations
  Clone ID: MRT4577_62415C.1
attgattccctccacctttcttgtttcccacaagcagcagcagcaccgtagttcttggcatcatcatcaattgaagagattatcgatcgatcggccatggtggagcctagtgtgaaatcgtcagatcagcatggtggtggaggagtcgacgtgctgttcctgccacctggcttcaggttccatcccacggacgaggaggtcatcaccagctacctcctgcagaagctcctcaaccctagcttcgcgccgcatgccatcggggaggtggacctcaacaagtgcgagccatgggatctcccaagcaaggcgaagatgggggaggaggattccaaggagtggtacttcttctgccgcaagggcatgaaatacccgacgggcacgcgggcgaaccgcgccaccaaggagggatactggaaggcgacgggcaaggacagggagatcttcttcaagccagtagctgggcacgacgacgtcgaccgccgtgagcagctggtggggatgaagaagacgctggtgttctacacgggcagggctccaaggggcaccaagaccaactgggtgatgcacgagttccgcctcatcgagggcaggcaccgcaccaccaacgacgacctactactacgcttcaaccccaaggatgaatgggtcgtgtgcaaggtgcaccacaaagggggccaacatgatgccagcgccgccaaggccgctggcggcggcggaaaagagcagcactactcgtccgccgccggaacgcccaacgtcagctccgtcgagaccggcggcggcgacgaccacgacngagtccctagtgactcatgctgctggggatatactcagcagctgccacttcac

SEQ ID NO: 143575 - DNA, 714 bp, Zea mays
  Clone ID: MRT4577_62416C.1
ccggccgggatgatggcaatccgggtgtcggagtcacggcggacccgaggcgagagagacgcgcaggcacatgtgatgcgatcatggcaacgtgaataccccgtcccggccatcgtcgtccctcctgcattccctttcccttgcaagcaagcagatggtctcgtgtgacctctagtcgtcgccagtcagtcacctctccagcctccagcaccaaccatccaccaccgagctagcagctgtctgctcgcctcccccacctaggctaggactaggagccaccaaactctgccccgccatgccgggcctcgccgccaacgacaactcgcccccggcggcggcgccggcaggctcaagctacgtgaaggcgcacatcccccacgcgccgtctctcgtcgccgctccgacggcgcctccaccctgctccgcacccacttccacgactgcttcgtcaggggctgcgacgcgtcagtgctgctcaacgcgacgggcggcagcgatggcggagaaggacgcggggcccaacctgacgctgcgcggcttccccgcaatcgaccgcatcaaggcgctgctcgagaaggagtgcccgccacgctcggtcctgcgccgacatcgacgcgctcgccgaccgcgactccgtcggcgtgatggggggtccgttctgcagcgcgcccacggggaggcccgacgggcccgggatcatgaagtaggaggcgc

SEQ ID NO: 143576 - DNA, 2043 bp, Zea mays
  Clone ID: MRT4577_62417C.1
cggggtgatggcaacccgggtgtcggcgtcacggcggacccgaggcgagagagacgcgcaggcacatgtgatgcgaccatggcaacgtgaataccccgtaccggccatcgtcggccctgatgcattccctttccgttgcaagcaagcagatggtctcgtgcgacctctagtcgtcgccagtcagtcacctctccagcctgcagcaccaaccatacaccaccgagctagcagatgtctgctcgcctgctccacctaggctagggatacttctgaaactaggagcctctaaacattgggtacctcgatccaggccgggccgggaagagctcgagaccgacaggacgagactcgcagctagctgacacggccgagaagcagcttgcattgcaggcgtagtacgtacccagcagcagctagcactagcagtccatcggagcgacgatggtgagaaggacggtgctggcggcgctgctggtggccgccgccctcgccggcggcgcgcgggcgcagctcaaggaggggttctacgactactcctgcccacaggcggagaagatcgtcaaggactacgtgaaggcgcacatcccccacgcgcggcgacgaatgcccgatatgccgatgccgacgatgactgaccgcgccatgcgctcccgccgttgcacgcaggggctgcgacgcgtcagtgctgctcaacgcgacgggcggcagcgaggcggagaaggacgcggcgcccaacctgacgctgcgcggcttcggcttcatcgaccgcatcaaggcgctgctcgagaaggagtgccccggcgtggtgtcctgcgccgacatcgtcgcgctcgccgcccgcgactccgtcggcgtcatcggcggtccgttctggagcgtgccgacggggaggcgcgacggcaccgtgtccatcaagcaggaggcgctggaccagatccccgcgcccaccatgaacttcacccaactcctccagtccttccagaacaagagcctcaacctcgccgacctcgtctggctctcaggggctcacacgatcggcatctcccaatgcaactccttcagcgagcgcctgtacaacttcacggggcgcggcgggcccgacgacgcggacccgtcgctggacccgctgtacgccgcgaagttgcggctcaagtgcaagacgctgacggacaacacgacgatcgtggagatggaccccggcagcttccgcaccttcgacctgagctactaccgcggcgtgctcaagcggcggggcctgttccagtccgacgccgcgctcatcaccgacgccgcctccaaggccgacatcctcagcgtgatcaacgcgccgcccgaggtgttcttccaggtcttcgcgggctccatggtcaagatgggcgccatcgaggtcaagaccggctccgagggcgagatcaggaagcactgcgccctcgtcaacaagcactaggcggcggaattcatgcgggagatggctccattgctcgcaaaaaatccttgtgagacacacaacatgctctgcatctgcaggcgttgtcgtcaccttggtggacgtagtacatcggtgcatggattatctgttgtttaatttgtacgttcagttcattctgtttcttgtattcttttggttcctttcctcttgtttattcatggatgatgaggtgtttctgttttattctctggttcagctgtaaccatgtaacatgtaaggtgcgcgttttgtcctcgtgatctctgcaactgtatttattttaatggatggtatacatggagatatgatcatgataataacaataaggtgattacaataaaaaaaaaaaaaaaaaagcggcctaaaaaaaagggttacgggaggcacctttttttttttctgacacgatccgactcgcgagtggcccggccgcagcggttgcctggtggggcgcggcaggtgttttttttaccttttttttgtcctttgtgcgaaggagttgagggggaggaggagagtacggtggagaaagagcatgggcacaaggcggcgccggcggcggatgccatggcacc

SEQ ID NO: 143577 - DNA, 470 bp, Zea mays
  Clone ID: MRT4577_62418C.1
cccccactgtgggccgggactagggaccgcgagctccgaacccatgtcctcgtaatgatctgctacgctgcatgctgcgagagatagcgcggcgacttccccttccacatcgtaccaacccgaagcatgtcatgaagccactgaatcgcctcaccatcctcctaccctaccttaaatgaacgatgcgtactgcccactatgcactggggcctcctgacatgcgcattagggacctgatcgggccaaacggcatgccagacgcagtgagcggattgagcgctcttccacatactatatcactcactcgatgcgcactctcctctatatgagacgctcgctgccagctcactcttaagaccccttgctgtccttcacctattcacttgatgcctcgctgaacatcgtgtgaggcaaattagccaatactaaggacatcgaaccgtctacaggccgctgagcttgactggttg

SEQ ID NO: 143578 - DNA, 510 bp, Zea mays
  Clone ID: MRT4577_62419C.1
aaaaagacaaaaattttttaatctggggcgggggaaggaacaattaaacctggggggtaaacaacccctcttggtgttggccggggggggggccctggggtacacaaaaaaaaaagaaaaacccccaactgaaattaaaaacccaccccccgaatttgcattaataggcaccaaccccaatcctcctcctttttaaaaaggtctccatgacgggccgacccctctaacagttaaaacgaatcattcgggctgggcgtcccaaacccccgggatcttgacattcctgggcgcctaaaccccgaggccgggggccgacggctgccccctcatgaataccccaatgacctccccgggggccgggttgctcttggggaccctcagcgggaggttgcccggggacgaggcggcgctcttgatgttctccctcaggagcccctccttggcggctttgcctccggcggggagcgcgacggcttatacttatcccggggagcctccccggcccttggg

SEQ ID NO: 143579 - DNA, 413 bp, Zea mays
  Clone ID: MRT4577_6241C.1
tcggggatctgcaccctccttctatcccgtctcctgtcttcctcagcctcatcgcaaaagctagtcaggagcgttagaacacgctcgttgtttatggcattctcctcacctcctcatctgattagctgccgcaaacccttcaaccgccatgcctacatcgccgatactgatcctgcatgggatgatgctcctccaaaaggaaaggagcaacaggcgccatatgatggagctaaggaagtgaaacagattatatgtgaacttagatctctatgttgaactgattgtgtgaacttgtctttgagaaacttttgtgagcgaacttgatgactttgcgaaattgttgtttgcgaacttgatgactttgtgaaactgctattttaagatttgatatctttgtagaacttttatgtgcc

SEQ ID NO: 143580 - DNA, 1133 bp, Zea mays
  Clone ID: MRT4577_62420C.1
ccgtgtgcggcgctccccccggtcgtttccacgcggaggcaagagatcacacgcacacagcacactcgcatcccaggcagaaccctcgccgcctccgccgccgatgacgtccgtgcgcagctgtgccgcgtcgttaaccccgtcgatccgcgggatgtcggggctggtccggcaggaggcactgcggcgcgagctggacgggtgccagctgctggcgggcatctggtgccacgggttcacggtggcgcagctgcggagcatccgcgcgtcgctgcccgacgcggcgcggctggtggtggcgaagaactcggacatggcggcggcggtggcgggcacccggtgggaggcgctgaggccgtgcgcgcggggcatgaacgcgtggctgttcgtgcgctccgacgagatcccgccggcgctcaagccctaccgcgacttccagaaggagtggaagctgcagctcaacgacttcaccggcgccgtctacgagggacggctctacgggcccgacgacttcgcgcagctcgagaacatgcccaccagggcgcagtcctaccagtacctcctcggatgcctgcagatgcccgccgtcaacgtcctcgccgtcctacgggcgcgtcaggaggcactgtccgcggaggccgacaagccgcccgccgagggggagggggaggcggccgcgccggctgagaagtgacccgtcgacaaggtctcttgccgctcgtctcactctgcctctgcctctgccttgttgtatggttttgcagctgcggcttggcttaaaggaaggtccttttttcagtcagtccctcttgtgcgcctcaaatttgttcagttcaggatacatgtagtaggaaaactgatatataatactaccatgaactccattctggaagttggactgatttttaattgtcatttctggttcagaaatcagactccaaaaaaggtttagccgcgggtgcatttcagttgaaaattaagtttggtattgcgatgtgtagttatttgaaatttaaatctggtcacatgttgtggtgtattggttttttttgaaaggaatttggcattgtgcccctgcaaattggaatgaagtgcgctggaaacagcaccagaacaaaaaaaaaaaaaaaaaa

SEQ ID NO: 143581 - DNA, 410 bp, Zea mays
  Clone ID: MRT4577_62421C.1
aattctcctctttcggtggagaaaaaaattagcattttttaaaaaatcattctttcattgaaagataattgttggaataaaaataataaaccttgagaaggaggagggagaaaaaaatatttttgaattgaaacaacaaatacacattatctacaacaaatattctaatggcaaacccagtatttacatggttttttcgaagctttcagattcgcttctaaatgaattttcctcttggatgagaggaagctgatttttaaaattcgcttttcttcttttgattcaaagacgcttgggactgacataaataaaataagtttgatttgggtgtacgaatttcctagagaaattgaagcggcatgaggccaaggttcaaaaaacaaatgtgcagcacgtctgagcaaaacata

SEQ ID NO: 143582 - DNA, 2899 bp, Zea mays
  Clone ID: MRT4577_62422C.1
atgggccccttcttttccgcgtccgctgctttggcttcgcctcgcggtcgcccagtcgcagcagcaacaccgcccccggcctcgctttgcagccccctccctccaccgcctcctccacgccctagcgctccggcccccgccccgagctcgtcgtggccggctgcgctgcggtgcccgcacctgtgggggcgtgcgggccggtggtgaaacgacccgcgacctcggtgcctctcgacgtctgcccgcttcctcgccggcgccattttgttcgtctaaatcccctgtgataagcaccactgctcgtgatgcattcttcggaaaataaactgggttggaatgagacctctatggggttggttcctgtaccaaaaagaccagctagacctgatgcttcccaccaatgcaaatctgattcctttatgaagcgatcaccaaggaaagttagaaatgctactctggcaaaaagcataaagagcaagtaccactatagtcccctcaaacagcggaagggttcagattctgttcctgggaaaatcgtaacaggactaaccgcaaggaaaaagaagaaaaggaaaatccaaattacagacgaggcaactcgtttggaacgaagagcgagatattttctaatcaagataaaactggagcagaatttgctagatgcttactctggagatggatggaatgggcaaagccgagagtaaataaatctagagagggaactgcaacgtgacagaaaattaatcataaaatgcaaaattgctaaacgtgaaatcatcctgcccaatcgatggccatgaagagatgttgattattgatggctcactgatgacaagagagcagaccaccaatcccgaacataccatgtgctcaacatgcaagtctcatgaatcatttcccagcaataaaattatcttctgcaaagggccctgcaaaagggcatgtcatgagaaatgtttggaacctcccttaaacaaaagcgtacttccaacaagtagccatgggtggctttgcaaattctgtttgtgcaaggtgaggattttagaaactattaatgcacatctagggacgagttttacagtgaagtgccactttgaagatatattcaaggaaactactgaactaatagactctgaggatgcactagatgaagattggctttctgagtattcaggtgatgaggactatgatcctgatgaaaatgaggccagtggcgactgtatggacagcggggagaagattatgtctgatgattccaatggttcaggaagccccctttattctccaaatgacgatattcctgacttcatatcagcagacttaaatgttgtggaagggttttgtcataccaatttagatttaggcattgatgccgttgaagatgattttgcacagatcctcacctaccaaaggccaagaagagatgttgattatagaaggcttaacgaggaaatgtttgggaaaataaccgggaatgaagaacagagcgaggatgaagattggggccatgaaaggagaaagaaaaggacgcattcaggtgttgctggggataattctgttggtttcttgaacgttatatctgatgaaaagagccagaagaaggggagaaaacttttcaggattcctcctgcagctgttgaggtacttcgcagagcttttgctgaaaatgagcttccaccccgggatgttaaagaaaatctctcaagagaattgggaatttcttttgaaaagattgataaatggttcaaaaatacacggtgtgctgctctcagagatcggaaggctgaaggaaacagtcataatacagctcccagcaaaagctcaaaaaataaaggaaaagctggaatctcaggcaagactggaaggaatggtcatgttactggtccctgcaataatttgagaacaaatgaagaaaaaacaggtatatcggggaagtttgattcaggagacaactcttgtttggttcccttctctgaagtcatcaatgtgcctacgcgattgccacacaactttgagatgaggaagatggaatcaactagaagtcctgcgaggctacacaataaaggagggttcctgtctgcaacagtccaaattaaggagagtacgttgttacccacaggcaagccttgttggcagtcagaaatgagccatccaacaactaatgaagtgagcacttcagcgcaagctactacttggatcgacgcgggggcgtgtgccgaggagcaagaacctactccttgggtggacatcggggtctcagactaccagcctttcctggatgtgatcgacgacatgtgcggacttgagtggaggctgcagagactgaaggagaacatgctctcatctagcatagacggccaaaccgccgccagtgagagtgacaaaagaaaccagaccgtggtgctagtgccaaccgccgagctcaaggaaaagctgccgcatgacggtttattcgggcattattgcccataggtcttatatacatagcggataaactgtacagagaaccaagaagaagaagaaaacaaaagggaaacagcaaacagacaggtgcccgcttacataccggtccatactgtcaggcactactctcctttcttgggcctcgacacgactaatactgtgctagtccagaacagatgagccatagccattacctgtgtgcctcccaggttcagttcatatgttgtatgtattaatgtatatcagaagagtcgtgcttagtagtagcaagaacctagtcctgatccagaccgtgaatctggatcatcttgtcctgtggttgtaccgtgcagaacagacagatgtcggctagtcgtttggttctgaagtaagaaactataagcatgcgtgattttggcccgtgcgtgacaaaaaaaaaaaaaaaaaaaaagggcgg

SEQ ID NO: 143583 - DNA, 531 bp, Zea mays
  Clone ID: MRT4577_62423C.1
tcgcgatgggccggggtctggaggtcgaggacttgcgtgcagaggttggagccagcaaaggcgatggacgtaagctgccagcagcaacagtgccacatccacagcgttcattcgtgtcgaaaccagatcaccattttcacagagatgctaaggatttgggagacagtgggacgaaaccggcctccaatgatgcaagtgaggggttgaagaaggcgctggaggccagacgaaagtaggaaacacctagataggggggccatagggcttgctgacactgcaagcgctacaatatgatatggctgctgacggctgtgtcaagttttgtgcttaataataatgcttcctcaatggagaagattggtaagggctgtgaggttgccatttgccttaggtgatgtagtagttttgcctatattctatttccattgtttgtgttaggatattatccgttctgtataaattcgcatcttgcgatctaaaatgaatgaagattagttttttctttccaaaaaaaaaaaaaaaaaagcggcc

SEQ ID NO: 143584 - DNA, 982 bp, Zea mays
  unsure (1)..(982): unsure at all n locations
  Clone ID: MRT4577_62424C.1
cggccgcgtgggtccacagctcctcatccttctgcgttgccgccctcgctgtaccctgctgcttacccttcaagcctgccgaccatcgcatcatcactagctttttttcttcacttctgctcggcgtctcttgtttgctgttggctgttggcttcataagcgcaaggaaggacgagagatagagcgacgaagtatcttgctcggaactctcccacagctgggctctgagatgagtaatgggttctgaggatagagccgcgcgagcttcctcccgttctgcgtccctgcgacgtatgggcactgcccgggggctatgacctgtaaccaaagaagagggaaaatgcgagataagcagcggctggaccatgataaccagggatgcaggtatggctgttgatttgcttcgtgttcacagaatcctctccaccctgttggagacaaaggggataaccgtcacgcgtccgcccacgcgtccgcccacgcgtccgaaaacaaccgaattgttgctggaagctggtgagcaagagcttttacgcacctgggaagacccaatggacgagcagtgcaaacaggacagcaaggactcgattcggagaacaatcgtggagcatgataaggtcttcaggcagcaggtgcatgagctgcatcgtttgtaccatgtacaaaaaacattgatggctgaatgcgatagccataggtatcaaccgagagcagaaggaactcatgaagtggtgcagggatcaaggtcgaacctcaagtgcagtccttctacctcagggacaaaccaatctgctctccttggtaatgcacaatacccagctccgcagcaagtacaagaagatttgagtctccatgaatgcaagccggtgaactgcctcagcctcttcggagaagaaaactcagcagccaaagaaaggtttcacggngagaaccataaatcagttgaagatgaaagctggagcgccgctgtagagagtgatct

SEQ ID NO: 143585 - DNA, 1396 bp, Zea mays
  Clone ID: MRT4577_62425C.1
cccacgcgtccggtcgcagacactttctgtagatcaatcccagagctaatgttctggccaaccttcattatcgccattctttcggctatcatcgcaagccaagccatgctgtcaggcgcattcgccatcctctccaaggctttgtctcttggctgtttccccagtgtccaggtgattcatacatccaagagctacgagggccaggtttacattcctgaagtgaactttttgatgggatcggcgagcatcatcgtcacgatcaccttcagaaccaccaccgaaatcggcaacgcttatgggatctgtgtggtaaccgtgttctcgatcaccacccacctgacgaccattgtgatgttactcgtgtggaggaagaatttcatcatcgtcttgcttttctacgtggtgttcagctccatagagctggtctagatctcatccatactgatgaaattcatccaaggcgggtacctgccgttctgcttctcgcttgtcctcatggccttgatgatcacatggcactacgtccacgtgatgaagtactggtacgagctggaccacgtcgtgccagccaacgaagtgacaacgctgcttgagaagcatgaggtgcggcggatccccggggtgggcctcctttactcggacctggtccaaggcatcacccccgtgtttccacgtctggtgcagaggataccctccgtgcacgcggtcttcctgttcatgtccatcaagcacctgccgatcccacacgtggcccctgtggagcggttcctcttccggcaggtcggcccgagggagcaccggatgttccggtgtgtggcgaggtatgggtactgtgacaagctagaggagtcggggctgttcaaagggttcctcatggagagcctaaagacgttcatccaagatgaggctgcgtttaagacgaactctacagctggagataccaaggagctgaccgatcccaaggtgtctggccatgatttggctcgttgggtcgaaaaggaaaagcaaatgattgacaaggagatggagcgaggggtggtctaccttatgggggaagccaatgtcattgcaggaccagaatcatctgccgcaaagaagatagtggtagactatgtctacgcattcttgaggaagaacttgacggagggggagaaggtgctctccattccgaaagaccaactactcaaagtagggataacatacgagatatagggattatgctgggcctcaagttacaatcctatgtatcaacttggcctgaagtcataaagtttatgtatatcgagagattcaagattcaatgtaaattattcaattttattccttccacatggtatctatgaaatcgatctcagcaggggcaatgtccttgttaagctaatagatcctagaacac

SEQ ID NO: 143586 - DNA, 566 bp, Zea mays
  Clone ID: MRT4577_62426C.1
gccggccgggttgggcattgactccctcaatccacataaatagcccacctcgacgaactcatcaccttccgtctatccgtcttcgtcaacagcaggggcaaaagagcatatgacacattacgaacacctctccctcaactaccgacgacgcatccacggccactgcctcctcacgagccaccgccgctctgaccacagtgctccgttacggaaattactgactacaatgccgtttagaccgcattctcctcctctgtaatcctcacacaggcgcacagcgcatagacatacaagtacctatccctgaattcataatctctcagtggtgacctgggatgcccacttacaaatcttctattgagatcgatatctcggtccatctcgtacaaaatgcacttcatgctcgacagagatggtgatgcatcggatgcattgatgacacctccccactaatatcttggcaccaatgcacactctatgtgagaacactgcctataatagagatatccattagttgagtgttacatccgcttcttagcacatatggctgcctgctcctttccata

SEQ ID NO: 143587 - DNA, 1540 bp, Zea mays
  Clone ID: MRT4577_62427C.1
cccgggcggacgcgtgggatccccttcacggagctcgccaagcgctatgggggacgccaacggcggcagtatgcacgttgtgatgctgccatggctggcgttcggccacatcctccccttcacggagctcgccaagcgcatagctaggcagggccaccgggtcaccctcttctccacgccaagaaacacccggcggttaatccgcatccctccagaactcgcggggcatatccgcgtcgtggacatcgcgctgccgcgcgtggagcgcctgccggaggactgcgaggcgagcatagacctgccatccgacgacctccgcccgtacctccgcgtagcctacgacgccgccttcgccgacaaactctcggccatcctgcaggagccggggccgcagaggccggactgggtgctcatcgactacgccgcgtactgggcgcccgcggccgcggcgaggcacggcgtgccgtgcgccttcctcagcctgttcggcgccgcgacgctcagtttctatgggcccccggaggggctcatgggacgcggcaagtacgccaggacgaagccggaggacctcaccgtagtacccgactacgtgccgttcccaaccaccgtcgcgcaccgcggcttcgaggcgcgcgagctattcaagccaggccttgtcccggacgactccggcgtgtcggagggccacaggttcggcgtgtccatcggagagagccatatcgtaggcatcaggagcagaacagagctcgagtcagagtggctgcaggtgcttggcaagctctacaagaagccggtgatcccgatcggcctgttccctccgccgcccacgcaagacatcgccggccacgaggcgactttgcggtggctggacagacaggctcagggctccgtcgtgtacgcggccttcggcagcgaggcgaagctgacgagcgcgcagctccaaacaattgcgctaggtttggaggcttccggcctgccgttcctctgggcattcaggccgccagccgacgccgcacccggacaaggcacgggcgggttgcccgaaggcttcgaggagcgtgtcaatgaccggggattggtctgccgcggctgggtgcctcaacccaggcttttggctcatgaatcggttggtgggtttctgacccatgccggctggaactccatcgccgaaggcctctcgcggggcgtcacgatggtgctgttgccgctgatgttcgatcagggcctcaacgccaggcttcttatggataagaagatcgggattgaggtggagaggaacgaagacgacggcacgttcgcgcccaaagacatcgcagatgctctgaggacggccatggcggagaaccaagagacggaactagggtcaaggaactggccgaggtgtttggaaatgacgaggccaatgatcagtgcctgcgagatttcctccggtatctgtcagaatacatcaggcagcatcaagggatgacatattgaatttcgaggctaatgttaatgcagaaaagggcaaagaaatggtagtgagtcacgtcacgctatc

SEQ ID NO: 143588 - DNA, 334 bp, Zea mays
  unsure (1)..(334): unsure at all n locations
  Clone ID: MRT4577_62428C.1
gccggccgtttcgggaaccaacattaccgttagttaggcaccatgccatttttaggataatcagcaatctcctcgcatgtagctggtcatcatccgttctccttggtttagtttgttctccaatggatccaccaaatccaatgcgcttagcggcacttctctccctctgtgctggtcttctccttcgccttgcttctggtgagcaccgccgtcgcccacaatgacctcggcgtgcacaagaactnaccnntcgatcaatcgtggcgcacgccgtacgagtatgaccgcgagcatgttcaaggacgggtcgaactggcacgcgtccctggctcgc

SEQ ID NO: 143589 - DNA, 436 bp, Zea mays
  Clone ID: MRT4577_62429C.1
tctctggccgggatacagcagtgctcctgcatgagtgcttactccttttgccatctcattatgttgtacacgtacacaccctggcctgccgacgacggcgccgatgttgatgatccacatatacatgtgatgtgattctgcgaatatgtagtggggatggtggctagacaggtgatgtccgctggcgtgaacatacagtacatgcttggtagtggccggcgcgcatgctgtcctgtggcctaccgatcctgtgctcatcattgttttagtagccttggactactttgtcatgagcgaaccagccgctgtatctacgtcctccgatgcatgcatggacgtagacatgcctgtggagtcgcaatctcgtgcatgcctacctaccttgcaatccatgggcagcggcgctgcggcggccggggccggttcgttcgtgacc

SEQ ID NO: 143590 - DNA, 206 bp, Zea mays
  Clone ID: MRT4577_6242C.1
cacccacccacccacccactcgcttcagccgcctccgccgcgcggcaagcagggggagacaggatgccggctggccacggactgcgctcgcggacgcgcgacctgttcgggcgccccttgcggaagaagggcagcatagcggtgaccacgtacgtggggaagtacaagaacgtttattacgaaaatgaaaaaatgaacgggggggg

SEQ ID NO: 143591 - DNA, 232 bp, Zea mays
  Clone ID: MRT4577_62430C.1
ttttccttcttatatatgtgcttctacaaaatacaatgtttcacatttataaccgggtaaaaaatttgtctaaaacctttccacattgggggggggggggaattccgaagcaacgccctttttacaaagcaatattttaaagggcctcaaaaatgaaaggggaaaaggaagtctttccccaaaaaagaaaaagtagtgttaagagcttttctgccatattttgttgctattg

SEQ ID NO: 143592 - DNA, 128 bp, Zea mays
  Clone ID: MRT4577_62431C.1
cccgctcttgcgatcttaatcatctcactttggctttcatgtatgctgctatgggtcaggttacgatctattttggcctagctagtccaggcagtacaaagcgccaaactgctgaagaacatgtgcta

SEQ ID NO: 143593 - DNA, 278 bp, Zea mays
  Clone ID: MRT4577_62432C.1
atgcacgcgccgtaagctcggaattcggctcgagcgcagcttgctatcgagcagttttcaacgtcgcgggcaggctgagcagtgactccaggtgtgtctatgtccagagggcagtgtttgacgctcggacgctgggcgccaagtgcaccacacagctggccattcgtgacctaacagagaactatgggggcttcagagatccatcataagatcgtgctcctatgtgcactgcacataccatctctcacaacattgatcactgcctgacatgctgctaa

SEQ ID NO: 143594 - DNA, 431 bp, Zea mays
  Clone ID: MRT4577_62433C.1
aagtggtacacaggacatctgttacatatggtatgctatgagggaaacttacaccataatatgaaacatgaatgttccatggaaagaatgccacagtcagcatacaagttgattgaactaacgtaaaacatatttggataatactgcagacaagccgcaaggactgacagtacaacacagctccctatgcctttataaatacataaggatgagccttcaaaccttgtaactggacttaagaaggtacaacatgaacactaattagccagaacaacatccaacactacctgaagaactcttgtccatatatatacatggaagagagactgccaattcttggagaccaatcttcaaattgtctttggaattactgacctttggagatggcatatagctcccccattaccttgagtagaaatagacatatccat

SEQ ID NO: 143595 - DNA, 1432 bp, Zea mays
  Clone ID: MRT4577_62434C.1
agcatcttcatgacgtcggccatggagggttgagcgtcgtcacccatggtgatgaacctggacgtagcggtggacggggaggtgggggctggtggtggtggtgcggctgcggtggctgaagggctgggggtggtggtaaaggatcgccgacttcctgataccaggttgtcaagggcgtcgggcccgagggtaggaggaccgcggctccgaagatcgtaaccgccgtccgtgttgccgaccgggttatgcccccaggaacggcgttcttcgtcaacgggttatgccccctgttgccgactagagagagagagatagatggagaatgagataaatctgtcttgtcccatcacgagtgcttacagggggtatataaggccataggtcagggctactaaaggaaagccactaatcactcttattcccttctaaatctagcccagactaataaaggaaagccatcaatcactaatcactcttattcccttctaaatctagcccggactaataaaggaaagccatcaatcactaatcactcttattccttctaaatctagcccggactaataggaaggccatcaatcacttttattctttctagatctagccgctaggcctggctgcctgctggatcaggcgccctgcgcgctcaaccgcgcgctgcacgtcgcgtgccctgtgacgccgtgtgtacgtatttccgtacatcacacttgtggacatgtttttgcagccgtgctgcacgttcctagcttcttgccttctgcccttcaccaaaaagcagtagcatcacctcagcgcgctgaccctagcgttatggataacttgacctgaaggggaagaggacaccggcggccctggacagctggggaagaggacaccggcggcggggaccttggacgggtggggaagaggacgaatctggtggtgggctggtggttctgttttcctcctctcacatgcgacaccagctgctcccgccttctttccaattattcacgttctttcacgcaacagctcctgcccttcttttcacgtgcatctcttttcccgctcttcttttccgcgcgctgagcaccgcctcagcgcgccttcttcccgcctcagcgcgcgcaacgcaaaaaaagcgccgcctacacgcgcgcaacacggaaacaaccgcctagggcctaagcgcagcgttaccatgccgctttgcgtctaatcgtgattaggcgggcgcttaatcgcgcttttttgaacattgccgcttcctcacaatgaatgtcgttgctcgggacaagctgcaactactggctgtcactgcattgctcgttgctgccaagtatgaagaaattgagtctgctgagatgaaggtggtgaagatggaggctgacttactgaaatctcttaactttcagattgggggtcccactgtaacaacatttttactatt

SEQ ID NO: 143596 - DNA, 146 bp, Zea mays
  Clone ID: MRT4577_62435C.1
agggcgctgccgagaggtaactcggcgtcacatgtcctggcgctgagtaaagggtcaaaacggatattaaatcgtctaggaatgtgatattttttctttaaaaattgggctaaaaaatcgaccgtcttcctcccagcccaagtgca

SEQ ID NO: 143597 - DNA, 178 bp, Zea mays
  Clone ID: MRT4577_62436C.1
gcatttatcatattctgacgtctatactagagaaagaaggccgcctctgggtggaaagaatttatggtggtatccgagacagcatttcgaagcggaccatccaaagtgatcttcatttcaaaaaactgcttaatgttattgccaagcttgttgctgtattgggaatactgcgaggtac

SEQ ID NO: 143598 - DNA, 205 bp, Zea mays
  Clone ID: MRT4577_62437C.1
gctttcgaataattgaaactgctagctcggtctgtacattttacagttgctattctgactgggggaacccgtataagagccttgaatactaaatcccttagtatgatgccccctaaaacttcctttgggtatgaaccttatcttacgaaattggtttacttcccaactttcagaactcccagtacacaaatagcaactgtaaaat

SEQ ID NO: 143599 - DNA, 493 bp, Zea mays
  Clone ID: MRT4577_62438C.1
cacattaataatctctacatgggtcgcttgttattgcatcatgtgcttctaaaatggcactgcttcaaggagttcatcacggggcactttgctgtcttataagcgaagaaaattagtgtgctctgatataaaaattgagaactcaagctttgattcttgtgatttgactcaggatgaacgatgactgacaatttgactgccacaatttctggcttatgctctcctagaacactcttttattcactgttgaccacagtataaatacataacctgtctgacgactaaggcactcaggtagcaagagtacatgaggctatgtaccaattctaccaactaactgggccataccaccaaactacccatatagccaaaacctacaattcctgctactgatctacatacacttagacgggaaaacaaaggagcaggccctgttacctgtacttctatgacaaagaaaaagagcggtagcagctgattatataacatattc

SEQ ID NO: 143600 - DNA, 1453 bp, Zea mays
  Clone ID: MRT4577_62439C.1
tgaaggatccataacagactacgcgaatcgctcgtggaatctgaacctgccatggcgccctgctctcctttcagaagcggactccaccaggcatggggaactcgactctcaccgacatgacgctgctgccgggcgtcgagccgatcgtggctggcctggccgccggcccctcctccccgggccaggagggcaaggcaaagaagaagcccatgaagtccctctacctcaggttcttcgaaaccgcgctcgacggcaagtcccgcatctgcaggctttgcaggaagagctactgcatgaccaccgccacggggaatttgggaaagcatcttaataaccgccaccctggttatcaccaacttcctgagggcgtcagcttcactaaccagagtaccatagaggctaccatgcttaatagaagcaggaaacctcatgttcctgtgcgagctcgggcccaagctcagcctcaagttcaatctcaatctcaagttcaagatcaagctcaacctaaactacggtctcaacctaaaacgaaagcaactgttgatattgaccatgtcaactggttacttcttaggtggcttatcagtgcctcccttccaccttctactctcgaagataatatgcttattgatagctgcaagtacctggagctcgtctgtcaggctctggccaaaagaaaaggttcaagaagttatcattgaagtcttcagaagtatgaaggaggacgtcaaggaaactctgcaatgtatcacttcccggctctctgttactctggacttttggacttcgtacgagaaaatagtatacatgtccgtcaaatgccattggattgatgaaaactgggtctcacagaatgctctacttgatgtgtgtagaatcccatacccatccactggttctgaggtttttcaagctctaatggatgtcttggtgatgtataacatcgattcaagaatccttgcttgcacacacaataacagccaacactcaatacatgcttgtcatgagctcgcacggcagcttaagacccgtaacctcccattctgttacattccttgtgctgctagaacactgaagaccatcattgaagcaggactggaaaatgtgaaaccaattttgtccaagatccgcgagtttattcttcacatccattcaaaccaggagatgatggaggattttaagcactggactgaagtttatcaagaaggttcatggaaactcccctttgaccattcagcaaattggaacagtgattataatatgcttgatgtggtaaagaaagctcctaacgcaatagagaacaccatcaaaaaggttgaagagatcttcttaccaagggattgggttctgactactgcagagaagtcagtgatcgatgtgttgcactcataccttgaaccattcttcaaaactactacaaacctttgtaattgcaagctaccaactcttgggc

SEQ ID NO: 143601 - DNA, 273 bp, Zea mays
  Clone ID: MRT4577_6243C.1
cagataataagggtgaagcaagaagcatttcatttgcacatctttcttggacgtgggatatacagttcaagtttattagcagcaactgctagggaaatgattttggtgttttgggttaattgcttctaagaaaagtttcatagtggactgtttagaagaagtgatgaaagatccagtttgggattatgaaataaaccacgaattaggatttatgtatttactagtccagatctgatttacaaatatggtcttagtattatatgattaatggtt

SEQ ID NO: 143602 - DNA, 1047 bp, Zea mays
  Clone ID: MRT4577_62440C.1
cttctctgcgtccccaacggatcgcgaagcaggcggagctcgcggcaagttctcaggtgaaatttccgcgcccgcgaagtcaggcgctgtcgcgtgggccacccaggaccgcgtctcccccagccgccgcgagaaaccagggcatgatccgcttctaccggccgactccttcttccccataaaatccagcacggcgacgctggcgcagttcattccatggcgctcctacgtcgcgcccttgcgccccctcctctctgctcgaccatgcccacgccgccaccatcccctatgctcggcgtgccccttctctactccctcttcgcgtcaccgacctcgcctggtgtacgctccaaccgtggaatcgccgccgccgcggtacctcctctgcatcctcacccagtgcgccagctttggtagtgacgttcgccaagtccttgcgtgtgcgttcagcgacttgccgagggtgattcgtgcactagtgcctggaattgctcaccggactgacgcttcaccgccgggccgcctaaactcgaggacaaaccgtctgcgctcgcgactcccgacgagcaagccactgtggaatctgaggttcaacaagtagagatagctgagcaggagctcattgaagacgagcaagccactgtggaatctgaggttcaacaagtagagatagctgagcaggagctcattgaagtgctttgttgtttctgttgaatggtgcggcgtgcgtggcatcagagctctccaaccacgtgtacgtgtgtactcgatgcgacggaacggagcaggaagcgatggtgcgttgacatgggagagcatacgacgacgcgacgcgacgcgagcgtgttgttgtcggtcaccagaacggagtagttctgcctgctaggacggatcacgggcatggacgacgatggaaccactcgtcccgtactgcttctgctagattaagaggctgtttgataccattacaagcgtgctaaaatagttggaaactccatgtttccgagtgatttctatttttcaaagaaaaataaactagtagtcttt

SEQ ID NO: 143603 - DNA, 444 bp, Zea mays
  Clone ID: MRT4577_62441C.1
atccaagggccgggggaacgggctttttttttgttttccccagggtgaaaagggcagtggggggcaaaaaaggaaggcctaggcttgcaccccctccttttgggggggccgctccagcccggggggtttcgttaattttccccttttttttccggggaggacagggaaaagtttttcctcgttaaacaaaaaagggcggggaaggaagcccccatttttggggcccgggcccgacgttttatataacttccctgggggaggaccaaacaagtttgggggtttcgggggtcccaacccctgcccctgggggatcaccgggcggcccaaaccaggggttttggggaccccccggggccctccctcaaattccgggggaggtgggcccgttaacggatctcccaagtcctccctggagaaatggggggtcttttgaaaaaccgggag

SEQ ID NO: 143604 - DNA, 636 bp, Zea mays
  unsure (1)..(636): unsure at all n locations
  Clone ID: MRT4577_62442C.1
cccaccggcccgccccacccancgccgaancggagncccgcgcgcgnccacccttgccagagcncgagagcnaccnncnggnccggnnggacaganccctncgggcgcagcgnccccccgagannanncaggcaaggggcggnaacanaagaagcaagggggaagaggggggaggcagggnnngnncggnnnnggggacccnnnngnnggnnncggcagnccnggacagccagggaacanaagggccggnnncnnnggnggcgcaaancccnnngangacccnnncnncacaaaccccnnnggnggcangangcaaccnagnnncncaaccccnngcagcggcaggaagcaacccagcnncacgaaccccnnnggnagcangangcaaccnagcnggcnnggancaagnangnnngcancccagggcaancncaagggaggcacnnnnggaagccagacacancncaancaaggcaggagcaaggccagnggnnncanncagcaagccccngaancgagcaggcccaaagggccaannancaaggagnngncnncagangacgagganaaaccagaggagganaaagaagaaggcaagaagaaaggcaacnnnaggaagcacccaagggaaagcag

SEQ ID NO: 143605 - DNA, 389 bp, Zea mays
  unsure (1)..(389): unsure at all n locations
  Clone ID: MRT4577_62443C.1
agcaacatagaaagcacaatagngnnaccaacaaggcagnccaaaaatnnngcctccnnangctcctnggncnnnctgcaagtgctgctacggcgaccattttcccgaaatgctcgcaagctcctatagcttcccttcttcccccgtacctctcaccagcggtgtcttcggtatgtgaaaacccaattcttcaaccctacggatcaacaggcaatacagctggcatttacttataccctngttctcaaaatatcagctatacatattacttgtgattatgcacaaaatcaggaacactcacactggtacaactgtgctattagacaagtctcatacacactatgattgttatgaacaataatacatcttgtccaattatacatgatatt

SEQ ID NO: 143606 - DNA, 592 bp, Zea mays
  Clone ID: MRT4577_62444C.1
gcacatacacacaccatcacgagtgcaagtaaaaacacaaccaccttagctaatccgaccgtgaagaagaacagcatgtcgttgaacgacatggggcgccgcctggccctggtcatcgtctgctgcatcctcctctcgtcgctccgcacggcggccgcgacgggaaagaccggccggatcacggtgtactggggccagacctccagcgaggggtcgctacgcgaggcctgcgagagcaacctctactccaccgtcatcctctccttcctcaccaacttcggccgcggcaagtacgagctcaacctcgccggccacccctggaaggccgtcgggccccacgtcaagtactgccagtccaagaagatcctcgtcctcctcgccatcggcggcggcatcggcaagtactccctcgcctcaagggccgacgccaagaaggtggcggagcacctctggaactactacctcggcgggaagtcccgcgaccggccgttcggcaacgccgtgctggacggcatcgacttcgacatcgagctcgggagccgcgcccactacgacgacctcgccaggcacctcaaggcctacggcgacagga

SEQ ID NO: 143607 - DNA, 1384 bp, Zea mays
  Clone ID: MRT4577_62445C.1
atcctgtagcacgatccccaagaccccaacccctacgcagcacgcacggacgcctgacggcctgaggccggatccccatccctacgcgcggacgccagaggccggaggccggatcccctacgcgcggtcacggacgccggaggccggatccctacgcgcgccgtctcccaggcagtggcaggccggatcccctacgcacgccgtcacccaggcaggggcaggccagatcccctagtcccctacgcgcgctgtgaccccgccgccggatcccctacgctttgtctgccgtcagcccgtcacccaggcggccaggcaggagcagccgagcagggcgttctttcctgtgtccgccgccggatccctacgcctacacgcctacacgccgtcacccaggatgacgtctacaagtggctctggctcgcaagctccttgcccaccaccctcctcacaagatggtttgaggaggcagatctcaaacagagctagtgctactactccaacaagtgttggtgttgcgactgatactccgacaccgtcctcaagcgctgctgctggtggtggtactccaacacctatagatggaggtacagataatgtggttgtatctggggaagatgctaatgtaattgttggaagcaaaagaaagctcaaatctgatgtatggctagagtttgaacaagtgacatgtcaaaaaggcctaaagcaatcgatattgaagttgggcaaaaatgagaagggaggagctgtggttgagaagtatgtttttgatcaagttgttgctagaaaagaacttgcgctaatgatctgtgtgcatgagtacccactttttatggttgatcatgttgggttcagaagattttgtgcagcactacaaccccttttcaaagtagtgtccagaaacactattaaaaaggacatattggatatgtatgaggtgcaaagaccttctttagtgaattccttccaacagtgccaatctcgaattgatgtaactactgatatgtggacagcaaatcaccaaaagaaaggatacatgtcggttacagtacattttatcaatgatgattggaagcttaaatcttttcttttgaggttcatatatgtgcccgccccacacactggtgaagttataagtgatgtcctttatgaggtactacaagattggaaaatagaaaagaaggtgtcgactgtgattcttgataattgcaccaccaatgatagtacgatgagttctatgcaagataagttgccccttgtctccctcatgctagatggtaaattgttacacatgcgttgtgcggcacacatcattaatcttattgtgaaagatggaatgactgttatggataaaggcattgaaagggtgcaaaaggttcacatctag

SEQ ID NO: 143608 - DNA, 3743 bp, Zea mays
  Clone ID: MRT4577_62446C.1
cccacgcgtccgcggacgcgtggggggtgggctagcgtcggctaccgcgactgcagcgtcggcggctgggaccagcggatgtgcgttcctctctctagaagctccgtcccgtcttcacagccttttcctcccaacaacgcataatattagctagggtttcaacgcatctgacggcggaagctagggcgtcgccaccgtcaatgtcttggcactcccgctctgttcatcaatcgcatcgacaggtgctccatgattctctataatatccgaaataaattaggattaaagcaagaataggaagttattcaaaactcaaaagtaaagggtttccggtcttccagttaaatgaccaaatgacctgtagaatgacagcaagcaagcaaaataaacggcagacaaattgcaccaactcagagcagtgcaggccagggaagaaagcaaaatttgacacatctcattgtctagtaagtttgaagcctcatatcagtcttaaatgggatcaatatctgaggaaagttgtgccagagaaggaacaagttggaattttgtggtcagacttggcccctttcatggaaagccagaaacactgttcaggccttgctgatgttatgtatgttcctccagagattttctctcttaagagcctgaaaggtgtgctatcctatgaggcatggtctacatctcttacagaagccgagagaaaatttctcatacaattccttccaagcgagactgatgcagaagaaaatgtaaaattgttgcttacgggacaaaatcatcactttggaaatcctttccttagctggtcatcttctctttgctatggtgatattcatccggatgcactacttaacaaggagaagcacataaaaaaggatgagaaggcatatcatgttaacttgcttaattaccattccaacatggttgaaaccttgaagagttggaggaagagatggctaagttgcggtgatacagagaatttgttcagggataaccctagtaatcagatgcaaggagttatgcagctgaaagctactaacagtggaatgcccatgaaggttgcacaaagaatcgatgtttcaaagtttatgtcatacatcaaagttagtagaacacagctcaaccatataaagagactgaagcaatctggggatggtattcagaccaagcatgtttcacgtgtaattggcggccttgataaatctcatgtgaaaccttatggagctttattagaggatgaacagaggagactgcgcgagcattggctggaaatgtcttgcaatgatttacctgctgcctttgaggttcttagggaaaggaaggtgctgatggagaaatcaataaagttattaggccttgagcttcagcagaagaatgtatctgtcttgagaaaggcagaccagttaacagacataatgaaagggctaggacaacctggtgctagtgaaaatgatggtaccccagtttttcaaaatgaccaggtagaatgctcaccccaaagtatattgcaaggtgggcatgttcagagcacatctcttcaccatcaggatgatgagcagtctgtttaccatattcaccgtatgaatgtggaagatcatgatctcatggtagtcaggggtatagacataactagtcagagtgagaaaaactctgatgtgccagatcaaagtcgtaatggtatcagctgcgtagataaaggcatttactgctgtgccaacaaccctgataagcagagtgatgttctcatggacatcaaattatgtaaaggtggactggttgtttacaatcctgactgcaaaaatacgcaactagaagatcttgatggagtttcttacaaaggtccatcagttcatgcttgtgaccaagatcaggacctggaaagcattggccatgctgttgtgaaccacaattgtcacaatagtccaaatatttcttcggaaatgagtcatccaacgacgaacgctgtaattgaccaggaaactgagaatgttatgaaaccatcttgcagttcttcacaactacctaagtcgtctggagaacaaatgcatgtggaagattttctgtatctaaatgaccaagcagcaaaatttgagaaagtcagtgggcagttggcaggccctcttggccctccagagaatatgatgtataatgactcaggtgacttgcagattaaacagacttatctctcttcaggacaacatttttcttcagtttacttgaataatggcattttaagccatcagcaacctcaacttgccacaccagcttttgctttggacaatccagcatcatttattgagccattctcaaatctgcagggccttgagcttcccgagacagaaaaggacattggagcagtcttctatccctttcgacactcaactaacatcaaacaatcagcgagtttgcattgtttagtgaataaaggcttggctcaatctgcttcatttcccaggttgttgcaagagcggcatcagttaatcgatcagagtgacagtgacctctatgcacaacctcatgaggattactgcacagatgtgagttgtccaactaaagtgaaccttcatatctctgaacagcattcttatactgcttttgcttcgatggatcataggtataactggttccccgagggctgtcagtcacataataataatgataatctgttggggttgcagtcaggtaacttcttaccccaggccttaccaagtggaagcagcaccgatggagctctgttcagcaccgcatcccagtacaatcagccatcagtacacatgggacatggtgggtcaaaccgcagccaactcattgagccaaggaatcaatttggcccacctcagaattttctttctaagagtcaagacacaaaccctatgtttccggatatgtatggcttcacccagaatatagccagtggcacaagcagtcaggtagcacctatagggtctctggattgctcacattggacaaatttcatacaacaaaattctggaatgccgtctgactttacaaacaggccatctcgagggccttggaccagataactctatgacaccctggactggatgtactagattggttggttttaggcgccacctaagttggttaataaggaaactggggcaggttggaacagaatgttttccagcatccatgacttatgtcatgtagtggttttgatctgtttgaatggtgtggtttcaggaattgcttttgcaccatacctgtctgaacgcaagcgctgggaatctggagtcaaagctgaggattcccgcttttgctgtcttgccctgctgattttttttttattttgataataagctgtgccccagtttccatgtgtagtctgcctatggtgccctcagcaaaacatgatgctgtgttgttctcaattattttgttatttttttttgggttgacatgccagttatatatgaagacaagatatgtataccagtcgggatgccattttaggtatcaagagcgggcagttcgaaatgaacaagtagctttccttttggttgggaggcactaggatttctttattcaggcgtgtttacattccgtttgattagttggccgcaccgtttcgtcctatgtcacttagtgtattgactttatctaaatgtttgtttggttgtctgtacatcaaagacgtgcaacgttgttgcacgagtggatgtaaaataaatcatcttgagacaaaaaaaaaaaaaaagggcggcccgctcgcgatctagaac

SEQ ID NO: 143609 - DNA, 791 bp, Zea mays
  unsure (1)..(791): unsure at all n locations
  Clone ID: MRT4577_62447C.1
ccggccgggaaaaaactcataatattagctagggtttcaacacatctgacggcggaagctagggcgtcgccaccgtcaatgtcttggcactcccgctctgttcatcaatcgcatcgacaggtaacagtccatcatctccgtatcacctccttggatcctcctctgttccgtgacttccacagcacgctgccaggagccctatcctcaatcatgtctttcccgccgagctacacaccttcaggagcccatcccctcctccctcaaacgacgccgggtgacaagcaggaaaagtagtaatgacgacatgcttccaaatcactttcaacagtttcttctacttctttttgtttgccttatgatgattatctactgtcagttactcagttttatgatttgactagttactttggtttgtggagctggatggaacaatctttcagggtgcttcaccattagattgtgcttatatattgagctgaaaatttaacctatatatgtcctgttttaggtgctccatgattctctataatatccgaaataaattaggattaaagcaagaataggaagttattcaaaactcaaaagtaaaagggtttcccggtcttccagttaaatgaccaaatgacctgtagaatgacagcaagcaagcaaaataaacggcagacaaattgcacaaactcagagcagtgcaggccagggaagaaagcaaaacttgacacatctcattgtctagtaagtttgaaggcctcatatcagtcttanatgngatcaatatctgaggaaagttgtgc

SEQ ID NO: 143610 - DNA, 317 bp, Zea mays
  Clone ID: MRT4577_62448C.1
gcggccggcccgacgggcgtagtagttcttgtgaatatcaatctaggcgtagggcttgcaagattcgcttcgtgccgttgggaaaacactggtatatgcttagcccttctcttccttgaggtttaagggggaaagatatcgtcttctaaactgaggagagttgtgtatcgccttagcttatctgctgccttgttttacgaatctgacttcaccctaaagaacaataagaagtcaatgggtttggtttctgaccgcacttctctacaggcatcccacccgtcctcttcctccagcagctcaaggtgcccgtcgggccg

SEQ ID NO: 143611 - DNA, 461 bp, Zea mays
  Clone ID: MRT4577_62449C.1
caaacaaagtcctaatgaaacgacccggtttacatggggcccccttcgagcccacaaatgctcgacaagatcattttggggggggcccgacctattttgacgacaaatttcaaaggggttaatgacccattctgcccttccttttccaattatttgagatgtgtcaatggctgaactgttatttccgaaatcagttttaccagccaaagggccttaattttccacaatcatattgggcatgatgatgcaagctgtgattatttttgttaaacgggtgcaatcccacccatatgctggaccacggagcaccgcctaccgggcttgaagaactccgaaagcaccctcaatattttttcggcaactcttttgcatttgggtgaaaaaaactttcttttcctcataggggtgtctgatagctttgacaaaagtaggccagttcgggtaaataccatcagctaagt

SEQ ID NO: 143612 - DNA, 300 bp, Zea mays
  Clone ID: MRT4577_6244C.1
ttttctttttttttttttctatctcgtacagcgagcaattaaggctttctaatggcgactaggaacacgctgcaagccaactaggagggtgaggaccccccccggctaaaaatgtcatcgagcagcactccacaacgatatggcaccaaagcacaaacaaacgaagcacgcaccaactccgacgacctgttccccccaccctaatcttccctccacatgggatgggagccgaccatgagggcagaaaaacagacgacggcctgtcacgctcacacctggctaacagacaaacccagccaa

SEQ ID NO: 143613 - DNA, 257 bp, Zea mays
  Clone ID: MRT4577_62450C.1
ggcaatcgagagtgagaacctaaactatgtgggatgtaataactttatgattatgttgggtcaaaacacctggcctgtaatagataattaggtgaacttgttcttattatgctactactcgtttcattatgccgtgaatcctctttatgctaagctttatgtatattgttactgtatcatttgggatctactattcaaaaaataataaaaagggcaaaaaagatcaataaaatggatatcaagctgagtgtccatga

SEQ ID NO: 143614 - DNA, 299 bp, Zea mays
  Clone ID: MRT4577_62451C.1
ttcccgggtcagaccgacccatccggcgctggttgctcctagatagaggacacgaagtactctgaagccatggagcacttggactcggctaaaagactgggcagagacgagcttatcgcggaagactacggcgaggcggatatcgcatatgaattagctcctgtgactgctcagctcgcttacgcgcaccagctacacggacaatctcacgaagctatgccaacatatgctcatatgataaatggtcagtcagctgatttatcatcactcgctgtggcaacaacatatctgatttcaat

SEQ ID NO: 143615 - DNA, 384 bp, Zea mays
  Clone ID: MRT4577_62452C.1
gggcaagggaacaggcaggaacatcttcagggacaattgggcccaaaaacaaaatggccccgaaaaaaaaaaaaaaaaagccccccccgcgcgtccccaagttattgcaggggggcaaccggttttcaccaccaccaccacccaaccccaaaccccagtttacacaaacgaccactggtacatgaaaggatgcgtaaaataccatccgaaaagggcccaaaactaaaaagaaaggggaaactttttattttttttttccaaaaccccccctccgttggtgggggccggcccctttccccaaaagggaaacgtacgttgttcgtacacgggctcgccggtaacctgcccccaccctggggttgcgggaagggcgcaacccccgtc

SEQ ID NO: 143616 - DNA, 703 bp, Zea mays
  Clone ID: MRT4577_62453C.1
tcttattctacattatgctacctactactcaagcatccactccttattgagtactgcgttgatccatggactcgcaaggagatgtagcagcaaaggcgtgagatgagactactacaccgcacctccaagaagacggatgccagatcaaggacgatatgactgatctgctgatgctgaccgacaaggcgcagctgctccgagctgttgatgctgctgcgcaactacgatgatctcatgatgagccaggtgatcaagtctcataccccagcgcattgacgacctcaagacgtggatcgactgctacacacggacaatgaagctcctcgacgattccatgccggacaggaccacgctaccaccagtgtcctcggaatgacgagcctactacacccgggacatggacgacgtactgcatctacagtctctacacgagcttgcataacgtccgcaactgctgcgagcacctgtacggcatcgactgagctgcagttgcatctacaacgccctcgccgacgccgtcgacgacccgggcgccaacgtcgagggactcgccgcggatgcgtccgagatacgaggccgacatgcggcagtactgctacaaccagcgtagcggctccgtgcgggagaactcccgcggctactcccaggcgctcaagttggagggcatcgacttcgccgaagctgctgcggaggctacatgatc

SEQ ID NO: 143617 - DNA, 1886 bp, Zea mays
  unsure (1)..(1886): unsure at all n locations
  Clone ID: MRT4577_62454C.1
gtacctcgaggccggccggggacccttcatatctgcttgcccgcgtcattgctgcagcgccgccgccaacgaggaaaaccgaagctgaaaggaaaccctcagagctggtcgcctccccccgtttcaaattctccgaatcgctgcaaacggtcgccgaaatttcaaaatcccacctcccaatgagcgggatcctcccccatttcaaatttcaaatccacccactcccacttctcacgattcacggctcacgagcccgccgatctatacagtacatcccatccccatcgcatcccgtggtctctcatccccatcccatcccatccccatcgcatcccatcccttttcgtcgagcgccgccgatggagtgggacggcgactgcagcgaggtcggcatgaactcggtccctgacggcgtcgtccagctcatcctgtcgatgctcagcaacgcccgcgacgtggccgcctgcgcctgcgtctgccgccgctggcgcgactgcgtcccctacctacccgcgctcttcttcccgcggaacgccttcgaaccggccaggggcgccgcggacgatgtcatcggccggatggtggcgtccgtcgcgcgcctcagggagctggtcatctactgccccttctccatggcgcgcctcccggtctggctcgccgagcggagcgccacgctccgggtgctcgagctgcggatggacgccgccgctgacaaggtcccggaaggtgggcacctcgactgcatcggcctgactgcgaatctggaggagctcaggctctggggagtgtctctcacggccccgccggcgtggggccggatggagcggctccgcgtgctggaggttgtcggtgcgccgctgcgggatagcgccgtgagggacgccatcgccgcgtgccccaacctcaccgatctgtctctgcttggatgcgactgctccggcacggtggctatcgatcttncaacagctcgagcgttgccggctcgacatcctcggcgccggcaactgctcgctcttgctcaccgcatctcgtctggagtcactcgagatccagggcttcacctggatcactctgcgtggtggccacaacctccgccgcctctcaattgccaagagcaccgggaggcttcacaaggtggacactggtaatctcccagatctggatcacctgtcgctgcgcggtgttcagtggaactggggagcagtgagctcggtgctgcagtgcgctagcgaggtgaagcatctagtgatgaagatagagttctgtggcgacctggacgcactccagccgttcccggaagtcgatttggttgacttcttcgacaaccaccccaaactccgcaaatttgagatccatggtgccatgttcgctgccctgtgccagaaaaatagcctgaaaaatttgaattcaaggttcctcatcccttgtttggaagaggttctgatcactgtacgctccccactcaatgctgaacagaagctgaacactctcgagtcgcttctgaagtacagtgtgaagctgcggacgatgatcatcagaatctcacagatgaagaattgccacgaggctgctgatgagttctttgaggatatatgtaagttcaagtacatgaactacaaaaaagtgagaattgaataagtggagatgctgttttgatttttaaagttaatctgaccgaggactcgattttttttcatcccagaataattttattgtcattattgtcagaggattcattttgaacctcttgagtagttaagttttttttttatcatctagtctatatattgagtactagagggagttgttggaacaattccatcgagtattgtggctgcaaattgttgttgtaatcgtctctgttccatagcaaacatttttcatct

SEQ ID NO: 143618 - DNA, 462 bp, Zea mays
  Clone ID: MRT4577_62455C.1
gttggggttcaaaataaaaaaaaaaggggtagggaaacaaaaggaacggggaaaggggccagagggaaaggaggggggcaccagcccaggggggggggggcaaaaaagggggtaaaagggccaaacagggaaaaaagaggggaccccagggaaaaacagggggggcggggggggacccggggggggccccgggaagacccgaccgggccccgcagggggcccagcttagcccggggggaggccgataaaagccggggggaaacagggaaatagctgtgcccggggggaaaagggaatccgcggacaagggcacacaaaatacgacccgggggactaaaggggaaagcccggggggcccaaaaaggggggccacccaaatcaagggcgaggcgcggaaaaccccgtggccacgcggggaaacctgacgggccccccccccaaaagaaccggcccccccccggg

SEQ ID NO: 143619 - DNA, 764 bp, Zea mays
  unsure (1)..(764): unsure at all n locations
  Clone ID: MRT4577_62456C.1
atcatcaactccacgtctgacttctacgactacgtatagagctctgtcacttgcacacacactctacctatcaggctatgctagactattagtccacatcgacgtatgaagaaattggcgcacgcgactctgcaagagagaaccacagccgatcgaccgatagttaacactgcgatggcatatgacttccaagatgtatgatagggttaactctgctgctgcttgaacctgacacgcgtccacctgccgaagcgatgaacatctcgaccacgtacaaacgctagaagaaggagacgcatcgcagtaatctcacacctgtcccgcccttcgaccgcctcggactactggcgtccccttggtgcccctggctccccggagttcgtattcctgatgataacattcacctcctcagcatgctcggctgcgctaataatctactccacctctgcttgcccgtgagcgtgaatatgcactctttgcgcagacccgtcaacatgctctccttgctttcaccctatgcagcgaagcacatgactttgctgctgcaacaagatgaatgcaaccactcctgaatactccaaggcacgtttatgatgagattgtgacagaagtctcatcctacctcaagaaagatgcgtacaacgcctgataagattgccttcgttcacattatctggttttgagggcgaccacattgattgagaggtccaccaacctttgactggtactaaggtccaatcctngcttgaggctcttgaccagat

SEQ ID NO: 143620 - DNA, 1079 bp, Zea mays
  Clone ID: MRT4577_62457C.1
aagcgtacgtccagtccaacactccaatccaatccaatccaagcagagtttcagtcgattatcagtccagattccacgggcacaggcggcgcgtgcgtacatggcggcggaggcggaggtgggttcgggtctggctgcgggggagaagcagaggacggtggtggtggtcgctgtggacgacagcgaccacagctaccacgcgctggagtggacagtgcggcacgtggcggcgcccggcggcggcgtggcgggcggggccgccgacctcgtcgtcgccagggcgcgccgcgtctgcgccgccagctcggcgcgcgccctggtcgaggtggtggaaggcgagcccaggaccgtgctgtgcagcgcggcggagaagcaccgcgccgacctgctcgtgctgggcagccacggctacggcgccgtcaagagggcgctgctggggagcgtcagcgactactgcgcgcaccacgcgccctgctccgtcatgatagtcaagcagccaacaaaatccaaatgaaaaaaacaaaaaatttgccagcctgctgctgatgatgaaggtggtgatccagcggccgcagcgcaaatccatgttaccccgttagcgattacaggcagcagccagcccacaggcccagtgatagtgttgtgtatatatgtgtgcagtgcagcctgcagcgtgtggagtgtgtcctgtgttctgtgttgtttaattttattgcgagtaactgcatgtaaaataaagaagatagggaaatagtaaatccgcttccagcgtgaggaggagatttgactagccagatatccatctaaccgaattagattaaaaaacggtgaaatcgcaccgtaaaaaatattagtgcaatgaggattttgcaccgacaaacaaaaaacaaaaaaaactgtaacgccccgaattttgcagttgaattttttcttttctttactcgccaaaattcgggcgttaccttttctttttctttttcccttcgctaaaccttggccttttccaaagttctagcgggattcggtttggaattcccgtgtaagaaaaaccctaaatactttatgttgtttgatgcacc

SEQ ID NO: 143621 - DNA, 264 bp, Zea mays
  Clone ID: MRT4577_62458C.1
ataaattattttattattactagagggtttcaactgaaaaatttttaaaatacccatttttaccattaaccaaccctttttttatacttcactaaactactttttccccaaatattaaattctttatctatacccaataaaaaacttatatacctccccaattatctttccccatttattcatcctctttttcttaaaatcaaacccactttaccccccccaatataaccttatttcttaaaaaatatacccatcatccttttt

SEQ ID NO: 143622 - DNA, 269 bp, Zea mays
  Clone ID: MRT4577_62459C.1
cattgggtacctcgaggccggccgggaccagtcacctcgtggcctcgtgctacctgcatgcactgctcgatccaaagcgtccagcccaacactcctatccaatccaatccaagcagagtttcagtcgattatcagtccagattccacaagcacaggcggcggtaccgttccagtctgcttcaccgtactgcgcgtgcgtacatggcggcggaggcggaggcgggttcgggtctggctgcgggggagaagcagaggacggtggtggtggt

SEQ ID NO: 143623 - DNA, 616 bp, Zea mays
  Clone ID: MRT4577_6245C.1
actcgcctcgtcattcattccgagcctctcgccgatactgactctggacttttgctgcgtcgtcgtctggatcggcacggtactcctatcggagagccgcgctcgtgagcggttcgatgctgcggcctctcttctcaagtatagcaacagaagtgatctctgcggtaacgctgtcgagcgctatttgtcagccgctgtatctggagagcaggctctgacgtcgaaacaacgcgacgctcccacctcctccggagtatcgaagaaggacaatgtcctctcccgttagtatccacttggtgactccttgatgacacatggtggaaaagttgtgcgagaatatgttcctacgcatcttgccacatggagaagaaaagatatgtgtgtcgacttgatggaataagggccgacaggcgaccagaattctagtcgggatggcatgttggaaacacatcagatgccgattgtagagatttctcataagaactgcgtccccggggagatcttcaaaagaagtatccagtcctattcatagaaccttcagaagaagcttcttggtaacaagaggtccaatcttttccgtgctacgaaaaaagacatggagtgatcctttgtctgg

SEQ ID NO: 143624 - DNA, 566 bp, Zea mays
  Clone ID: MRT4577_62460C.1
ggcagtggagtagtggtaggaaagctcgtcgccgagtcgccgtacgggggctcggctcgggtgagcgagcggcggccggcgggtactgaggcctgagggcgaggcgatgggccgcctccgtgacgggcgagccttcctccaccgcgcgcttgtcctctcgtcgctgctccttctcgcctccggcgaaatcttcttcgaggaacggttcgatgattcagaatttcagtttgttgtttgagtgagctgttcactattcacgtggtttagcttctcaaagaagtgaattattccagagatattgctactgctagttgtgccttctgaaatgctccaagcctccaatggtcctgcctccaggagtcgaagaacttatttgtagttggcttacagtccgatgtcctatcgatctgatgtcttgtgctgtccatgaagttatcagtagctgatgtctgctcaagtttcttgttatcctaggtgtattgttttatttgtgattcatgaaattacgcaacttggtaacattcagatgggtggggatagccgcttgggtgaaatctgattggaag

SEQ ID NO: 143625 - DNA, 1263 bp, Zea mays
  Clone ID: MRT4577_62461C.1
ccctcatctccaaaccctatgtgcaaaatgttcttccaaaactgcttgagttaggggctgtacgcatagccccattctcaaacagattagctcagtcagttccattgaacatccaggccttgaggtgtttggtaaactatcatgcattaagatttgctgaaccaataagaattctatctgatgaattggttggtcgaatgacaaaaaagagtttgttgactggtgggaagtatgtctcggtgcatcttcgcttcgaagaggatatggtagccttttcatgctgtacatatgatggtggctggagggaaaaaactgaaatggacaatgctcgtgaaaggagctggagaggtaagtttcgtcggcatggtcgagtgataaaccctgaggcaaacagaagggatgggaagtgccctcttactcctttagaggttggcatgatgctaatgggcatgggattcgataatacaacctccctatatgttgcttcgggtaaaatatacaactctgaaaaatatatggctcctcttcgccagatgttccctcttttaacgacaaaggattctcttgctttgcctgaagaacttgctcaattcaaggggcattcgtctcagctagcagcgttagattacactgtctgcatgcacagtgaagtgtttgtgacaactcaagggggggaacttccctcactttctgatggggcacaggcgctatatgtttgggggtaatgcaaagacaataaaaccagacaaacggaagctggtcttatcttttgatgatccaaatatcagatgggatcagttcaagcagaacatgcaggaaatactgcagcatagtgacatgaggagcattgcattgagaaaaccaaacgattcagtatatacattcccaatgcctgattgcatgtgtaagcaagatgggatgatataaccctgagagcatacatatgacaaatcctttttgtgtttttggttttgaaacataggtaggtttaggcaggtaggtatattgtacatttgtaacctgtaggtagtctcaccatatccatatgctagcaagagatttgttgattcatgttggttctacactttattctaatgtggtctgtatagaggtctagaggagatacatccaacacttgagagggcttctaacaaagtgagaggctgtaccttactccttgcttgtacgtgtaaaggcgtagcctaactacagaggcgaaagcaaaactttatcttgttcttggaaaaaaaaaaaaaaaaaaaa

SEQ ID NO: 143626 - DNA, 456 bp, Zea mays
  unsure (1)..(456): unsure at all n locations
  Clone ID: MRT4577_62462C.1
cataataaatttgaattcccatatagaatatccgtaattaccaaccattttacaatcaaatgaaaaccaatttcccataccctaaattgtttaaaaataaaaattattaacatagcttttaacaaatttgtccacaaccattgccaattaacaattctctgaatgaatgggttctcaattactaatgtataaatactatcagccctcaacaatgatnccttttaaaactaacactaatcagacgacagggctaaccccacataacattgcctaacacattgatgaacaattctatactagcccaaattctgcttcacaatcataggaataaacgacatccaaagatcaaaaaccacancaaatatgaactcttggctgctcacaagccatttatccctgcgcgaaatatactgacccctctagctacaaactcccgaatccctaaaggatcaataa

SEQ ID NO: 143627 - DNA, 302 bp, Zea mays
  Clone ID: MRT4577_62463C.1
attcggctcgaggcgaaaaaaccaacactcatttttatggctccgaccgactacaaggacagcgggttcgacgatcagtaaaccgaggaccacgccttcgatgacaaaaggctgactgtgaacgacctgtccgactccgggccgaagtacatcctggtcatgcgccaccacccgcctgagcgcgtcaaggatgtcatttttccaccagctctgtcctactgcgaggatgctcagagcatccgagcggtggacctgtccgagccgcggcccgaggatcacgggctccaggtgaagcacgcgga

SEQ ID NO: 143628 - DNA, 410 bp, Zea mays
  Clone ID: MRT4577_62464C.1
ggggaccaggcgtccgaaatccccccggagaccgggctgccggggttaatgtcgggcgcaaacccgcccccggccacctggaactactgggccgattctcggacccttttcgttttaaacatggcgctaatgggcttggccgagcaccgccgcctccaggactgggtccaacccggcctccatgggcaagcagaacttcctgggcctcaagaagttcctggccggttccggggacccgtcttaccccggcgggccctttttaaacccgttcggtttcggcaggaccgagaaggagatgaatgacctcaacctcaaggggatcaagaccgcaggtctcccatgttcgccatctttggtaacttaatccaggggttcgtaaccgtcgtgggcccgttcaaaaactttgttta

SEQ ID NO: 143629 - DNA, 257 bp, Zea mays
  Clone ID: MRT4577_62465C.1
gctcgatctccatctcgactgtcgctcaccgggtagctacgctacgacgaagcatggcgtccgtcaccgtctgtatcccggtcgtggtcctgtgtccgtcggtgtctctcaagtcgtcgtcgtcgtcggtggtggccttccttggccactctagccacctcggccgtactgctaccgcgtcgtcgacgaggcgcagctataaggcggtggtcaagggtgagtggctcccgggccttccctcccccgcctacctcgac

SEQ ID NO: 143630 - DNA, 1528 bp, Zea mays
  Clone ID: MRT4577_62466C.1
aatatcaaactctatttttatttatttttttatttagagctctaataaattgtaaagaagcaaatcacgccgattctgttgccgcatctgaaatggaaactgtcaactggccactataatctctcagatcgtcaatggcgcacgcgaaagccggagcgtctctgccggtgcccaacgtgcaggcactagctcagacttggcatggatcaggcgagccggtgcctttccggtacgtcaggacagaagagatcgtcgccggcgaagtcgtcgccggctgcgccatcccggtcgtggatctcagcaggttgcttgacccgcggtcgtccgaagaggagctcgcaaacctcggctctgcctgtcagcactggggtttctttcaggtacgtatccgtacatgattcgccatgttctgaccagattgattagacactgtacagcgcacgcgctgcttgtgcgcagcttatcaaccatggggtgccggacgaggtgatccaggacacgaagaaagacatggtggagttcttcaagctccctgtggaagccaagaaggtgcacgcgcaggtaccgggcggcatcgagggctacggccaggccttcgtcttctccgagacccagaagctggattgggcggacatgatctacctcatgattagccccaaggagtcgcgggacctgaggttctggcccacccggcctccctccttcagggactctatcgaaaggtactcggccgagacggcgaaggtgacggcgtgcctgctgcggttcatggccaaggacttgggcgtggagccggagcgcctcctggaggagttccggggactgccgcagagcatgcggacgacctactacccgccgtgcaggctggccgccgatgtgcttggcctgtcgccgcacaccgacgccaccggcctgacgctgctgctccacgtcaacgacgtgcagggcctgcagatcaggagggacggcaagtggctcgccgttgaccctctggacggtgctttagtcgtcagcatcggcgacatactggagattctaagcaatgggaggtacagaagcattgagcacagagccattgtacacccggacaaagaacgcatctcggcggcgatgttccatcagacatgccccaacacgacggtcggccctctgcaggagctcgtggaaagagacagtggcggggcacggtacagatccatggactacatggatttcatgaagggcttcttcgcggccaagctcgatgggcgaaggagccacatggacgctttgaggatatactagtccaaatgctggatgaatcatgttcctgtcttcataatgaattggacaactagtagtaaaatatctaaggctatccccaatagttcctctatctttatcctctatcacatcccgtattttaatcttcactctacaaacactgcaaagtgcaaataatgtcatctacaatgtaaaacccctatttaccatggtacactgaagatattctcactgaaaaacaaggcaacttgtgatgcatatttaa

SEQ ID NO: 143631 - DNA, 834 bp, Zea mays
  Clone ID: MRT4577_62467C.1
gatgaactgtgggttttgttcgttttctgtggttggtgtgcttgatttgacgtctgtgcgatgccttttttttttttgtcatgtttaagaatcatgtccacacttaactgtactcatgtgctgttgcttctgtgtgactacttttaggacacacttacaagttttgaacttcactgttgtcttacttctatgtgattattgttgctatcgataaatcatctttattagttaaattgttatagctaatgttgtcaaatcgaacctgcaagtgtgggcactccaagaaacttgctctagaggtaatggatctcctaccctgtaatcactccctttacttacacatgggctgtgttctgattagtttaatcccataagctaaattgtgttatctttgatgtttcagtatgagaatgcggccaaggcacttagcaagcatgacccaccgattgttctcgctaaggttgatgctaacgaggagaagaacatgccacttgctaccaagtacgaggtccaagggttcccaaccatcaagatcttcagggaccaggggaagaacattcaggaatataagggccctagggaggctgatggcattgtggattacttgaagaagcaggttggccctgcgtccaaggagatcaagtcaccggaagatgcagtggcccttatcgatgacaagaagatctacattgtaagcttccaattcaaagttttcacatgtttttattcagtaatcactgaatctgtattatgatgatcaggccaagtgaacatcttgagctgacaactgattgtacataataattgcaattttataggttggtatcttcgctg

SEQ ID NO: 143632 - DNA, 686 bp, Zea mays
  Clone ID: MRT4577_62468C.1
aattcggcacgaggcgttcacccacgataagccaagtcatccaccccactccctgcctaccaggagccaagtcatccaccccttccccgacgaggcaggcagggcaccacgccattctcgcgcgaggagagggcacaggagaaaaaaaaaatcacctccttcaacctctccccctcctccaccgaaatcatcctccagaatctcccgatctttactccgcccaaagatcctatacacgcgcggctatttgtagcgtctgccctgccctgccctgcccggcctcgtggaaaggcgctccgctcttggctctccccacctgcgggcgggggctgttggttcgggtggggggaggcagtcaaatccgcctgcggctgaatcgggggagaggggccgcatggcggaggaggacaggcagcggcggtggcggcggcggcggttcgcaaacctgcgcagcgtccggtggcggatcgatctcggcatcctgccggcgtcgcccggggcctccgtcgacgagctccgccgcgccgccgcggattcgcggaggaggtatgttagtttgaggcgccgccttatggtagacccgcatcttccaaggaggaggacagatcatccaaccttgttgttgacaacccgctctcttagaacccagatagcagctggggcccgcttctttagaagggcctgag

SEQ ID NO: 143633 - DNA, 708 bp, Zea mays
  Clone ID: MRT4577_62469C.1
ccgggacccgacgactttcgacacgagcgacagccagatcaccatcgcctctgtttctcgctgctagtgccaatttggttcagcgtacaaggtccacgcatcacaaagccgcagctgccaaaggagctgtcaaccgcaccacgtctcgcaacgccagtttcgcttcggaccgcaaaggaagcggcggtaccggtggatcagctggctggggctctccattggataacccgttcaagatggatcgtcctctcaatgtgttcggccgccctttggcgcagtgcggcacgagtcccatgactggattctacagagacggctattgcaacacaggtccggcagacggcggctcccacacagtggcagcggtagtctcacagaaatggctcgagtattcggcgtccaagggcaacgatcttcgtcccatcctctctcagggctgttcatggtgtctctgcgtgacaaggtggaagcaaagcctggacgcattcaaacgtggagagctgcccaaagagggtgtccccaagatcaagctggaggctacacaccagcgtgcgctggatgtggtatcgttagacgaactcagggggttcgctctggaggaaggaggcggacgttcgacccaggacccagcgatgggcggtccgattcgttgatccggtgaagtcttttggccctcgcttacgtccgatgcaacgctctgactcgcgc

SEQ ID NO: 143634 - DNA, 500 bp, Zea mays
  Clone ID: MRT4577_6246C.1
actaaaaaaaaaagaagcaccggagactctggagaaacacccagggggcagacaccggcccgggaaccgggcaacgagacaagactctggccgaacaaagcgagcacgaaaaccggggggacccaaaacacaagcggggcgagcaaccgacgggggaccccgagaagccgaacaccaggagagcagcccacccaaggcgggcggccggacccaacacagcgagacccaagccaagccaagcaaggggagcccagagcggaaccaacgcgccaaacccgcacggagaccacacaagagacccgcaacaccaaagacgaacagcaacaagaccaagcccaccggcccaagacgcccagcaagagcaacccggcaaccaggagagacaccgcccgcggcaacaagccccaacggagcgcagaacacgacgccccccccgacaacccagacgggggccccacacgacgacaacgccaacccacacaaggaaaccggcggagaga

SEQ ID NO: 143635 - DNA, 473 bp, Zea mays
  Clone ID: MRT4577_62470C.1
gggccttacacgagtacatgtatccatcgggctctcagatgctgctgctgttgcatgacacacctaggacgccgccatagcggcctagctagctgcgtcctgggccgagcgctttcattgccgaacgttcgacactgacagagggagatcgagagagaactgaatctagcgaccatttatatccaaggagaacacgaagcgcccgcgtatatataccgttgcgtgccgctctatcgatcgacacagcgagacagatacacgagctgcaaccgctgcccactactgcccaagggctgcagccacgcctgcgtgctacgccccagcatagacacgtatccacagctcgcagccgcaggccaacgccaccgccttcgtctccaaattcttacgccccgcacatctcctaggctccctggtccaagcgccattcctccacctgccaagagtattacggcactggcagcaccacgact

SEQ ID NO: 143636 - DNA, 522 bp, Zea mays
  Clone ID: MRT4577_62471C.1
gggacaaaaaaccaagggggcccaccccaaacatttaaataaaaagggttattgggaagaaaaacatcatcgaacaaattgaagggagggtaagcttgaagccatgaactaacaacggggactccctttccccattggagggatctaccccgaaaccccggacctgggtactacccactactacagccttgatggggggttccattccatccaaccccccgaccatgaaacgaactaaaccccccaggaagctcatccacaacagcctccagggggggggtttcaccgggcttactcgccggcaacaaataaaccaaaaaacacgactttgcaagggacacgggatcatccgaaaaaaaagctttgtacaaaggaaaaccggggccccccaggggaaagttcaaagggggcttttatgctgccgggctgttgccgtccaccttgccggtgcacttccacacaaaatttttaaggtggggcgacaggcgtttggaaaacttttggaaccccaaaggggccccc

SEQ ID NO: 143637 - DNA, 164 bp, Zea mays
  Clone ID: MRT4577_62472C.1
gggaaggaattggtggaccgacccacgcgtgaagaggatgaaccaattcatgactaccttttttttcccgagggtcagatgacctgtggagatgagatatcttccacacggcgttctcgttacggctcgtacatcaaagtctgccgaagaagcaggcctatctt

SEQ ID NO: 143638 - DNA, 286 bp, Zea mays
  Clone ID: MRT4577_62473C.1
atctgggggggataaaaccctcttggtccaaaaaacccaagccccaacaaatttccccatacattaactttcccgcgggggggtaaaataaattaccccgaacggggtttacaaaacggaaccggtaattttgcttcaaatggggcatgacaaaagttatatttgcttgtcaaaaaaaagggccggggaaacagccatttggtttacaaccccaaatataaccttggggcccccttgggtgtggaaaaattgcctggaaaataggcccccccgggggggggggggg

SEQ ID NO: 143639 - DNA, 435 bp, Zea mays
  Clone ID: MRT4577_62474C.1
tttcttgtgtgtccaggaagtacaaaacagttttacaaaaaagaagaagaagaagaagatccggaacacaagatgatgtacaagtgaaaagattcggggttcatagtttgctagttaacagaattaatttaattgattcagtgtaacctggttcgtgccagtgtgttctagttgatgtcgaatggagcaatgcgcagatcgtcttgtgaaattccgtacgtgatttgtttactttcactgtcggcacacgcccacaccatgtgtggagtcgaatgcaagatcactttctttccttccgaatcgactgttaccactccagccgttccaccgacacgatcacgcatgtactgcagccctttttgaaccgctgccttgacactcaatccgcactcgttttgaagctttgcaatgtgcttgcacaatgccactcgcatg

SEQ ID NO: 143640 - DNA, 558 bp, Zea mays
  Clone ID: MRT4577_62475C.1
cgtgctgtcggtcccttccaaatcatgtgtatgcgtttgattcagtaatgaaaactgcgttatatgcccaagtttgtacagctctgcgtcctttccagaggcacacaattggtagaagcaatgaaaattcctttcaggatcagtaatttgcacaacacgggacctttccaaaagataggtcctaatagcagctccagatattctaccacttgaatcaaactgtatctctacgaattttccaaatcgacttgaattgtcattgcgtactggttttgcattgccaaatgcctccaaaagagggttagattctagaacctgttgttcaaccgtccggtcatcaagagcggctctaccgccaacaaaggtgagatactgcataataagcttcgttggttcgggtttgccagcaccactttcaccactaaccaggatggattggcttcgagaatcattcaccatagccctgtatgatgcatccgccaccgcaaaaacatgccgacagcaacgggtccttcctcgacgacggccagatggccgaggggtacctcctcacctgca

SEQ ID NO: 143641 - DNA, 1452 bp, Zea mays
  Clone ID: MRT4577_62476C.1
tgggtactcgagccggccgggccggctagcaaatcgaggctcctatctggtataggacggagctgagcttctagcaacgtacagtgtatccgccatgagtcctttcggggcggtgatcacgccagaaaccctcaagtacatgtccaagtaccagggacgtgagatcacgcaggtggactgcgcacgggaggcgatgaggctgatccacgcggaagacaagaacctcaaggccgaggactcagcgtgggagctgaagaagaagttcggcaacggcgtgagcaccatggtcctcgtctacaacgccaccggggccagcctgagcctggtggacgacgggaaagactggatgggctccgtctacagctcgccgatcccggacaccttccacaacgggcagtggatcgccttcctccacgtcaagcccggctcgctggcgtccgccatgaatcctttcggggcggtgatcaccccacacgtccgcccggccgggccgggaagagatcgaggctcctatctggtataggacggagctgagcttctagcaacgtacagtgtatccgccatgagtcctttcggggcggtgatcacgccagaaaccctcaagtacatgtccaagtaccagggacgtgagatcacgcaggtggactgcgcacgggaggcgatgaggctgatccacgcggaagacaagaacctcaaggccgaggactcagcgtgggagctgaagaagaagttcggcaacggcgtgagcaccatggtcctcgtctacaacgccaccggggccagcctgagcctggtggacgacgggaaagactggatgggctccgtctacagctcgccgatcccggacaccttccacaacgggcagtggatcgccttcctccacgtcaagcccggctcgctggcgcagggcagccaggccgccagggtgttccgcggcagggacgtcgatggccggactcgggacttcgtcgtcgcctggtacatcccgtgggacaacataccgacacgagcttacactgaaattggcagtgaaaactacttcaagactcggtggagtagtgtcaaaacgagtctaggacattcaaggagagtgacccgtgccaaggacgagaactgtgcgtcaactgtcagcatcggtggctacactacagccttctgcatcgcagtcctacaacaccagttccagccgctgccggaagagcgcgaataatcaatcaatcgatcgatcgagtttgcgatcgtgttacctcctaaataaaagttgtacacgcgaagtactactccagtatttacatgtatgtttctagcaggtgtacgtacgctactcctgaataaattgtggtgcacgcaataaataaataattaatgctcctggataaaaaaaaaaaaaaaaaaaaaaaaaaaaaaaaaaaaaaaaaaaaaaaaaaaaaaaactcgggactagtctcgtgc

SEQ ID NO: 143642 - DNA, 2307 bp, Zea mays
  Clone ID: MRT4577_62477C.1
gtacctcgaggccggccgggaaaatcatttcatccttcccggtgcggctgcggccagatgcgtccaaattcctcatattttctctcctcccctggtcccttctcgttctcgcccgcgtaattcctctctggcgtctaccaaaagcggagcaaccgaggcaagaaaaaggggtgggcgaggaaaagcgattaggcttctcttccagttcctgattcagtctgagaaacaatggatatctgaagcatgaaaagtcaacccacctcactcttttaaacagttcggttaacacacttaatggctgcggtgtttgcatgacattctctttgagcttatatgggagcagtggctgtattggtaatttaagcagatctcagtcacttccagattctaaaccgaagcgatctttgagaaagaaatatcaggattcatcgactggaaacagaagacgatggcaatcgggtctagaagcaatggagaagaatgttagcatatctgtttctcttgaggggaatatctcttctattcccaattcaatagccaacgactctaaaacgtcaatggaaaacagggtagatacatcatttatcaaccatggtacgatatcattttgaaattttgttaccttgttgtatttaatgagttatatctgtgtttggatgcttacaacctaagtggattgagaatggtagcttgattgtaaggtaaatatgattgtagttgtttcatccgttagattttatagcatctttaatatgcagttaattgtgcttgtaccaacaccaatgtcgtatccaaattgtttctcttttgaacaagaactgttcatataggcttgtttttcttggaacgataaagaaaatcacatgtaaaggggttcattcagtactgttgtcatgttaaagtcagactacagaagattgtatcttgctctcttactttttgcaagggaaagctttttgttagcatgattttctgtggtcagttattcagacaataacacatttgttatagttattagcctggtcaatagtaccagtttttgcgggggatatggacgaatgaataggatttgatgccagagagtcatttgtataccaattataatatttgtttctgcagcggctgaagcatgggctgagatgagaagacaatgggttggacgccaggcagaagttctgagaaagaccccccgagagccagtgataaggttcctgacgctctttcatttgcatgaattatactctctccattctttttatttgtcgcgttttagtttaaaaataaactagcaggtgacaaatattcgagaacattatttgtcatgttttagttcaaaaatgaactagagggtgacaactattcgagaacggaggtagtaatttcctgtggggcacaatatgtaaattttaagaatctatagagaactagtcccattgccttgggtaggtgtttggtaaataagctagtttaaagatcctttgagatttctattatttgtgaaattttcttcacccctgcaaaaaatgtattgttaattacttaattgtagtttttaaaccaaaactagaaaacgaggtattgtagctaataacctagatagacgatatgttgagcgcctgatgcactaacaagccgtcaggagcttctagttctagcgaataagtgatgttagctcacactgaaggaagctttagttattggttcatgatagttagatagcttcttgattcatggtaggctgcaagctatatatgcaagagttcggttagattccatttcaactccagtgtcttttacattgcagttggtccacaacatatgatgacctcttgtcgacaagtgagcgttttccacaacgaatcccattatctgtaagatccctgagttaaagctttcctgcttctattggtcatttatgttatcagtttctgacttgcagagctcttgtaggagatggttgattttttggttgacatatggcacgaagaagggctctatgattagctgacctctgcctttctttacgccttacttttagaatgtggtcaacttcctccccacaaaatatgtgaccttcagaagaaatgaaaaaactacatactctatgaattagtcgcaacatttgaattagtcgcaacatttgaaattgaaaaaaaaactctcatgtgaaaaggtacaacagtgggttggtatatttggtgatgagttgtcaacggtttcttcatgttgaaggactcgatgacctgtcattcctgaatgaacgattgcttataagtaagaatataagggggaagggcattttttctc

SEQ ID NO: 143643 - DNA, 706 bp, Zea mays
  unsure (1)..(706): unsure at all n locations
  Clone ID: MRT4577_62478C.1
aattcggcacgaggccggccgccgccagcccgtcacaccaccaccggccaggcggaggcggcaaccgcggcaccgcccagaagcccaccggcacgggccacgccgccaggggtcacctccacaagtccacagctccactcatcgtctccttcagtcccgtgtgaacccgagcccgaccactggtccacgtccatcgccatcggaccaccgccacacggccaccgaccctcgcctgccagctccagcagtccagctcgtcgcctctcgcagcctcgcctaccgacctgcgtgccgctcgtgtccgacccgaaatttcgggtaaacccgaacgccatcccagccattcaccagtcccgaaacaagagaacggagacgcagaagcggtggaacctccagcccgtgccgaaggggagaagccctactatgcgctcccatggccgcctgcgtgctgggcctagcacctactctcgttagcatgtggcccctccggtgcgctaccgcttgctccgccgctacagaggcctccaccacggccgctcatgcgnntcgcgtcgcggcgtgggccgcggtcagctcggctctgtcccggtcttcggggaaggcactccttatcttcggcgcaattatggatggtcttagaagcatncttcagtggaaggaacctgacactttctncaaagtcaccatggtctcgtagtgatgattc

SEQ ID NO: 143644 - DNA, 594 bp, Zea mays
  Clone ID: MRT4577_62479C.1
gttgttgtgggctgcattttctttgcatggagattaaaagctgacttaagttgacaaactggaaataatggtctagtaggtggataatgcgaggcacaacaaccctttacacgtaccacttattaggacagtgactgatcagatcaaatgataagataggggttaaacaagaatcacatgtaggggccataaaaaagcatgatagagcgcaggcacaccaaaccaaaccagaccagaccaaaagctttttccaaaacagaggaggcgcctgatgcaaaagacggcttctacgccttgaggggcttcaccacctaccaggtgaagtcggggtcacccctaccaaagtgcccgtaggccgccgtcttgaggtagcgcccgttgccgcctttcttgagggcgaggttgatgatgatcatgccggtcctgaagtcgaagttctacttcacgatcttcaggatctccttgtcggggatcgcgccggtgccggacgtgtgcacgaacaccgtaaggggctcggacacgccgatggcgtaggagacctgaacaatggcgcgggggtcgaggccgggggcaacgatgctcttgggaacctgt

SEQ ID NO: 143645 - DNA, 403 bp, Zea mays
  Clone ID: MRT4577_6247C.1
ggaacccggcccacccaaaaaccaggtaacggaaaaagaaaaaaaccgggcccccactggggcaaaacccccaaacaatgaaggggaacaaaaagcccatttaaatgaaaaccggccccccccccggggggcccaaaaacaaattgggaaaacgggccggggatcggaaaacccgaaaacccccaaggtaaaaaccggggttttgcccggggccttgccaaaagccggggcccaagggaaaaggaagctccccgggggcgggtccaacaattggggggggagggttgggagccctctttggggaaaaccggacgggggaaaaggcaaacccgggggggggaaaaaaaccctttgaccgggacggaaaatactgagtatcccccaaagggggccaacaatgggg

SEQ ID NO: 143646 - DNA, 391 bp, Zea mays
  unsure (1)..(391): unsure at all n locations
  Clone ID: MRT4577_62480C.1
cacatccaaccctatgtgataaaacacgacccancgcacaccagggnggagaacataaaaggaagaggaccgggcacacaaaccaggaggcgcaacgcacacaaaacaacccacaacacacagccgcaaggcaaagcacacccactgcgccaaggcgcaggcagacacgacacacaaacaccaacgcaccacaagacagccccaaaacacgaacccaaagatgccgcagccaagggaaaccacaagccggaacgccctgctgcagcggcagcgagggaggcccaccaggcaccagggcgggagccagaccggacgagcaacaaggggcccaaagccctgaccacgatgctcaaggcgggacggaaacacccacccacagcacgcacagggc

SEQ ID NO: 143647 - DNA, 233 bp, Zea mays
  Clone ID: MRT4577_62481C.1
aatacaaaacactttgggtgtttggggtttttgtgttttgggcaaaacaaaaaaaatcccaactcttatcgattggaattaaaaccagatgacaacaccataaacaaaacatttaaaattccaaattgctcaaatcctaaagggctcttggaagaaaatggccaaatctccaagcaagcccaaaacccaagcataatataaagcccaaacccaaatggaaagtattactgaaa

SEQ ID NO: 143648 - DNA, 686 bp, Zea mays
  Clone ID: MRT4577_62482C.1
gagactttgggtggaagacctggcaaatcttctctcctccagcgcgcttcggcatgtcgtgctcaccgccgccgccaatcctccgcttgcacccgccctcttctatctcctccttctcatccccacggcggccgcacctttccccacgaacctgcccgtggaggctcgccgcggcgcacgagatgccatggccgcacgtgctcacggttgcgggctccgactccagcgccggcgccggcatccaggccgacgttaaggcttgcgccgccctgggggcatactgctcctccgtcatcactgccgtcacggcccagaacaccgccggcgtccagggcgtccatctcgtgccggaggaattaatccgggagcagctccagtcggttctttcggatatgtcggtggacgtggtgaaaacaggaatgctcccttcggccggaataattaaaattctgtgtgagagtctccagaagttttcagtcaaagctttagtggtggatccagttatggtgtctacaagtggagatagtctttcagatccatctactctcacttactatagggatgaactatttgccatggccgatatagtcaccccaaatgtgaaagaagcatcgaaattacttgggggtgtatcattgcacacaatcgccgatatgcgtgatgcagcagaatccatttacaaattt

SEQ ID NO: 143649 - DNA, 705 bp, Zea mays
  unsure (1)..(705): unsure at all n locations
  Clone ID: MRT4577_62483C.1
cccacgcgtccgattcggcatcacttgacaagaccgtgactgtatctatctacagggttccacatgcacattcagcgagtcaatcctgggatcgtgtggcttccatactgggctgttcacctcaccacatttgatggatgttagagagcgatttcagctagatggagaaaattttgaagtactcctggtggtgctagaacaagttgaagcctatttcaggttcctcgcgctgctcgcattcaagatattttctgctgagcaggtagatgttgctattctcgaggttggcctaggagggaagttcgatgcaactaatgtggttgttagttctcgtgaatgtcctgttgtctcgaaatacaaagcttctgttcgcacctaatcgcctaaaatggaaatgtttgactcattgtttaattcggggggaagctgaaggtggtctgatccgttctaggaagagaaaggctgaccaagtcatcatctccagggacgatgttagcgaaagtcaatttaatcaggtgttgatcattgggttgcaacaaatcatcggtggagnctgagtcaccgcggccagaaaaccacggtctcaatttgaggagtttttccatctatgtttgttagaaggcataatgcctatttatctcttgtattcgaacatttggcaattaagaaatagaagattacttccccgataaaagaaaaaaacac

SEQ ID NO: 143650 - DNA, 545 bp, Zea mays
  Clone ID: MRT4577_62484C.1
agcagtggtaacaacgcagagtacttttttttttttttttttttttttttttttttacttttttttttttttttgtttttttgtttttttttttttttttttttttgcgccgaaaggaggtgccgagggtatttaaggcaaaagttgaatccacacgggtgtggattttttgggggggggggggaaactatatgtggaaaaaaaaggaccccttcacagaatgggtgaaaaaaaggtcgctggcagaggggcagaatattagaaggtatttgttagtcccttggcatataacaaaaccctctacgctaccgtgtgagaccgtatgggtgtggacgaaaccaacgcttgcaatcttttgagccggaggcgagaaacacctttcctttttttgggtggcatagaagcatttttcgggaaaggcgacccaggtttatatgtcacgaagttttatctgagatgaagcagctttgccttcgacaaagcatgatgtcatcggtgacaaggcatttgtctgactttcttatttataccctgtgttttatgcc

SEQ ID NO: 143651 - DNA, 951 bp, Zea mays
  Clone ID: MRT4577_62485C.1
tccctctctgttttgactgtcatggttcacgtggtagaagcggtagaattgagtgcttgcccgttcggtcagattggttcaaccacatctaatttggtctcagtctcttgaagtagtatagtggcacaaatttcatgccccttttgctcctctacttttttgtaaaaatgtggcttgattatgtcagagtggttctagatttgttcattgggaacttgtttgattatgtcagagtggttgtcttcttatccagtgctttctattctgcatgagattattgctttattaaataattgtcgagctgttgtcattgtcgaggtgttgttttcaagtgcttcctcataaggaggttagtgagttcaagaaagccatcactgactgctcgaagttcttgtagcagttgaactttgctaattgaagctgcaaaaggaacttcgatagatcagcattacgaggcacggacgcgtgggcggacgcgtgggcggacgcgtgggcggacgcgtgggtgcacattcaccgagtcaatcctgcgatcgtgtggcttccatactgggctgttcacctcaccacatttgatggatgttagagggcgatttcagctagatggggttaatatttctgaagagaaatttttgaagtacttctggtggtgctggaacaagttgaaggagaagactgatgatgatattcccatgccagcctatttcaggttcctcgcgttgctcgcattcaagatattttctgctgagcaggtagatgttgctgttctcgaggttggcctacgagggaagtttgatgcaactaatgtggtaaagcacctgtagtttgtggcatatcttcccttggatatgatcatatggaaattcttgggaatacacttggagaaatcgcaagagagaaggctgggattttcaagaaaggagttccggcctatactgctccacaaccaga

SEQ ID NO: 143652 - DNA, 485 bp, Zea mays
  Clone ID: MRT4577_62486C.1
gtacgcctgcaggtaccggtccggaattaattcccgggtcgacgagctcactagtcggcggccgccctttttttttttttttttttttttttttttggggaagtaatcttctatttcttaattgccaaatgttcgaatacaagagataaataggcattatatgccttctaacaaacatagatggaaaggctcctcaaattgagaccgtggttttctggctgcggtgacagtctccatcgatgatttgttgcaactcaatgttcagcacctgattaaattgactttcgctaacatcgtccctggagatgatgacttggtcaggctttctcttcctagaactggtgtagaattcaatcaaacactcccagaagcgacatcaaaatccaacaagtgtaatgcagattaagatctcttaccggatcagaccaccttcagcttccccccgaattaaacaatgagtcaaacatttccattttaggcgatta

SEQ ID NO: 143653 - DNA, 605 bp, Zea mays
  Clone ID: MRT4577_62487C.1
cattgggaccctcgaggccggccgggcaatctatacgtgcaaaaaaccagaaagcatacaagcgtcatcaaggcactaagtatcctctacttgaaaaaagccatccctagagcttcatggcgtgctctaagaagactcttgttgttctcgttgttccaatattgttagctcttcttgcttcgaccatgccagcaagccaaggcggtcgtgccctcttaggaggggaacaatgctccacatctaacaattgcaatgagcagttgtgtggagcaacatgtgccgtcttgggggagaatgctattgggatatgcaaggttgttggagggatctcctcctgttgttgtgtcccaaaaccatccacatccttcaacatccaactctagatggttcacagattcatcattgttctcattcaatattgagaatgtcacgttttgttagaaaaaataatatgtattgtaagggacaagatgtgtggcacaatgtattacatccatgctaggatggcaaataagtaatggtttgtattttaaaacaaaatttaatatataacatggtattgcaaactttccattgtgacgaaaaaaaaaaaaaaaaaagcggcc

SEQ ID NO: 143654 - DNA, 290 bp, Zea mays
  Clone ID: MRT4577_62488C.1
cggacgcgtgggggactctttgtgaagacaatgacccattggatgtgttggtgctgctacagcagcctgttattcgttcttctctcctgccagcaagagcattccgtcttattaccatatttcaccgtggataagatgacgagatgataatagcatgctctgctgatcctgaatatcatcaccaccacaaccatcatttgctgccttctcatcacctgctggaagtgaagacgcccttcttcgattattataagaaggatgattataacgttgttgctgtcgcagcattg

SEQ ID NO: 143655 - DNA, 170 bp, Zea mays
  Clone ID: MRT4577_62489C.1
acgggccaatgcactgaacctggactgagcgcagggcctccttgcccaggcaggaggctggggtgctgtgtgggggccaatgcactgaacctggacttgggggaaagagccgagtatcttccaaccgctgcctcctgactgtagacctattaaacttttttaaaaaacca

SEQ ID NO: 143656 - DNA, 483 bp, Zea mays
  Clone ID: MRT4577_6248C.1
cgaatatatcaagaaaaggacattctgcaccttttttcaggaaaccaacatgttctttacagatgtcacaaaagagtacatatttgctaacattttctgtttttcttgcatgcataggctattcgaacgacgatgctccccatgagtttcttttaattaaaagaacatccttataacgacagtccaaacggatggcttgacatggagttgctcgtacatgtatgcagaggaccaaatatggcattccatttctctgggcttttcgtcaactcctcagggtcatttatgtttttccttggcaagcgcaatttcgacaagctgaatattcccctgaagtaaagcagccttaaatggcggtaggaaggagaaaccatccagcagtttcaaacacttcaaaccccacttgaccatcaaaaactcaatcagatgatgaccactgcggttgtggtatgtggttatgaaaaccgccccagaagaattttc

SEQ ID NO: 143657 - DNA, 358 bp, Zea mays
  Clone ID: MRT4577_62490C.1
ggccaagaaggaggcggatgcggacgcggacgcggacgcgtcagcaagagcggctgaatgcctgtcagtgtcaggcgtcgtggagcgggactacttcagcggcagcctcattgagagcggcaagaagcgcggcggggatgacgcccttcttctcaagcggtcatcctcctgcaacgccgacaggtcttgggcgctttcagttttccagttaaattccatcacgcatcttcattcttacgtgtgctgtcctgtttgcaactgaagcaggggcgccgcgaagctgaagttgccgccggtgccggcgaaggaggtccgtcccgggcgccttgcctcccgaggaagccccgcgcccaacaaa

SEQ ID NO: 143658 - DNA, 238 bp, Zea mays
  Clone ID: MRT4577_62491C.1
cggacgcgtgggcgttagcggtatagcttaactacttctacccaccgccttgggacaccatcaagtccacgtcggacagcgcttttagcgtcaacacactgagcaccttcttgtggtgacactaggccgctactacggtgccgcctgacagacaccgacgaatggtgaacctatctttgtcgccaactgcctttgttcgccctgcgtactccccatacggagaatcatgtgcctggct

SEQ ID NO: 143659 - DNA, 110 bp, Zea mays
  Clone ID: MRT4577_62492C.1
ttcagatcatataactagcacaaacataccgaggggacctcctaatttaggcagatctaaaccacgaccactaccctcaaaagtccaaacctatctcttaagctttagcc

SEQ ID NO: 143660 - DNA, 1223 bp, Zea mays
  Clone ID: MRT4577_62493C.1
cctcgaggccggccgggtgatatctcgaattgtaaagatggagtgagcaatttctttgcaaaaaaaaaaaaaaaaaaaaaaaaaaaaaaaaaaaaaaaaaaaaaaaaaaaaaaaaaaaaaaaaagactgaacaaagcattgaagcaaagaaccctgcaactgcaacaagccctgacgcttaatacatcggccggcactcgatcgatcggcagcagatcaaagatggcggcggaggagggggagaaggcgaagagcggcggcggcgggcagcagatgacggtggtgcgggggctggacgtggcgcggtacatggggcggtggtacgagatcgcgtcgttcccgtccttcttccagccgcgggacggccgcgacacgcgcgccacctaccggctgctggaggacggcgccacggtgcacgtgctcaacgagacgtggagcaagggcaagcgcgactacatcgagggcacggcctacaaggccgaccccggcagcgacgaggccaagctcaaggtcaagttctacctcccgcccttcctccccatcgtccccgtcgtcggcgactactgggtgctctacgtcgacgatgactaccagtacgcgctcgtcggcgagccgcgccgcaagaacctctgggtatgttatgtaagccaattaattgccagctcttccacctccaagctgcatgtgtgctcgcgcgctcatgcatgtacgtgcagatcctgtgcaggaagacgagcatcgacgaggacgtgtacaaccagctggtggagcgggccaaggaggaaggctacgacgtgagcaagctgcacaggacgccgcaggacgacccgccgccggagagcgacgccgcgcccaccgacaccaagggggtgtggtggttcaagtcgctcttcgggaaatgactgcccgtcaccgcacgcgcgcgtgctccggtactgtgcttgcagttgcagcaaataaaaccaggcctgagtgagtgaggattggtattttagctttgtagtatctgtctcgctatctgtgtgtgtggaactgtggactgtgctgttacgttatacgtgcatgtatttttaagatttctctagctaattgcatcgatcggcgaggtagtcactcaggggattatgtgagtttgcaaaaatgtctatacgtatagaatttgctttgcttgacagccaaaaaaaaaacccacgcgtccgtcccacgcgtccgcggacgcgtgg

SEQ ID NO: 143661 - DNA, 332 bp, Zea mays
  Clone ID: MRT4577_62494C.1
gcagcaccaactaccccagcctcggaaggaactttcagaagcggaagaattttaaggcgttgctttccatccttctggcgcggggtcgcttggatccataacaatggtgaaggctgtgtgtgtttgtagcacgatgtgtcaaggcacatcttttcaccaagaggagatggcctaccgctgtcaccggaagtgtctcatggctcaaagctggcctccatgggttccatgtacatgcacttggtgacaccaccaatggatgcatgtcaactggaccacactacaatcctgcgagctaggagcatggggcacagaagatgagaacgccatgtggt

SEQ ID NO: 143662 - DNA, 340 bp, Zea mays
  Clone ID: MRT4577_62495C.1
tgacgccgctgctgctgctgcgtacgtggctcaatgaccggcacatcggcatcaacctccaccgccacccggtgtccatggcgtgtggttacttcccggagtacatagcaggactcctcgctctctgtgcagatgcgacgagggcggcatcatcaccagcgtggaccgcgtcacgtacctcagcatcatcgagacgccggcgcttgtggccgtcgccttctgcgcgatggtgtcgtgtgagtcctgccgctacatgaatgatcgcatgcggcggtacttccgcacggcgcacgtctttgcgctggtccgcgaccgcgtcgtcgggttcgtggacggcgaa

SEQ ID NO: 143663 - DNA, 309 bp, Zea mays
  unsure (1)..(309): unsure at all n locations
  Clone ID: MRT4577_62496C.1
ctgcaggaccggtccgtaatnctcgtgtttgcccacgcttcttggttgcaagaatcgatatgacttatcctaaaagaaggtgctaagatgatgggacatggctctcaaaactttcagctgttgcctgctggtagccaagacactgaatccgaaggaaggcgttgaagggtagtattggttgatcctatgagtgtaatgtttttttgctgcagcttttgggggcagttggtattaaattcagtaatagcatctccaacgcgtgacctataaaaatgtcctataatttaaaaatgagtaaattttattgga

SEQ ID NO: 143664 - DNA, 190 bp, Zea mays
  Clone ID: MRT4577_62497C.1
acttgcgccgccactgcctcacaggtaagggccgcccatggtctccggcttcgggcgtgtggcgcgaagcgcatcgtggaggacgcgcgccacctcatgctgggccgcctctcctcgatcatagccaaggagctgctcattgggcagaaggtggtctctgttcgactggaaaagatctgtatgtcggacg

SEQ ID NO: 143665 - DNA, 600 bp, Zea mays
  unsure (1)..(600): unsure at all n locations
  Clone ID: MRT4577_62498C.1
tcctgggaaatgattcacaattaccaagtcatgctttgcttgcacccaaatcngaatcctcgtatcccgcgcctatatgacaaatctcggcctggcaaccgatcggaacatgccctgcaccgcgtggccaataagagccgagcagtacacactatcctcctaccgtgaaagggagatatctgggcggcgtaaagtcatcactgccataacctcccaaaatggcatggagaactggatctcctgcaagctcctcctcacccgcggcggtcagcacctaccaatcttccatgagtcctaaatagcaagagagagcttctccacagagagtataagacatgcccgccgatctactgcaggattgtcgcatctcgaatatacatgatgggtatgtatagtatagtgatgtgatttctgtgcatcatttaactgaaacacattataacctatctgtatgtgtatataagatactgtgccgaggatgcatatctggagaataactgaataagaaccttctgattgctgaagaaaaggatgatgacgctaagaacgctgacgctctactgtagagactacacgtcatggatgaaatcgatgttgatg

SEQ ID NO: 143666 - DNA, 1539 bp, Zea mays
  Clone ID: MRT4577_62499C.1
ctgagggcgggcatggccacggcggactccctcgcaggtagcggtagcaggctaaagggccagctgagcttctcgtcacggcaggggtcattgatgtcccagatctcagagatggacagcgaggaggtcggagggagcagcccagaggctgccggcggaggcagggggtacatccctgggtacccaatgggctggttctgggtgggaggactcatcggctctcatgtcagacaatttgtctggcatgaaacgcccccgggactcgtcggagcctggccagagcggccttacgcaccagttcagcgtgcccaagacgtcgtctgagatggcaactattgagaaattcctccagttccaggacgccgtgccttggaagatccgtgccaggcgggggtgcgccactcatccacgcagcatcgctgagagggggaggagaacaaagatcagtgagcgaatccgaaagctgcaagaactcgttccaaatatggacaagcaaaccaacacatctgacatgctggatttggctgtcgactacatcaaggatctccagaagcaggttaaggtgctaaaggagagccaagataattgcacctgctcagcaagcaagaaccagcagcactcctgctgaaaccgtaatgctcactgtacatgacctcgaaagcatgtccactcgggaaagaaaaagatgtaagacagctctcatgcatgttgtttcatgaggttttgaactgcagcagttgagaggctttatctaccaggcagtgtagcttttgtatgagcgaagggggatggagcaatggcatcatcaagcattcaagtgattgggagaagggtaaaaaaagtggggagagatatatatataggagaaacaactgtatagtttggctgtagcttttctatatatacacacacgcactaccctttcagtagaaagtggttaatttacctatgttagagcatctccaagagaggctctaaacatggtcctattttaaatatagggctcaaaaccataaaacatccttccaacagcggccctattttataaaatttcatcaaatggttataaaaaaaaaaaaaaaaaaaaaaaaaaaaaaaaaaaaaaaaaaaaaaaaaaaaaaaaaaaaaaaaaaaaaaaaaaaaaaaaaaaaaaaaaaaaaaaaaaaaaaaaaaaaggggggggcctttttaaggaaccaaattttacttcccggggctggcaaaataaaaattttttttaggggcccccaaattaaaattccggggcggtggttaaaaaacttggagcggggaaaacccctgggttacccaaaataatgcccttggggcaaatcccccttttgccaggtggggaaattaaaaaaaaggcccccccgatccccctttcaaaaaagtgccccaccctaatgggaaaagggaccccccctttaccggggcaataaaccgcggggggtgggggggtttccccccaggtggccccttacattggacggcgcctaagcccccgttcttttggttttttttccttttttttttttg

SEQ ID NO: 143667 - DNA, 670 bp, Zea mays
  Clone ID: MRT4577_6249C.1
cccgggtagcgagcggtgcggtccttagttgcgttgggttggattcgattgggctgcgtctgctgagtgataatcttgtcttcacaatagcatcttccaaattatacaacaactcctcttctgccactttaaaaaggctgctgaggacatccatcaacaggacaaagagcattggagaaagggcccccccttgccttaatcctctgtgatgtctgatctggtcaattggaaacccatttattaatacttgagttgatgaggtggctagaagactagatataagatccctccatctattaccaaagccaagatgggacaacacctcaaggagaaaggcccaggaaactgaatcaaatgcttttgttatatccgatttcagaaaaggctagccacttttttcctatgtagtgacttgatagactgttggagcagcatatagttataatggatggatcttcctctgacaaaagcacgcactctggttagcttccaccaacttgttgagaagaggtgctagtctattggcaaggagatttgtggtaagtttagcaaagctgtgaatgagactgatgggtctgtaatcaccagctgtcatggcatttgttttcttggggatcaaagtaagataagctgtgttcagtagccaaaaaaaaaaaaaaaaaggcggccg

SEQ ID NO: 143668 - DNA, 387 bp, Zea mays
  Clone ID: MRT4577_624C.1
attcggctcgaggagtgaggacaaggtctctttctatcccttatgcagatttccagtagggggcttgttatacagcatttgaggatgatgaagagaaatactcatcagagaatgactgccgtgtggatgtagcaggacctgacctgtgcccccctgaggggaaactccctgatgctggcacaagttcacccgctgaccacttgatggaggtcttctacagaacggggctcaatgacaaggaaagcgttgccttgcctggaacacatacacctggcaggcccaggcccgaactgatcggctgctggattccctagaccaattatactacaagtggctctggtgcacctggggggcactcctggacagatcaaaggctgaggattgcta

SEQ ID NO: 143669 - DNA, 582 bp, Zea mays
  Clone ID: MRT4577_62500C.1
ctgctgcaagatactaacggaactccactcctcccctctgctggaatctgctggccgctgtctatcctggatcataaactatgctgccatcgatggcatgtttgctgatagacatctcttgaacacaagcagctgacccataggtcactgcagctcaatcaccaattgctgagctgctgactgatcctgccgccagagcataccataccatttgtccctgcctcgctgacgctgcctcctatgtcgttctgtttcgtccagccccaagaatgacagtcacaccaatcccggcctttactatcaccgagctagcccagatcaccaacaactgatgtccacgatgacatctacttgcactccttatgtatacccaaccatacggatcacttattcctgctgtcccacgtaccccgtcaccactgcctccagttccactactgtgccatacatgtaccactagcgattccaaaaatcttccctaccattcccgctactccgagagacctcccttcgctggcccatccccacaaactactcgagacttgaagtcgatgtagcaggagacttttctttacatgctgt

SEQ ID NO: 143670 - DNA, 332 bp, Zea mays
  unsure (1)..(332): unsure at all n locations
  Clone ID: MRT4577_62501C.1
cgggcgcggacgcgtgcgcggacgccaacgacaaacaagttcgacacatcaccgcaacgccgaggccaagaggcggcnggggggacaagggcgagccgccccccccgcacccaaggccaccccaccacgggacgccgccgccgccagggccggcggacgaagcaccagagccaacgaccggccaaacgggccggacccggcaaagcaccaggcccccccgaccgcccaaacgccctcggacccgaccggggagagcccccgagacaacagacgggacaccgcccggccgaccacggacgcgacagcgcccgcccggaacacgaccccgaaac

SEQ ID NO: 143671 - DNA, 202 bp, Zea mays
  Clone ID: MRT4577_62502C.1
ttatttttttttaagaaaaatacacgctatatttatatggggcaccgacaggtaagagtccaatgaccatattcaccaagctcttctaccaaaataaaaacttttgtgttgcacttttaaattaggaaaatgtactcccctcgactggactgtatataagttttgtgcttacagttacagtgacagaagtgcccctggacta

SEQ ID NO: 143672 - DNA, 546 bp, Zea mays
  Clone ID: MRT4577_62503C.1
ttttttttttttttttttttttttttttttttttttttttttttttttttttttttttttttttttttttttttttttttttttttttttttttttttccggacccggggggcaacccggaaatcccggaccggacccggaaggggaacaagttttcccaaaagggaggcgaataaaagctgggggaaaaaagggaaaaagcggtttccgggggaaaatggtaatccgctaaaaattccaaaaaaaaaaaaagccggaagaaaaaagggaaaagccgggggggccaaaaaagggagcaaaccaaaataaatgggggggccccaactgcccgttttcaaggggaaaaaccgggggggccagctgaataaaaaaatcggccaacccccgggaaaagggggtttgggaattgggccccaggggggttttttttttccccagggaaacgggaaaaagttgattgcccttaaccgccgggccctgaaaaagttgaagaaagcggcccacgctggttggccccagcaggcaaaaatcctgttggaggggggt

SEQ ID NO: 143673 - DNA, 328 bp, Zea mays
  Clone ID: MRT4577_62504C.1
gtgatatgctgcgtgtgcagtctcgcatacgtgagctcagattcggctgaggagtacccaatttgttaatagccagaaaccacagtggctcttcactaggcatttagaacatgggtatcatccaagactactctaccctgcaacattgaactcccaagagcaaatccacattcctcttgagttctgcagcttctgtgtaaatagggcagctgccgtctatgccgtagaatcacatgatctgaggaccattcatggaagctgctaaatagcctagtctggcgagtcttccataaagattcgcatggagcagacaaacaggattaaacta

SEQ ID NO: 143674 - DNA, 169 bp, Zea mays
  Clone ID: MRT4577_62505C.1
tctatctacaaattctatttgttcaatagacctttgttaggggggatacaatgttattagatctaaaaaggaaataaaataggacttttgttagattgccaccacataaatgcagcagaaaaaaaatgggctaataaagagcaaggggcgtctaaataagtaaggggtg

SEQ ID NO: 143675 - DNA, 673 bp, Zea mays
  Clone ID: MRT4577_62506C.1
ttttttttttttttttttttttttttttttttttttttttttttttttttttttttttttttttttttttttttttttaaaaaaaaccccccccaagcaatttttattttatggggggcccccccaggaacaaaaaaaaccgggacctccaaaccaaaaaggggggggccccaaaccccccccaccccattgggtttttgggggggcacaaaaaaaaggggttttaaaattccccccccaaccggggggccccaaaaaaaaatgggctttggggccccccaacaagcaaaaaaaacttttggaattaattttttaaagggaacccctgaacaggaaaacaccttcccctttttttttatccccctccctggggaaaaactcggggttttggaccccctcaaaaaaggggtgggcttttttgaaaaccggggagtcttttccagggggaaaaggggggttgacccaacccaaaaggggttccccccccaaaaattttccggggaaaagggttttaaaaaaaaaggggaccttttttaaggcctgggggttgcccttggtgccaaaaaccctgggggtttaaaccaaaaggggtggggcccccttttttggcaaaaaaacggaaagggactttttttttttaaccaccttctttggaaaccccttgcccccccgt

SEQ ID NO: 143676 - DNA, 725 bp, Zea mays
  Clone ID: MRT4577_62507C.1
gcacgaggacgacgctcgtacgtggtctcccactgcacccagtccactcgcagtcgcagctagtccggtccccggtccgacctatcccagtgacaccatctatcgtcggtcggggacgatgaggccggccgcgctcttcctcgccgcggtgctggccagcgtcgtcctcctcctcgccgccggccgcgccgcgggcgacttctcggccctggcgccgtgcgatgtgacgcagctgaccccctgcgcgagcgcgttcgcggggaaggcgtcgcccacggccgcctgctgcgccaagctcctgtcccacgggcccggctgcctgtgccggtacaaggacgacgccagcctgaagcgcctcgtcgacgccaggcacaagcgcagggtgttcaccgcgtgcaaggtgcccgtcccgagttgctagccgtactcctagtcctccaagctcatccgtcggccgtcggcgcaagcagccacgcacggcgaagaaataagatggacggaggagagaggggaattgttcgccgtggtatgtggtgtccggccaaggatttggctggttagatttgttcgcttcttcactgtctcgcacaaaaaaccagctcgtgggaggtagtgtgtttgtgttggattgcgttagttcgaagttcgaactcatgtcgccaattttccatgcattgcgaaataaaaatcaccacaccatcgtcgctaaaaaaaaaaaaaaaaaa

SEQ ID NO: 143677 - DNA, 875 bp, Zea mays
  Clone ID: MRT4577_62508C.1
gcccacgcgtccgcgcatggtcacttactaacaagctgatttgcacaacatataacttctatctggaacaggtatgctttctccggtaagcaaaatataacatgccttttccatattcacaacaaaaatacacaggttcattttttttccatcgtgtcccctaactgggaaaaaataagaaaaggtacaagccatcgcctatgttttattgaacaccatgtatatgtccacgcatatatgaccatgttctacaggttggtttacattgtatatgaccatgttatgttgcatggcagatatgtgaacaccaaaaggggatgcaactgcgaactgtgagaaattttccacatactacgctcacattgtctggggcaatgggatatcatactcatacagtaatactgctgcctgtcgatcttaacaaatttcattcaagaactagggcatgctaatgttcaaaagagttgtcagcgattcatgacacctggtagcactacaaccagcaatgtatggatgaattgaaggaagtaaagaaggcagacaatcttacagaaactttacagaaactctgcatcttgaaactgccatgattgacaaagaagctggatgcatcatgtgcattggtgtcttcttatcaccatgcattaatgtgaagcaagttcatttgttgactaagaatggatgaacacaaatcagtggagttcgttgcactagagatggaggttggagaggtgtggtaggtgtcaatatggctttgatacaattttgccctacaatctttgtacggaacaagaaaaatgacattgtacgtggatactatattgtaattcaataattttttctaaataataaatatatttgtttatagtttgtgt

SEQ ID NO: 143678 - DNA, 252 bp, Zea mays
  Clone ID: MRT4577_62509C.1
ctcaagtcatccagggttcgatccctgagcctggttgcaatttttttttgctgcggacggacaaataacggacgggggagggcagaacggggtggcagcctaccccttacattcttcatagtagtagagatataaagcactgaatattcataaatgcaaacatgaaagcgtataaccttgcattttattatttgagaatgtaatcatgttttgaacaataaatctctacaagttggtgtttccaaactccca

SEQ ID NO: 143679 - DNA, 190 bp, Zea mays
  Clone ID: MRT4577_6250C.1
cgggtcggaccagttcgacgggcgcgacccgtggaaggagcgcgccatggtgttctattataaaccgcttctactaatgtgtcagcctggggtcgatgatcgaggaaaccgtgctgaagtacgtgatggataacgttttgtggaactgtggttacattacctttaaagatgagtttaaaaagctcaagga

SEQ ID NO: 143680 - DNA, 323 bp, Zea mays
  Clone ID: MRT4577_62510C.1
aagcacagcacagtaccgtcccagccatggctgacaaaatgcctcgtcatgctacgcggcctggccgcaagggctgcgccggtaaccataccatcacaacgcacagatgctacgatagcatagcttcctttcttgcaccgcacatcaaaccagccgtggctacgggaaaacccaacccaacaaccctacccgacccgacccgccatgccagcacagatggcaccttaaccacactagcctcgccaacactactcagacctatcacagcacataccttacctgcagtgaatggatcggcacatcacatcacagcacctccacca

SEQ ID NO: 143681 - DNA, 3388 bp, Zea mays
  Clone ID: MRT4577_62511C.1
ggaagggaaaaggggagcaggcaccgtcgtctccgctcagctgcgacatcgttgacgtcggctacagcgaccatggtggcagccattcctctgtgtccgcacctcccccgtttgctttgtcgtcgtctctccgattgccataggtacgaacaatctttttcaccgtaacttcacagatctgcgtcccctcagtgttagggttgtcttccagcctgccgcaatgtgcgctcccataccattactacacatcgagtagcaatcgccttcctcgcatttttccatcgctcgctccccctgtaatgtagagtttgcttaggtattgcccaacccgcaggacggacaggccacaccatcatactatgaatcttctcctcgtcaaaaaagctaagtcacatcagagcagatagcagccacatatacgttgtggatcggtcgcctgctccatgtcctcccccttgcttttacggaattgaggataagttcttggttttgctgcgcaggagtattactacagtctaagccaggaatgcaggtcctgatgaatctgtggaacctgtggttcctattttagtgtggggtagcagagtcttgattactgggttccaagctaaattactgtgtccgaagcttgattactgtgttcgatgctgaatcctgttagatctagattcgaaattgcagagtcccagagtctcgattacttggttatctacaatactattgatccttggttccgtagtcagtttttgttatttaaaactaaatatcccgtggagcctgattagagattagaattactcttatttattctgttatattcatgccattgttccattataaatggtctaatttattggaagttgtttttggctgattgcgctacaggctgaccttgctttggttagcaaattcacttgctaagtttgtactatgttcactctaattacgttatggtggtgttgaccggtgagacaactaaggcaacacatattgtttactttgtttcgtagttaatttttaaattaaaaccaagtatccgttataaatggtctggtttataaatgctatctattttcccaaaaaaaatatttttgggtgactacgctacagcttgatcctgctttgattagtagattcacttgctaagtttattctatgttcactctcattacgttatggtgagatgttgacataatgacatgtgaccacaattatggcagcacatattgtttcagttactaaagtaccaactgctgatacatagggatcttaaataggaaaaaacaattacacatggtttcttaggcatgtcatcaagttataaacttttccccaaaaaatgtttatgtacattactttgcaattgctaacctgttgtgcatttgattttgcaatcgtaaccatcgcgctatccaaatatacctccaatcaacaggatcgagctacgcaaattgctcctacattctcacatacacttaggggtgacaatgggctctaaattttaaactataatatttaaggttctgatcggattaggatcaggctctatttctattcatttttgaactagatttttatttagggagctaagaaattatgaagaaacatttggatcgcgatccattaccacccctttatacactccattgtaagcatacctgtccatgccttatttacattacttgtttacgcacagcagttagttttctattatttgcacccctcctcagcctacatgccacaaatctcatttgtttcttactgttttcgcatggtcacttactaacaagctgatttgcacaacatataacttctatctggaacaggtatgctttctccggtaagcaaaatataacatgccttttccatattcacaacaaaaatacacaggttcattttttttccatcgtgtcccctaactgggaaaaaataagaaaaggtacaagccatcgcccatgttttattgaacaccatgtatatgtccacgcatatatgaccatgttctacaggttggtttacattgtatatgaccatgttatgttgcatggcagatatgtgaacaccaaaaggggatgcaactgcgaactgtgagaaattttccacatactacgctcacattgtctggggcaatgggtgagtgattttgttatgttctacaactatttatcttaatgttgttcaacaaaccatttagttagtcaccactgattgtcacaatgatataaaagttcattgtcagttggtttctatgtaagtgtgggcttcaactcgttatgataaaaatctcaaccttaactgttgtcatggttcatctttctccaaattatgttggctttgaatggagtgcatgggatctgtctgttcttaatttgtgcaatgagatggatgttgaattgtgtagtaacctttgtttaattctagtgccctggctagcttgaaataaatttatactgttatctagttcgattccttaaagctagcagtagtggtcactagcccttgaaaataaattttggacaaccagaatttcgtagcagctttgactactattgacgttgatctttttactattgtagattgtcattgatgtaaatgttattagtggcactttaagacgactaaggatcgatatctatcataagatttgtcttttctttataagtgaggagattgtgtgaagttctaacctatgatatatggtccagatctttgatgagtaccttaacttgcaggatatcatactcatacagtaatactgctgcctgtcgatcttaacaaatttcattcaagaactagggcatgctaatgttcaaaagagttgtcagcgattcatgacacctggtatttattatatcttcttttgtagagggctagtgtggtctgcttagcagttggtaattttgctattgaaagattaatctattactgtaaacttggtgacttaggtagacatctgatttatacttaatctaattgtttctctatgtgaatggatacatataataactcaggtagcactacaaccagcaatgtatggatgaattgaaggaagtaaagaaggcagacaatcttacagaaactttacagaaactctgcatcttgaaactgccatgattgacaaagaagctggatgcatcatgtgcattggtgtcttcttatcaccatgcattaatgtgaagcaagttcatttgttgactaagaatggatgaacacaaatcagtggagttcgttgcactagagatggaggttggagaggtgtggtaggtgtcaatatggctttgatacaattttgccctacaatctttgtacggaacaagaaaaatgacattgtacgtggatactatattgtaattcaataattttttctaaataataaatatatttgttt

SEQ ID NO: 143682 - DNA, 1434 bp, Zea mays
  Clone ID: MRT4577_62512C.1
ccctaggtgatttttcttctctatgaaactggggataatgactgcgttgacaaactggagataacctcaacttcaagtatcaggaccctggtagactataagtacgaccgaagatcgagctccctacatccaattgaggaagagaagaggcgataagcacactaatggctgacgagtcatggagggtgccaaccccagtgcaagaactggccgcaggcgtggtggagccaccgacccagttcgtgctgcaggagcaggatcgtcctggatctgggaccctgctcttcgccactgacatgccggagcccattcccgtcgttgacctcatcatgcagtgcgaaccaaccaacagcatcgtctgcattgtgcaggttactaagcatgggatagaagcatctctcatggacgatgtgatggccgcgtcacgcgattttttctaccagccgctcgaagcgaagcaggaatacagtaacctgataggcggcaagcggttccagatggagggttatggtaatgacatggtgaaatccaaagatcagatactggactggcaagatcggctgcagctcagggtggaaccccaagatgagaggaacctcgcttattggcccaaacaccctgattctttcaggtatctcactcgcttactcgtttcttccctcaaatatccattaattcgtgagatcttctggagaagtatgcatcaaaaaccaagatagttaggaacaaagtcttacgggcgatgggcaaaacattggagcttggcgaagactatttcatcagccagattggtgacagggcctcagcaattgctaggttcaactactaccctccctgtccaaggcctgatcttgtctttggcattaagcctcactctgacggtggcgcggtgacgatacttctcgtcgacaaggatgttgggggcctgcaagttcagaaagatggcgtttggtacactgttccgtccatgcctcacacgctgcttgtcaacttgggtgactccatggagataatgaacaatgggatcttcaaaagtccggtgcacagggttgtgacgaatgcagagaaagagagactctcactcgccatgttctacggcgtggaaggccagagagtgcttgagccagcgcttggtttgctgggtgaggagcgaccagcacggtacaggaaaattatggcctcagactacattattgggctccgtcaaggaattgcggaaggacagagatttatcgagactttgaagatatagtcaatcgtgaatgctcaagaataataaagagttgcttcgcccattgctaaatcagatcagagtccaatgtccattctgtaatgcattaccacattgttatacatgctcggaagacttcagagaagatgtaatcctgctcgttttactaaatttggggcattaataaatgatttaataaaaac

SEQ ID NO: 143683 - DNA, 176 bp, Zea mays
  Clone ID: MRT4577_62513C.1
agacattagctgctggacacggaatttatttataccgtaccatatataatatacaaaggggtcattagatcaccccatgtgagcggccgacacatgtaacatcccctacagttgtggaatcaactacaccagaaacactgaggaccgaccaagatctgaatcaatggagggcagca

SEQ ID NO: 143684 - DNA, 251 bp, Zea mays
  Clone ID: MRT4577_62514C.1
ggccgtgggattgaccctagcaacatagaacacaatatgccaactggcgcatattgttcttactcttggtctttctgaggtgtaccgaccatttcactgtacgctctatgcttcttttcccataccttaccacggtttaatgggaaaaccaatgtaaccctcagccaacaggcaaccacagattaccatatacctgtctcaaccgagctatacgagtcctggcattgggccaacatagccacactcacact

SEQ ID NO: 143685 - DNA, 906 bp, Zea mays
  unsure (1)..(906): unsure at all n locations
  Clone ID: MRT4577_62515C.1
ccctaggtgatttttcttctctatgaaactggggataatgactgcgttgacaaactggagataacctcaacttcaagtatcaggaccctggtagactataagtacgaccgaagatcgagctccctacatccaattgaggaagagaagaggcgataagcacactaatggctgacgagtcatggagggtgccaaccccagtgcaagaactggccgcaggcgtggtggagccaccgacccagttcgtgctgcaggagcaggatcgtcctggatctgggaccctgctcttcgccactgacatgccggagcccattcccgtcgttgacctcagcaggctggcggctgccgacgaggcttccaagctccggtcagcactggagacctgggggctcttcctggttactaagcatgggatagaagcatctctcatggacgatgtgatggccgcgtcacgcgattttttctaccagccgctcgaagcgaagcaggaatacagtaacctgataggcggcaagcggttccagatggagggttatggtaatgacatggtgaaatccaaagatcagatactggactggcaagatcggctgcagctcagggtggaaccccaagatgagaggaacctcgcttattggcccaaacaccctgattctttcagggatcttctggagaagtatgcatcaaaaaccaagatagttaggaacaaagtcttacgggcgatgggcaaaacattggagcttggcgaagactatttcatcagccagattggtgacagggcctcagcaattgctaggttcaactactaccctccctgtccaagggcctgatcttgtctttggcattaagcctcactctgacnngtggcgcggtgacgatacttctcgtcgacaaggatggtgggggcctgca

SEQ ID NO: 143686 - DNA, 221 bp, Zea mays
  Clone ID: MRT4577_62516C.1
tttaataactactaccagcgagctgcagcgaagagaaggatatccatcaccaagtaggggacgttatcaaacgacatgacatgtccctgggcgggcgctactcctctgggatcacgctccaccaacttgcctggtggactcgccatgctctctacgtctagactcttgaggcgcccacgagcgccgtccgtggggtgcttcttggttatccctaactttga

SEQ ID NO: 143687 - DNA, 192 bp, Zea mays
  Clone ID: MRT4577_62517C.1
ttttataacagcaacagcagatagtcccaagcatatagagacaacacttaccagggctaaatttgaagagctatactcagatcaccttgacaggctgaggacacctgtggacaatacccttagagatgcaaagttgcaattcaaagatatagatgaggttattcttgtaggtagctcaacaagaataccagc

SEQ ID NO: 143688 - DNA, 500 bp, Zea mays
  Clone ID: MRT4577_62518C.1
ccggccgggcagaacaaaaactcctcctacttcgtggagtggatccccaacaacgtcaagtccagcgtgtgcgacatcccgcccgtcgggctgtccatgtcttccaccttcgtgggcaactccacctccatccaggagatgttccgccgcgtgagcgagcagttcacggccatgttcaggcgcaaggccttcctgcattggtacaccagcgaggacggcgaggaggagcacgcctgatcgatgcaacgggcttcagagtcttcgctgctgtggtaacatcaattggaactataagttcctacaatcctatactacctaccttaagcatatgtattcatgcacttctgtatttccgttgctgctgctagcttgtgtgtgtgtgtatctacaatcgtgtgtgttagtgttttgtgatatgttgtccccgttgtccaggatttgtgcgtatgattattcatatgatgggattaattgcgaaaaaaaaaaaaaaaaaagcggcc

SEQ ID NO: 143689 - DNA, 630 bp, Zea mays
  Clone ID: MRT4577_62519C.1
aagaactcctcctacttcgtggagtggatccctaacaacgtcaagtccagcgtgtgcgacatcccgcccgtcgggctgtccatgtcctccaccttcgtgggcaactccacctccatccaggagatgttccgccgcgtgagcgagcagttcacggccatgttcaggcgcaaggccttcctgcattggtacaccagcgagggcatggacgagatggagttcaccgaagccgagagtaacatgaacgacctcgtcgccgaataccagcagtaccaagacgccacagccgaggagtacgacgaggaagagcaggacggcgaggaggagcacgcctgatcgatgcaacgggattcagagtcttcgctgctgtggtacatcaattgggactataagttcctacaatcctatactaccttaagcatatgtattcatgcacttccgtatttccgttgctgctgctagcttgtgtgtgtgtgtgtgtatctacaatcgtgtatgttagtgttttgtgaacttgtgatatgttgtccccgttgtccaggatttgtgcgtatgattattcatatgatgggattaattgcttgctctcaaaaaaaaaaaaaaaaaaaaaaaaaaaaaaaaaaaaaagctgtg

SEQ ID NO: 143690 - DNA, 708 bp, Zea mays
  unsure (1)..(708): unsure at all n locations
  Clone ID: MRT4577_6251C.1
gcagnattggtacaagttttcttgaatcaaagnagacctcagctgagtcccacactggagaactaatctttgagtatgtggatagttgtattgagaaagtaggcgttgaaaagtggtgcaaatagtcacagataatgcttcaaataacatggcagcgaaaaattgttgtctgtgaagaggccaaacatattttggagctcatgtgcaactcacactttgaacttaatgcttgaaggcattggaaagctgaagaggtttaagagcacacttgaccgtgcaaaggcactaaccatatttatttatgcacatcataatactttgtctttgatgagaaagtacacaaagaagagagacattgttaggccaggtgtgaccagatttgcttcctcttttctcaccttgcaaagcttatatgagaagaagaatgaactaagggcaatgtctcaaagtgatgagtgggagaaaattagccatgttaaaaagagccccaaaggtgtgcaagccactgctactttgactaaacctacattctggggtggtgttgctctttgtttgagggtatttgagccattggtcaaagtactctgtttggttgatggggatgttaagccatcaatggcttttctttatggggacattctaaaggccaagaaagaaatattgacaggcttaggaaatgttgataaggctgccactcaaaatctctac

SEQ ID NO: 143691 - DNA, 1745 bp, Zea mays
  Clone ID: MRT4577_62520C.1
ctcgaggccggccgggccgggctacccgcttcgcttctccctcggcctcgctcgatcgctcccacgccctcgcgcccccctccacaaaccaccaccacccaagaccgcagcgcagggcgcgagagggatcggcaggtcgggcaagatgagggagatcctgcacatccaaggcggccagtgcggcaaccagatcggcgccaagttctgggaggtcatctgcggcgagcacggcgtcgactccacgggatgctactcgggtgtctccccgcagcagctcgagcggatcaacgtctactacaacgaggccgggggcggccgctacgtgccccgcgccgtgctcatggacctggagcccggcaccatggagtccatccgcgctggccccttcggcggcatcttccgccccgacaacttcgtctacggccagtccggcgccgggaacaactgggccaagggccactacaccgagggcgccgagctcatcgactccgtcctcgacgtcgtgcgcaaggaggccgagaactgcgactgcctccaagggttccaagtatgccactccctgggtggcggcactggttctggcatgggcacgctgctcatctccaagatccgggaggagtacccagaccgcatgatgctgaccttctccgtgttcccgtcgcccaaggtgtccgacaccgtcgtggagccctacaacgcgaccctgtccgtgcaccagctggtggagaacgccgacgagtgcatggtccttgacaacgaggcgctctatgatatttgcttccgcaccctcaagctcaccaacccttcatttggcgacctgaaccatctgatctcggcgaccatgagcggcgtgacgtgctgcctgcggttcccgggccagctgaactcggacctccgcaagctggcggtgaacctgatcccgttcccgcggctgcacttcttcatggtggggttcgcgccgctgacgtcgcgcgggtcgcagcagtaccgcgcgctgacggtgccggagctgacgcagcagatgtgggacgccaagaacatgatgtgcgcggcggacccgcggcacgggcggtacctgacggcgtccgccatgttccggggcaagatgagcaccaaggaggtggacgagcagatgatcaacgtgcagaacaagaactcctcctacttcgtggagtggatccccaacaacgtcaagtccagcgtgtgcgacatcccgcccgtcgggctgtccatgtcttccaccttcgtgggcaactccacctccatccaggagatgttccgccgcgtgagcgagcagttcacggccatgttcaggcgcaaggccttcctgcattggtacaccagcgagggcatggacgagatggagttcaccgaagccgagagcaacatgaacgacctcgtcgccgagtaccagcagtaccaagacgccacagccgaggagtacgacgaggaagagcaggacggcgaggaggagcacgcctgatcgatgcaacgggcttcagagtcttcgctgctgtggtacatcaattggaactataagttcctacaatcctatactacctaccttaagcatatgtattcatgcacttctgtatttccgttgctgctgctagcttgtgtgtgtgtgtatctacaatcgtgtgtgttagtgttttgtgatatgttgtccccgttgtccaggatttgtgcgtatgattattcatatgatgggattaattgccaaaaaaaaaaaaaaaaaagcggcc

SEQ ID NO: 143692 - DNA, 1911 bp, Zea mays
  Clone ID: MRT4577_62521C.1
tcgagccggcgggacgccgggacctccacttcgtctctccccgtcccttcccgtctggacgagtccccacgactttggcggcgaaactccaccgccgtcgcctccgatggcgatgctctgcaggaccacgcgcgtcctccgcaaggtgtgcgaactgggacccgcggcggcggcgcgacggctctccgccgctgaagccttcgccgcgtgtgagggctcactcctgcgccctctacccgggctggacctcccgccgtgcctccctgacaacctgagccgcagccccacccggatcaccacgctccctaacggcctcagagtcgccaccgaggacgtcccgggtccttctgcgtgcatcggtttcttcgtcgactccggctccatctacgagtccggggagaccaccggcgtatcgcacctgctggagaggatggccttcaaggacaccaagcaccggagccacctcaacatagtgagcgagctcgagcttgccgggggcaacgtcggcgcttcagcctccagggagcagatggtctacagctatgacacgctcaagggatacatgccagaggctctcgagatcctcatcgactgcatgcgcaacccgctcttcctccaggaagaagtcgaacggcagctggttcttgctcgagaagaagtaaaggagctacaaaagaaccctgagaagtttcttcatgaacagcttaaccttgttggatattcgggtgctcttgcaaatccgctaatagctcctgaggatgcccttgctagaatcaatgacaaaattattcaaaagttctatcatgaaaattttactgctgatcgcgtggttctagcagcatcaggtgttgatcacgaacacttgctaggctatgcagatttgttgttgaaagattggcacaaggggaccccaatggaaaagccaaagtctacatatgttggtggagattccagacacagagcagattcagatatgacacatgttgcattagcttttgaagtgccagggggctggcttcaagagagagacgctacaattatgactgtcatacagactttaatgggtggtggtggttcattctcatctggcggtcctggaaaaggaatgcattcacggctttatcgacgtgtcctaaataaatatcacttggttgattctttttctgcatttaacaatgtatatgacagcagtggcctctttggtatctacttgaccacgccatcagattttgtggcaaaggctgtcgacatcgcagtaagtgaattaattgctgtcgcaactcctggagaagtgacagaggttgaactgcaacgagcaaaaaattcaacgatttcatctgtattaatgaatcttgaatctagggtagttgttgccgaagatattggaaggcagctgttatcttatggttgcaggaagcctattgactacttccttcaatgtatggaagaaattactctagatgatgttgcaacatttgccaggaagatgctagctacgcaacccacaatggctagctggggaaatgttgacaaagttcccccatatgaatttatttgcaagcggctacaatagtacccctacacaatgacctctggactctggtggtcttgaaggatcctttcgtggaaaactaaacaatcacttgtatgaagtgccctagcttagaaactgcttttctttcagacatgcagtttagtgagtttaggatttcaacagctatgttcaattgtaactgttcaagcaacacatagtaaatgagaggctgatgaatggcaaatatcaacagtttctccatggcccattagcattttattgtcatgttcagtgtttttatgtacattttctgcgattatggatagcaggagtattctgttgcccttaaaaaaaaaaaaaaaaaaaaaaaagcggcc

SEQ ID NO: 143693 - DNA, 1863 bp, Zea mays
  Clone ID: MRT4577_62522C.1
cattgggtacctcgaggccggccgggtgacttcaaaagtgtcacgggggatatgtgattgatacccgcaataggtattttcttatgtgatattggaccacacattgcccttttcttatgtgagagaacaaatttaggttgtctctatttggtttgtgcacaggtttactatgattgtaacattcaggtgcccttagtctcactaattttcttaacttgctgtaatcaggcttccaagtctgccattcccttggaggaggcactggatctggaatgggcacacttctcatttcaaagattagagaggagtaccctgatcggatgatgctgacattttctgtctttccctcgcccaaggtgtcagacactgttgttgagccatacaatgcaaccctgtctgtccatcagttggttgagaacgctgatgaatgcatggttcttgacaacgaagcactctatgacatttgcttccgaactctgaagctgacgactcctagctgtaagttgatttaagctcaaagtttaattttcctgttttcaaaatgtgttatttgcgatatacattgtcagaagatttatattcctattatggctttgccacaatatatttttgctcaataatttcattgagcttttatttattcgtattgttagcagattagatacacatggctgctgaaataataaaaaacaagctggcatttgatctgtactagatttcaaacaatgaatttgcttcttagtgtttacagaaatcatgttgtcatttagtatttttgaaatttttgaatacttttgacagtttgtttctgaacagttggagacttgaaccacttgatcagtgcaacgatgagcggtgtcacttgctgcctctgcttcctaggacagctgaactctgacctgcacaagcttgcagtcaacctgatctcgttccctcggctaaacttcttcatgatcggctttgcgccactcacctcgtgtggctcgcagcagtaccgtgtgctcaccgtctctgagctaacccagcagatgtgggatgccaagaacatgatgtgtgttgctgacccacgccatggtcgctgtctcacagcctctgccatgtttcgtggcaagatgagcactaaggaggttgatgagcaaatgattaatgtccagaacaagaactcgtcctactttgtggagtggatccccaacaacgtcaagtccagcgtgtgcgacatcccgcccgtcgggttgcccatggcctccaccttcgtgggcaactccacctccatccaggagatgttccgccgcgtgagcgagcagttcacggccatgttccggcgcaaggctttcttgcactggtacaccagcgagggcatggacgagatggagttcacagaggccgagagcaacatgaacgacctcgttgccgagtaccagcagtaccaggacgccaccgccgaggagtacgaagaggaagagcacgacggcgaggaggagcacgcctgatctggacgccaactcatcggtgcaaagcgtttcagtttcatcgctcctatggtacacaaatcgcgactacgtattcctacaatcctactaccttaagtatgtatattcatgtactgccgtattttccttactgctgttattagcttgtgtgtgtatctacagtcgtgtgtgttattgttttctgaaattgtgatatattgccaccgttgtccagattctgtgggtatgtttattcatataattggaatgctctctgttcttgtacgtatcccctccattgttttttgtttgtcacgttttagctgaaaaatgaacaagcaggccacaaatattgaacggagttagtaaatgttagaaatattcatttcatcgt

SEQ ID NO: 143694 - DNA, 373 bp, Zea mays
  Clone ID: MRT4577_62523C.1
ctaacgatagcaccaatcatgtctggtctttcttggacaataatggcgcctatcctggcgtggatctgctcatcgggctcgccgtgagctccgaggacgacgaggacggcggatgcaaaaagaagccccacgtcaaccaccgcaagtttaacgcggaaccgtggactgacggtcacgctacgtactactgctggcgcgacggattaactgacaccactgacgtgcgcgcgtgcggctacaaggtctagctggtgaaagactacgactccctgacggcgaccgtgggcccatagctgtacaccaacggcacctgttgcagcgcgtgctatgagctcaaggtccctaagggcaccgaagtagagacagtcaccaa

SEQ ID NO: 143695 - DNA, 1848 bp, Zea mays
  Clone ID: MRT4577_62524C.1
attgggtacctcgaggccggccgggacccgcttcggcttctccctcctcctcgctcgctcgatcgctcccacgtcctcgcctccctccacaaaccaccaccaccatccaggatcgcagcgcggcgcgcgagagaggggtgagcaggtcgggcaagatgagggagatcctgcacatccagggcggccagtgcggcaaccagatcggcgccaagttctgggaggtgatctgcggcgagcactgcgtcgactccacgggccgctactcggggacctcctcgcagcagctcgagctcgagcggatcaacgtctactacaacgaggctgggggtggccgctacgtgccccgcgccgtgctcatggacctggagcccggcaccatggaatccatccgcgccggccccttcggcggcatcttccgccccgacaacttcgtctacggccagtccggcgccgggaacaactgggccaagggccactacaccgagggcgccgagctcatcgactccgtccttgacgtcgtgcgcaaggaggccgagaactgcgactgcctccaagggttccaagtatgccactccctgggtggcggcactggttctggcatgggcacgctgctcatttccaagatccgggaggagtacccggaccgcatgatgctcaccttctccgtgttcccgtcgcccaaggtgtccgacaccgtcgtggagccctacaacgccacgctgtccgtgcaccagctcgtggagaacgccgacgagtgcatggtccttgacaacgaggcgctctatgatatttgcttccgcaccctcaagctcaccaacccttcatttggtgacctgaaccatctgatctcggcgacgatgagcggcgtgacatgctgcctgcggttcccgggccagctgaactcggacctccgcaagctggcggtgaacctgatcccgttcccgcggctgcacttcttcatggtggggttcgccccgctgacgtcccgcggctcgcagcagtaccgcgcgctgacggtgccggagctgacgcagcagatgtgggatgccaagaacatgatgtgcgcggcggacccgcgccacgggcggtacctgacagcgtccgccatgttccggggcaagatgagcaccaaggaggtggacgagcagatgatcaacgtgcagaacaagaactcctcctacttcgtggagtggatccccaacaacgtcaagtccagcgtgtgcgacatcccgcccgtcgggctgcccatggcctccaccttcgtgggcaactccacctccatccaggagatgttccgccgcgtgagcgagcagttcacggccatgttccggcgcaaggctttcttgcactggtacaccagcgagggcatggacgagatggagttcacagaggccgagagcaacatgaacgacctcgttgccgagtaccagcagtaccaggacgccaccgccgaggagtacgaagaggaagagcacgacggcgaggaggagcacgcctgatctggacgccaactcatcggtgcaaagcgtttcagtttcatcgctcctatggtacacaaatcgcgactacgtattcctacaatcctactaccttaagtatgtatattcatgtactgccgtatttgccttactgcttttattagcttgtgtgtgtatctacagtcgtgtgtgttagtgttttctgaaattgtgatatattgccaccgctgtccagattctgtgggtatgtttattcatataattggaatgctctctgttcttgtacgtatcccctccattgttttttgtttgtcagattttagctgaaaaatgaacaagcgggccgaaaaaaaaaaaaaaaaaagcggcc

SEQ ID NO: 143696 - DNA, 438 bp, Zea mays
  Clone ID: MRT4577_62525C.1
gacaaatccatacaaattaaagggttggaacaatgggcccagacccatacaaatggggagggacaaaaaacagttggttgtagcttataactttgacccaccgccatttattttcgtcctggtagacagaatgcttctcttataactgaaactgcatctccttcgtttaaccaaggccattcacgtgctcggacatggctttgttcatgggaggaggcccacatcgcaatgcctctaggagggcggcacgcgctatgcattgagcatggatcctttacttcggaacaaaacctaagcctgcttcccttactgaaagaggctgattcaagacctaatatttcttgaaacgatcgggatagtttttggccttgcaagaaatttctttctttaaaagaatttcctcataactgtcttttggataaaaaaaccgtactttct

SEQ ID NO: 143697 - DNA, 1758 bp, Zea mays
  Clone ID: MRT4577_62526C.1
cattgggtacctcgaggccgggccggggtcccacccgcttcggcctctccctcctcctcgctcgctcgatcgctcccacgtcctcgcctccctccacaaaccaccaccaccatccaggatcgcagcgcggcgcgcgagagaggggtgagcaggtcgggcaagatgagggagatcctgcacatccagggcggccagtgcggcaaccagatcggcgccaagttctgggaggtgatctgcggcgagcactgcgtcgactccacgggccgctactcggggacctcctcgcagcagctcgagctcgagcggatcaacgtctactacaacgaggctgggggtggccgctatgtgccccgcgccgtgctcatggacctggagcccggcaccatggaatccatccgcgccggccccttcggcggcatcttccgccccgacaactttgtctacggccagtccggcgccgggaacaactgggccaagggccactacaccgagggcgccgagctcatcgactccgtccttgacgtcgtgcgcaaggaggccgagaactgcgactgcctccaagggttccaagtatgccactccctgggtggcggcactggttctggcatgggcacgctgctcatttccaagatccgggaggagtacccggaccgcatgatgctcaccttctccgtgttcccgtcgcccaaggtgtccgacaccgtcgtggagccctacaacgccacgctgtccgtgcaccagctcgtggagaacgccgacgagtgcatggtccttgacaacgaggcgctctatgatatttgcttccgcaccctcaagctcaccaacccttcatttggtgacctgaaccatctgatctcggcgacgatgagcggcgtgacatgctgcctgcggttcccgggccagctgaactcggacctccgcaagctggcggtgaacctgatcccgttcccgcggctgcacttcttcatggtggggttcgcgccgctgacgtcgcgcgggtcgcagcagtaccgcgcgctgacggtgccggagctgacgcagcagatgtgggatgccaagaacatgatgtgcgcggcggacccgcggcacgggcggtacctgacggcgtccgccatgttccggggcaagatgagcaccaaggaggtggacgagcagatgatcaacgtgcagaacaagaactcctcctacttcgtggagtggatccctaacaacgtcaagtccagcgtgtgcgacatcccacccgtcgggctgtccatgtcctccaccttcgtgggcaactccacctccatccaggagatgttccgccgcgtgagcgagcagttcacggctatgttccggcgcaaggccttcctgcattggtacaccagcgagggcatggacgagatggagttcaccgaagccgagagcaacatgaacgacctcgtcgccgagtaccagcagtaccaagacgccacagccgaggagtacgacgaggaagagcaggacggcgaggaggagcacgcctgatcgatgcaacgggcttcagagtcttcgctgctgtggtacatcaattgggactataagttcctacaatcctatactacctacttttaagcatatgtattcatgcacttctgtatttccgttgctgctgctagcttgtgtgtgtgtgtatctacaatcgtgtgtgttagtgttttgtgaacgtgtgatatgttgtccccgttgtccaggatttgtgcgtatgattattcatatgatgggattaattgcttgccc

SEQ ID NO: 143698 - DNA, 451 bp, Zea mays
  Clone ID: MRT4577_62527C.1
attcggctcgagcccacccagaacattttctcggactcattccctaccgacgccaaacgacgcctcgcccgacccagggggtcggactcacagctcagccgatgaagactacgaacatgcgcatcgaccgaccccaagagtcgaactcagtgccgagctaaaccgacagccatcaggctgccgacccaagtgctcggacatcacctcgacctcggaagacagaggcgaccaacagctcggaggagcctccgcctcgccgtacccagggcattaaccaaccaccatacatgaggcaccaacaataccctaccgcaaactgactcacgctacggggaacacgaccggcgtcccatctggctcgccccggtaaacaagtaaagatggcgccccgcatgctctatgacgacgacggctctcagcccccttacggaagcaaggagacgtcagcaag

SEQ ID NO: 143699 - DNA, 996 bp, Zea mays
  Clone ID: MRT4577_62528C.1
cattgggtacctcgaggccggccggggtcccacccgcttcggcttctccctcctcctcgctcgctcgatcgctcccacgtcctcgcctccctccacaaaccaccaccaccaccaccatccaggatcgcagcgcggcgcgcgagagaggggtcagcaggtcggccaagatgagggagatcctgcacatccagggcggccagtgcggcaaccagatcggcgccaagttctgggaggtgatctgcggcgagcactgcgtcgactccacgggccgctactcggggacctcctcgcagcagctcgagctcgagcggatcaacgtctactacaacgaggctgggggtggccgctacgtgccccgcgccgtgctcatggacctggagcccggcaccatggaatccatccgcgccggccccttcggcggcatcttccgccccgacaacttcgtctacggccagtccggcgccgggaacaactgggccaagggccactacaccgagggcgccgagctcatcgactccgtcctcgacgtcgtgcgcaaggaggccgagaactgcgactgcctccaagggttccaagtatgccactccctgggtggcggcactggttctggcatgggcacgctgctcatctccaagatccgggaggagtacccggaccgcatgatgctcaccttctccgtgttcccgtcgcccaaggtgtccgacaccgtcgtggagccctacaacgccacgctgtccgtgcaccagctcgtggagaacgccgacgagtgcatggtccttgacaacgaggcgctctatgatatttgcttccgcaccctcaagctcaccaacccttcatttggtgacctgaaccatctgatctcggcgacgatgagcggcgtgacatgctgcctgcggttcccgggccagctgaactcggacctcccgcagctggcggtgaacctgatcccgttcccgcgctgacttccttcatggtggggttcgccccgctgacgtc

SEQ ID NO: 143700 - DNA, 239 bp, Zea mays
  Clone ID: MRT4577_62529C.1
ttttacgcctaagctcactactctgccaaggtaatctatgatgtgcgcaaggacatgctgttctacgactatggtcatcgcgatcgcctctctggacatcatgtctggcacagtaaaacacagctaccggaaattcattatgggtccagtaaacctgattccgcgtatgcagaacctagaggcgctgaacaaccagctgaacaaaggtgataactgcgacattaattgacacagccatg

SEQ ID NO: 143701 - DNA, 409 bp, Zea mays
  Clone ID: MRT4577_6252C.1
gaccgacgcgtccgaataagcacaccaagcaacacacactaccaacatcctaaccacaatcgctaccacaatgtgtagcattatatcactccttgcgctgcttgctaccccaacaaatacctccactaatccacaaatcttactacatcctacactcattattacacacatccttccaccagttacttcaatagccacttaacacccatctgaacaagcctatatgctacaacacacgataccactaagcctcttacaacacccaatacaccaattactacaacaattcttgccacatttaacaatacatatcatcctaccgcaacatcaacaacagcagctaccacaactgatccacttactcatcctgaaacctgtcgtctactttcaacactacttgcttcaatac

SEQ ID NO: 143702 - DNA, 789 bp, Zea mays
  Clone ID: MRT4577_62530C.1
gggtactttgagttcggcctgtagtcgttggcggggtctgcttcgtgtttcttactttgttctggaggaaaaaaaaagatccctaatcaggagacaaggatccacatgcaataaatcttctcttctgttctgttctggcaccttcttcccagatcaataggggcgaggcgacagcagcgaggagacgaaatcgtttaaaggcgccagcttgtcttctgttccatttgtggtttcatttcctctgcaaacgatttccattttttctgcacgccgtcagctgatccttttcgccgtagtatccccgagcaaaagagaaaacccttttttttgtgcgctgtgctgtttcgccatctctgttcgtcccaccgaggcaccgactcaatccccattcttggcatctggcttcacaaaacaagaccggttcccgttccctagatctctgcgtagaggcggcggcgaggcacctgaatccggcaaaaaagggttcgcggtttggttgggaggagcgcaggagcccggcgccaaaacccaatcttggcgcccgggctgccgtgcgccatcgtcttctccctgtggtgtttagggagaggagaaggccggtggagatggtgccgtgggaagggtacgtcagcgacgagacgatgggcaccttctcgcccatcgtgctctactggctgtacgccggcggctaccagctgatccttcaccgccggccgcttgagcggtacaggctccacacgcgggacgaggaggaggagaagaacctcggcagcctctccaccgtcgtcc

SEQ ID NO: 143703 - DNA, 471 bp, Zea mays
  Clone ID: MRT4577_62531C.1
gggttaaccaaattatttgttctgggatcgagccgggggacaggggggggcggggggggggccgggagggcgccgcgggtacaaaaggggggggggggaaggccaggcccgcaccgagcgtaaaacgaccccagggaagggacgggagggaccgcacccacaggcaaaaagaccccgggggggggcaaactcaacgcacaacaaacccaaaaaaaagggggactgggtaatagcaacgaaaagaaattcgcggacgaaagcctggacggcaggcggatttggaaaaaaagggccggaggcagcgggggcaggggcaaagccccgggtaacaggagaaaaggaatcgggccaaagggaacagccccgagtagataggccgaaacataaatttaaagagtgttctcaccccaaaaaaaagcgccagcacctcaaaaaaagaggtctctcaagcccctgaaaagggaacgcaat

SEQ ID NO: 143704 - DNA, 425 bp, Zea mays
  unsure (1)..(425): unsure at all n locations
  Clone ID: MRT4577_62532C.1
ccggggcgctacacgcccgtgccgcctcctcctcggactcgtctgcggtggacggaggagggccgcaagcccgcctgcaccgagtgccgcacgcccgcctgtggtggacggaggagctgcatcggcagttcgtcaaggccgtcgagtgcctcggtggccaggacgatctccctggcctctccggaagcaagaacgcctacctgctttaagcaaggagggggggctttgtgaaaagctcaaccggtcggacagtatgcctcagggtaaacccagcagataccgtgcataccgtgaagacaaagattcaggaacagcaataccttgtgtatgatggagtgcagctngaggacgatcgtacgctggctgactacggtatggaacataaatntgtgcttgacctttaataaaagatgcaaatatttata

SEQ ID NO: 143705 - DNA, 419 bp, Zea mays
  unsure (1)..(419): unsure at all n locations
  Clone ID: MRT4577_62533C.1
ctccgaccacagccgtcctccgccaggcacccaggccgcctccgcctccctcgccatcgccagtcgctcgccgccttgtcctgctccctcgcctctcctgctcggtgctcgccagtcgcccccgctccctggggcaaccgcgtcccttggctcacccgacgccgccggcccacggttggcctggccccctcccccctcgcctgctctgctgcggcgctgctcgcccgtcgccccgcttccctggctcactccctcttttcggtctctgtcacccttctcacggaggaacaaaggatcagaaatggctatgcaggccacaaggaggctagcgtctttgagcctccaacgacgcctactccttccctctcagaacgaaggcccaagatcccaaacgcggcggcggcggcttcctccantcc

SEQ ID NO: 143706 - DNA, 758 bp, Zea mays
  Clone ID: MRT4577_62534C.1
cgccgcgctcacgcccgtgccgcctcctcctcggactcgtctgcggtggacggaggagcgccgcaagcccgcctgcaccgagtgccgcacgcccgcctgtggtggacggaggagctgcatcggcagttcgtcaaggccgtcgagtgcctcggtggccaggacgatacttactacttgggacgagagatttgaacgtcgcgcgcggtggttataaaattgcattgttcccctgtccacctctttcacttcttcagatctccctggcctctccggaagcaagaacgcctacctgctttaagcaaggatgaagatctttgtgaaaagctcaaccggtcggacagtatgcctcagggtaaacccagcagataccgtgcataccgtgaagacaaagattcaggaacagcgataccttgtgtatgatggagtgcagctcgaggacgatcgtacgctggctgactacggtatcgaacataaatctgtgcttgacctcaaagaaaagatgcaaatctttatagtggaaacactagcagggacaaccatcactcttgagggtgaaaggtcagagactatcgacaacatcaaggaaaggattaaagaaagtgaggggctttcccaagggtcaggagggtctcatatttggacacaaggaggtagagacaacaggaccttgtgggacaacacatttccgaggggtctaccctcctccttggcctccggcacatgcttctcagaggcactatgcatatctccatatacat

SEQ ID NO: 143707 - DNA, 749 bp, Zea mays
  Clone ID: MRT4577_62535C.1
gaccctcgaggtcggccgggactttcagtaccactcctcctcctcctcccactacttacaatgggaaaagaaaagggtcacgttaacgtcgttgtcatcggacacgtcgattccggcaagtccaccaccaccggtcacttgatctacaagtgcggaggtatcgacaagcgtaccatcgagaagttcgagaaggaagccgccgagctcggaaagggttccttcaagtacgcctgggttcttgacaagctcaaggccgagcgtgagcgtggtatcaccatcgatatcgctctctggaagttcgagacccccaagtacatgatcaccgtcatcgatgcccccggtcaccgtgacttcatcaagaacatgatcactggtacttcccaagccgattgcgccatcctcatcatcgccgccggaaccggtgagttcgaggccggtatctcgaaggacggacaaacccgtgaacacgccctcctcgccttcaccctcggtgtccgtcaactcatcgtcgccatcaacaagatggacacggccaagtactccgaggctcgttacgaggagatcatccgtgaaacctccaacttcatcaagaaggtcggattcaaccccaagaacgttcccttcgttcccatctcgggatggcacggagacaacgtgctcgagcccaccaccaacatgggatggtacaagggatggaagaaggacaccaagggtggagaggtcaagggtatcaccctcctcgacgccat

SEQ ID NO: 143708 - DNA, 590 bp, Zea mays
  Clone ID: MRT4577_62536C.1
ggccgggaaaaaaaaatacaaaaaaaagaaaaaaaaaaaaaaaaaaataaaaaaaaaaaaaaaaaactccgtccctctctcccagctcaaataaatctttcccccgtcctccctcgccttcgccttcgccggaaggaaatttccaccaccaccgccggaccgccccgaccctcctcccctctcgggctatggcccaaactgttgggctcaaggttggaatgtcctgtgagggctgggttgaagctgtcaagcgggtcctgggaaaaatggaaggcgtcaagtcctacaacgaaaacatcatggaacaaaaggtcaccgggaagggaaatgggacacctgacgccgtcctgtaaattgtttccaagactggaaaaaaaacttcgttctgggaggctgaggccgtgacaagtgagtccgcaacacctgccggggccaccgcctgacagtttcaatgatctggaagggcccggcaaaaaaaatgtgaaggtatttagcttggccgagaaaaaataattgcaaactgctagctcggactgaacaacttacagatgaaattcgtgaaatgggaagaaccccaaggattgggaagg

SEQ ID NO: 143709 - DNA, 829 bp, Zea mays
  Clone ID: MRT4577_62537C.1
gtgacgcccttcgtggtgctgtcctgcgtcgtcgccggcagcggcggcgtcctcttcggatacgacctcggcatctccggtggtcttacctcaatggactgcttcctgaagagattcttcccaaagtgtaccgtcagaagcaggacagcaaagtgagccactactgcgagttcaacagcgagctcctcaccgtcttcacgtcctccctctatattgccggccttgttgcaactctggctgcagcaaccatcacaaggaggtatggccgtcgcacatcaatgctgatcggcggcagtgtcttcatcgcgggctcagtgttcggtggtgcagccaccaatattcccatgctcctaatgaacagattctactggggattggtctggggttcactaatcaggtaacttatacttgaatcagtactaaacagggcacatatatttagctcaaaacaccataaatcggttgagcagtactccctttgtcacacattataggtcaatttagttttgaaggaaacaaaggcctaggtatggtcaatctagcacattcaagtagagaagattttttaattgcttataacatgatatatagttcaagaaatcagcacaacagtttcatgctggatgaatgttgtaatatctagatattggaaattaaatgtattgtgcagtaagtctagcatgaactcagaaaatcctgtgtggctatgaaatcagtatcagacttgagatcaagtatttcattgagttggacttggtggttaaaaacaaaggcttcttgtggatgtcatttgttcagctcccaagttggctactagatcgctaaagtt

SEQ ID NO: 143710 - DNA, 273 bp, Zea mays
  Clone ID: MRT4577_62538C.1
gggcaccgaaataaaagacgggaattattggtaaacaagaccatgttatggtacaacctaacacagacaccaaatgtttaagggctttgggtgctaaacacaagattgttaccaatatgcacatctaattctgggggattatataagctagaccaagcctccgttttctttaattaagggtggatgcattcttacatttaaatatggggcgcgggggtttggacattttcttggctgtccaaaggcatgtactgggccatgatggggcggatt

SEQ ID NO: 143711 - DNA, 505 bp, Zea mays
  Clone ID: MRT4577_62539C.1
cgaacccccgggccagctcacccatccaaaactcccagggcgctactcttcgttgataaaaacacccctgcttcccttcctgcctgcacaccacatctcaatctttgctgcgagctcccgatctgtggtacttccggcatcgcgaactgaagtttaccaccgatccgttggctccttggcattccttttcctccagcagcggcaaagcctccatctttttgccaaccgacttgaggaatggggtgcatgaagctgcttggagtagacgcaagctttatggaagatttctagtacttcattcccaacaagcaatcagataaaaacaaaaggagcaacttcaacagaacctgcggctccagtgattggaccgaccgatatttgcaaactgctgaaattgaatccatgggtagaggaagaggaagagggaagaagctaaccactgtcaggagccacgaagataaaggtagcagcggcgaagaagttgtgctgcaaaaaagaggagggg

SEQ ID NO: 143712 - DNA, 481 bp, Zea mays
  unsure (1)..(481): unsure at all n locations
  Clone ID: MRT4577_6253C.1
ccgggcctccgcggtgcccgtcgacccgccgagcaccagcagcagcgtcgccggtggtggagctccaccgcctttgccgcgctccatctcttcaggaagtgccctgctccaccgcccacctgagtgcaaatccgtcagcattggactgttttactcatctataggatctgattttgggtgggcgcagttgcggagatgcagaggctgggggatttcaggctccctcccttcttcaactacccgccttacttcactttacagcctgtgcgtgagacgcggaaaaagcaagtgcagttatggaaggatctgatacttgattactgtanaagtcaaaagatacatacaatatntntagaagaagatttacccttgttctccaatgaaagattgaaagatctcttaaatacnaaaaaaaggaagatgaactagaaaatataganaaaaaaagacgaacaaaaaggatgaacaaaagaaaaaagaa

SEQ ID NO: 143713 - DNA, 171 bp, Zea mays
  Clone ID: MRT4577_62541C.1
gctgacgggcaaccgctcctcactggggcggcagcgatggtgcatgttaacatctaccactcctattgtaacaccctctatatgccgtggcgtgcgcccgataaggagcgcctagattactatatgtaccgcgtgtatgagtacttcctgaagtgcaagcgcaagtccttc

SEQ ID NO: 143714 - DNA, 480 bp, Zea mays
  Clone ID: MRT4577_62542C.1
ccggccgggccgggctctgcgcactccaccctactctccgccgtcgctgtcaacgccgcctgctgccgcagacgccatgggggggtacaactatgtgtcgcaactatggaggaggaagcagtctcacgtgatgcgcttcgtgcagcgcgtgcgctgctgggagtacaggcagtatacgtccatcgtccgcctcaccagggccacccgccccgacaggaccgtcgtctcggctacaaggacaagcaaggatatgttgcctaccgtgtctgcgtgaagcgtggtggcaggaagagggctgtgaccaaggatattgtctatgtcaagcaccaagataccagattatcacccagctcaagttcctcaggaactatacgactgtcactgactacagagctggacttcagcttggtgtactgagggatcttaactcctactgagtgaatgacgatagtacctacaagtactttgaaatcatccttg

SEQ ID NO: 143715 - DNA, 179 bp, Zea mays
  Clone ID: MRT4577_62543C.1
ggcaagcccatctctggttcctgatggaggcatcatcaatctaaattcaaaaagttactggttttagtttgtgccagatctggctatgacaatttctggtactcgatcttcagaactgcagcccagcactttcagattcaccttatttggtcggtatggggagctatgacataacaggg

SEQ ID NO: 143716 - DNA, 255 bp, Zea mays
  Clone ID: MRT4577_62544C.1
ttctttttttttttttttttttttttaacccatgaaatatttttttatttttttttttttttccccccccttttttggggggggaaaatgaaattcccccatttcataacccttgcaatttttggccaatgggccctacccaggggaaacttttcaaacaatatatgatccgggggacttcccccccaaccaccattagggtagggccccgttactaacgggttttaaggacacaaagaaatgggcccccaaaat

SEQ ID NO: 143717 - DNA, 430 bp, Zea mays
  Clone ID: MRT4577_62545C.1
cccaggcgtccgcccaaaagcagggcgacaaagcaagcaaaaaggagagcactagctccaaaaaggccaaaactgatggtcgggagggagaggaagcagtgaagtctgaggttgaggatgatgatgagcaggatggcaatgaggatgaaaatgagtaaatagtaggatggggaacagcagctttgcaattgggtgtttgcttcttgtttagcctccaatgtgctgttccttttgctgttatatatgctgtatgctgtaagaaaaatctgtacatgatggaaccttagggctatggcatgctggagtgcccgtttaactagaggagctggatactcttgccagccttgtcagcatgtgtaaactgttgtttttcttgttttatcgactaattgggtgactacccttgcagttaacagcatctgcttgtccc

SEQ ID NO: 143718 - DNA, 938 bp, Zea mays
  Clone ID: MRT4577_62546C.1
ttttgatctagcttccacaggatgaagccctacttacagattggaagcagcagttggaagcggctcgcacggcaggtggatctcagcgctaggcaggtggaagcgtggttccagaacacacatgttcagataacacacatgttcatgctcatgctgaccccacacagaatgaatacttcttcaggtacagggatgaccggaatgcagcagaattttttagagctaatgggggtataaatggacttaaatcacactgtaatagtcagttaatatgcatgccactactttgttaaagcgaagatgcatgccacttcttctagagcaagtgaatgggggtatgagttggatgttttaggtctctgtttgatgtgggatggagaccatcagaagagatttgatcaccatcgaggtatggaggggaagcagtaggagttcccgggggagagtagggtacaaacagaagagcatcgacaggtattacctaagtggtcatttcctgtctatctgggaggggatccagtggtgtggcttgatcggtgtatggagtattttaccatctatagtgttccaaagttgatgtgggtttctgcagcatcaatgcattccgatccaaatgttgctcaatggtggagatgtcataagctgtgtcatggcatgagtatttggcaagggtttgtttctgctgcgacacagaaatatggtgttgatgcttattcgaaagctctgagaagacttatgaatctaaggcaaactagaaatatcaaatgtgtatattattcatcatatttgtttgagattattaatgtcatgcttagtgttcgtgccaatagataagtttgtagttgatgataatatgtattgtttgttttcatgtaatcattatatactaactttggatcaaataatttgtatgtcgtagcaacgcacgggcatatacc

SEQ ID NO: 143719 - DNA, 251 bp, Zea mays
  Clone ID: MRT4577_62547C.1
ccatatttcttctggattgaataaaattgttagtagctccttttactttgttcctgtatctggaaagccatttttgaattgctgattactttggctttaatcagtggtcacctagaaaaagctttgtaatcataacacaatgagtaattcttgataaaagttcagatacaaaaggagcactgtaaaactggtaggagctatggtttaagagcattggaagtagttacaactcaaggattttggtagaaagg

SEQ ID NO: 143720 - DNA, 416 bp, Zea mays
  Clone ID: MRT4577_62548C.1
aacaaatgggcccctttccgggggggaagctgttttcaccatagcacaggtttcattccatgacattggatgactaaatgggggggccccttttaaaacaaaccctttgcccttttgttagggggggggctaccccaagttttggctccacaatgagtttcagtgttggaaaatgctggtaggggggggaaagcttaaaaacaaacttggaaacaatgaaaaaaatgaggtttttgagctcaaccatagaaaatccctgccctagggaggttcgggccccagccccaaagggcaagtataaatgttgctggggccaaacataaaaaaagccctctgggttgaactttttaacataaggcccccatagttttgggtaaaaatgccttggggagacagggatttaaattttgacccct

SEQ ID NO: 143721 - DNA, 607 bp, Zea mays
  unsure (1)..(607): unsure at all n locations
  Clone ID: MRT4577_62549C.1
ggggatcctcaccgaactccccgcctgccgcccggcccatgactccttcgacttccccgtgctccatctccgccgtcgcaccccacgagtgggcccccttcgtcagcacaccggcttactgaattcccgcttctgtcaacttcacatctcgctactgnctactgtgttgtgcctgctgaaacaaaaactagcaatgcgaggctatgtttaattttttttacataaaccaagatttagttttctgcaagtaatctttgctgcacaactctattctgagcagttgaccgtttgttgatgtgctaagaaataagataacaaattctactattcaacctgtgccacaaaatgtgctaaaatagatgattgtgctaagaaatactccctccagtcagattcattcttcgcatatcaccataagcctcaaggagctcaacacccataggagtaaccttaagtttctacagaatgatcagataccgtaaccaaagtattagacatcatgtgataattttttcaatacagcattatatgagttataatatattaaagatggtctcccgcagcggatggggcgctgcccatggatattctcatgagggatcttatg

SEQ ID NO: 143722 - DNA, 1276 bp, Zea mays
  Clone ID: MRT4577_6254C.1
atcccatcccacctcttctacagcgtgttatatagatagggtttctcccacccgtcgccgccgacggctgaaaccgacgtcgaccacggccggaccctccagctcccgccgcgcgcggtcccgccgctggacgctccagctcttgcacgcattctcggccgccgtcgcgcctgcactccgctccagcttgcccgcgcgcgctcccctcgactgctctatgttctgcacgccgtcgatcaccaatcgtcccctactaccactcggccttcaagcggcagcttcatccgcgacgtccgcgccgccgtcttgcgccacgacctcacacgagcatctctgcctactcccgaagccctcctccgaggtgcccgccccagcagttcctcctccgcagcgtgcgccccatcagttcctcctcggcggtgcccgtcgagccgccgagcaccagcgagcatcgtgctccggtgttgaactccatcgcctttgacgcgctccatctcttcaggaagtgccctgctccaccgaccacctgtacgtgaacatggcccagatattcggctggctcgaagatctcgctgcctcgccgggctgaaataagtgagtgcacatgcgacaatattggactgtgttactcatctatacgatctgatcatgatcgtgcggagttgcggatatgcagaggctggcgtatatcacgctccctcccttcttcactactcgtcttacttcactttgcatactgtgcgtgagacccggtgaaaagcaagtgcagttatggaaggatctgatacttgattactgtagaagtcaaaagatacatacaatatctctagaagaagatttccccttgttctccaatgcaaagattgagagatctcttagctacgaagcaaaggaagtgttcctcgcagctctcgtcagtgaaggtcgtgcagaatggatggacaaaggtcacaagaagtgcctaattctttggctaaggatacaggattgggcaaatttcatattgaactttgtaaaggataacgggttggaagtaatgactatcgaagaaatacgctctggaattgatacacgtggaactgaactcgagggaattgatcgtggtgttctcatgcgggctctgcggcagttggagcagaagggaaaggcagctatcttcaaaggcacctctgctgatgacgaaggcgtaaagttttcggtgtaattcttttgcgatccttaaactggcagactaataatctcgttcagccggtgcccttgacatggcatgacacac

SEQ ID NO: 143723 - DNA, 1030 bp, Zea mays
  Clone ID: MRT4577_62550C.1
cggctcgagctctcccctcctcacacaggcacacacgcactttctgtcagcttcctcccctgcgccgataagcaagcccgtgagccaacagtggtgccagcggcccgagcggcgaggatgcacagcggagcgaggaagctcatgtgggggaccagcccggacaggcccgacgaccacgacgtggtcatcgtgctcgcctcgctgctgtgcgcgctcatcaccgtcctcggcatcggcctcgtggcgcggtgcgcgtgcgcgcgcgggcccagcgcgtcgacgggcggcggcgaggaggtgggggagtgggcggagcagtcgtcgcggtcggcgctgtcgctgttcaaggagaaggaggaggagatcgagcgcaagaaggtggaggtgcgggacaaggtgttctccatgctgggccgggtggaggaggagaccaaacgcctggccttcatccgccaggagctggagctcatggcggaccccacgcgccgggaggtcgacgccatccgcaagcgcatcgacaaggtcaacaggcagctcaagccgctcggcaagacgtgcctcaaaaaggagaaggagtacaagatgtgcctcgaggcctacaacgagaagagcaacgagaaagccacgctggtcaacaggctgttggagctcgtaagcgagagcgagaggctgcggatgaagaagctggaggagctcaacaagacgatagaatccctctactagatctgatctcatggaagacgaggacgatgatgatgatggtaacgtagtcgtggtattacggcccataagagaaatcgagctagcaatgactgaagctcaacgtgcaaatttttttttctgcgacgtacttgatgattggatttgtgtatttgtacacgtgatttgtaaccgatggctcactatccttggattgtaatcgttgctctgcggcaccattggtcctaaacgtatttgaaataccaatatcagataccaaatggttcttagatttatcattatgtaaatagaacgacgagctcactttatc

SEQ ID NO: 143724 - DNA, 247 bp, Zea mays
  Clone ID: MRT4577_62551C.1
cagacgcgcggacgcacacctgtgcggaatcgtgtggtcttcctaagacccaccccaagcttgattttcgcgatcatggatacggctatgtaggtgacggaacggtccacggattcgatggtagcaccaccccgacctccaaacagagcgtttatacggcgctcccagctcagctgtcatgggctatacagaagaaaacaccgtcgtgcttgatccatcctccccgcgggcgctttaggggattcta

SEQ ID NO: 143725 - DNA, 209 bp, Zea mays
  Clone ID: MRT4577_62552C.1
tttttggagctatatgtacattggaaccaatatggatgcaatgaacgcgtacacactcacacactttacaaagttaccatctgcacctgtcgggcggagggacaatcaaggttgatgtttttgaaaactacaaccgagacataaggaatctagcccatgaatttgtatcgggcgtatgttgtttttaagcccaagcacgatctcaacgc

SEQ ID NO: 143726 - DNA, 453 bp, Zea mays
  Clone ID: MRT4577_62553C.1
agcactctcatttggcataccgacgctactgagacggccttgttggacactctgatgacgaaatggttgcagaacgaggtcttactggctaacatgtatgtctctgtgcgacgggctgtctgttggattcctgaggctttttcacatgtcaggattggcgatcaacaggaaagacagaggcactaaaacagacttccaaggaaagaaaggacgttacagatcaaaattcgatgctacaagattatgacgaaccttaccgcagaggaccagaagctgctagcaacatacaacccgcacttactcagccaactcttaacgttcaaacacacacactagagcaggcgcaatcacgagaatgatgcagatgagatagctgttgatattaggactcagtacgcatacctatagctacatacataataaaactgatgagtagctgctgaaggcaataca

SEQ ID NO: 143727 - DNA, 252 bp, Zea mays
  unsure (1)..(252): unsure at all n locations
  Clone ID: MRT4577_62554C.1
ccgtccgggatattattatttgtgcctttaatggtcagaagcaccaggtatcatgttaaataacctatgctatagaagaaagggtgttgataatatcggatgtaccaaagtgatctatgantttgattgggatgatttaccggaagagcccattgaagtggtcttctcgatacccgctgaaggaggagagtacccaattggtttcttgcaaaaagttcgagccctgtctttatgtatgtgtgcagtgggaaa

SEQ ID NO: 143728 - DNA, 369 bp, Zea mays
  Clone ID: MRT4577_62555C.1
cctaatccgcgtggcgcacggtgcccagggggggaccttttaaacatacggccggcggcagccacaaaggagccaagttcttttgcgagagtcagagctacgacaagtggctcatcacccaggatgacctggccctgaaccagacacacatctggcctgtcaaagcatttcaatgaagaagtcctgctagagtgaatactaggcaccagccacgccaagaagaccctgattaaatgacaatcaagcgcttaattcccagtctgatgctaggaccttccagtgaaaattgtcaaaggtcctaccacatgacgctgcatacatgggttgctcccctgactcatgctctgaaccctggtagaacccaaaccc

SEQ ID NO: 143729 - DNA, 424 bp, Zea mays
  unsure (1)..(424): unsure at all n locations
  Clone ID: MRT4577_62556C.1
cgggcggccacgcgaccggggtaacatagatggaaaatttaaatttatggcgcgcactatcgatgaaaacagggggatttgtccaagccaacctagagcatccgccngaccaacatgaaaatgccagngtttttttctcctctcggcgaaacagncannggacngnnacagaatgatcaaactgagacctatgctaaacaagagctgaaggaaacacctgaagattctactgcgtgcagacaaccggaactcttctcgaattgcttcaagcttgctaataggtatatgaagcagacaagctttcatttcaaagcaaaaccagctggacagcaccaggtcacaagcaggttggatgcatcattatctaaactagctgggcatctcactttaaaggaagaagctcatcctttccagataactggag

SEQ ID NO: 143730 - DNA, 114 bp, Zea mays
  Clone ID: MRT4577_62557C.1
ttcgagctgtaccggggatacttttaaacaacttgcacctacaacacactgcatgatgtcttttctgcataattgcacataagcatccgatgccatgtctggactcggtaccta

SEQ ID NO: 143731 - DNA, 415 bp, Zea mays
  Clone ID: MRT4577_6255C.1
atcaagataaatctcaatcaatatattgattatttctaggaaacacatgccggtatgagggcaccattgttgagtacatctcatatgtaatctaaaagatggcacctccaacgatgggttgctgcaaggcagggttcatcaaagagaactggttgtatggcagcaattgttgctgttgcaggaagttagcgaccaatgggttagccactgctagtggattaagtaactggtgtcgctgttgtaggtacacagcatagttcgacacaaccagttggttgaattggaaacaactgttgcaagaaagcatttaggtttgccacagctagtctaaacacagctggtacaaatttgttgcagcaactgttgtttgaggtacctaggttcatttcccacagaaagcggccttaaaagaaaa

SEQ ID NO: 143732 - DNA, 579 bp, Zea mays
  unsure (1)..(579): unsure at all n locations
  Clone ID: MRT4577_62560C.1
gaagtaagatgttcctgcggaggatcctgaccggcgggggcggcctggcggccctgagggcggcgcgcgccgtgaaggagacgacggggatcgtgggccttgaggtggtgcctaacgcgcgagaggttctgatctgccaggaggaggaggactggaagcgcatcgaggaccgaatcggatgcgggcaggtcgaggagctcatcgaggaggccgaggacgagctcaagctcatcgctaaaatgattgaatgggatccatggggtgttcccgatgactacgaatgtgaggtgattgaagacgacaccccaattcctaagcatgttcctcagcaccggcctgttgctcttcctgaggagttcttcaaggcactagatgctgtcaaatctgatcctgctcttcaaggcgatgctcctcctcaagtgaaggcgtaaggatggctgttcctggctaacgtcatttcacattttgccgcggtgggtagggactggtttcttgtgtcatttgccagcaatgcgcttgctctgagcagaataaatttctggtgagtaccatcaaagtgtgaatttgaacttanngatt

SEQ ID NO: 143733 - DNA, 1395 bp, Zea mays
  Clone ID: MRT4577_62562C.1
ctcgtggcagcctcgaggccggccgggataaccggccggcccacccaactctccccaatccagcagccctcgagtctggtcccccacccctcagcgcgacgaaggtaagatgttcctgcggaggatcctgaccggcgggggcggcctggcggccctgagggcggcgcgcgccgtgaaggagacgacggggatcgtgggccttgaggtggtgcctaacgcgcgagaggttctggtagggctctacgagcgcacgctcaaagagatcaaggccgtccccgaagacgagggttaccgcaaggccgttgaatccttcaccggtcaccgcctccagatctgccaggaggaggaggactggaagcgcatcgaggaccgaatcggatgcgggcaggtcgaggagctcatcgaggaggccgaggacgagctcaagctcatcgctaaaatgattgaatgggatccatggggtgttcccgatgactacgaatgtgaggtgattgaagacgacaccccaattcctaagcatgttcctcagcaccggcctgttgctcttcctgaggagttcttcaaggcactagatgctgtcaaatctgatcctgctcttcaaggcgatgctcctcctcaagtgaaggcgtaaggaggcgtaaggatgctcttcaaggcgatgttcctggctaacgtcatttcacattttgccgcggtgggtagggactgctttcttgtgtcatttgccagcaatgcgcttgctctgagcagaataaatttatggtgagtaccatcaaagtgtgaatttgaacttagtgattcggcacagtaaacttgttgcccatgaatactcgatgccctgagcatcgtttgttttgacgttataatcgatgttgacgaaatatttgatgctaaaaaaaaaaaaaaaaaaaaaaaaaaaaaaaaaaaaaaaaaaaaaaaaaaaaaaaaaaaaaaaaaaaaaaaaaaaaattaaaaaaaaaaaaaaaaaaaaaaaaaaaaaaaaaaaaaaaaaaaaaaaaaaaaaaaaaaaaaaaaaaggggggggccttttaaaaaaacaaaatttaactacccggggttggaaaaaaaaaattttttttttggggccccaaaaaaaaaataaagggccggggtttaaaaaacggggaaagggaaaaaccctggggttcccaaaataaaatgctttgaaaaaaaacccctttttcccaggtggggtaaaaaaaaaaaagcccccaccaaaccccctttcaaaaaatttcccaacctaaaagggaaaaggaaccccccctttaacggccaattaaacccggggggggggggggttacccccaagggaaccctttaatttggcaagcccttaagccccgtttttttgggttttttcccttttttttt

SEQ ID NO: 143734 - DNA, 448 bp, Zea mays
  Clone ID: MRT4577_62563C.1
accgctgctagggtctacgagtagaccttcggcgtccctgccggccacgcgagcgtccgccaactggacacccagaggttccatcagtgccgggtggtgggtggtgctctggcgaccccaacctacgagcaccccatgatctagcgcgtggagctctgtgccactaacaagtacttgagctgagtccaaggctctggaggggggtgggaaatgtcaagactgtgaagaagagcgctggccagatgatggccatcaacgatgatctggtgagcgcaacgcccatccaccatgaatgaactagtgccatcctggcatgccctaccagagcacgagctggataccacagacatgtacagggagtccttcgtccccactctgaacggtgcagaggcgcagacctacaacgagttggagtaccaccaccgtgatagggacctctgctgtacga

SEQ ID NO: 143735 - DNA, 879 bp, Zea mays
  Clone ID: MRT4577_62564C.1
tttggtaccggaccgcccacccgggtggcctgccactcgatcagcagtaggcccacagctcactcgcaaccactcaccaagctagcggaagcaaagcagagcagcggtcgccggccgggcacgataccagcgtcgcgagagagagagaggatggcgttcatgcggtaccgcgcgctgccgcggggggagctaacagcggaggagttccgggcgtggctggcgcagttcgacgcggacagcgacgggcggatcagcagggaggagctgcggcacgcgctgcggagcctcaacgtgcggttcgcgtggtggaaggcgaggggcggcgtgcgcgccgccgacgccgaccgcgacggcggcgtgcagctgggggaggacgaggtggcccgcctcttcgccttcgcgcagagccacctccgcgtcaagatcgcccagctcgggtactactagtactgctgatccgtcgtcggccgatcgatcggccaatatggaggcatggagcatatggcatcgatcgatgggtttgtcactactcgatcgtcacttgtttgtcacagctgggtgggttggatgtgttgttgctacttttttttctctcacgtccgggtggatgtgtgttgttacttattgttacgtactgctgtttggtcaaaacacattgaacgcaaacgcaaacgggaatagaaagcagcgagcgctaatggtaatccatcagttgcgtgtacaaaacaaaaaacactttcttaataggcgctgtacgtacgagtgctgctgcttcttgtgatgctgcttaaagaatgtcttgtggtaacttcaatttgtggatggtttgaagaagtgtatgctgcgtataaaaaaaaaaaaaaaaaaaaaaaaaaaaaa

SEQ ID NO: 143736 - DNA, 1471 bp, Zea mays
  Clone ID: MRT4577_62566C.1
gcctaaaaaaaaaaaaaaaaaaaaaaaaaaaaaaggtaagacattggtacctcccggggaacctacgaagagccgactcaaccgctccacacatgaacaacgccccaactgtcctcaatccagcagccctcgagtctcgtccccgcacatcagcagagagacgccactaccaccaccgcaagcgacgacggggagatgtttctgcgacggatcctgaccggcggaggtggcctggcggcgctgagggcggcgcgcgccgtgaaggagacgacggggatcgtcggccttgaggtggcgcccaacgcgcgggaggttctcatcgggctctacacgcgtacgctcaaggagatcgaggccgtccccaaagacgagggctaccgcaaggccgttgagtccttcaccaatcaccgcctccagatctgccaggaggaggacgactggaagcgcatcgaggaccgaatcggatgcgggcaagtcgaggagctcatcgaggaggccgaggacgagctcaagctcatcgccaaaatgattgaatgggatccgtggggtgttcctgatgactacgaatgtgaggtgattgaagacgacaccccaattcctaagcatgttcctcagcaccggcctgttgctcttcctgaggagttcttcaaggcactagatgctgtcaaatctgatcctgctcttcaaggcgatgctcctcctcaagtgaaggcgtaaggatggctgttcctggctaatgtcatttcacattttgctgcggtgggtagggactggtttcttgtgtcatttgccagcaatgcgcttgctctgagcagaataaatttctggtgagtaccatcaaagtgtgaatttgaacgtagtgattcggcacagtaaacttgttgcccatgaaatactcgatgccctgaacatcgtttgttttgacgttataatcgatgttgacgaaatatttgatgctaaaaaaaaaaaaaaaaaaaacaaccaccggataaattttaagaacagataaaaaatcaaaaatttgcggcagtgatctcatctgaacagatgcaatctctgcattcagacaacaagggtgatgagatgaaagatgagaacgaaaccatttatatgcagaacagcaaaggtcggactcagactctatccaatgctgatgcatcagtactttccactaccgaggctgagaacacatccatcaagacttcccctgaaattgagctcaacggggatgatgtctgtattacaagcagcatagggaagaccaggaagtatagagcaaaattcactttgtttctgagcgtgatcgtgatctttttagcaatcatcaccatgctcatcaggatagagaatgatgatgattcagcgtaccttgtccccacttaatattttgtatgcttcattgctgtctgtttaaattcctatttttattttatcactatagagtggtttgtgttttgaacaattttgcagt

SEQ ID NO: 143737 - DNA, 380 bp, Zea mays
  Clone ID: MRT4577_62567C.1
gcggtctattgcaaggagaaaaagcctcctgaatgataaagctttgacttctcttgctgaaagctggctggcggatcctacatatatgtggatctgatgtcactgatgctggttcggctactgtagcaaatgtttgtagcaatttacggccagctgatattagtcggtgagaaaaaattactactgctggcgtgtctacaattgtatgccactgcccatccttggagatatagcgatgtggcatactaaaaatagcttgaatactatcattgcacaggctgttcatgaagcgaaatcaccgcacggaggtgcttgtatctgtggatacccattattgactgctcttgtaaaggactcatggaaggaacttgtttcactag

SEQ ID NO: 143738 - DNA, 384 bp, Zea mays
  Clone ID: MRT4577_62568C.1
gagaaacggggagagcagcgcgagagagggcacggcggttcgttcaacaccctagcaagcgcagccctagtccggagcccggagccacggcgcggctagggagccgtgcccggcggccgtcggagccgccgcggggaccaggcggcggggcgcccagggtcgccgggacgcgcgccatggcgtggtggcgcgcgcgggtcgtcgcgccggctcgtcgcgcctggctcgccgtcgtcgccgcgcgcgtgcgccgccgcaccgagcgcgcagggatcgtggacctccacagggacgtgcagacctgcgggtaccacgacgtcgaggtgatgtggggcatgctgggcctggacgccgggccggccagcgcgccggagcgccggaacc

SEQ ID NO: 143739 - DNA, 500 bp, Zea mays
  Clone ID: MRT4577_62569C.1
cggccggggtcggcctccgggcttctggtctccccgcatcggccaccggggaaccctacccgagcatcagccatggcgatcgcggcgcgcgtcctgcgccgcctcccgctccacctctacccctcgctcgctcgctctgtctgcgcagtttccccggccgccgcctcgggtcgccccggcgaacgacaagggcgccgatcgcatcgcgcgcgtcctcgccatagatctgaagggggcgcgccgtgagggcgttggcctctccgggcagacactcctccgggcgctggccaacgcggagctcatagagccggtcttccaccgcctagaggatatcgccgcgtgctccggcgagtgcgaggcccacacctcgcaggagtggctcgacaagctgccgtcaccgtgctacgaggagcggaacacgctcacgcgcgcgtccagtaaccgtgagctcaagaagcacgcgcgcctgggctgccagggtcctctcacgcccggactgc

SEQ ID NO: 143740 - DNA, 1353 bp, Zea mays
  Clone ID: MRT4577_6256C.1
agagtctagagttcaaagttatctaatgtacttttactatttgaaccctatgcaatagttgagctatcattttcccccctcttctccagcgtggcacagagctagggtttctcccacccgtcgccgccgccggctgcacccgccgtcgtccacggccggtccctccagctcccgccgcgcgcgctcccgccgctggacgctccagctcttgcacgcattctcggccgccgtcgcgcctgcacgccgctccagcttgcccgcgcgtgctcccctcgactgctctagcttctgcacgccgtcggtcaccaatcgtcgcctactacgactcggccttcaagcggcagcttcatccgcgacgtccgcgtcgccgtcttgcgccacgacctcacccgagcgctctgcctactcccgaagccctcctccgcggcgcccgccccagcagttcctcctccgcagcgcccgccccatcagttcctcctccgcggtgcccgtcgacccgccgagcaccagcagcagcgtcgccggtggttgagctccatcgcctttgccgcgctccatctcttcaggaagtgccctgctccaccgcccacctgtacggcagcctggcccagctattcggctgcctcggagatctcgctgcctcgccggcctgaaatttgtgagtgcaaatccgtcagcattggactgttttactcatctataggatctgattttgggtgggcgcagttgcggagatgcagaggctgggggatttcaggctccctcccttcttcaactacccgccttacttcacgtaattctcccttgttttcgctctatcttctgccttttattctcttccaaacgctccgacgactaggtctttgcctgctctcagtaacaatgccactagatgtttctgttatctgcaaccttgcagctgtatgtggaagagatggtccatgatgctgaattggttatggatgtagtctcgatcaatgtattcaggatgaatatttcaaagcgaatttgcactccaatatgttgaactatttaactattttggtggtttaatgaaatgaaagaattaattgctttcatacttgcatgtttcatactaatgatgtctgctttctgttttttctgtggtgttttcagtttaggaaattcagtaattcaccattcatcctatccatatagatgaaatttctaccttggcattaaccattaaggtttctagacaatacacacattgatttattaatttgtgatttattcttgaaaaatattactaagccaatattctgctacatttatgttagtttcctatcatattatcacactatgtagatttgagatgttttcacttcataa

SEQ ID NO: 143741 - DNA, 258 bp, Zea mays
  Clone ID: MRT4577_62570C.1
acgcggacgcgtgggcctgtagcttcatccgatgtgctgcgcccggttccctcgcgcagtgcggaatttaacatggccgagccggaggtggtggacgacggcgtcctcttcccaccggtggaccagacagcgggctccggcggctcgcactttcttggcggcgcaagcgtgcgaagcctagagatcggaggcaacttcatcaaggagacggtcatcggcctctaccaggaggacgcgaccgtgcccgcccttgtcaac

SEQ ID NO: 143742 - DNA, 934 bp, Zea mays
  unsure (1)..(934): unsure at all n locations
  Clone ID: MRT4577_62571C.1
nnnnnnnnnnnnnntttttttttttttatacgnnnnnatagcacgtatgcaacagatgtgacatccttttgaacaatactcacaattgtgaggttttcaacagttatatcatagaagctcgagaaatgtcaatcttaggtcctgtttggatccatggtctcttagaaagtgggttttaaaagctagaaggtctcggaacaggtgagttttttttatgctgtttctaaaaactagtttatgagtttcttaaaaatcaagaagctagtctccttagctaaaactagtttctaagaaactaggtcgatccaaacaccttctcttgttttttttattctaaaagccagtttgtagagaccaaatctaaaaactagtttttaaaaaaactggtatggatccaaacactgccttaagtatgttagagcaaaacaagaactagtttacgtaaatagggtcccgaaaggtcgacacatgctcttgcttaatcaatcgtaaagcgtggcgtcgagaggattattggaaacgattgagtcagcggtagcagtcagatgttggtcgtggacgcttgtctgggtggagcggagaaaaatagcaggcggccaggacccaggacactacgacagggacagcggcgtttggagcgcggcgaggtggggcgcgtgtcgacggttgcgtacgtgcgggccatgccggggtccaggtgcagcgcgcagcctgctaccgccccacgtctccgtccgcaccgcgcgcgcgcagcccggcagcggcaggcggtagccgtgttctgggccagttgcctctctccggctcccaggggtgtccgtgactcctgtgtgccggtgccggaaagggccgcgccgccacgccccacgccaagtgcgacgtgaagagaagaaaaagggccgggcgcgtgcccccggctttttctttccctccg

SEQ ID NO: 143743 - DNA, 326 bp, Zea mays
  unsure (1)..(326): unsure at all n locations
  Clone ID: MRT4577_62572C.1
acgcgttgctcgcgtctctccttgccttggctgctgtcgtgccggtcggcggcgacagcaacggagggaacatgtcgaagaagaacaatcttgccangaggangaagcagtacgagttcgacctccaactggagaacgatgctaatgagatgcaggccaagaagctgcaagccaagaaatccaagatgaagatagatggtgctgatagtaacgtagaggtggccatctaaggtcggcatgcaaaggtgagacgaactgtcagccttagcantagctatagcgcgcaactatggtagtcgacagtgactgcggactcaagcatcatc

SEQ ID NO: 143744 - DNA, 643 bp, Zea mays
  Clone ID: MRT4577_62573C.1
ttttttttttttttttttttttttttttttttttttttttttttttttttttttttttttttttggaggaaaatcaaaattttatttcacacaaaaaaaaagtggggcttgcttttacatgcctccaaaaaaaaggacaaacctaatttttaagggccaagggccctgcaaaggagggggggttcgggatatatcaaaggttcaacagaagccctataaaaaaaccctatccccggggaaagggctcccaaagctaagggggggaaattttgcggccccaggggggaaggggaagaagctccccccagttgaccattttgaggccccatccccaaacattaggcttttttgaaccttttaagcctttgaccagttatagggccctcccacccccccaagtttataaaaacccttcccaaattttgaaattttgaccctaaaaaaaaacaatccagttttgggaaccgttgggctaaaaaggttcggacccaattttaattgtacccttcccaaaaattccagccgcaaaaaaacccccctctgcctttagaatctggaccttgcgggggaaaagaattttttgacggggccaaagggaaaaaaatttaccgacccctggtggaaagggggaaaatatggggcc

SEQ ID NO: 143745 - DNA, 661 bp, Zea mays
  Clone ID: MRT4577_62574C.1
ctttcttttgcagcataagaaacctcttacgaagctcttaccaaatctaacggttacaagattcagttcatacttgggttttgctcattgtattgtcttcaagcagggtatgaggaatagtatagatggaacaatttcttctctgttagtggcacattgtcaatggtgtgtctgacaacattctcaaccacatcatcctagagaacaatgagaacaagcctgtcacaaacagtcgtgacactcaggagatatgccttgaacaaggccttcatatcctcaagatattcgaggattatcatgtcagcaaaacatccatcctgaacgaccttgcctcagcaatgggaaacactccaaacccatacgagcaagccatgtccacttgtgtgaatgaccaagcgatgatgctatcgcatatggtgtggcatgagtctacaatttcactgtagttatgaaaactgatcagtcaatgatgatgaatcatacgaaccttttttacttcagcacgttctttaataggggacgaatttgcatgaggtgttatgaactgcaggtggaggtgagcagtgggagcgtttgcgtattaaagtgcattgcactacaatacttgtttgtggatgttgagtgtttactttagcttaatcaatcttatagttttttaatt

SEQ ID NO: 143746 - DNA, 211 bp, Zea mays
  Clone ID: MRT4577_62575C.1
aaaaaaaaaacatgccccttaagaggggcataaaatttgcaaaatttttatcccttgtggctttggggtttggtccggtaaatacaaaaaaaactgttgcaagtgtggctttgaaaaaatacaatgcctgccctttaaaaaactaggtcctattgtaggaaagggacattttttttgccaaaccatttggggggaaaatacccatttcccc

SEQ ID NO: 143747 - DNA, 386 bp, Zea mays
  Clone ID: MRT4577_62576C.1
gggaaccaaacgaaacggtttttcctggcaccaaaataacaaagggaaggcaaaaccaacccctgggggggggggggggttaaactccaacaaaccaaggaaacaaagggattacactttagatggggggggattcaaggaaaaacgggggggacttccgaaacattagaaacattaacggtcagggggggaccacccccttatttaatggttgattagcccggtgggggtcaaaaaaaacaatgctttgctggagaagctgggcaaagggggggacccccatgggtttagaaaccctgggttttaaaggatttggggactccaggaggggaagaacccccgggtggtccatttccaaaaggatgccagggaccttgggaggctgg

SEQ ID NO: 143748 - DNA, 326 bp, Zea mays
  unsure (1)..(326): unsure at all n locations
  Clone ID: MRT4577_62577C.1
ctcgtgctctagtcccagattctactttacattcttctccnctanctgagtgaggctctcaaatattttaacaaagtgtccaacnctcaaatcctnctattaaacccaacctcatatttgtcaatcgacgtcttgcttctatatctgaaataataccttgctgatttgattcacaaaaataatgaattaacataacccggcatgtatatatctctccaccacttttctgcaaaatttgattctgtcccaaagttcatatttttggagcaatgggtgtacattacttttacaccactacctcactacctcttgacagacctcacata

SEQ ID NO: 143749 - DNA, 279 bp, Zea mays
  Clone ID: MRT4577_62578C.1
gtgggtgtgtttagtttggttatgggtggggtttttaggaggtcgaggaaaggcccaccggtgtctgttaagccagagagcggagaaaaaccccaatcccgggaaaaatgctgtttgggttggcgccgcggggtggataaagaaaaatgcaccgggtttttagtaaattttgaaggctaaaaagggagttgaagatgctgggggggtaacaagaccagtggaataaaaagaagctgttgggcccaccgggatacgcgcctgggggtcttaaccccgaaa

SEQ ID NO: 143750 - DNA, 944 bp, Zea mays
  Clone ID: MRT4577_62579C.1
agtggcctcgcccgcctccttatttagaaccgacgacgagcccgggcggccccccgatcggcgggagagcacgagacgcccctctgcttccttttctctgtcgctcaaaagttgctggagccctcttctctctctcctctccgagccccaaccatggatgaggcgcaagttgtggagtcaaaggatggaaccatctcagttgcttctgcatttgttgctcatcaggaagctgtacaagacagggatcacaaattcttgacaaaagcagtggaagaagcataccgaggagtcgattgcggcgatggaggtccatttggagcagttgtcgtccgtaatgatgaagtggttgttagctgccataacatggttctgaagcacactgaccctactgcgcatgctgaagtaactgcaattagagaggcttgcaaaaagctcgggaaaatcgagctctctgactgcgaaatttacgcgtcctgcgagccatgcccaatgtgctttggtgcagttcatctctcccgaatcaagaggctggtttatggggccaaggcggaggctgccatcgccattgggtttgacgacttcattgcagatgctctgagaggcactgggttctaccagaaggccaacatggagatcaagaaggccgacggcaatggcgcactgatcgccgagcaggtcttcgaaaagactaaggagaagttccagatgtactgatgatgcttggctgaagagggttctcggatttgtacaatgctcacccagaaggaataaatacatcgcccaaatgtccattgtttcgaaaaaattttacctcaatcccaatgcttagcattctgatgatgcctgaattccttgtaaacagacacaagattgtcctttgctgtaactcatgtgcagttagtggaattcactttcattaagaaaaaaaaaaaaaaaggccccta

SEQ ID NO: 143751 - DNA, 346 bp, Zea mays
  Clone ID: MRT4577_6257C.1
cgcaaagatagttcagccgcaattcgacactccacattacgccagcacatcataactgccttcaaatccatcattacgaacaaatttgaaactttttagtgcaagcttttgttacattttttaattcattatcatcttggcaataatgaacaattcgaattgtttaaatgctgtttgtgttgccgtttccataaaataaaacacataaactttcaactgacttgttaactaataaaaactgattttaattaatacaataattgtttggttttctaattaaacacaatttagttgtgtagattagcaatcaattcaaaaatgactgccggaatttcaaagtcaaatg

SEQ ID NO: 143752 - DNA, 823 bp, Zea mays
  Clone ID: MRT4577_62580C.1
ttggctcccgggggggccgggccggccgggagctcagtctatcattccattgtctggtcatttgtccccggccggcacgtaataatcaccactatggccagcggacggagaaagagcggcattccagctctggggtggtggctcatggcagtcggcaccatccgctccgccatcgtgtggtcctgcctcttcagttctgcatcgctctgcttggccgtctaccccgagatgaccggcgtgcaggagcgagctatggctgcgtggactctgctatcctgcactctcagcttcctgtgcgcgttcaacatggagagcaagccgctctacgtagctaccttcatgtccttcgtctacgtcgccggctacctgctcgtggagtgcttcttctaccacagcgtccatgcagccagtatcgctccgtactgcttcatcgcagggacatccatggtttggatgctgcttcaatggaactcccatggccgtggccgccgtccccgtgaggctagcaagcagccctgatccaacctctctggttcttttgccatcgatgtgattggggcggtctactatacagacgatgaataaatatttatttacaaaaaattgtattatatatataagatgcacaccgagttccgttgttgctgttgacttgttgaatgtaagaagtgacgactagaatgggtgtcgtctaagttgagttgtattgtatcgtagcatcttgatatatataaccctataatctgttgttggaaaaaaatgtttgctcaaaacaaaaaaaaaaaaagcggccctcatttaatagtacacaccttttaagtaa

SEQ ID NO: 143753 - DNA, 349 bp, Zea mays
  Clone ID: MRT4577_62581C.1
gaaaagatcgaggtgaagtatattaaaaaatgaggcgttatactgccagctgttgtcttgttttactccccttccatatgacatggagttttataatcagggagttgaactggagttgctcaagctcgaagttgctgtccaatcaatccatgacaacctgctgctactaaaatccaagtctgtgcatccatttgttttttctagcttcatgttgagattatccacgtacctggctgatatccagggtacaatagcaatctatttaacgaagttgttctcggtgcagagaagctaacatgagggacgtcagtgagcagacgaattctagggtcacgtggctgagcatgct

SEQ ID NO: 143754 - DNA, 325 bp, Zea mays
  Clone ID: MRT4577_62582C.1
cactcattatggaccctactgagcttccacaggctgagggactgaaccaattgaggatgagggatggacagtaaggatgagctcttctctgctgatcatccaatctagcagcagcagtggtagcacggagggggtcataaccctttagagcagctggagccatttggacctgctcgctagccactctaggtgatgatctccttgacgcctgagcaggaggattgattaggaaggaagcctcattcttacgagcctgccagagccttcgcaaggacattaacctcgatcaccttttcagcagagtatgctagctatgacttaatct

SEQ ID NO: 143755 - DNA, 373 bp, Zea mays
  Clone ID: MRT4577_62583C.1
tcgatacaggaatctggccagaatcccctagtttcagtgaccacgggatgcctccggttcccaaaagatggagagggcaatgccaaggaggagacgccaactcaccgtcaaacttcacctgcaacaggaaggtaataggaggcagatattacctcagcggataccaaacagaagagggtggcgccatcaagttcgtatctccaagggacagctcggggcatggcagccacactgcctcgatagcggccggaaggtttgtcagggacatgagctacggaggtggtctgggcaccggaggagggcggggaggagcccccatggcaaggattgcagcctacaaggcctgctgggaaactggctgctacgatgttga

SEQ ID NO: 143756 - DNA, 359 bp, Zea mays
  Clone ID: MRT4577_62584C.1
actagttctagatcgcgggcggccgttcgtgcccacgcgtccgcccacgcgtgcgccgggccgcaagcgttggcgctacgacagctaccacgctgaccatccacaacctctgcccccacccggtgtggccgctggtgaccccgagctggggcttaccctgcatctacaccaacaccgtgcggctggtccccaacgcgctgctcttcctctacttgcagcccaccttctgagccaggcgaattgccgtgggaagtgtacatatcataagcaatgctcggtataatgcagtgcggcaagtgctccaaggttttgtgattatcatttcgcgcagcatacaatgcaaatgcaaagagtagtgg

SEQ ID NO: 143757 - DNA, 351 bp, Zea mays
  Clone ID: MRT4577_62585C.1
aggacaaacatggctgtttgtattagggatagataaacgagtggtggccgaacaaagtacccaagcggtccacttaataaaggcttcaggtgcgccttagattaatactactgaagcgatgagcccaaaggtccttaaaaagactttttgccttttggttaaaactacccaggggggaaaggaaaaactgggttccaaactgctgcttttatggggtggtagggacgctatctccgggctcgagaaacatggactaaatgtacatgtcggtctaaatttctcaattattatgagtctgcttgagccatacccttccgacatttaaaatgtatgttacagtggtccagttct

SEQ ID NO: 143758 - DNA, 426 bp, Zea mays
  unsure (1)..(426): unsure at all n locations
  Clone ID: MRT4577_62586C.1
aatttccccacacgcgcccacctcctccggtccttccctctagtcctctctcccgaggccacctctgccagtctcgtgcgtccgtccggccaaccgatactgcaacaatggcaggacaggcgagagcgtagcgcggtgagatgtgtcggcgagatgctgatagacttggtgccgaccgtgggggttgtctaggtggggaacgagccgcccttgatagtgcggggggggggtccaggcacaccaaaccgcggatccggaggttggttgggaggggcggtgtgaagcgcatctcggggatcatctacgaggaaacccgcggggtgcttaagatcttcctcgagaacgtaatacgggacgcggttacctacaccgagcagcggcgccgnaagaccgtaacgcgctttgtatgttagttacgcgctgaag

SEQ ID NO: 143759 - DNA, 502 bp, Zea mays
  Clone ID: MRT4577_62587C.1
gggcaatggaacagtcaggatcattttcagtgacaattgggccccaaatcgaaatgtcgcccagataaaaaaaaaaaaagtccccgccgggcgggcgcaagttattgcagcggggcaaccggttttcaccaccaacaccacccaaccccaaaccccagtttacacaatcgaccactggtacatgaaaggatgcgtaaattaccatcccaaaatggcctaaaactaaaaaaaaaggggaaactttttattttttttttccaaaacctcccctcccttgctggggtcccgcccctttccccaaaagggaaacgtacgttgctcgtacacgggcttgccggtcacctgcccccacccttcggttgcgggtagggcccaacccgcgtccctcgaacaccttccgttggggcccgcccgcctgggccgttcccgcccccggcggggccctttacgaagtccttcaacattttctgcaaggcctccaagggtcccgctttttgttttt

SEQ ID NO: 143760 - DNA, 412 bp, Zea mays
  Clone ID: MRT4577_62588C.1
agaccattagctttatctactacagagcgcataagaacccgatcgacaccatgagggtgttgctcgttgcccttgctctcctggctctcgctgggagcgccacctccacgaatacaagcgagggcttaggggtgagcgtattacaacagtctaatgtacaatcgtaacaagcatatgttgacacatgtaaaaatacaagccatcagagcgcatcagtaacaacagctgctaccagcagtgagccaactagccatggggaaccatggcgactacttgtaagagcaggtgcttgcatgcaacacacttgctgtggcgaacgtagttgtataccagtatcaacaacagcttcaacagtttatggtaacatttaggaaactagccatggaaaaccctgtcaactacgtacaataac

SEQ ID NO: 143761 - DNA, 420 bp, Zea mays
  Clone ID: MRT4577_62589C.1
gtattgttgtttaatggttggaaatgggaatttcagatgaggggaggaaaaaaagagaaaaaaaaaaaaagaagacaaaaaccccaggaaaaaaaagggggagaaaaaaaaggggggcaaaaaaagaaggaaaaagaaaaaaaaagaaaaagaaaaggggataaaaaaaaggagaaaaaaaaacgggaaaaaaaaaggggggggtggaaaaaaaaaggggagcggaaccagccttgggggaacaggggggtaggacataaagaggggggccctaggggatgggggcgaaacgattggagcacaggggggggggggcccacggggacagaccaaggggggccatgagacgaggggccaaagcccatgggcaacaaggttacgggagggatggtttgacccaccaatccattgcgggaacca

SEQ ID NO: 143762 - DNA, 253 bp, Zea mays
  Clone ID: MRT4577_6258C.1
aattcccggggcgacagagctcacgatgcggcggccggccttacctatatctgactacattaagaagctggtgctgtcattctcgtgtatgtgtctaccaaaagggaaggcgcctagagtgagaaggggagtaggacataaaccattcacatgatgcttaagacggcctacacattatcagttaagaccacatgttatgataaagtcccggctatggttgtggtgaaaaaacttatttttggaaccgggaccg

SEQ ID NO: 143763 - DNA, 495 bp, Zea mays
  Clone ID: MRT4577_62590C.1
gaagacgcgcaccgagagaagcacacactggtaaccaccgactcccttgctaacctggccgtaggtgccaactgccatgtggtaatcaacaacgaaggcctattatgcaaataagattccgagaggatccgatatctgccgttggacaacaccaaactgcaaaggtcatgagcttcttgacacaagaatacataatgaaaccatcaaacaatgtgaaaacgtatatacaatgacttgattagcaagctgaactagctgatgacatacataataacagactagttgcatgatactacatgcactacctgatcagatgccaccttattaaaaaactacaatgaaaatatgatgtaatttacagaaaaaatacattatctgttaaaaaaacctcatatgatgaatacgttgaagatggtgatcattgatgaaacagttttagtgaaacagaatgggaccttaattcctatgcagttatctgacatacagcatgctttc

SEQ ID NO: 143764 - DNA, 652 bp, Zea mays
  Clone ID: MRT4577_62591C.1
attgcactcactcccggtccgagaggcacaccacggcgcagcgccaaccaccactaccactctctctgtcttcggctcggctgccgattggagagcacccgttctgtctgctcggagaaccctactcccatccaccatgaagggcaaggctgacacctcacgagagggacaaggtcgggctcacctgccgtgtgcatctcggccatctgctgcaatgcagacgcgagcgccgagccccggcgcgcgtcctccgccttctcctcttcatgaaggacttcaggaatgaaatccggaggagcaccgtgggcggaagagcgacgcgaccgtgagccaggccatatgacaacagtggcgaggtctgcctcaacgacatcatcatcgatatgggcatcacggaggacatcacgaagcggactatagtcagagtagggcgaggtgtgctacgacggagggcacaggctggacgagcgtaagactgagggtaggaattcctcgaggaaataggtcaaagaggccggatggctaaggagaaagctgtaactgagctgatggatgatactgtcgtgcaagctctaagggaccttcagagcgattggggcgactataactacgtgatctgctgcagctactcgcacagatgcagaatacatgt

SEQ ID NO: 143765 - DNA, 685 bp, Zea mays
  Clone ID: MRT4577_62592C.1
agacgtagtccgactcccttccggctctgaacgtatgatctgtcgagtgctgacctctttatagtgactaactacgaacgctaccgagtaccagtgcgctcaatatgcaaaacctaaccctcaccaccaggaacgcatggcgcgtacatgggcgaaaacacaaccaggtactgacagggcggcctcgggatctcctacaggtgcctcagtacgaacagactcacaacgcgcaattgttacctggagatcgcgtcgcgcaccatcagcggcaacccctcctcgccctccgcttcggcctccaccaccgcacgcagaacgtgccccttcctgctccagtggcgacatacggagagcgcgccgcgcccccaccgccgatgtcgctgcctgttgccagccccaatacacagagcggggatcccgcggaagctgccgacactccccttccacgtgcgctcagagtgtagacgcgctcggcgacgtgacactccgtcttgaagaatgtccacgcggtcgtgatgctggacgctccctctccctcctacgtctcgcgggcgaagacggccaacgccgaccgcctagctagaggagccactggtcagctgccgaagtggccgacttcgctccctgagatccagcgcgacttcttctttgtccgcgaccagcggttcgtggccgacgactaccg

SEQ ID NO: 143766 - DNA, 407 bp, Zea mays
  Clone ID: MRT4577_62593C.1
ctggatgataggtgcagagttcacacggacactattgatctctgccatagtgtgggagagcgcaagttcctggactggattgctgtgcaacccattcatttgtgtcagccaatacgtgacaagcatcttgtggtaggtgtcgaaggcgattggtacccttcttcgggctagtcattttttggatgattcatgtcctatattgggtgttaattcagatcctacttgtactaaggaggttgaggagctaactgatgaatttgctgcaaggatgatcacactttatctttgtgcagcttctgcaggaaactttgaacatatactaggagcaacgcttgatggctgatggcaccctttggagcttcctatgatattggtataatctaaatggaattcatatgctgacttct

SEQ ID NO: 143767 - DNA, 320 bp, Zea mays
  Clone ID: MRT4577_62594C.1
tcccattcgtccgggccgccctttttataaagggagggtttttttaacaatctattgccgtcccctctaaataatgatttttaaagaaaagaaaaagacggaattttggaaaaaaagagtttcaaaaaaataaaagctgggtccaataaaaatatgggtacaaaaaatggttaaggaacaaccaaaatgggaggaaacaaattttagtacaatggcacaaaagcttattccaaacatgtaaattataggagggggtatagacacttgctgttgaagggagaagagcaagaaataatgggactataacagaggttaaaaat

SEQ ID NO: 143768 - DNA, 1711 bp, Zea mays
  Clone ID: MRT4577_62595C.1
tgggtaccccctcgaggtccggcacgggagacgtcgtcaaggtcctctccctacttttctttcttttttttaacccctatggtttacaggtgggtcacttttgattgaacactctccctcaggcagctttcgtttgccgaccatggaactgtgacgtcaattcatgcagcccaagtggaggagggtcgacgacgacgacgagcggcctgggccctcggcagtgggcacacgcaatttgattactcccccatctttccaaattttgactacttggacgacgtgaagtttaggcccaagttcaaaggcccgcccgcccccgagcccggccgggactccaattccaaacactcgcccgtccccgtcgctccccatcccacaccaaccctctgtgcctcggtccctccgcccgtacgcgcgacgagagacacgatgcggcggtccctaccccttctcctcgcgcggcaggtggcgcggcggcggcggctgagcaacgtgccggagtccaccgtctacgggggcccacgcccgcaggagtcctcggcggcgcggcgcgtgacggtgaccacactccgtgggaagcaccgccgcggggagcccatcaccgtcgtcaccgcctacgactacccctcggcggtccacgtcgactccgccggcatcgacgtctgcctcgtcggggactccgccgccatggtcgtccacggccacgacaccacgctccccatcacgctcgacatcatgctcgagcactgccgcgccgtggcccggggcgcgccgcgcccgctcctcgtcggggatctcccattcggctgctacgagtcctccgccgcccaggctgttgattcagccgtgagggtcctcaaggaaggtggaatggatgcgatcaagctggaagggggtgccccatcgaggatcactgcagccaaggctattgtggaggctggaatcgctgtcatggggcatgttggcctcacaccgcaagctattagtgttctcggtggatttaggcctcaagggaagacggttgacagtgctataaaggttgtggagacagcacttgccttgcaggaggctggatgcttctcggttgtgttggagtgtgtgcctgctccagtggcagcagctgcaacatcagcattgaaaatcccaaccattggcattggggctggaccattctgtagtggccaggtcttggtgtaccatgacttgttagggatgctgcaacacccacatcatgccaaggtcacaccaaaattctgtaaacaatttggtaacgtgggcgatgtaatcaacaaggcgctatcagagtacaagcaagaagtggaggctcaggctttccctggtccaagccacacaccgtataagataactcccacagatgttgacggctttgcagatgcactgcagaagatgggtttgagtgacgccgcagatgccgcagccgccgctgctgaaaacagggagaaaggtggagaaccaaaaggagagtagctaatctaataatgcctgttgttttcagcagatgcacctagacctagagtagagaatgtgagggcagattacctagcataaacggtgtcctgcactagaacaatttttgccagattgcagccacataaagtcagactgcaggtcatacagaatcgtttggctttggatagcctccgaaagtcagaactgtcgacaatcgaatgtttcatacgatctgatggtc

SEQ ID NO: 143769 - DNA, 892 bp, Zea mays
  unsure (1)..(892): unsure at all n locations
  Clone ID: MRT4577_62596C.1
nnnnnnnnnnnnnnnaaaaaaaaaaaaaaaaaaaaaaaaaaaaaaaaaaaaaaccttttgcgctagcttccacagcatcacacctcccaccgccgccccagctcgcttccctccccgctacacggtcgctcaccagtcaccacccaccactgcttccatgctcctcgcctcgtttccagctcgcgaaacttagctccagatcctctcccccccatccaccgcgccgcattaacctcagatccacccggcgagctcatttcagatccatccatgcgcttcccgttccttttcgccctccagctggtcgccttggcggcggcagcgtcggcggccgaggtcgcggtgacgcgctcttcgaggatggtgcaccgtctgtcagacgaggcccggctggaggtaggcccgcgtgtggggtggtggccgcagcgaggaagcggggagtactaccgcgcgctagtgaggagcgatatccagcggcagaagcggcggctcgcggtcctctcgctctcaaagggcggcagcaccttctccccgggcaacgacttaggctggctatattacgcttgggtggatgttgggacgcctgctacctcctttttggttgcattggatactggtagtgaccttttctgggttccctgtgactgtatccagtgtgctcccttgtctggctaccgtggaaatctggatagagatcttagaatatacaggcctgctgaatcgacaacaagtcggcatcttccttgcagccatgagctatgccaatcggttccaggctgcacaaacccaaagcagccttgcccatacaacattgactacttttcagaaatactaccagctctggtttgctaattgaggatacactacacttgaactacagggaggaccatgt

SEQ ID NO: 143770 - DNA, 454 bp, Zea mays
  Clone ID: MRT4577_62597C.1
tctggggtctacccacgcgtcccgcgtccgcccacgcgtccgcccacgacgaccggaagatctcatgggaacactccaccatatatgggatagatgggatgggcgggtgatggcacctacagacccccgactggcttgagtgcctcaacgctcacacagtcggctagacctatcatttatggacaatgagaagcttggagacatctaaaaggttttggagcctgtctttacctattggaagggcacacgccaagagcgcgaatcttttcgaagcttcacaaaccgaacgggatctgaacaattgcaagaagtggtgaatgagtggagcatagccaccgtaacccgtccgaagatttctctttctttggataaaatcccaggctcgcaacacaattttggccacgggagtaaatatgtgacgagacgaaaaacgcattagccgagaaatgggaaa

SEQ ID NO: 143771 - DNA, 2645 bp, Zea mays
  Clone ID: MRT4577_62598C.1
gagatgcctgatgtgccaaccataaccctgacatttgctgcggacaagagcttgcaagctgttaatcctatcttgccatttaatgacaaacagggggcacttgccgggttctgcttagctgtgctgccatcaacagaacccattggaattattgcccagaatttcctggttggataccatgttgttttcgacagagaaagcatgaagctgggctggtaccgctccgaatgtaagccatatccatctgccatggaaatagaccaaattctaccattcacctggtactccggaagtgctaaacatgtggtaccgtccattccttgcgagcacagctcgagccggcccttccttttgcgctagcttccacagcatcaccaccgccgccccagctcgcttccctccccgctacacggacacggccgctcagcgctcaccaccgcttccatgctcctcgcctcgtttcccgctcgcgagacgtagctccagatcctctccccccccaccgcagcaccgcattaccctcagatccacccccgcgagctcatttcagatccacccatgcgcttcccggtccttttcgccctccagctggtcgccttggcggcggcagcttcggcggccgaggtcgcggcgacgcgctcttcgaggatggtgcaccgtctgtccgacgaggcccggctggaggtgggcccgcgcatggggttgtggccgcagcgcggaagcgggggctactaccgcgcgctgctgaggagcgatctccagcggcagaagcggcggctcgcgggcaagaaccagctcctctcgctctcaaagggcggcagcaccttctcccccggcaacgacttaggctggttatactacgcttgggtggatgttgggacgcctactacctcctttttggttgcattggatactggaagtgacctgttctgggtaccctgtgactgtattcagtgtgcccctttgtctagctaccgtggaaatctggatagagatcttagaatatacaggcctgctgaatcgacaacaagtcggcatcttccttgcagccatgagctatgccaatcggttccaggctgcacaaacccaaagcagccttgcccatacaacattgactacttttcagaaaatactaccagctctggtttgctaattgaggatacactacacttgaactacagggaggaccatgtacccgtgaatgcttcagttattattggctgtggtcaaaagcaaagtggtgattatctggatggtattgcaccggatggactccttggccttggaatggcagatatttcagttcctagtttccttgcgagagctggactagttcagaattccttctcgatgtgctttaaggaagatagttctgggagaattttctttggagaccaaggagtgccctctcaacagtctacaccgtttgttcctctgtatggcaaacttcaaacttatgctgttaatgtcgacaaatcttgtattggacataaatgtcttgagggtactagcttcaaggctttagtcgatagtggaacatcatttacttctcttcctcctgacgtttacaaggctttcacaacggagtttgacaaacaaatgaatgcttcaagggtgccttacgaagacactacctggaaatattgctacagtgctagtcctcttgagatgcctgatgtgccaaccataaccctgacatttgctgcgaacaagagcttgcaggctgttaatcctatcttgccatttaatgacgaacagggagcgcttgccaggttctgcttagctgtactgccatcaacggaacctattggaattattggccagaatttcctggttggataccacgttgtcttcgacagagagagcatgaagttgggctggtaccgctctgaatgccgcgacgttgacaacagcacgaccgtgccgctgggcccatcgcagcacggcagtccagaggacccgttgccgtcgaacgagcagcagacttccccgcccgtgacgcctgcaacgacaggcacggtttcctccttcagtgcgcagaataagaggaggctaccatgattttaagcagtttagtgcttatttccagtgattgattggcaggtgctccatcataaatggagcatctattatgcaggatagagatcttagaatatacaggcctgctgaatcgacaacaagtcggcatcttccttgcagccatgagctatgccaatcggttccaggctgcacaaacccaaagcagccttgcccatacaacattgactacttttcagaaaatactaccagctctggtttgctaattgaggatacactacacttgaactacagggaggaccatgtacccgtgaatgcttcagttattattggctgtggtcaaaagcaaagtggtgattatctggatggtattgcaccggatggactccttggccttggaatggcagatatttcagttcctagtttccttgcgagagctggactagttcagaattccttctcgatgtgctttaaggaagatagttctgggagaattttctttggagaccaaggagtgccctctcaacagtctacaccgtttgttcctctgtatggcaaacttcaaacttatgctgttaatgtcgacaaatctttgattggacataaat

SEQ ID NO: 143772 - DNA, 866 bp, Zea mays
  Clone ID: MRT4577_62599C.1
gtgatttgaagggatgtttttttttctcttttttgtgtgggagggggtggggatttttcaaagatcagcttgtagtggtcagttacagagttttacttttagtggacagtcaccacaatgattcaagttagaactatctgacatttgggctgccattcttatagaagtatagcatttctagctaattggtcagctatagatgagttccctttggacatttatagcattcttatagaactatcagagttcttttttgtaggaatgtggtataaatttcctcttatgttcatatccatgatggtgccttagtaatatcacaatgttccttcatacaggtgatgagttcagaactatcagcaaggaaatcacattcatgaacctgcaatgagtcaataataagatggagcccgaggaaaaggctaaaggcctccgcataaagggagctgagaagtttttgcttcaaataagatggagaccgaggaaaagactaaaggcctccgcatgaaggggcaaattagcctgagaagtttttgcctgaacgtgtaatctacaaggggactgcaaaccacgatatgttctgtaaatgcccagaccattctcctagcattgatgtatgaggcatcagacctgcaacaacagctagaaagggaactacaacgttcatagttactattgcttcaaggattctgaaacctgttatcagatatttgttgttcaacaaggcaagctttgtattgagccttgccttttgcacagcctttgcctgaaaaatgatacagtggataggcaacttttttttcagtatcattctggtcagtaggccactgcaaatataatgtaaaagctcagaccaagagccttgcagg

SEQ ID NO: 143773 - DNA, 766 bp, Zea mays
  Clone ID: MRT4577_6259C.1
tttttttttttttttatttaggaatgtccatttagataaataaacaaataaaaaaatgtgtattcacgcatcccatgcaggatctttgaattgtgcatataaatttgatttcaaaacatcaatcagggttgggacatttaaaactggaaatgaaaactaagattagaaatagaaaagaaaattttaaaaaatgaagtctaccatggtcgactcccttagcccattggccaaaagggccactactcggcgtattgtcggcccacgccagatgggccgcgcgccaagcaacaggaagcgacactctttgttctcttctgtattttattcaccttgtcggacgcgacgtcatcacaatgtcatggctgacatcacccatacgcttctttcagtcgttgacggctgggctccttggcatcgtctcgtattttcagtcgtatctccccggacgatggatttccaagacacaatgaaccgccccgtcagatccttctccttcgtaacgaacacaagtacaccgtaacaaacttccaggaaatcacaacaaactcgtcgataggttgttccccactcggacacttttcttccacgactataagaacgtcgaggctcgacatctatcccatgtgcacgcgagagatcgccatcaccgcgtgtgcgcagctgagctaccaccatcgccagaccgaacctaggaaagagaggggatgatatttaagtcatgcaagagccattatctagtcttaggaatgggtcaggctctaccacc

SEQ ID NO: 143774 - DNA, 491 bp, Zea mays
  Clone ID: MRT4577_625C.1
ctgcggacacctcacaggctcacacccacaggtccggccgccacagcaccgcggatagcagagcagagcggtgagctgcagagcagggtagccgaggtcgtcgtcgtcgtccccactcgtcaggcatgagcaaggacaattaccacaagcacgagcaccacctggggggttgctgcgcctgtttgccctaatgcctcctggattatggcctcttcctggccttcgttttactagggccggaccgggaaaaccccggctttacccaattttattgccttggggaactttccccttttcccaggtggggtaataaccaaaaggccccgaccgattctcttttcccaacgtttcccaaccctaatggccaatggaaatttcacacgcttattttttgttcaaatctcccctatttttttggtcatcccccctcctttttttctacactcgccctatcttcctacctccctttttaatccccaatatacatccca

SEQ ID NO: 143775 - DNA, 1046 bp, Zea mays
  Clone ID: MRT4577_62600C.1
tctccaatgtcaccttcgtcgacgcgccgtactggagcctccaccctacctattgcaccaatgtaaccatcagtggcgtcaccattctcgcgccggtgaattcgcctaacaccgatggaattgacccggattcttcctcgcgtgtcaagatcgaggactgctacatcgtctccggcgacgactgcgtggccgtgaagagcgggtgggacgagtacggcatcaggttcaacatgccgagccagcacatcgtcatccggaggctgacctgcgtctcccccacgagcgccatgatcgcgctgggcagcgagatgtccggcggcatccgcgacgtgcgcgccgaggacagcgtcgccatcaacacggagtcggccgtcagggtcaagtccggcgccgggaggggcggcttcgtcagggacatcttcgtgcgcggcctcagcctccacaccatgaagtgggtgttctggatgaccggcaactacgggcagcaccccgacaacacgtccgaccccaacgccatgcccgaggtcaccggcatcaactacagcgacgtgttcgccgagaacgtgaccatggccggcaggatggagggcatccctaaggacccctacaccgggatctgcatatccaacgtgaccgcccgcctcgcgccggacgccaaggagctgcagtggaactgcaccaacgtcaagggggtcacctcccacgtctcgcccaagccgtgcccggagctcgccgcggagggcaagccgtgcgccttcccggaggaagagctcgtcatcggcccacccgagctgccgaagtgtagctattgaggccgattgccaaaagagatcattgatcatataggctcttcggtgatagtctagacaagcagtatgagaaatgcagctgaaatacgtttgcattacagtgtccgtctcacattactgcttcctccgattacaatgtctggcagtggtataacttgtgactacaaattatgcatcaagaagaaatcagcaaaacggacatgatcattgcaaacctttttcataggtgcacaagtt

SEQ ID NO: 143776 - DNA, 191 bp, Zea mays
  Clone ID: MRT4577_62601C.1
cgcggtagtggagacgagatgcacggaggggcgacggccaagcagcatgcgcgagacggtgaccgcggcccgacgaagacgccgacgacggaggtgaagggagactccgccggcgccaaggggagggccgacttttcgaagggcgacgccgccgtctacaaagctgatggagacgacgtcttcttagggaa

SEQ ID NO: 143777 - DNA, 474 bp, Zea mays
  Clone ID: MRT4577_62602C.1
gcgcgcaatggggcgactacccatcatatgattcatcattacatacatacttggaatagatgttcgttgaggatgcgcctgagggacaacactctatttggtggcgtgtgcctctctctttcctatatatacataataaacacacacacacccactgctggaatggaattctttgcctcctttttctgatctacaccggacggacggactgacggcctgagctgacggactttcattgaagaacacgtaccctgagacagacatactaggtactgaaaaacgcactggatgtgtgcttatacgaaaatctgaataacacccaattctatgcatggaaaggaggagtacgagaactgactcagctaacattggggtctccatgtgggcaatgcaatgggctttaggtagctgcctaggcaccgctcttaaccagcaagtaactctcacccatatgcttgttctgggggagcacgc

SEQ ID NO: 143778 - DNA, 833 bp, Zea mays
  Clone ID: MRT4577_62603C.1
ggggaaccccccgggtccggccgggggccgcactagtctacaactatcagcggtgcctgcaggccaccgccggcgcccgcgcgcggaggaagtgcatgcagccaggagagagctagcatagcagctaggagaaactaaccatggccgcctctcgccgctcttccgttgagctcccagtcgccgacccggcggcggatccagaccaagcccggctgcaccagctgggatacaagcaggagctcaagcgaggcctctccgtcctttccaacttcgccttgtctttctccatcatctccgtgctgatgggcgtgacgatcacctacaacaccggcctgcgctacggcgggccggtgtccatgacgctgggctggttcctcgtctccgccctcaacgcatgcgtggcgctgtccatggcggagatctgctcggcgtacccgacctccggcggcctctactactggagcgctaagctcgccggcaaggactgggctcccctcgcttcctggctcaccggatggttcaacatcgtgggacagtgggcaggtaccacgagcgtcgacttctcgctggcgcagcttgtgcaggtgatcgtcctgcttgccaccggaggcctcaacggcggcggctacatggcatccaagtacgtcgtgctggccatctacggcgccatcctggtcatacacgggctaatgaacagcctccccatccagtacctggcatggttcggccatctcggagcgttctggaacaccgcaggtacatttgctctggtgatcatcatcccagccgttgcgacggagagggcgagcacggagttcatcttcacgcatttg

SEQ ID NO: 143779 - DNA, 233 bp, Zea mays
  Clone ID: MRT4577_62604C.1
aggaccacgaaacagaagaccccgaccatatgcagggcgaaagtggagaaccacccgagcggactcaaggcaccgcacaaaacacagaggaaggcataccaacacgaagggcacgaggcagcccgcaaggccccagaggcgagactacgagaccggcagcacagctagccgcaagacaagccaagcaggatgaggcgggcagactaaggcacgctatacctgttgcccccgct

SEQ ID NO: 143780 - DNA, 855 bp, Zea mays
  Clone ID: MRT4577_62605C.1
attgggacctcgagccggcgggacgtggtcgtaaacacgacatttagaacacacctcgccgccgtcgccggggacgacggcgatggcgtggcgttcgcgagctcgttcgctgctcctactccgctcgaccattccccggtcacctccagcaccatatcccactcgagtcctaacccaactcccacttccccgccctttctcccgcttcctcttctccccggatcccatccccgatgcctatttctccgccgcggcggttcccttccctgaagccttctctttctcgaccgaggtttcccaagatggcactgcggacgggaggacaacctgacctcgatgtgggaggaagctggggacgccgacgacatcttcgcctccccctgcggcgccgactccgtagccgacgatgaggaggtcgccagggtccgcgccgtcgtggagaccactcccgaggacaagatcgcatccaccctcgccgacatgatcgtggacttcaacgagccacttctcgccgcagtcctccttgctgccgagcaatgctcctataagaagctggtttcccagttcaattatgctacgaagaacagccccgttgccaagagcctctcgaatcttgagatcctcgtgagcaaggtagctgattctgatgaaatggacaagacagacgcttatttgctttgggattccattaaggaaattggctctgtgccaggatcagtgagtacactgttattgaataaaatgattgccatattttggaagcttgagaagtccaaggcagcggtggaggggctttcccagtttgatgagtttggttgtactccggacagtgacagctattatcctgggattgaa

SEQ ID NO: 143781 - DNA, 1411 bp, Zea mays
  Clone ID: MRT4577_62606C.1
cgtcttccttcttcctcagctaggcacccgtgcccatcttcagtccacctagccatgcctacgacgatggcggcggcggcggcagcgtctgctccaagctcgctctgcgtagacggaaagcgggtgctcctttcccagcccaacctcctccgaattcacgcccccgtcaagatctgcggtgatatccatggccagtttgttgatcttctgaggttgttcgatttgggtggttatcctccagcttcaacttatgtattccttggagactatgtcgatagaggcaaacagagcttggagactatatgcctgctgctggcatacaaaatcaggtatcccgaaaaaattttcctgttgagggggaaccatgaggatgcgaagatcaacagagtctatggtttctatgacgaatgtaagaggaggttcaatgttcggctgtggaagatattctcagattgcttcaactgcctgcctattgcagcgctcattgatgacaagatactgtgcatgcatggtggtctctcaccagaatggactagtttggatcagataaaggatattgagaggcctgctgagattcctgattatggtctcttgtgtgatctgctttggtctgatcctagtcctgatggagaagggtggggggagagtgacagaggtgtttcgtgtacgtttggtgcagataagctcgtagagtttttggagaagaacgatctcgaccttatatgccgagctcatcaggtagttgaagatggttatgagttttttgcacaacgaagattagtgacaatcttttcagctccaaattactgtggagagttcgataacgccggtgctctgttgagcatagatgagagcctaatgtgttcatttcagattctgaagccaactgatatgggtccaccacatgcaagaaaacaaattccaaataagccagcaagagggtgaagccttcgaccagcatccaatactttcagcatcatgatcgtcagtcagctcaaagggggtgatctgttgtttggatagttggatccaccaggacatggcattagactcagcgtcttggttggcggcttggctgtaaaggatattctgtacagcattaggttggattcagcgcaccatctgttctattgttcttcctgccggcacagtacctcattggcagcttgacatccagtagatgttagtagtctctatttgttttttcttagctgtgtcatgcattgttttttgagcgtaacttgatgtatggtgatttttgtaatctttgtaatatgtaaatgctgcaggaaataggtctgcacaaattctgtccatcagcagtaccattcttttctttttttgacttccagttcttttgtggatctgaaagacgtctagagctgttatctaaagtcttaaaagatgctgg

SEQ ID NO: 143782 - DNA, 876 bp, Zea mays
  Clone ID: MRT4577_62607C.1
gccggccgggttccgagtccgacagaacagcacgtgaaagcccaggcctccctccctccctctccccacgtgctggaattcggccgctgcctgcaagggtgaccttgcttgagcccgtcttccttcttcctcagctaggcacccgtgcccatcttcagtccacctagccatgcctacgacgatggcggcggcggcggcagcgtctgctccaagctcgctccgcgtttcgcgccaggggacgatcgggggaggccatgtcctctacagcaggtctcagagggctgccactgtctccgccagagcttccatgaacataacgtgctgcgcgaaccagacgcagacggcgcagcgcaagtcgtattcggggacgacctctccgccgtcaggttcagtgaaagagaaggtgaagccgaggctcgacgacgggggcgtcgggttcccgccgttccggttcgggggaggcggaggaggaggaggcggcggcggcagcagctcgtccggcgggttcatcctcttcgtggtcgtcctgctcctggattacctcaaggagttcgagaggaacctgcagaacgggccacggaggagcggcagtggctacgacgacgggctggcgccacagtagattcctctctctctctctctcacacacactctcggtatgtggtttggaagagaacgtgtactacgtctctacacgagcatgtgttgcagagatgcttcggtgttcgttggcgtgatctctctttttgctacaaaagacagagtttttctcgagggctcatggtgaggactagaaattttagccagtcgaacgaatgccttgagatcacacaatgaaactcattggcgcttcgaaagtttgaataaatttcaaag

SEQ ID NO: 143783 - DNA, 2227 bp, Zea mays
  Clone ID: MRT4577_62608C.1
gttaggcaccggtgcccatctctcagtctctctagccgctgcctgcgtcctgcgccacacgccgcggccgtctccgggcaggaaggaagggggcgggaagatgatgatgacgcgggcaccgatggggccgatggagggcgcggcggtggacgagatggtgcgccgcctcgtggagggcggccgaggcgggcgccaggtgcagctgtccgaggcggagatccggcagctctgcgtagagggcaagcgggtgctcctctcccagcccaatctcctccgaatccacgccccagtcaagatctgcggtgatatccatggccagtttgtcgaccttctgagattattcgatttgggtggttatcctccagcttcaacttacgtattcctcggagactatgtcgatagaggcaaacagagcctggagactatatgcttgctgctggcgtacaaaatccggtaccccgaaaatattttcctgttgaggggtaaccatgaggatgcgaagatcaacagagtctatggtttctatgacgaatgtaagaggagggtcaatgttcggcggtgggagatattctctgattgcttcaactgcctgcctattgcagcgctcattgatgacaagatactgtgcatgcatggtggcctctcgcccgaattgactagtttggaccagataaaagatattgagcgacctgctgagattcctgattatggtctcctgtgtgatctgctttggtctgatcctagtcccgatggagaagggtggggggagagtgacagtggtgtctcgtgtacgtttggtgcagataaacttgtagagtttttggagaagaatgatctcgatcttatatgccgagctcatcaggtggttgaagatggctatgagttctttgcacaacgaagattagtgacaatcttttcagctccaaattattgtggagagtttgataatgttggcgctcttttaagcatagatgagagcctaatgtgttcatttcagatcctgaagccaactgatatgggtccaccgcatgcaagaaaacaaattccaaataagccaacaagagggtgaagccttggaccagcatccaatacttccagttccagtatcatgatgatcgtcagtcagctcaaagggggtgatctgttgtttggatagttggatccaccagggcctgacattagacatccatcagccaattaatccctttagccaccctttactcgtgtcttgggaggcggcttggctgtaaaggatattctgtacagcatttagttggattcaacacatcatctgttttactgttcttcctgccggcaagggacctcattggcagcatgacatacaatagatgttagtagtctcaatttgttttccttagcttctgccatgcgtttttttttttttttggtgcgggacttgatgtatggtgattttatatctttgtaatatgtagatgttgcaggaaataggtctgcacaaatccagtccatcagcagtaccattcttttctttttttgacttccagttcttttgtggacctggaagatgtgtgaagctggtaatgtcatgcaatgcaaaaaaaaaaaaaaaaaaaaacgaccgtcgcgatctagaaccggacgcgtgggcttcccgcccccttccttcctgcccggagacgatcggggcgtgtggcgcaggacgagaaatcagagggctgccactcgctccgccagagcttccatgaacataacgtgctgcgcgaaccagacgcagacggcgcagcgcaagtggtatgcggggacgacctctccgccgtcaggttcagtgaaagagaaggtgaagccgaggctcgacgacgggggcgtcgggttccccccgttccggttcgggggaggcggaggaggaggcggcggcggcggcagcagctcgtccggcgggttcatcctcttcgtggtcgtcctgctcctggattacctcaaggagttcgagaggaacctgcagaacgggccacggaggagcggcggtggctacgacgacgggctggcgccacagtagattcctctctttcttccccacaggtgtgtggtttgaattttggaagagaacgtgtgctaccactctacacgaccatgtgttgcagagatgcttcggtgttcgttggtgtgatctctctctctcttttttttttttcctacaaaagacagtttttctcgagggctcatgtgaggactagaaattttagcc

SEQ ID NO: 143784 - DNA, 678 bp, Zea mays
  Clone ID: MRT4577_62609C.1
atttcacgtctatatagaataagcatatagcatgggcttggcatccaaagtgctgacagacatggaatccaacggcggcgtcttcttggctgttgacctcctgcacttcacggtgggcaacgcctgtggcagctgcccgaccccagcgccaacggactagtcaccgatgccgactactgctaccccacccccttcctccaggggcaagtgcccggtgaacgtgctcaagttagtggtgtgagaccatgcgctacctgctcgtgaacgccaaggtggtaaggcgcctgccggagcatgttgtaacctcatcaaacgacttgcggacttcaatgccggcgtctgtctctgaactgctatcaagggcaacgccgctcgacctcgttatcgatgtacccatccagctaaaatccctcctcaactactgtggtaagcgtgttcccaaggtatagttgagagagtaagcatcttgcgttgctgacacgctcatatatgttaatgtacgagactacatatgcatgcacctctgcatggtacgaatgcatgcatctgtgtctgcttgataatatatcaccgtgactcacgtgcatttgtgcacactttcgatgtctacaaataccaatgaacccttcccacacaaatactttgtaaagtttaatttgccaaaaaataaacaaacag

SEQ ID NO: 143785 - DNA, 368 bp, Zea mays
  Clone ID: MRT4577_6260C.1
ccgggccgacccacgcgtgcgaaaatcataatgcagaatacagttttaagtttcaaacaacaacggcggccacgagattctggatgcttatactacgagccctgtgcgcgtggatcgctgacgcaacgatttataatcaatacgtacaagctcacatacctgccgttgttgccgcatacattacatcaatgaccgggctaagactgtgaaaacccaatccttatacactacaacatccaacttgccatcgtaccaagcatctccagtttcttacacccgttcttctaccaattgccagccctactctttggcgcagtcatcggcacaaaccataagggcaacaacaactgcaacaactcgtgctacca

SEQ ID NO: 143786 - DNA, 332 bp, Zea mays
  Clone ID: MRT4577_62610C.1
tcgtagatcgactctcaaggccggcacgtaggccgcgtcgaggctgttgctgaggactccccagctgcgcacgtccgaatcactgatctcgtccatgaagaagcgcgtgaacgggttgtcggggtcgaccctcttggtgaccccaacgggagcctccttctccctgaccaccacgtgctccggcatgccgggcacctggatcatggtcccgagctcgaagatgaccggcgggctcgcgtcgagcgctttgcagatcgccgaggtgaagcaggacataccgttgaacaagatgcgacggcgccggccgtcggccgccacgcggtctgtgaacc

SEQ ID NO: 143787 - DNA, 297 bp, Zea mays
  unsure (1)..(297): unsure at all n locations
  Clone ID: MRT4577_62611C.1
agcgacggcatgatcacagccggtgtttcgagctcaaggcaccggctgcaagtgcgggttccaccctgtttaggtgggcgcccccacagangacnccaancctcgactcaagccataagaggtcgtgaggtcgccgaggctcaagcctgcacaacaaatctcttgtttctccctacttaattctcccttgtttctaaggtttcgactctacacttctattgttctccccagcatactggctatcgcggcatccatccattctctaatacaagccaagcaaactgctgcgtgctccgg

SEQ ID NO: 143788 - DNA, 353 bp, Zea mays
  Clone ID: MRT4577_62612C.1
atcagataggcctgggagctacgcgtaggacaccttgacactactggcgagggaagcgctagaccggcgctcaactgacgcatggagcaggaactcctgcgctagaagtatgtgtgccgagctgttgatctgctgtggtgacactgaggacaccgaggaggtgctcgtgatcatgcggctcaactccatgctcatcaacatgatcatgtacaactgcaacgacatgatgatcaacgacgtcaatgtgacggtgtccggctacagcttcaacacggacggtatacacatgggcaactcgatcgacgtctacatcaccaacaccgacatcggcgtcggcgaccactgcatctaca

SEQ ID NO: 143789 - DNA, 299 bp, Zea mays
  Clone ID: MRT4577_62613C.1
tcgtttttttcttgtacagcggacatgcgctccattgcatgcgggagggattagtgctagttatattgcattagctagggactaatttacccacacctggatatgttaacccctgttagaacaactacgccggttcagtcccttaccgtctgacaggccgttggaaactgaatttaatgccagctttgtaaattctgacaggattgcagcggtttttatcagatgggcacagggtcgcctctcggcgaccagatcatacatgtacgtgatcggacactgagaccgtcgacagatgaata

SEQ ID NO: 143790 - DNA, 469 bp, Zea mays
  Clone ID: MRT4577_62614C.1
gtattcaatccaaatgcattcattgctcaagagtgtgccatgattccaatcgaatgggtctcacgtcgagttgccactggttcgtatcttcgtcgtaatccaaatgtgaaggaaggatatcgctttgctccagtcaaactggaaaccttcttcaaagatgacgaaaatcacgatcctttctggtcgatcgactcggtgatcgaagctcgtcttgtgtgcgggggattggaaatcactcgcaatcacgtctacgagatgttccgagtgacagaacttgtgttcgaagtgctggaacgcgcctggtccacagtcgatcacgccttgatcgacatgaagatcgaattcggtgtcatttctcgtaacggcaagctggagattgttttgggcgatgtgatcgataacgacagttggcgattgtgggcctgtggcgacatacgattgatgttggacaagcaagttaccctaactt

SEQ ID NO: 143791 - DNA, 621 bp, Zea mays
  unsure (1)..(621): unsure at all n locations
  Clone ID: MRT4577_62615C.1
ccacgcgtccggtcagctctcctgcaaaatgtaaattctgcagttgttatctggaactgaagatattctaggactgtttcctattgtttgtgcagttccatttctgtcttcattttttttgtgtgatgcttcctgccaaatagtagcacctgatgtggaatgtaggccagcctttgtttgactttcgtttaccatttccataagaatataatgctgattttgtcagcatgccatcaaattacgttctgtgtaaccgtctccaatgtgacttgttttatttggtctgctcagctgtatatttcttgcctaatttcgctatcgaattttctttggaactttcagtatttcagtggagcttaagtttgtcatgcatcatcctccccctgtaggtatcgggcaattacaagtgcgtactatagaggggctgttggagcacttgtcgtgtatgatgtgacacgccatgtgacctttgagaatgtggagaggtggttaaaggagctccgggatcacactgatgcaaacattgtcatcatgcttgttggcacaaagctgatctgcgacaccttanagctgtatccgtgggaggatgccaagggcttcgccgagagggaaagcacattc

SEQ ID NO: 143792 - DNA, 301 bp, Zea mays
  unsure (1)..(301): unsure at all n locations
  Clone ID: MRT4577_62616C.1
anncacccaanacgaaagctcnccnancccngcncnanncnnncccaaccanaaccacnnancccagacnacanctacancnncntcnnncaaccacacacncaacaacaaccaaaacaagnacnagaanacggcgcgcgncggnagnntnanccagncctcgccccanccgaagtccaaccgaaggagggagagagananatacgcaacaanagnaaagaacncncanaacaaacaccngncannagcaanaaangacanncnacganccnnannaaannnnnncnncgnnnnannancn

SEQ ID NO: 143793 - DNA, 542 bp, Zea mays
  unsure (1)..(542): unsure at all n locations
  Clone ID: MRT4577_62617C.1
catagctggtgggcgttggnctaggatctaactaaaatcccctcctctccggtcaaagtctccggagtccccaaccattctcctatccagcgggctcaagctctccgttgccacaagtgtaggtgcggccgtggaggtgcagatctaggacttggagctctctagttcagccatcgaattaatgtaaaataatgaagaaaaaagagagtggatagggcacgcgaggaggatcgctgcgatcgagcgcactaaatttcgaaggggcatacaaagatggcagaagctgtggtgtttgctcttgcaaagataagcgtatccttggcagggtctgccatttccggtctgagggaacatgcttctataatcaaggaacttccagggaaggtgcggcgaatagaagcacaactgtcaataataaacggcgccctccagcagcaagattcagcctacctcagcgaccacgcctacatgaaatggatcgcctacatcaagaccttggccttaccaggtgaggatatcatggatacatactcacaccatgc

SEQ ID NO: 143794 - DNA, 375 bp, Zea mays
  unsure (1)..(375): unsure at all n locations
  Clone ID: MRT4577_62618C.1
caaaggaggagttttggtttacatcgnggcacaagaacatggggagccactgggcggatctacacgacatggccagggaggcctgagactcccacgacaacttggaatatcaagataactatcccgaagtacagggacttcccacaagtgatacaagccacgaccgaccgctgcgggaacactgacgataacagcaggcccacgggcactggagaagccttcccacacataaaatgcactgggcgggccactcccaaaaacatagccaccaagccaggcgagggagcgaggataaactatgtcgaatgagacatgaacaggtaaattacacctgctcaaaatgtggtgctaaagatcggctgcacacacctgacc

SEQ ID NO: 143795 - DNA, 442 bp, Zea mays
  Clone ID: MRT4577_62619C.1
taatccgggggtccacccactcgtccgtctccttatctctaacgatcttctttttcctactttcgctcccttttgctcatcgctagtgccttgcggtcttttacctcctgctctagcatctgctatccatacttacagtcttcgtttgatgctggaatcctgattggcaggttcaatcacatagctcgatcgccatgtctttcactgtctctcatgacaagtgctaagcctgcgactagactgtccacatcatcgacctgctctccgcctactgcttctcgtaccacatgacattcttcaagtgcatccactgcaatgacgtcctctcaatcagcagatactctctcatggacggagtccttttctttatgactcactctgtacagcttttcaactatacaggtaccctctcataaaacttttaacgttgagcatattcaaa

SEQ ID NO: 143796 - DNA, 428 bp, Zea mays
  unsure (1)..(428): unsure at all n locations
  Clone ID: MRT4577_6261C.1
aataaaacgccaggggacgagaccanggatgttgggaccttggggagaaagcgcgggacccacacacgccgggggacagacaaccacagaacagagccgagcggaggagcaaaggagggaagccggacagaggagctgacgaagaacggcaggcagggctgcagacaagcgcgcgancgagacgaccgaaagcggcggcaaggaacaggggcaccaacagatgtgaaaagagaacgtgtcgagagacagaacgcagaagcggaaaacaagggggcaggcctgctgccaagagagagaccaacgcctaagggagaccgcgcggagcgcagacacaaacgacagcctcacaagagcagtcaccagaagaggaggaactggacgacgccaaacaacgcgggagggggcgaaacccggacagcccgagaggc

SEQ ID NO: 143797 - DNA, 388 bp, Zea mays
  Clone ID: MRT4577_62620C.1
attcggctcgagcgaagttcacaatcttattgatatggcgagaccagtgcccgaaagggagcagactgtggagctacagctcctggcgcgttccggttggcccgagcaagatgctagcgtaagggagctcgacaatcagctgacgattaacaacgttgaatcaaagtataactcgctgaagattgaattttcacagactgaaaaccagaggctgcagacacagctctcacagaactcaaaaatattctctgagcttgaggcgacatgaacaaaatgcatgtttctgaagaagaagtttatatcgcatgcagaacaggcacaggagcaacacatctctcttgagaaaacggactactcattgcagcacaaacagactgttgaggagaaa

SEQ ID NO: 143798 - DNA, 2725 bp, Zea mays
  Clone ID: MRT4577_62621C.1
gttttgcagctagcaatggagagttctcagagaatcttgacaagacatactatgtatatttaccacccgaattgtgccttgtgcatcctctccccggatcacttgttcgtggagctcagaggttaccctcaataatgagaagggtggagagcatgcttcttgcaattcaactgaaggacataattgggtatccagttcctgcaaataagatattagaagccttgactgctgcgtcatgccaggagacattctgctatgaaagagcagagctgctgggtgatgcatacttgaaatgggttgtgagtagattccttttcctaaaatatcctcaaaagcatgagggacagctcacaaggatgcggcagcagatggttagcaacatgatcctgtatcaatacgccctgaataaaaacctccaatcttatatccaagcagatcgatttgctccatcaagatgggcagctccaggagtgttacctgtatttgatgaagaaacgagagattctgaaccatccatctttgatgaggaatttactcctagcagtgagttacaaaagaacttgtatgatgactatgatggcgatagcatgcaagaagacggtgaaattgagggagattctagctgctatcgtgttctatcaagcaaaacattagcagatgttgtggaagcacttattggtgtctattatgtagctggagggaaaattgctgcaaaccatctgatgaaatggatcggtattaatgcagagttggatcctcaagagatcccatcttcgaagccatataacatacctgagagcataattaaaagcatcaattttgacacattagagggtgcattgggtatcaagtttcagaataaaggcttacttgttgaagctataacacatgcatcaagaccatcatcaggtgtttcctgttaccagcgcctggaatttgttggtgatgctgtattggaccatctcattacgaagcacttattttttacttatacggacctacctccaggccgcttgactgacttgagagctgcagctgttaataatgagaactttgcaagggttgcagttaaacataagctacatgtacatcttcgccatggatcatctgcattggagacacagattcgagagtttgtgaaggatgtccaggaggagctttcgaaaccaggtttcaattcttttggccttggggattgtaaggctccaaaggttctcggagacatttttgagtctattgctggcgcaatattccttgatagtgggtgtgctacctccgtagtctggaaggtttttcagcctctgcttgatccaatggtgacgccggacacccttccgatgcaccctgtaagggagctccaagagcgctgccagcagcaagccgaaggattagaatacaaagcatcccgtacaggcaatgtagctacagttgaagtcttggttgatggcatacagattggtgtagctcagaacccacagaagaagatggcacaaaagttggcggctagaaatgcacttgttgtcttgaaagagaaggaaaccgcagcaaagaaagacactgaaaaggatggcgagaagaaaaacggttctcagttcactaggcagactctgaacgacatctgcttgagaaggcaatggccgatgccacagtacaggtgtataaacgagggtggccctgcccatgccaaaagatttgtttatgcggtaagggtaaatacatctgacagtggatggactgacgagtgcattggagagccaatgccgagtgtgaaaaaggccaaggactctgcagctgttcttctgctcgagctgctgaatcgaaattaccgtggcaagcctgatggaaaataatctttggtgatgttctgtggtggtaggtagacgtggaagcatccatcattctgattatacccccatgcagtgcttttcagcaaagcaaattaatggcctttgttgatgttcttggtggcggtattggtgatatggaggcattcaatgcaagcataagcagagctatggggagtgggattagaggattattattagttttgtctgaggtgactactaggtattttactggcgaggtactgaggtcacaactcacaaatagcagttgcaaattgcaatagaggaaatgatgataggttgatataggatattggaggcctcttattcatcgattgtataagatgtttacagaacagtgcattgatccattaaatttatattgattgatatttttatagtggatgcgcctgcagctgggaactcggggttctctatcttggcctcgccgaccaaatatcacgtacgtcgacgtccgcgaacagtatatatatggtaggcttggcgggcgtgatccccttgcgcatggtacagagcaagacgctgagctggatattctgataatcccgtatactccaacagaaactacagaatggaatcaagttgtacctgcgtttctgctgctcaaaaattgcgagatggaccatggacgtgtgttgtttggcaacaacgacgcaaccagcacggacaagaaggggggacatgcagtctctcgaaacctgtcctatacaattagaaagaaaaaaaagagggaaaataaaaggaaaagaacgcgagggcagggccggccggtcggtcggtgcctgcgccgcacttttgtcatgtgcctagcacaatcgagggcctcacctgcccgcctacctaaaaaatattttttggac

SEQ ID NO: 143799 - DNA, 462 bp, Zea mays
  Clone ID: MRT4577_62622C.1
gtgtgaaaagggccaaggactctgccgctgtttttctgctcgagctgctgaatcgaaattaccgtggcaagcctgatggaaaataatcattgattgatgttctgtggtggtaggtagacgtggaatcatccatcattctgattatacccccatgcagtgatttgttgatgttcttggtggcggtattggtgatatggaggcattcaatgcaagcataagcagagctatggggagtgagattagaggattattattattagttttgtctgaggtgactactaggtattttactggcgaggtactgaggtcacaactcacaaatagcagttgcaaattgcaatagaggaaatgatgataggttgatataggatattggaggcctcttattcatcgattgtataagatgtttacagaacagtgcattgatccattaaatttatattgatatttttatagtggtat

SEQ ID NO: 143800 - DNA, 775 bp, Zea mays
  Clone ID: MRT4577_62623C.1
gacccgctggaaaaaaaaattcacccacgaccgcttgtccaccacttcctccaccgatccccaacctcccccgatcccatcgccgccgcgcgctgcctacctcgcctcctaccggcgcgccaccacttccgcctccttccggcgcgccaccagacccgccctctccccccgtgcactgcacctccccgcgcgtcgcgcgccgccggccgccgctgtggtcgagcttccccggaccccaacgaccagccgtgatgcactccccaaaccaccacgcatccccggatccgccgccaccacgctgtggcgagctccctcgccagggatccactgggacggcagcggcccgatccccctgccgcggccaacgacctcctgctccgcccttgctgtggtggccgccagcggccttccgccgcgctggaggtgcccgtcccctacctcccgacgctgccttggtcttccccaccttctccagtagctacaacgtcggacatctcctgtagtggatcggctcattgaccaccgcccgatgcgtcgccggaccgacggatccacgctgctcctccacctcccgaccaatgccctcggcccgtcctgctgctcacctcctcctgcatatgcatcaacaaaacatggcatccgctgcagtccacatcgttcaacagtagcaggtcaactcctcgccgccaaaagcccacggtctattgagccagagatggcactgtacgccgccgcggccggtcatctggatcagacgcctccagggccttcctcg

SEQ ID NO: 143801 - DNA, 228 bp, Zea mays
  Clone ID: MRT4577_62624C.1
gcacgagctgcctctcacctcctctgccgccccaacacgcctcacgccgccgcgtccgtgctccggcctgtgctccgccgcgcccgtgctccgaagtgcagcacttgaacaaagcaaggccaaatcaattatggacgctaggcaggtatccaagatggtgaagttcccaggaggtttatttgcgtcttggataccagtattaagctcctcttgtatgctactgtcaac

SEQ ID NO: 143802 - DNA, 695 bp, Zea mays
  unsure (1)..(695): unsure at all n locations
  Clone ID: MRT4577_62625C.1
atcttcattgcgacctgcattagacataccttgaaccctacccaccaaaaaagaaaatacgatcgagagacacgacaacgcacattattattgatcctgtatgcctagcgagtggagaaacaccgctgaaatcgtgctccgctgcaatagcctgcagctcctggatgccatactgtggctgcacagccgatcgaggtcaccagagacatgccaacgacgaccaccacaactacgtaaacaatggcaggcatacatcgacactactactaacaacaaccacagccaacataatcacggtcaaagatcagctgcacccgacgtgaacgacgaccacaagacctacgtgtcactttacgtcctagaagaagaagcgtacaatgatcgacgagcctgcctcgtgagcataagatgcgcatggacatgaattagaagaatcaatgcatggagaggtcctcagacaccacattgtgcatagtcagaacttttgcatcgcttggtgcgggtcgaagaaatcacgtcttgttgactcatagattcacgggaatgctgcagaacgcgattgagctgaccactgttgactgtgatgtatgctaataatcggtcatggtatttcctcaatttattcgaccttgagggggtctctccagtctgatcctggntgaatacaacgcaactgacgatgcacagaatatgat

SEQ ID NO: 143803 - DNA, 232 bp, Zea mays
  Clone ID: MRT4577_62626C.1
ccggaaatagccccggcacgacgctcatttgtcggcggccgccctcctaaatttttgttcgcggatatggcccaatcacacacagaaacgaccaatgcaccgctcaggccttataaccatccacagggatggcaaggagcaaacgctctccattttgcatagacacttaagaggcgaaaaaccaattcaattgctaaccatatggcccaaccacatgccgaaactggagctc

SEQ ID NO: 143804 - DNA, 449 bp, Zea mays
  Clone ID: MRT4577_62627C.1
gaaggaccaaataagcaaagcttttttgtacacgagggcaatggtaccaaatacctgacatcaacgacacacttacaacaaatacccactaaaagcggaagggggcactttggccaaaagccccgtatgtcaaatggcaagttaaaaagtgttcgtagaggccactattggggtagaaccatctgtagaccagagcaactctgggcgcccaccgcaagtgccgcggaagatatgaaaactagcgttcttcttcggcgcggtgaccacaacctccttctcaaagaccgtcgccaccacagccgttgtccgaagaaccaagtgcaaaccggcgagatccatccccgagtacttgcctaaccactccaggggcgccatcacctcctctcaacagattgaccaaaacatgcggcaacaaccatgcaacgttaccatcaccaccaattattggg

SEQ ID NO: 143805 - DNA, 487 bp, Zea mays
  Clone ID: MRT4577_62628C.1
cttggaacctttgggctgatttatgtgcttgtttatgtgcttgtgttaccggtggtggtgatgtgttaattactactagttagggtaattgtcgtgacagtattattaaatactgttgctaaagcgactattaagtatcatgtggaagaaggtgcgcggaagaatcgggcgcggtatatggaggatgattcgcctacgaatggtgttactcctaacttgcttggtggtgtttttaagtaggctgatattaatgagcgggcaaagtttaagttaggaattcatgccataaggtctatttgtcctcctggtatatcgcttcgtcgtatgggtaagttgcgtcgaaggttggcgggtactaagtcgacctcctcaatctacggttcggttacgttaggctgtgtcggtcgtgccctaccctacggaagaaagtaaggacggactataggccgctgcctcgtcaaccaactcatacatgcccgttcctaag

SEQ ID NO: 143806 - DNA, 374 bp, Zea mays
  Clone ID: MRT4577_62629C.1
tatttttttttttttttttttttttttttgttaactgccgttggagagaactcgtggcgtgaatcaacagtaccgtaagtatgcagctacatgaatcaacagtacaccgggtgacagacaatccatctcgatctgtctccttgcacacctagctcttggtcatcaatgtgcccagcccaacacgctgcgactgcgacgtggctggcaaattggcaatggcaaacttcaagtatccgcgcttcatcattcattcatgcattccgaaaacaccaccaaggcgctagctcacaccactcaccgaggtttcagtaaggaaagacgctggcgccgccgcccagccgagtgctctcggcagtggtatacaacaggtgttc

SEQ ID NO: 143807 - DNA, 265 bp, Zea mays
  unsure (1)..(265): unsure at all n locations
  Clone ID: MRT4577_6262C.1
gcctttctaggctcggctcggatcttcagcgagcttcaaaatgcggcgtcgggtcgtccttggctcaagatgtcttgcgagccaaactgtactcagccatgcatgcaacccaagtttattcttgcaaaagctgatcttcatcattcaactctcaacagtcttcaaaagcttaacttcaancctatagaatagtagtacactaccgaaattccaaatttacaagaacaatcgtctctttatgcctagccttcctttttgttcatgt

SEQ ID NO: 143808 - DNA, 312 bp, Zea mays
  Clone ID: MRT4577_62630C.1
ccttttctattttttttttttttaggaccattattctttttcgggggggggtaaatttatattacaggggcctccccagaaacaaacatacgcccacagaagagagagcacttacacactggggcacaaaaaaaataacaaactgggggctaacacagaacacgaaatactcgggataaaaaaacctccccctgtaaaaacactgccccaaaataggaagaccaaaaaaacacccgcagcacaaagaaagtaaaggcaggcacacacaagaagacagtggaccaaaataaaccccatacctcaaaggcacca

SEQ ID NO: 143809 - DNA, 747 bp, Zea mays
  unsure (1)..(747): unsure at all n locations
  Clone ID: MRT4577_62631C.1
gaaaaaannnnnnnannaaaaaaaaaaaaaaaaaaaaagaaaaaaaaaaaaaaaaaaaaaaaaaaaaagggagcgttctacttctcctttttccacggtacgcagtgttgcgatccttgctctcatatgctgttccttgtcatgcccggcagcggcccgagttgctcttgacggtggccgagaacaagggatacctccgccggtggccgggaacccggtgcaagttccaagtcctggattccttcctccgccaccgccgcctgggagccctgtgaacacgccgtgtccttcaacccctaatgatgcgacgccattgcgacccgtgtacgggaacccggtgactccaagtccttcggtgcctattccgccgccgcccattctcgtgggcgggaaccagctggtgactccaattgcttcagtccctagtcctccgctgccgccagtgcaggtgccggtgagcacaccatgttattcaatacctattcacgcgctgccagtgccggagatgacggcaccgacaccacaccgcaagacactgcagcatgttgttaagaacatcggttaattacgcgtgaaacactgtcgctctatatttattatgcgttatctgttacgtatatcaatgatggtgctagttaattgaggtactaataaaattatgacatcgcctcgatgtaatcttataaattctggtgtgaagtgtgattcaattttctgtgaatatatatggcatcccggtaagtcagt

SEQ ID NO: 143810 - DNA, 313 bp, Zea mays
  Clone ID: MRT4577_62632C.1
gggacgcttgtttccaacatgggtaccctgaagatggatcttgaggcacaggaaataaataaagatgcggtggcagcatcatactctatgcaagctaacagtgacagctgcgtggcaggcacatatctgatctactatgcgtgtcaatgtgtcgaaaaacatgactgccattttgctatatgaatgtaacgcgcagtgaaacatacaggactcgctgtttgcttgacgatgcgtctgcatgtatccggacaaattaaaggctataggccacataggatatgcgtactgcaccttctggatgcgtgcattatct

SEQ ID NO: 143811 - DNA, 400 bp, Zea mays
  Clone ID: MRT4577_62633C.1
ctgagcttcaagcgggcgcaggccgcgctgcaggtggagtccgagatctccatccggaccatcgccatgctcgcgtcgggaccgctgcaggtggagatcgagcatttaatcgccatgaccgcgtcgggaccatctccatccggatccatatggtggatgtacatctcagaatatttcattggccaagtctcattacgattttggacgaacctaaagctcacaaatccttccgtgacatggacatcagcttagactcaaagtttttagtttcatcatccactgatggctctgcaagaatatggaacattgatgaggggtctccactaaccaatttgacaagagcttcgatgagaagattgagtattgccgcttttctagggatggagccaaacctttcctg

SEQ ID NO: 143812 - DNA, 369 bp, Zea mays
  Clone ID: MRT4577_62634C.1
tttttgtttttttttttttttactttaaaacaacggcttccgggaacattaaccaatgaccacctacccaaaggaaggaaagaacaggagcatatcggctaacaatgtgcaaccaccttactatggcgaatggcaactcatgtgtacccttcgacatacactacaacacaattcaagacgatgatcctagatcgatcatggatacccacaaccaacaacaaattcaaaggaacattggcgcccaaaaacggttttcttgaaaccccaccgtggtggacaagcaggaaaacgttcgtctgcccattgcgtactctctgctccagctgctggccgtaaacatggtactatggccggccctttttgtccatg

SEQ ID NO: 143813 - DNA, 2122 bp, Zea mays
  Clone ID: MRT4577_62635C.1
accctcgagtcctcgagggaggccgggacgtcatcaccctccgtcttccccccacccgtccgtcaccagtcaccacctcactccacgtctcctcggtccctcccgcgctgctcactgcccaccgacactctcctgcgctgcgccgccatggaccgcgacccttccgtctccgacgaggacgacgacctcgagaccctcgtaccacagaaccacgccaagcccccgtccccctccgcccgctcccgctcgccgccctcctccttcagcgtcgccgcgctccgtccgacgcttccgtcctccgccgcctccctccggcgcgtcctctggtcccgccgctacctcgtgctcttcgtttccctcccgcttctcttcctaatcctcttcttctcctacgggggtgcgtcctccctccgcctgcccgcctccatccgcctcccctccgccgcacccgccgccgaccccgcggcctcccgcatgcgcgaggccgagctgcacgcgctctacctcctccgctcccagcgctccggtctcctcagcctcttcaaccgcaccgcagcccccaccaacggctccgcccccgcccccatctcgctctccgatctccagtccgcgctcgagagccagatcaagatcaaccgcgagattcaagcggcgctcctctcctcgcaccgctcagggtccggcaatgcgaccgaggacggcctggatctcgatctccctttctccggctgcaggaagagggaattgccggccagccggcggaccattgagtggaaccccaagaaagaccggttcctcctagtcatctgcatctccgggcaaatgtccaaccacttgatttgcttggagaagcacatgttcatggcagcgcttcttggacgtaccctggtggtgcccagccagaaggcagattaccagtatgatcgggtgcttgatatcaaccacattaatgactgcattgggaggaaggttgtgatcacctatgaggagtttgtggagaagaggaagaaagtggccatcgatcagttcatatgctatgcagcctcgcctccatgtttccttgatgaggaacatattaagaagctgaaaggacttgggatttctctgagcaagattgaggcagcttggccagaggatgcaaagctgaaggagccaaagaagagatctgttggggatattgcaccaaagttttcgacagaggctgaggtccttgccattggcgacatgttttatgctgacatggaggatgagtggctgaatcaacctggtggtccattggctcacaagtgcaaggcattgattcaaccaagtaggctcatagtgctcactgctcaacgtttcgtccagactttcttgggaggaaactatattgccttgcattttcgacggcatggattcctgaaattctgtaatgtgaagaaagagagctgcttcttccccatcccccaggctgcagaatgcattctgcgaatcgttgagaaggccaatgcacctgtgatatatttatctactgatgctgctgagagcgaaacaaatcttctgcagtccttggttgtgttcaacgacaggcaagtccctctcgtgaagaggccagagcaccacagctccgagaaatgggatgccttgctaaacagaaaccgcatgggtggagatggtcaggttgacgcgatgcttgacaagacgatctgtgcgctatcaaacgtattcataggatcgtcagggtccaccttcacggaggacatcttccggctgcggaggggctggggatcggcgtcgcactgtgacgagtacctctgccagggcgagctgcctaacttcatagcagagctagattgagaaggcaacttcccaggaggatcgatagctgcaattttctcccattcgtgtccatatgtcctgtaaaaaaaatggtggtgtgtacatctagtgtgatttgtggtggtgctggtgtgtgtgtgtgttggggggcggggggaaggtctctgtatcggggatgtccattgatttgttcggtgttattcttgcacaggtaggcaataagctttgagagaactctttgccgttgtgttgggggtcttcggcttatgaaggtcctcaaaaacaggatttaacagatttctgg

SEQ ID NO: 143814 - DNA, 723 bp, Zea mays
  Clone ID: MRT4577_62636C.1
tgagcagggtatgagcattgcttggcgtctacgcacccgcttcgtctctctgctaggatttaaagcaaagcaaagcttcaaagcatctctgctaggattttagcgagcggcaacgacgagcgacccaaaagctcctctaaggcgagcgtgcaatggggttcgtgctggtggtctctctgcccttcatcttcctctccatcctcctcggcttcggctgctacttcctcggcaagcacaggggccgggaggagatgcggaccggcgtcggcgcgcagatctacggcacgccgctgccgccgcccggcgtcgtcggagcctcctcgccgccgcctgagccgttccacagcaagaaacaatggtccgaggctgtgtgactgagattcagacgtctctccatccatccattctactactactacatatatgtcttggtggtgatgttggatttatattcttaattctttcttctttaatttcgccctggctgtcttgagagtgtagattgagagtcaaatctgtgcttgtttctaaagatgtgtgtgtgtgtggatgttgtgatacgattgcagtcacaatttatatcttcagtaatgattgtgtctaaagatggtgtgtgtggatgttgtgatacgattgccaatcacactttatatcttctgtaatcaagcacaaaaatttctgaaattgtgcttgtgtctaaagagtaaaaaaaaaaaagccagt

SEQ ID NO: 143815 - DNA, 622 bp, Zea mays
  Clone ID: MRT4577_62637C.1
tgtgtacaatatgcattggcgggatgtctgccagcaaagcaaagcttcaaagcatctctgcttggattttagcgagcggcaacgacgagcgacccaatggggttcgtgctggtggtctctctgcccttcatcttcctctccatcctcctcggcttcggctgctacttcctcggcaagcacaggggccgggaggagatgcggaccggcgtcggcgcgcagatctacggcacgccgctgccgccgcccggcgtcgtcggagcctcctcgccgccgcctgagccgttccacagcaagaaacaatggtccgaggctgtgtgactgagattcagacgtctctccatccatccattctactactactacttatatgtcttggtggtgatgttggatttatattctttcttctttaatttcgccctggctgtcttgagagtgtagattgagagtcaaatatgtgcttgtgtggatgttgtgatacgattgcaatcacactttatatcttctgtaatcaagcaaaaaccaatgcgttgcagtagaatggcttgtgtgtgtgactcctgcaggctgtatatgtgtttgaagatgcaactgagcatctccacaagatcttttatacatctat

SEQ ID NO: 143816 - DNA, 674 bp, Zea mays
  Clone ID: MRT4577_62638C.1
gccgggcccggctatttaacccacccagcctcgctcgggccgccgggatgtcccaaagcaaagcaaagcttcaaagcatctctgctgggattttagcaagcggcaacgacgagcgacccaaaaaaagcaatcaatagtcaccatatctgctcctctcgctccacacccccctcctctgcgacttgaggcaggacaggaggcagagacgggcaatggggttcgtgctggtggtctctctgcccttcatcttcctctccatcctcctcggcttcggctgctacttcctcggcaagcacaggggccgggaggagatgcggaccggcgtcggcgcgcagatctacggcacgccgctgccgccgcccggcgtcgtcggagcctcctcgccgccgcctgagccgttccacagcaataaacaatggtccgaggctgtgtgactgagattcagacgtctctccatccattctactagtactactacatatatgtcttggtggcgatgttggatttatattctttcttctttaatttcgccctggctgtcttgagagtgtagattgagagtcaaatctgtgcttgtgtctaaagatggtgtgtgtgtggatgttgtgatacgattgcaatcacactttatatcggatccagattcagtaaaaaaaaaaaaaaaaaggccccta

SEQ ID NO: 143817 - DNA, 607 bp, Zea mays
  Clone ID: MRT4577_62639C.1
cccagcgtccgcccacgcgtccgagcttcaaagcatctctgctaggattctagcgagcggcaacgacgagcgacccaaaaaagcaatcattagtcaccatatctggtcctctcgctccaccccccctcctctgcgacttgaggcaggacaggaggcacagacgtgcaatggggttcgtgctggtggtctctctgcccttcatcttcttctccatcctcctcggcttcggctgctacttcctcggcaagcacaggggccgggaggagatgcggaccggcatcggcgcgcagatctacggcacgccgctgccgccgcccggcgtcgtcggagcctcctcgccgccgcctgagccgttccacagcaagaaacaatggtccgaggctgtgtgactgagattcagacgtctctccatccatccattctactactactacatatatgtcttggtggtgatgttggatttatattcttagttctttcttctttaatttcgccctggctgtcttgagagtgtagattgagagtcaaatctgtgcttgtgtctaaagatggtgcgtgtggatgttgtgatacgattgcaatcacactttatatcttctgtaatcaa

SEQ ID NO: 143818 - DNA, 491 bp, Zea mays
  unsure (1)..(491): unsure at all n locations
  Clone ID: MRT4577_6263C.1
ctgcacgtacctttccttaattccggaggggacgccctcntcctttacattatcttcaatccttataaatctcatatatatcatactgatcttccacatagagaggatttcaacccaagagagggggagctcttctcatactttacccactacacatcttatattaacagctcatctcatcttcacacataatctgtttttcaacaaaacatacctgattgctcaaaaattactacttcacatactcttattctcaacctcttcgatttcaccttctcttgacctagcattacttcaattccactaacactctcttttcacataccatattctttcaacatttttcttctatcaaagaacaacacatccagtactctatccttcatttattctatactacataactagttcaacatcatcccctttaatattcccaacgcctacctcaatcttcttaataaacacccattcttggttacaaaatccttttc

SEQ ID NO: 143819 - DNA, 334 bp, Zea mays
  Clone ID: MRT4577_62640C.1
cccgccccgcgaccccgaggaggaggcaagatgaagacgatcctggcgtcggagacgatggacatcccggagggcgtcacagtgacggtggaggccaagctggtgacggtggagggcccccgcgggaagctcacccggaacttcaagcacctcaacctcgacttccagctgcaggagggcggccgccatctcccacgtccagaacctcatcaagggggtcaccaagggctaccgctacaagatgaggtttgtctacgcccatttccccatcaacgcgtccatcaccaactccaacaccgccatcgagataaggaacttcctcggcgagaagaag

SEQ ID NO: 143820 - DNA, 249 bp, Zea mays
  Clone ID: MRT4577_62641C.1
gtctaatttgattatggaagaatgtgtaacttaagtaccatacttaattcaaaaaagcctaggaaagtacatatattacacccccatatttaaactaaacaacatgcttaatttaatgaggatgaatccaaaccgaatcatattaaaatacaaagagaaaacatgaaagaataatcaagatttatttacatggaggtaaaacataaaaaggaattgatgaaccaaagggcaattgtacttgtttttgtt

SEQ ID NO: 143821 - DNA, 226 bp, Zea mays
  Clone ID: MRT4577_62642C.1
tcgggtaaaaaggtcagaccggatctttttcagggggctaccacattacttcactgtgggcggacagccgcaattggttgagtcctttagacctatgaagggatttcatgttaggacagaatcacaaactggcaactctaaaggatatgccttatgggtgtaccaagatcttaatgttaccgacattgccagcgctgctattaatggcatgcctatgggagacaag

SEQ ID NO: 143822 - DNA, 451 bp, Zea mays
  Clone ID: MRT4577_62643C.1
gccggccaggttcgggatgtcccaaagcaaagcaaagcttcaaagcatctctgcttggattttagcgagcggcaacgacgagcgacccaatggggttcgtgctggtggtctctctgcccttcatcttcctctccatcctcctcggcttcggctgctacttcctcggcaagcacaggggccgggaggagatgcggaccggcgtcggcgcgcagatctacggcacgccgctgccgccgcccggcgtcgtcggagcctcctcgccgccgcctgagccgttccacagcaagaaacaatggtccgaggctgtgtgactgagattcagacgtctctccatccatccattctactactactacttatatgtcttggtggtgatgttggatttaaaaaaaaaaaaaaaaaaaaaaaaaaaaaaaaaaaaaaagaaaaaaaaaaaaaaaaaaggccccta

SEQ ID NO: 143823 - DNA, 612 bp, Zea mays
  Clone ID: MRT4577_62644C.1
cttccagctgcaggagggcgggcgcaagctcaaggtggacgcgtggttcggcacccgccgcaccatggccgccatccgcaccgccatctcccacgtccagaacctcatcaagggtgtcaccaaggggtaccgctacaagatgaggttcgtctacgctcacttccccatcaacgcctccatcaccaacagcaacaccgccatcgagatcaggaacttcctcggcgagaagaaggtcaggaaggtggacatgcttgatggcgtgaccatcctgcggtccgagaaggttaaggatgagctcatcctcgacggcaacgacatcgagctcgtctctcgctccgccgccctcatcaaccagaaatgccatgtcaagaagaaggatatcagaaagttcttggacggtatctatgtcagcgacaagggtgtgatcgaggaggagcagtgagcgacaacgtagctaaaatgcctggagatgatccagaagtgctacatctgcctggcatgttgccattatcgtttgggttgcaattttcggagactgaattttgttcttggttaggatgtgttatggagcatgttatcttatcctacatattgtcgtccctgtttaagaat

SEQ ID NO: 143824 - DNA, 1242 bp, Zea mays
  Clone ID: MRT4577_62645C.1
ggacacaaggtgaccctgctttttcagggtaagaaggggtagagaaaatgcctcgagccgaggtccgagtaccaagcgctgcagcgctgaagtatgagccccgtggactagccattgcttctccacgaggctcataccaggcgctacggcgctgaagtatgtaacccatgccatactcccaggaaaagctcgaacgaccttcaacaaaagggtacctgtacccgaaaccgacacaggtgggtaggtagagaataccgcacacagccaaaccatcctcctctccgccgcccgccgcccgccgccgcagtacccaccgggcaagatgaagacgatcctggcgtcggagacgatggacatcccggagggcgtcacggtcacggtggccgccaagctggtcacggtggaggggccccgcggcaagctcacccgcaacttcaagcacctcaacctcgacttccagctgcaggaggccggccgcaagctcaaggtggacgcctggttcggcacccgccgcaccatggccgccatccgcaccgccatctcccacgtccagaacctcatcaagggggtcaccaagggctaccgctacaagatgaggttcgtctacgcccacttccccatcaacgcctccatcaccaacagcaacaccgccatcgagatcagaaacttcctcggcgagaagaaggtcaggaaggtggacatgcttgatggcgtgaccatcctccggtccgagaaggtcaaggatgagctcatccttgacggaaacgacgtcgagctcgtatctcgctccgccgccctcatcaaccagaaatgccatgtgaagaagaaggatatccgaaagtttttggacggtatctatgtgagcgacaagggcgtcatcgaagaggagcagtgagcgacagtgtagccgaaatgccaggagatgaatatgaatgtcgtttgagttgcaattttgcgagactgaatgtgaacctttttctcattccttaaatagttgactgccagtgttcgtgggttcaaacgaaatttagtcttattaactgaatttgcgtattcaaatggattgcgtggctgcctggttatgttttgaattttgcgtcgcggtccaataattcgatagactggacccaaggaaatttgtttccaaaaaaaaaaaaaaaaaaaaaaaaaaccaaaaaaaaaaaaaaaccaaaaaaaaaaaaaaaaaaaaaaaaaaaagtactctgcgttgttaccactgct

SEQ ID NO: 143825 - DNA, 296 bp, Zea mays
  Clone ID: MRT4577_62646C.1
cccacgcgttcggagacgcgtcagtcggcatgctaaaggggacaccctttggtcccggggcaaggatgacctaattgactttgccgggcaccaaggacgaactaaagggtaggctcgactgcttcaagcttggatggagcggatattttatcgccgtagccatgagtcctgctcgtaccacttagagatcaattgagcccgggtgaccccttgtctagtacgaagaaaaaattgccacgaccaatggcggatctgttagaggagagcgaacacaggaggcctatgccctgcgctac

SEQ ID NO: 143826 - DNA, 1477 bp, Zea mays
  Clone ID: MRT4577_62647C.1
gccggccggtccggggcaaaccctcctaccccattccgccgcccgccccgcgaccccgaggaggaggcaagatgaagacgatcctggcgtcggagacgatggacatcccggagggcgtcacagtgacggtggcggccaagctggtgacggtggcgcgggaagctcacccggaacttcaagcacctcaacctcgacttccagctgcaggagggcggccacaagctcaaggtggacgcatggttcggcacccgccgcaccatggccgccatccgcaccgccatctcccacgtccagaacctcatcaagggggtcaccaagggctaccgctacaagatgaggtttgtctacgcccatttccccatcaacgcgtccatcaccaactccaacaccgccatcgagataaggaacttcctcggcgagaagaaggtacaccctacacacatatctctgtttcgtgcgtgcgtcgaagcagatcagatctgggaggttgcgatgtgttctgacctgtgtctgtctgactgcttggtggtgatcccggggtcgatcaggtcagaaaggtggacatgcttgacggcgtgaccatcctccgctccgagaaggtcaaggacgagcttattctcgatggcaacgacgtcgagttagtctctcgcttcgcaaaccctcctaccccattccgccgcccgccccgcgaccccgaggaggaggcaagatgaagacgatcctggcgtcggagacgatggacatcccggagggcgtcacagtgacggtggcggccaagctggtgacggtggagggcccccgcgggaagctcacccggaacttcaagcacctcaacctcgacttccagctgcaggagggcggccgcaagctcaaggtggacgcatggttcggcacccgccgcaccatggccgccatccgcaccgccatctcccacgtccagaacctcatcaagggggtcaccaagggctaccgctacaagatgaggttcgtctacgcccatttccccatcaacgcgtccatcaccaactccaacaccgccatcgagataaggaacttcctcggcgagaagaaggtcagaaaggtggacatgcttgacggcgtgaccatcctccgctccgagaaggtcaaggacgagcttattctcgatggcaacgacgtcgagttagtctctcgctccgccgccctcatcaaccagaaatgccatgtcaagaagaaggatatcaggaagtttttggatggtatctatgtgagcgacaagggtgtgatcgaagaggagcagtgagggacaattagttgttatcgtttgagttggaattatcgtttggtttgcaattttctcagggtgaactttgtaatcggttaggatgtgttgtggaccattatcttatcctacaatattatcgtatctgtttaagaatatgaagcttgtttatcatttcctaaaaaaaaaaaaaaaaaaaaaaaaggcagccgctcg

SEQ ID NO: 143827 - DNA, 739 bp, Zea mays
  Clone ID: MRT4577_62648C.1
gagctgtgctggcggctgctgcccctggtccgtcgggacgggtagatgaggaggaagagaacagctcgtgactgactgactccctccctcagcgtgagtgggttgcggacgaccacatccatccgttcccaccattcccttctcccacctcgcctcctccccttgcccttgcccttccacagccggaatcagggggtaatgggcgagaggggaggacccgtttttacggcgacggcggcgcgggcccgcaccaccagtaccactaccagggcctgcacccctttcccctccccttccacgtgcctctgcacgcaggagcgggagcacccgccgccggaccaggacctggagctgatgctgatgcctccacacacaatgccaatgccgctcaccactctcaacctccaagaggtttcaccgattggagcgcgtccaacagtgccttcgccgccgttgcctcacagcccgcacctgctaccaccaatacacccttccattacaacctctcccagtcttatgccctatggacccattacatgcttaacaagaatgtatcctactctacttaccctacaccacatgaggagcatccccacccattgcgccatacccacatccaggagaatccccacccattgcgccatacccacatcccggataaggattcaggttgtgcgtctagccttggatttgactctttcactacaatgtcccttggaccaaatatttgtttccacat

SEQ ID NO: 143828 - DNA, 1009 bp, Zea mays
  Clone ID: MRT4577_62649C.1
cgggaatttcgagtctccctcagcgcgccgtcctcctacgcggtacgcgcacacagccaaaccatcctcctctccgccgcccgccgcagcagcacccaccgggcaagatgaagacgatcctggcgtcggagacgatggacatcccggagggcgtcacggtcacggtggccgccaagctggtcacggtggagggcccccgcggcaagctcacccgcaacttcaagcacctcaacctcgacttccagctgcaggaggccggccgcaagctcaaggtggacgcctggttcggcacccgccgcaccatggccgccatccgcaccgccatctcccacgtccagaacctcatcaagggggtcaccaagggctaccgctacaagatgaggttcgtctacgcccacttccccatcaacgcctccatcaccaacagcaacaccgccatcgagatcagaaacttcctcggcgagaagaaggtcaggaaggtggacatgcttgatggcgtgaccatcctccggtccgagaaggtcaaggatgagctcatccttgacggaaacgacgtcgagctcgtatctcgctccgccgccctcatcaaccagaaatgccatgtgaagaagaaggatatccgaaagtttttggacggtatctatgtgagcgacaagggcgtcatcgaagaggagcagtgagcgacagagtagccgaaatgccaggagatgaatatgaatgtcgtttgagttgcaattttgcgagactgaatgtgaacctttttctcattccttaaatagttgactgccagtgttcgtgggttcaaacgaaatttagtcttattaactgaatttgcgtattcaaatggattgcgtggctgcctggttatgttttgaattttgcgtcgcggtccaataattcgatagactggacccaaggaaatttgaatccgaatggactgatacgttgtattttacggttcctttcaaatttcaaattcacatcgaatgttttaaaaaaaaaaaaaaaa

SEQ ID NO: 143829 - DNA, 360 bp, Zea mays
  Clone ID: MRT4577_6264C.1
gcacaaagtgtgctgctgctcccattagaaatataatagcgtatgttatggggatgcatatatatatgcatcatccatctacctgtgtggtgcaaaattctgaataaaacctgaataaaacctgattgagcaaaagaaaaataaaaaaaaagaacgcacaacagaaagcacaaaagacgacacagcagaaccacaaccagatgagaccgatgataacacttcatatggagatcacaaagttccgaagacatcccattctgaaagataataaatctctcttataggcgatgtgtcgcataagcctgcagtgcatgaagactgtccttagcatccagtacatggccacatcacaactcctac

SEQ ID NO: 143830 - DNA, 184 bp, Zea mays
  Clone ID: MRT4577_62650C.1
tcgtcacgcttacaccctcatcattcccgacctgccgtccgctcagccggtcaggcggtcagtcgcttgaccgcctgtgcgccgagcgccctactaccagagcaggctagcagctgcgctccgtgcgacgatccgagcagctcctgttcggtataactgttctcgcttggaggctgcctgaagc

SEQ ID NO: 143831 - DNA, 1334 bp, Zea mays
  unsure (1)..(1334): unsure at all n locations
  Clone ID: MRT4577_62651C.1
gagggcgtctgcgtctggccctttcaccttctcgcgtagctccgtagagatagagtgccgccgccgccgcctgcatcctgctaccacgggtcgagacgggtagatgaggaggaggaggagaacagctcgtcactgacgctgtgagttgcggggcgaccacatccatccgttccccctttcccttctccatttcccctttccggagccagggtaatggggcagatgggaggaccagacggcgacggcccgcaccaccagtaccactaccaggcgctcctcgccgccgtgcagaaccccagccagggcctgcacgtgcctctccacgcaggagcgggagcgcccgccgccggaccaggacccagacctggagctgatgctgatgcctcctccacgcataatgccaatgccactccccactctcagcctccaagagctttcactgattggagcgcgtccaacagtgcctttgccgcacagcccgcccctgctaccaccaatacacccttccactacaacctctcccagtcttatgccctatggacccattacatgctcaacaagaatgtatcctactctacttactctacaccacatgagccgttgcgccatacccacatcccggataagtattcaggttgtgcattcagccttgggtttgactctttcactacgatgtcccttggaccaaatatttgtgccaacatgacgcccatggaaagatctatatctgccaaagaacctgagaattcagaggatttgcctacagtagttagaagcagtgatgaaatggacactagaaacagtggcgacgttcgtcgtgacacagttgacactcttcctgagtcgaagcagagccatgaaagttgcgcgcgataccaagtcattttgcgcaaggagttgacaaagagtgatgtcgcaaattccggacgaattgtgcttcccaaggtagcctatcctattattctggggagttagggcactttgtcaacgatgttttgtaatgtaactgcctgttcaatcttctgcagaaggatgctgaggctggtcttccaccattggtgcaaggggatcctctgatactgcagatggatgacatggtgcttccaattatatggaaatttaagtataggtatgctctcactctcagattaccttatgacatctttgaaatggcacatctgagaaaggtaatagatgcaaatatgtttctgaatgataatgacctattgngatgtcctaacttctttcctgtgaagagccaggaagttgaaggcattgtataaattgatttctctcttaagtgttgccatgttcttaaaagtgaaggtcatgaa

SEQ ID NO: 143832 - DNA, 3056 bp, Zea mays
  unsure (1)..(3056): unsure at all n locations
  Clone ID: MRT4577_62652C.1
ttacacaatgcccttcctccgcctcagctagtttcttcatattctttggaaacaacaggttgtgcattcagccttgggtttgactctttcactacgatgtcccttggaccaaatatttgtgccaacatagacgcgccatggaaaagatctatatatgccaaagaacctgagaattcagaggatttgcctacagtagttagaagcagtgatgaaatggacactagaaacagtggcgacgttcatcgtgacacagttggcactcttcctgagtcgaagcagagccatgaaagttgtgcttccgtgaataatgtgatacatctaacacacactccatgtcctttttttattgtgcatattcttctcttatggcgtatctgcatttgctaagttcatcggaaaaagaaaataactgaagttcaactctggagagtaccaagtcattttgcgcaaggagttgacaaagagtgatgtcgcaaattccggacgaattgngctccccaagaaggatgctgaggctggtcttccaccattggtgcaaggggatcctctgatactgcagatggatgacatggtgcttccaattatatggaaatttaagtatagatccttccactacaacctctcccagtcttatgccctatggacccattacatgctcaacaagaatgtatcctactctacttactctacaccacatgagccgttgcgccatacccacatcccggataagtattcaggtacatcttctgcactctcctgctgcaaattctttctctctctctctctatgccctacattgcacaggcatcacaccattatcacccttatgctccaacaatcgttgaacttactacagcagttaaaaaaaaaaaaaaaaaaaaaaaaaaaaaaaaaaaaaaaaaaaaaaaaaaaaattggtacctcgggcgggccctttccccttctttgcccttggcccttggcctccttccgtcgagagagagagagagagagctgtgctggctgctgctgccccgggtccgtcgggacgggtagatgaggaggaagagaacagctcgtgactgactgactccctccctcagcgtgagtgggttgcggacgaccacatccatccgttcccaccattcccttctcccacctcgcctcctccccttgcccttgcccttccacagccggaatcagggggtaatgggccagatgggaggacccgacggcgacggcgacggcggcgcgggcccgcaccaccagtaccactaccaggcgcttctcgccgccgtgcagaaccccagccagggcctgcacccctttcccctccccttccacgtgcctctccacgcaggagcgggagcacccgccgccggaccaggacctggagctgatgctgatgcctccacacacaatgccaatgccgctcaccactctcagcctccaagaggtttcaccgattggagcgcgtccaacagtgccttcgccgccgttgcctcacagcccgcacctgctaccaccaatacacccttccattacaacctctcccagtcttatgccctatggacccattacatgcttaacaagaatgtatcctactctacttaccctacaccacatgaggagcatccccacccattgcgccatacccacatccaggagaatccccacccattacgccatacccacatcccggataaggattcaggttgtgcatctagccttggatttgactctttcactacaatgtcacttggaccaaatatttgttcccacatgacgcccatggaaggatctatatctgccaaagaacccgagaattcagaggatttgcctgcaatagttaggagcagtgatgaaatggacactagaaacagtggcaaagttcatcgtgacacagttggcactcttcctgagtcgaagcagagccatgaaagttgtgcttccgtgaataacaagttcaactctggagagtaccaagtcattttgcgcaaggagttgacaaagagtgatgtcgcaaattccggacgaattgtgcttcccaagaaggatgctgaggctggtcttccaccattggtgcaaggggatcctctgatactgcagatggatgacatggtgcttccaattatatggaaatttaagtatagattttggccaaacaacaaaagcagaatgtatatcttggaagctgcaggtgaattcgtgaagacacatggccttcaggcaggggatgcgctcattatctacaaaaactccgtgcctggcaaatttattatccgtggggagaagtccattcagcagacaaacccctagacacaatttgatgtgactgtgcaccatcagatatggcgtccgaggatacaccatatgttcacgttccagttgttatcgacttttataatgtctcaccgtcacactgagataagtcgaaaaaggagatacaccgcgtggatggagaaaaagagaagaaattttgggagacattggaagtgctgccagtgaggctacgtctaagctcagaacaaatggtttatgttttttcccctaattcggtcgtatttggatgcttgagtcctgcattgcatgatgaagaacattctcaatctctctttttttgtaaatattttaattcaggatctataaggtaaaggaagtggtttggaagcagaaaaaaaaaaaaaaagcggcacatctcctgcactctcctgctgcaaattctttctctctctctctctctctctctctctctctctctctctctctctctctctctcaactcatatatcaatacgcttaaattcgattgaaaataaaaactctcatggggaccttagagcaaaaaacatatgctttgctttcttttcattcctttcagcttcgcagacataactgtagcttgctgcaactagtaagtttgattttgtcttctttgttttgaatgcccttctgaccttcaagcatgtaatgtaagctcgcactttatttctgtactatcgtattattatctgtggtcgcatgttacatttagaatccaatgtagtattaaccgatatccacattgattcaaccag

SEQ ID NO: 143833 - DNA, 298 bp, Zea mays
  Clone ID: MRT4577_62653C.1
gtaataaaaagggaaaatggattaaaatgtttaggttgtgaaatctatttgggagaaaatgggtggagatcgtcttatagacaaacctggaaatgaacccttttgaaaaacacaaaatatacagttctttgttcctacattccaaagatggcttacaactttcgctagaggcacaacatttcaccttgtcggctacctactattacaattttaaaaacctaaaccctcgttctaaacgtttccgctttccatccttgcctggaatcctaggcacacccataatttctaacccgatgat

SEQ ID NO: 143834 - DNA, 239 bp, Zea mays
  Clone ID: MRT4577_62654C.1
agccttaacagttcgctcgcttttttttactttgttgggcgcaatgaacacacccatacagttttaaaggttggaatataccaatgccacacagtctgataagcccgaacacggcgcaaatttgtataccccctagggcgacacaccccgcagataaaggtgatgggtttcctggacacaaacctggagtacgaactggggttataatagggggtttcctttgaatgaccatttttgcc

SEQ ID NO: 143835 - DNA, 552 bp, Zea mays
  Clone ID: MRT4577_62655C.1
cttcttcgcgaccagcagcccgcgggtaaaggaggccttcacggcgcgctctctccgaagccacggaccgccgccgtgcaatgcgtgcacgcctgcttgccgtcgtgccatggcccagacgcgtgctggacgcaagcgacggcgacttcgtcttctagaccagtcagcccaccggcaaggacgcggacaccatcacattcaagaacaacgacggcttcccgcacgacgtcgtcttcgacgaagacgaggtgcccagcgtcggcgacgccaccaacatctcccaggacgagaacctcaacgcgccaggggagacctactccgtcaccctcaccgtgccggaaacctacgacttctactgcgagacgcatctcggagccggaatggccggcaagatcaccatcaactaattaagctacctatcgatcgagatccatgcatggattaactggtgctccctgctaaggactccacctatctgaacatctctacatgtcctcggcgtcgcagaaaaaaaaaagagataagcgatcctcaagctccagattatgatcc

SEQ ID NO: 143836 - DNA, 1374 bp, Zea mays
  Clone ID: MRT4577_62656C.1
ggcacgagggccaactctccacctgcccaaccgagtcaccaaaaaggggtgacacactagccatactgggtacttcaatgtacacaatataaactagctgggatcaaatacaggagcacctcgagtctgagagaatggctaacactgctaagggtaaggtctgtgtcactggggcgtctggtttcatcgcctcctggctcgtcaagcggcttcttgagtctgggtaccatgtcctgggaacagtcagagacccagggaatggcaagaaagtagggcacctctggggcctggaaggcgcaaaggaaaggctgcagctcgtgagagctgatctcttggaggaagggagcttcgacgacgctgtgatggcttgcgagggcgtcttccacaccgcatcgcccgtcgtcaccggatctaattccaaggaggagatgcttgattcagcaataaacggcacgatgaacgtgctacgctcgtgcaagaagaacccatcgctcaagagggttgtcctgacatcctcgtcgtcgacagtgaggatcaaggacgaagccgacctgccccctaacgtgctgctggacgaatcgtcgtggagctccatcgagttctgcgaaagtctccagatatggtacgccgtcgcaaagatcctcgccgagaaggcagcctgggagttcgccggagagcacaggatcgacctcgtcaccgttcttccgaccttcgttgtcggacctactctgtctcctgagctcggccccaccgcttctgatgtcctcggcctgttccaaggagagacggggaagttcacgacgtacgggaggatggggtacgtccacatcgacgacgtggcgaggtgccacatgctggcgtacgaggccgcgggcgcccgagggaggtacatctgcagcgcggcggtgctggactgcggcgacctcgccgccctgctcgcgcggcggttcccagcgtaccccgtcccgaggagcctgccccgcgcctacggcgagcagtcgtacggcttcgacacgtccaaggcccgcgcgctggggctggcggaattcaagggcgtcgaggagatgttcgacgacgccgtcgcctcgttcataggccatggccatctccccgccgccgaggaacgccggcacgcgtagcctcttggtctgaaactacatgaatgaacgtatcatgtactaattaaattatttaatacttttaactagcatctaatcatgccgtttagtctttatcagtgtgttttattttatagttatattatatttaatacttttaactagcatttaattatctgatgtgatggactaaaatttagtcggttagaaccaaaccgaccctaaatcttgtcgtaaccagtagaaagattatctc

SEQ ID NO: 143837 - DNA, 388 bp, Zea mays
  Clone ID: MRT4577_62657C.1
aaaagaaccaggccggacaacttaaaaaaagggggacaggggaattttcccgggggaaaaaccatcgccgaaacattagtgaaagcaaaagctacaacatgctcagggctaaaaggttgggcccaaaaaaacacagcctaagggggccttggccccgttaaaaaacccaattttagggcccttgggcaaagttttagggcacttgggcaggggggtttcctgccaaaggggctttttttcaaaacaagccccggggaaaaagcccgcctcccggttgagctttaatggggaattttggggggctgctaaggggcaattttggggggctgctcaggggcaatttggggggggggggcaaggttttccgggtggcaaataagggggaggg

SEQ ID NO: 143838 - DNA, 154 bp, Zea mays
  Clone ID: MRT4577_62658C.1
aaatcactctcaccgtctagatagtatgcagtttacggcaccctctagcacgtctcactatggacaaagctgatacgcgtccggatatcggtgcccaattactgcccgtttcgatactctgactactggcgggccacccttgatctcaacttcc

SEQ ID NO: 143839 - DNA, 809 bp, Zea mays
  Clone ID: MRT4577_62659C.1
cagtgagcccctcgcggccggccgggagccagccgctagcccccatcagttgctcgctcaagcactgcgctgtgcgtagccgtcggccgccgctcgctggacagagctcgcccagacggccagaccgccgctcgcctggagcctcggacgcagagcccggaccccggagtcccagcctcccaggaccgccactcgcccgcaagcagagcccgtcagccgctgcttgctggacgcttggacagccgcacccgtcagccgccgctcgcctggacgcccgaatggcatcttcatcgacgccgacaccgatgaacactgctgaggagcaaggaaggaatgttgacaaagatctgccactaccacctccatcgatggttccaacttcgacaactgacaaccctgtgtcccgccgctgccccctaattccagccggtgttggtgccacagctaagagcaagaagaaaagccacgctgcgactacaagagccaaagcggcacagggtgaagcaccgcccaccaaaggcgtccttccattaaaatccatagggtttgatttctgaagcttgataacttttaatttctttagtgattttttgtatgtatacctcgagttaatcagtatgtttatgtgtgattaagatgtaatttttgtatttagatcaagggatgtaatttttgtttacttatacatatctgtaatttttgtttactacatctctggaattgttttactggtatgtaattttggaatggtttctaacagacaacacttagaaagatagcacgtgacatatttggctattccggtcaaa

SEQ ID NO: 143840 - DNA, 525 bp, Zea mays
  unsure (1)..(525): unsure at all n locations
  Clone ID: MRT4577_6265C.1
ggagtgtcnggggttntttgacannnaancnnnnnnnnnnnnnnnnnnnnnnnnnnnnnnnnnnnnnnnnnnnnnnnnnnnnnnnnnnnnnnnnnnnnnnnnnnnngcttatttgcagcancnactattnccattcagncagntagntactgnctactctaaacaacancaacttattatatttaaccaattgncngcactgaaccccgctgnttatttgcngcaacanatnctactaccatgtagccagntanctgcatcaagccgngcttccttcttgacacaggagcagnngctgcctttctaccagnagnttgcgnctaaccnnncnaccatnttacaactacnncaatngntgnnctttgncnaacttgctttgacanacnnagtattctgctaccagnaacacatnattggtngtgccctattttagattgcttattagtatgtaattnaatantaaagtntttngggatgatgtatgtggncaacnagaaataanaagttacatttncagaaaaaaat

SEQ ID NO: 143841 - DNA, 307 bp, Zea mays
  Clone ID: MRT4577_62660C.1
agaaaagggattgaaattggaccttttttaaattcaaacaatttaaaaccacaattttttatccaccggtaatgggggaaaaaaagttgaccaacttaagacaggttaatggcaatattaggcttgggcacatttcaattacccagggttatggggctttaaaaaataagcctgggtggtttaaaaaaaaacccaggggcacaacctttaattttgttctttcggcccccccttcggttgatggacctgatcaacagccaatggctaacggtgtaagatacatttcaatgccccgggggaaacctac

SEQ ID NO: 143842 - DNA, 336 bp, Zea mays
  Clone ID: MRT4577_62661C.1
ggcagctgatgatctgtcctctgctttagcgacggattctgtggtcacagtggatatgcttgctctcggacccggaggccgacgaaaaggctgcaaggcctggcacggcctggcggctggattttgggaaagatgaggaattttgaaatgggggcatgttaacgtcttattaactgcacaaggtccaaggtacaaggggttggaaaagtattaggttaggttgaaaaccaaaacacggtttccaattaaccttaagttggagcaagttgaacaccaacttctttgtgttgaaccaagcattaaggaaaattttctcgaactaaaaaaaaaagaaaa

SEQ ID NO: 143843 - DNA, 429 bp, Zea mays
  unsure (1)..(429): unsure at all n locations
  Clone ID: MRT4577_62662C.1
ccgagacaagcccgaacatttacccccagaagaaagccaccaagaccagaggcacaaccaagcaccagcacacaagaccaaggagccaagagcacgccgaagagcagacaaagaccacagcagcagcgaagaacacccgcgggacgaacaacccaccaggagcacagccagccccccaccggaaccacaccgaggaagacgcagaacacaaccgacacaccgagggccagaagcccggcggcaacgcaaaagaganaggatattttttttaccccccccccccgggagagnaaccacgccacggagaacccagagcaaccaacggaaaaaaaagaaacgcgcaagaccggaccggacacaaaaaaagccacagcccaccacaagaacaaagcggaaggaaacacaacaggcgccaaggaaaagacgaag

SEQ ID NO: 143844 - DNA, 297 bp, Zea mays
  Clone ID: MRT4577_62663C.1
tttttaaaaaattggtaacctgccaatttaaaaggtttggggccccacaaaaattcccgaccaaaaaagaacgtttccaagccggaacccttgaaactgcaatgcccatgaaaatatttttctcacaaaaattccatcctaaaatacaacccggccagcgccttgaacacccaacccataaaacacaatcaccttcatcaacccatctctatcacctgccgccacagtgacgcagtcctcccaccatcaaaaaccgcctgcctacccccactgctgctcctcgaacttttccaccac

SEQ ID NO: 143845 - DNA, 435 bp, Zea mays
  Clone ID: MRT4577_62664C.1
aaaattggaactttgggaagaaaatctcagtactgctgtgagcctcgaagtgttgagaatgaccgagaagttttcagctgctgcaggcactagaagcatcagctagttttaaaatgtattgctcgtagcaggcagactgaaactagctgatgctttacaaaattacaatttgtatttcccaacgtttttggactttaggggacgaaattaccgatatggtccttttcattaccacgaacgagatcttgttagatctctcatactctttgcgcaaagtggggtgacagatacacccccagataaaggtagtcagggcatacgaacctttatggcttcaacagctttccattattccaaatattggaagaattataatgaaggtataatatgggttattaaaaatatacatgagtgtcctgacttaaatagtaataa

SEQ ID NO: 143846 - DNA, 469 bp, Zea mays
  unsure (1)..(469): unsure at all n locations
  Clone ID: MRT4577_62665C.1
cgcgctacttgtttaagcacaggcacaagcaggatcaaagaggcttcgttgccgacggcgagctgctggacgctacctgaccacccgaagctccccaaggggaagccgtgggctgtcgtcgagctggacggatggggcgaggccaaccccgaccagtacaactgcatccatgtcgctcagactcctgtcatggactcggtaaagaatggtgctcctgagaaagggagactagcgaacgctcatgcaacaggtgtgggtctcgcatctgacgatgacatgggccacagtgaacgtggtcacaatgcacttggcgctgggcggacgttcgaccaaggagctaagcttggtgagcaagctcttgtctcatgaaagacttatgatggacatgggtccaactacatcgaagagccttttgaaaatggcactcttcaccttatcgagttgntgagtgactggggcgtccactccc

SEQ ID NO: 143847 - DNA, 230 bp, Zea mays
  Clone ID: MRT4577_62666C.1
tcccactcttactctgactttctctcatcttcgcacgatgacctttatcgtgattatcgagaatattctactaacactacgacttaaaaactctaatacacagcacaaccgcaacacaacatcattatatatcctcactaccaccttatcacaaacatctataatatacacatcccagattttatccatcatccatacattaacaccttctactagttaccttacattca

SEQ ID NO: 143848 - DNA, 341 bp, Zea mays
  Clone ID: MRT4577_62667C.1
gaggctctagagcaagcggctcctttttcaccttcctcttttcattttttatatttttttcttctcggggggtttttttgaattttgtcgggagtttcaccaaaaagagagaaaaaaaaaaaaaaaggaaaaaaaaaaaaaaagatataaaaatggggggaagcagctgcgggggcaagcagcctaaagggcgaccccagggaaaagggagagcggaacacacacaacttcagtaagaaaaaaggaaaagaaggcataatgggaaacgcccaaaatgataaaagggggagaccgaatattcccaacaccctaggggggaaacggaacgggggggcattccc

SEQ ID NO: 143849 - DNA, 265 bp, Zea mays
  Clone ID: MRT4577_62668C.1
aaaaaacattcctgcagttacattgaacggcaacattttttttaaaggctaattgctaactggtggcacaaacatttgagggcaaaagtttgggctcaaaaatggggtatcatttttttgctttcggggggcgggttatcccaaacatttgggctcaaacatcgcctggtttttttaggggccggggaccctccacgggggacctccgtccgaggtggtgtacgcttggttgccaacaaaactgtctccgggggcgctggccccc

SEQ ID NO: 143850 - DNA, 242 bp, Zea mays
  Clone ID: MRT4577_62669C.1
gcgctcactagaccgtccaggcgttcaccgcgacgcgctctcctgcccgtgcccacctccactactccacctgcgcagcgcccgcgggggcctccccactccacgccacatcgttttcatgcacctacctgtatcggcctcccaattaagccgcccccgctgcgcgatccggtgttcaccgctgctccgccgtaggagggggaaggggaagaaaagggagggggggagcacatggggattct

SEQ ID NO: 143851 - DNA, 870 bp, Zea mays
  Clone ID: MRT4577_6266C.1
gtctttttccaccgctgaactataatctacattcaggtgctgtcaatccatatgttttttttggtgttccgctcagatgcaacaacgttgaggtctttgggggcctccctatcaactgtactagacgggaagcatatatttcgccaatatatggggttccttgaaatgagactggtcaacaaaggatctaataaacatttgtgctttgttgattttgcaaccccagcacaagctttttttgccatgagaaatcttcaaggctacaagtttgatgagcaggaccctcactcacgcattttgaacctgcagttctctcgctctcctcgtatgggttcacatggtgggtcctaggcactgaattgtgcaggtcttgttttcttctacaacttcttgaactcctgatatcttgacgcggcaaccttgttcttgctttcatcagcatcttgattttgccttaaggcttcagcttagtctatgaggaagaattgttgcaactgacatcggtacttaaagtactggaggttgccttgctgtatgatatagtggattccattctctactggtgctttcttgggtcatccactttattgattggtattgtcagctggttagtgggggcagattatctgttgagggacgtgaaccgcgatttgcaggtgtctcggtggttccagcctgtttcgaacatattggtttgcatggttgccagggccattttgatgtaaatggattcatgagaattggattatagcatagtttacagttatcctgtacctgatgatgacttttgcttaggaacatgttaatccaccggaaaaaaaaaaaaaaaaaaagcggcccaattcagagtttacagttggtttttgtggt

SEQ ID NO: 143852 - DNA, 410 bp, Zea mays
  Clone ID: MRT4577_62670C.1
ctccccggaaaaaaaaattccccccttggttaacatttttttagggggggtttttttaaaaaaccctttgggggggtctttcaaaagcatgccccccaaggggggggggccccccgcagtgtttgtttcactaaaaaacaccccctggcttgtttcaggggggaacaaaacagaaccttttttttcccaaccccgtggggattgtgggggccccccccctcgggggggcgccaggaccccctcctctggggggactttaaggtgtgcaaaaacagggccccttttttctccgggaggtcccccgcgctcccgatccccccccccccggggaccaggtcccccccgggagccaggggccccggctttcaaaaacttggctttatgatgccccccaaccgggggttctcccc

SEQ ID NO: 143853 - DNA, 197 bp, Zea mays
  Clone ID: MRT4577_62671C.1
ctcacttggccatctgtgcaccgaacaattgagtcatgtgggttacctgcggaatacaatcctgtggaaactgaatacgtgatgtattttcctgcccagggagtaggggcgggagttgacattcaatctttcctctgatgatcctacaactgtaaccttgcagggcttattcttttgttaacctgtgttaaaccctc

SEQ ID NO: 143854 - DNA, 284 bp, Zea mays
  Clone ID: MRT4577_62672C.1
cttcctctaagacacagctatagctagtagctgtagctgccatggccaaggatctcgccttcgtcctcctcgtccttgccgcgctagccgccttctcgtcggcgaccaagctgacaatccacaacctctgcccgcaccccgtctggccgctcgtcacccccaacgccggcctcccctccatctctgacaatgccgcgcgcctcgacaccaacgcgattctctccctcaccttcccgtccaccttctgggcaggtcgcgtcgcggcccgcaccggctgcgacgac

SEQ ID NO: 143855 - DNA, 584 bp, Zea mays
  unsure (1)..(584): unsure at all n locations
  Clone ID: MRT4577_62673C.1
cacacttgatatcgatggtaatccggagcacccggnaactgcaccgtgtactaggcggttgcagtatgttccagtaagaaccatgggactatcgccatgagctggtagaagaatgctctggactagctgcatccgtaggtatgcaagaaggatgacattgcagagaggcatggtgctggcaaagcccggttctattacaccgaacaccatgtttgatgctgatgagtatgtgcttaagaaggaagagggtggacggtactaacctttcttccctggataccaaccgcacttttcatttaagaaaccgatgtgacagggaatgtgactgagattatgaatgacaaaaatgatgaggcgaacatatgcatgcctgtggaccgcataaagatggctgttcagaatatccatcctgctgcttgttagcaaggaatgaggtttgctatcccttaagatggaaagactgttggtgctggcttcatcaacaaaataattgaatgaactgggtgtatcatatcctccacgagaattttccttggttactcaaagcgaaatgctctgtagccgctattatgagaaccagtttt

SEQ ID NO: 143856 - DNA, 1233 bp, Zea mays
  Clone ID: MRT4577_62674C.1
acacgactctcggcaacggatatctcggctctcgcatcgatgaagaacgtagcgaaatgcgatacctggtgtgaattgcagaatcccgcgaaccatcgagtctttgaacgcaagttgcgcccgaggccactcggccgagggcacgcctgcctgggcgtcacgcttcgagcacatctaaagggatggaagtttctgtatcttaatgatgttgagtgccagtgtgaattgccggagtcatatgaagcatacagaaaacagcaacatcgatggcattctggtcctatgcagttgtttagactctgctttgtggacattatcaaatcaaagattgggttctggaagaaattcaacctgatattccttttctttctcctccgaaaactgatcctgcccttctattcattcaccctcttctgcgtcatacttccaatgacaatgtttgctcctgaagcagagctacctgcctgggtggtgtgctacattccggcaaccatgtccttgctgaacatcctcccagcccccaaatcgttcccgttcattgtcccctatctcctgtttgagaataccatgtcagtaaccaaattcaacgccatggtttctggcctgttccagctcgggagcgcctacgagtgggttgtcaccaagaaatcaggccgttcttccgagggcgacctcatcgcccttgtcgagaagcagcctaaacagcaaagggtagggtctgcacccaaccttgagtcacttacaaaggagtcttccagtctcaaaagggactccaaaaggaagaaacacaataggatatacaggaaggagctggcactctccttccttctcctaacagccgctgctcggagcctgctatcggtgcaagggatacatttctacttccttctgttccaaggggtgtcgttcttggttgttgggctcgatctaatcggtgagcaagtcgagtgatgcggtacaagggagagtaattgggtatctattttgctgcgagtggggggcaatgcgaccaaaagaggcacttcaggtaaaggcaagcgtggtacatgatccaaagaagatttgattccggattaagaagggttatatagtttcatcggggatacttgaaacggtgaaaatgtggaattgtggattgtagatataatatggcttgggactgtgggctgtaaaaggcttgggggttctaattcttttgtaagaaaaatcatcagtggttagatgggttatttt

SEQ ID NO: 143857 - DNA, 293 bp, Zea mays
  Clone ID: MRT4577_62675C.1
cggagagggagtcgagagctctgccgccggcgaacggcagggcgtgcccttcgctctaggcggcccgctgttcgtccccttcatggtgggccccatcaccaccataccagagttcaacgtctcagccctccacgagctccaggccttggaagacgaattaggagacaccagagacgaattcagcaatgagctttgtgtcgatgagctcaaggtgctctctgaggaggagctggtggagcgcgccctgcaggaggctatggaggactcggattctggcactcaaccacaaccag

SEQ ID NO: 143858 - DNA, 477 bp, Zea mays
  Clone ID: MRT4577_62676C.1
gggataaaccattcaatatccctttacaccaataataagggttggcatattgggaaaccccaaaggacaaattgcttaaaaggggggcaatcatgcggggggcaatccagacgggttatattaaaatcaaagacttaccccccaagttttattgatccccagcataaacataatcaaagttttacctgccaagccccaccgtttttgagcagagcgatacaagataggcggccagctcaaccaggggaaacttgcttgggggggtcgaggcaaattcatccaaaaaccgggcttccacccaaggtcagcaaacagccaagctgccaggggcagctttcagttgacatgaccccaggcattgcttcaacaatttcgggacatccaaggggggaagggttgtggtagcaaaaaactggaggttgcaacttgggaaccgcccaaacttgtgagggcccaaaaaagggccggcttattttt

SEQ ID NO: 143859 - DNA, 687 bp, Zea mays
  unsure (1)..(687): unsure at all n locations
  Clone ID: MRT4577_62677C.1
gggtcgagacacgcgtctaggccgctgcggggctctgcctcgctgacatcggtgacatgatgacccgcgagttcacggctcagcaggatgtgctgagcacactcgaggcgctatgcaagcaagcgcgcgactccgtcctcctcctcccacgcctgccctccttccgacacccctcgaccgacggcgacggcgtcgacgagggtacagccgtctccggcgggcggaagcacgtgtcgttcggcgacctgagcttcgcggagtgggcgtcgttcctggagaggttcgagcagctgctgccggcggcgctagaggccaagaagcgcgctgggctacggacgtcgtcgtcgttctgacttctgagtttctgaccgaagctgaccgtaccacgtactagtcaaccaccaccaccatcaccgtttgcatgcatgcgtgcgtgcgtgcgcgcttgcgtggacgcagtatttgtacacgtgtgcatgccagcttgacgggtaactgacgtgtatgtagctactagctcggatctggatgtcttttgtgtctacgtagggtacgacgaggagacgatactgtaaggtggcatgcatgctctagggagctgttctggaacacccttccaaagacgctgacgtgtcgagcaatgccatccgatactatggacagcaagtcagcaacgagccanaagat

SEQ ID NO: 143860 - DNA, 839 bp, Zea mays
  Clone ID: MRT4577_62678C.1
gtttgtgcatcatcagtacttaatgtcgtcagcgccaacagttgatgaaggatctacatcgcgctcgacgcttatctggaggcatggtgggttcgtttcttaaccaggatgggatttctctggaccaagcgctcccagttaaccctaatcaggttcaagtcccagctccttcagcaccaaaaagttcagctgcctcttcttctgggtttgtccatccacagcagcgcagcagtatcacaaaaatctgttcgcacccaggttgtgcaaaagagcgaggggttcatctgggcggtgcattgcccacggtgggggcagaaggtgccagaaagaaggctgcaacaaaggagccgaggggaggaccatcttctgtaaagcccatggagggggcaagcgctgtgagcgccttggatgcaccaaaagtgccgaaggccggacagatttctgcatagctcacggcggcgggcggcgttgcagtcatgacgggtgcaagagggcgccgcgcagctggctgtagtatttgccagaagttcgtgacctgctcacagctcactctctccatctgggtctcctctgctcctgctccaagtgtctcccgtgtcctctggtcatgcgtggtatggtatgataacatgaactgtgtgtgtactggttggtcaggactcgggacttgtttggtactgtggatattgtggttgtttgtgctcttgtagcataggtctggtcgaacatacctactagtaacagtcgtcgtgtgcggtgtgtgattgaattgtaaatgaaaggaacgcctcgtcatgatacaaataaaaaatagtacctttcctcgcggcgcccgccaa

SEQ ID NO: 143861 - DNA, 371 bp, Zea mays
  Clone ID: MRT4577_62679C.1
attacaaagaagaatcattcttttttttttttttttttttctttttttttttcttattgctttctttttttcccgatagagcgcgagcttaacacaacgccccgaaaatatagcagagaccccaccaaacatcaaaggaaaaacgggggaaacctcatcaaaaaagcccgcaacatcaaaagaaaaatccccctcattggaaaaaaaaaccccggaagccaaaaagaaaaacacccccttaagaaaaacaaaaacctagcaaagaaaaaaacacacctccaaaaaaaaaaagaacccccaaaaccaaaaaaagaattttagcgggaaaaataaaccatattgcgaagcaaacttaaaaaggccacccaaaa

SEQ ID NO: 143862 - DNA, 131 bp, Zea mays
  Clone ID: MRT4577_6267C.1
aactgggttttctacaatcctcctgggatccatactggcattctttctatgctgttggactgattgtaactaaataccgaaccactgacatatcaaaatcccaatactatgctgcctacattaattccatc

SEQ ID NO: 143863 - DNA, 2823 bp, Zea mays
  Clone ID: MRT4577_62680C.1
ctctgctcacttctcctcgtccccgtccgacatcgcatcgcatcgcatcaccgcctctcgctttctgcccatcagccctccctctctctcctgcgtctccgaggcgcggacgacggcgacgacgcgaacgcccccgccgcctaggcacatttgctgggaattagggcaatcaacgtttaagtacatgtggtctactgctgtttgattattactgagattcaatcatttggtcagatgagagttctggctggggacttacaagtgtagcactgttgtcggcttgtgactaaatagcatcacttcacatacaacactggataatggatcgtagggatacttcagggtttgttagtggaggatgcaaaaataatgaagcctactagtttctctatatcttctaacttggtagctttattgacaattatttaacccagaagtgaggccagctggtacttcccataaagtttggttactctaatagcaatggaacccaggcatgggcgttcagcattcactataagtttctcaaatccaaatggctttgctaatcagtgcaccgccattccagccgtcagttattcagcggctggttctagccaacttgatgtgctggctcctactagaggttgcaagagaaagtggactgagttggctctaggtctgggtgacacatcaagctcagacagcagcaagcagagcatgggtactggctgcactgtttcttctctcaagggaagcgatgatgtctcatgtatggattacgacataagtttcaagttatctcttggcaatgaagatacttccaagctgcataaacaggcttgtggttctaaaaggactatggagaagcctcggttggatcttaagttatctttggctccatctcaatccgatgtaactgacgcggatctaatcagaagcagtgcacctcaggacatgtttgtgcagccgtacttgatgtcctcagtgccaacagtcgatgaaggatctacatctgctcgacatccatctggaggcatggtggtttccttccttaaccaggctgggatttctccgaaccagttgcccccacttaactctcatctggtccagggtccagcttgttcagcaccaacagtgctccaactgccaaaaagttcagctgccacttcttctgggtttgtccgcccacagcaacgcaacggtagcacaaagatctgttcagagccaggttgtgcaaaaggagccaggggttcatctgggcggtgcattgcccacggtgggggcagaaggtgccagaaagaaggctgcaacaaaggagccgaggggaggaccatcttctgtaaagcccatggagggggcaagcgctgtgagcgccttggatgcaccaaaagtgccgaaggccggactgatttctgcatagctcacggcggcgggcggcgttgcagtcatgacgggtgcaagagggcagcgcgaggcagatcgggcctgtgtatcaagcatggtggcgggaagaggtgccaaacgctgaactgcacaaagagcgcggaagggcggtcaggcatgtgcatcgctcatggtggcgggcggcgctgccagtacgctggctgcgggaagggagcccagggcagcacaaacttctgcaaggcccacggcggcggcaagagatgcacgcaccccgactgctccaagggcgcggaggggagcacggcgttctgcaaagcccacggaggcggcaagcgctgctcggctgacggctgcacgaagagcgtgcacggcgggacccagttctgcgtcgcgcacggaggcgggaagaggtgcgtggtggaagggtgcgggaagagcgcgagaggcaggaccgaccgctgcgtcggccatggcgggggcaagcggtgccactccgccggctgcgggaagagcgcgcaggggagcaccgatttctgcaagtcccacggcggtggcaggcgctgctcgtgggggcaccctggctcagacctcgggtctggtggcgctccctgcgaccggctggcgagaggcaagaaggggctgtgcgaccggcacaacccgctggtccatgacaacagcgtgcatgggggtgcgtcgttcggtggcttcagtgtcgtcagtgccgccgccctttctgagggagatggctctccatctccaggcaccgagacaagcatgcgcagcttcttcatgcacgcggtggaggctcctcgctgtgtggcggcctcggcccatgaaggccgggtgcatgggggcaacttcatgcctatcatgctcgacggtggcgtgggactcgggaagaggccggccgacaacgctgatgctggtgcctctgcccctcctcgcagctggaaaagtatggagaaggcctgtggatctgcgccgcgcagctggctgtagtatttgccagaagttcgtgacctgctcacagctcactctctccatctgggtctcctctgctcctgctccaagtgtctcccgtgtcctctggtcatgcgtggtatggtatgataacatgaactgtgtgtgtactggttggtcaggactcgggacttgtttggtactgtggatattgtggttgtttgtgctcttgtagcataggtctggtcgaacatacctactagtaacagtcgtcgtgtgcggtgtgtgattgaattgtaaatgaaaggaacgcctcgtcatgatacaaataaaaaatagtacctttcctcgcggcgcccgccgaaaaaaaaaaaaagaagatttccgccgtctgcaggaagagggcgcaggggaactccgatttctgcaagtcccacggcgggtggcagcgcgctgctccgcgggggcaccctgggc

SEQ ID NO: 143864 - DNA, 283 bp, Zea mays
  Clone ID: MRT4577_62681C.1
gttctatggcatacattctcatctctggcattgaaagaactgaaccataggaaaattaaggacagaagcacttctccagattcaatgccgatgaaagaacctatagctgtggcacaagctagaaggttttctcgactgacttcctttccagatatcttcctaaatgccaagtatattcctgaaacagccacaaatacacctcccaaggaaggctcacacaggcagttgtcaccctcaaatcggatattcaggtccacctctggaaatgataatgttcattcta

SEQ ID NO: 143865 - DNA, 1585 bp, Zea mays
  Clone ID: MRT4577_62682C.1
cgctcccggttaacccttatcaggttcaagtcccagctccttcagcaccaaaagttcagctgcctcttcttctgggtttgtccatccacagcagcgcagcagtatcacaaaaatctgttcgcacccaggctgtgcaaaaggagcgaggggttcatctgggcggtgcattgcgcacggtgggggcagaaggtgccagaaaggaggctgcagcaaaggagctgagggaaagaccatcttctgtaaagcccatggaggggggaagcggtgtgaacaccttggatgcaccaaaagtgcggaaggccggactgatttctgcatagcccatggcggcgggcggcgctgcagccatgaagggtgcaagagggcagcacgaggcaaatcgggcctctgtatcaagcacggtggtgggaagaggtgcgaaaagccaaactgcacaaagagcgccgaagggcgttcaggcatgtgcattgcccacggtggcgggcgccgctgccagtacgctggctgcgggaagggagctcagggcagcaccagtttctgcaaagcccacggtggcggcaagagatgcacacgccccgactgttccaagggcgcagagggaagcacggcgttctgcaaagcgcacgggggcggcaagcgatgctcggctgacgggtgcacgaagagcgtgcatggtgggacccagttctgcgtcgcgcatggaggcgggaagaggtgcgtggtggaaggatgcaggaagagcgcgagaggccggagcgaccgctgcgtcgggcacggcgggggcaagcggtgccactccgctggctgtgggaagagcgcacagggaagcaccgatttctgcaagtcgcacggtggaggcaggcgctgttggtggggacatctcgggtcgggtggcgctccttgcgaccgtctggcgagaggcagaaaggggctatgcgatcgacacaacccgctggtggacgacaacagcgtccacgggggtgtatcgtttggtgggttttccaccctttctgagggaggcgccgaaacaagcttcttcatgcacacggtggaggatcctcgccacgtggcgccctcggcccgtgaaggccgggtgcatgggggcaactttatgcctttcatgctggatggtggtgtgggactcggcaagaagccggccaacaacgctgacgctagtacctctgcccctcgcagctgcaaaaatatggagaagcctggtggctctgcgcagcgcagctggctgtgatgccagaagtccgtggcccgcccgcccttccccatctcggtgtgctctgctcgattcaagtatctcccctgccctctggtgtggtgtgaaactgaaatctattatgcgtggactgtcggtgtgtactggttggtcaggacatgtttggtagtgtggacgttgtgtttgtttgtgctttgttgcatcagtcaatcagtctggtccaacatacctggtagcaagagtagtgtgtgaatggcctgtaaaaggaacccattatcatgatgtatgtatatatctaaataataaaaggtggaaggctgcatcagtcggtgtaattaaaagaaaaaaaaaaaaaaa

SEQ ID NO: 143866 - DNA, 1988 bp, Zea mays
  unsure (1)..(1988): unsure at all n locations
  Clone ID: MRT4577_62683C.1
ccggattcgttacatcccaccatttgctgttcaccttccctcccgtttgcctcctctcgctgtctcgtagcttctttcctccggcgacggctgggcgagcggccgccagtcgggcccttcgtcggcgacgagcatccacctgctctgtaggttttttgtgctatactttttagtggttctggccttcttgatacaatggtgaagctgacaatgatagctcgtgtcactgacggccttccactggcagaagggttggatgatgggcgagatctgaaggatgctgatttctataagcagcaagctaaacttcttttcaagaacttgtcaaaagggcatcatgaagcttcacggatgtcaattgagacagggccctactatttccactacattattgagggcagagtatgttatctgactatgtgtgaccgctcttatccgaagaaacttgcattccagtacctagaagatctgaaaaatgaatttgagagggtcaatggcaaccaaattgaaactgctgcaaggccatatgcttttatcaagtttgatacattcatccagaagactaggaaactgtatttggatacaagaactcaaaggaacctcgcaaaactgaatgatgaactctatgaggtgcatcaaattatgactcgcaatgttcaagaggttcttggtgttggtgaaaagctagaccaggtcagtgaaatgtcaagcaggttgacttctgatacaagaatatacgcagataaggctaaggacctcaaccggcaggcgttgattcggaagtatgctcctgtcgccattgtcattggggtagtattgatgctgttttggctcaagaacaagatatggtgattgtacagtacgaaggatactgggccctgttacaacaccggagaagaacagatggagataaaaaccaggtctattctggaacaagatgctttggtgacttgtatcccgtatctgcccattcaagcgattacttaaactgcccttttgctcctccctataagctagtatcaaagtgaattcgttggagtgcagacctgataagagcatctccggaagtctttcaaaattcactctaaattgtcattttgagagtcatttgcttaataactgtcattctgtttttttcactccaacagctttttatatcctgtttgcactaaggagtcattctctttctatattggactaccgatgaatttggagaagatggatatattcggatagctgttttttttaaaaaaaagctgttggggggaatcttagcaattaggaaggttatagtctctagagaaactcatattttgtgcatccgttgaactcaatgtaatacaatataagggctctagagttctacatcggggttgtggaactcaatgtaatacaagagctgtggagttgactttacatcggggttgtaaattttagggtggaactcaatataaggattcaggctggtctgatgagttgactaaactctagcatgttttttatagctgcctaatatgtattaatttaaggtgtgtttggtttgtcttttatgagttgacgaaactcgagcatgctttttatagctgcctaatatgtattgatttaaggtgtgttggtttgtctaaaaaaaaaaaaaaaaaaccaccctccctccaaattttttcgggggggggggcccaaggggcaccccgtgggtttacccgggttccggggtttttttagtcccggggggcccaggtttccccccccccccccccccgggaaagcccccccccccccgggggcaaagccctttaaaccccccttttttccccatcctatttcacaccggggcccccgtttaaccatcccccccccccatcnnnnnnnnnnnnnnnnnnnnnnnnnnnnnnnnnnnnnnnnnnnnnnnnnnnnnnnnnnnnnnnnnnnnnnnnnnnnnnnnnnnnnnnnnnnnnnnnnnnnnnnnnnnnnnnnnnnnnnnnnnnnnn

SEQ ID NO: 143867 - DNA, 304 bp, Zea mays
  Clone ID: MRT4577_62684C.1
ttgtacctcctagctttctttgactgtgcaaggtgcccgccgcctttatgatcccggaacgttggctccaagagtagcggcggagactgacgtgatctgatgcctggaactatgagaatgataacagaggagaggtactgctacgagcaacatgggactgacgatcatacgcagctccttggacatccgacatggcacgtctaggtgtgcgcaactcttgagcgtggacgtcggtcagccatgcgctggcagctggcgcctggcgctgtcgccgccgccggcagctcaagaaagagaagagctc

SEQ ID NO: 143868 - DNA, 1576 bp, Zea mays
  Clone ID: MRT4577_62685C.1
gcacgagcaactaacatagatcgcaccatttcccgttcacctccccttccggccgggttacgccccggggggccaccatttgctgttcaccttccctcccgtttgcctcctctcgctgtctcgtagcttctttcctccggcgacggctgggcgagcggccgccagtcgggcccttcgtcggcgacgagcatccacctgcgcggcgccccatcttccgctccttcccttactcgcgctcggcacacaggcgacggcggcggcggcgctcaggatcgggctatcaccgacggggtccggcttctccgcccgcctctcgccactcgcctcgcgccctcgcctccggtcctccgcacaccggccggcgatcctgcctctgtaggttttttgtgctatactttttagtggttctggccttcttgatacaatggtgaagctgacaatgatagctcgtgtcactgacggccttccactggcagaagggttggatgatgggcgagatctgaaggatgctgatttctataagcagcaagctaaacttcttttcaagaacttgtcaaaagggcatcatgaagcttcacggatgtcaattgagacagggccctactatttccactacattattgagggcagagtatgttatctgactatgtgtgaccgctcttatccgaagaaacttgcattccagtacctagaagatctgaaaaatgaatttgagagggtcaatggcaaccaaattgaaactgctgcaaggccatatgcttttatcaagtttgatacattcatccagaagactaggaaactgtatttggatacaagaactcaaaggaacctcgcaaaactgaatgatgaactctatgaggtgcatcaaattatgactcgcaatgttcaaaaattccttggtgtttggtgaaaagctagaccaggtcagtgaaatgtcaagcaggttgacttctgatacaagaatatacgcagataaggctaaggacctcaaccggcaggcgttgattcggaagtatgctcctgtcgccattgtcattggggtagtattgatgctgttttggctcaagaacaagatatggtgattgtacagtacgaaggatactgggccctgttacaacaccggagaagaacagatggagataaaaaccaggtctattctggaacaagaaaatgctttggtgacttgtatcccgtatctgcccattcaagcgattacttaagctgcccttttgctcctccctataagctagtatcaaagtgaattcgttggagtgcagacctgataagagcatctccggaagtctttcaaaatttcactctaaattgtcattttgagagtcatttgcttaataactgttattctgttttttttactctccaacagctttttatatcctgtttgcactagggagccattctctttctatattggactaccgatgaatttggaggagatggatatattcggatagctgttttgaaaaaagctgttgggggaatcttagcaattatgaagggtatagtctctagagaaactcatatattgtgcatccgttgaactccatgtaatataata

SEQ ID NO: 143869 - DNA, 390 bp, Zea mays
  Clone ID: MRT4577_62686C.1
cctgccaaaaacttcagaattcttcaaatacttgcataacatggtagggtccgtggtaatcgtgggcatcttcgtcgccctcctcgccgtggacgacgaggaggctgtgtacacggtggtgaaccagtgcccgttcaccgtgtgacgcgttcccgtgccggtgggtcggcggtcggcagctgaaccgcgtcgagagctgctggatcacggaccccgcgggaacgacgggcgcgcacatctgggcgcgcacggtgtgccagttcgacgcgagcggccgcgggagctgccccacgtacgactgcgcctgagctgatcaagtgcactgagttacgtcgcgcgcccaatactttggcggagtatgctatgaatcactgtcacaacccctgattt

SEQ ID NO: 143870 - DNA, 489 bp, Zea mays
  Clone ID: MRT4577_62687C.1
aatttttgggtcgacccacccgtccgcgaaaggtttggatatgcattcatgacacctgttcatatttttatggacggtgacggactaaaatagagtacgggtcatggtcctgtgattaaccaatctcacgttcaaaaggtggagaagttaattaatgaccccacttccatgggagctaatggcatgctatgtggcataagacacatcctgggaatgatattttatgagccaactgtactaggggatggaagcaacgatctgcttcttttccaagatgaaggttttggtccatttgtccccctgtataccgttcaagaactgtggaagaagcagtgtcatacggtcagcgatacacacacaggcttagctgcatacatttttaccgagagcagtacctcatgcatggcgtgtatttgaatctattgagtaccgctaatttggggtcaacatggggattattttagcggatgtggcgacttttggttgatg

SEQ ID NO: 143871 - DNA, 211 bp, Zea mays
  Clone ID: MRT4577_62688C.1
ccgcggacgctggggttggcgaggagaagactttaattacccctgtgcagtgcaaaaatttgtggaggcaattcagggcttgaactgactatacagtgactcaagccatagctgctcaggaagcagataagaaggacaaccactggctagcaactccaatgggcacttgctgcaatggctattcttggattcacgagttcatgacattact

SEQ ID NO: 143872 - DNA, 374 bp, Zea mays
  Clone ID: MRT4577_62689C.1
cctctttttttttttttttttttttttcccttcttcattttttctttggcccttgttttttattaaaaataaaaaataacccccatccccaaaaaaaacacccttaaaaaaacccaaaacaaaacatggttaaaaaaaatcctctccgtatataactcaatcatggttaaacaatcactcacaaacgccatacttaattaaattttcctcttacctaaacaaccccccttataaaaaaaaccctctctaaccacaatcctaacattccccaaacctatcaccaaccaaaaccattcacaacatctcacacttcacacaattttaaacctctcacaaaaaaacaaaccttaccatcctcaaaccccaagcgtaaa

SEQ ID NO: 143873 - DNA, 618 bp, Zea mays
  Clone ID: MRT4577_6268C.1
acattaagacctggttcaatcagccagctcgtaaatacaggcgccaccaaaaccgtatcaagaaggccaaagcgttggcacctaaaccagcggcaggtcctttgcgaccggttgtacactgccccacgttaagatatcacactaaagttcgtgctggtcgaggttttactctgcaagagcttaagggtgctggtttaaataaacattatgctcgtaccattggcattgctgtagacaccagacgccgaaacaaaagtgtagaatcattacaagtgaacattgaacgtttgaaggagtaccgttccaaattgattttgttcccactcaagagcaagaccaacaagattaagaagggtgaagctactgaagaagaatgcaagacagctacacaattgaagggagttgtattgcccatccaacaggctgccagcaaagaacccgaagctcgggctatcactgaagaagagaagaagttcaatgctttcaatgctatttgccaggcaagacttgaagctaaattaattggtatcaaagaaaagaaggccaaagaagctgcagaaaacccagatgcggcaaagaaagccactgacaagaagggtaaaggaaagaagaagaagt

SEQ ID NO: 143874 - DNA, 599 bp, Zea mays
  unsure (1)..(599): unsure at all n locations
  Clone ID: MRT4577_62690C.1
ggtaccccttcgnaggcccggccgggaaagaacgaaccaacaatcaacccagcagcagcagtagttaaccaacaccactatcaacaccaatacgaaaaaggcaccttcccggcgcttttcgctgatctccacgaccttgtggtgatgctcccccttcagctccctcatctccccgtggcacggcgtgaggaccgccccgatgttcgcgcacgcgtcgcggtcaagcttcagcgagcctggaatggcaggaatggggttgtaaaggggaaaaagaaaaagaagaggaagctgtccatggctccatgctatgctatgctatgctatgcactgcactgcacggcacttaggtgaggccaagtttcagttcagagcgtggtctcactgtcaattgaagaaaggagagcctcgtttgcaacgtcgatatcttcaagagttgccgatgccgcagacgacagtttggaacgcagcaattcgttggcctctgtcccggtcctgtttgtcatacacacaggcgcatcatcagcacacactcgtagccgaccattcatttcaacagagaaattttttactgcccaagatcccatgtcgattcctatcat

SEQ ID NO: 143875 - DNA, 938 bp, Zea mays
  Clone ID: MRT4577_62691C.1
ccggccggggtaatcaataaagttttgagactccttgcggactccgaccgaatcgatctgcatcgccccgccccgtgcgccatgttcctgcggcggctgagaacgtccgccgccctccgccggggcgcgaccgccggcggagtcctggccgccgtccgcgccgagctggccaacgagctctcctcctcggctccccctccattccgttccgagctggcgcccgacttcgacaccgtgtctgacgccccgcgcgcgcaggacgtgctcctgcgccgccgggccgggtccgaggaggtcctcgtgtcggcgctgctcgccccgctgcggttcgtgggccgagacccgctgcccagggccgcgctcgtcaaggtcttcgtcagtaagcctggcgcgccgcccgtcctgcacttcgactgccgtgcgtcttgggtgggggaggaggagcgcggcggcggcgctgctgactacgctatcaacgctgtccgctaccactcctctcctggcggcggtggggaagacgagtacgaagggccggcgttcagagatctggatcctcggctacaggctgctttacgagagtatctggtagcgagaggcttcaactccaagctggcaagttcgattcttcaacacctccttcagaaggagcgcaaccagtatgtgaattggctgaagactttggaagaggcgttcgccaaacatcactgacccaatgaaacgattagtggatccttctacatagcctggatttggcactctactatccttcagtgcctcccattggaaaaaatccggcgagagtgtaaaccttctacgtctattttccatgaccaaagctgtcgtgttctttcccatttaacactaatgtaacgtaaatgataattattcacactcgaaaaccggcagtaacaaatttgaataagacagtatccatttgt

SEQ ID NO: 143876 - DNA, 1771 bp, Zea mays
  Clone ID: MRT4577_62692C.1
ccggccgggtagacctcgccttttgatatgtggtggtgaaagtgtcggactggatcatgtgggaccagctgttttgcatgagcttgagaagttctctgttcactctttgggactgccgtctcttctctctgatccaagtgcgaagacacctgaagaagctcttgtgcatatctttggggaagccaagagaacaaccccgtccattctatacatacctcagttccatctttggtgggatacggcacacgaacaactaagggctgtgttgttgactctgttgaacgatttgccctccaaccttccagttttattgcttggaacatcatcagtggtttttactgaccttgaagaagagtgtgcttccatattctcttctcgcaatgtgtatcaagtggatcaaccaagttttgacgatagattgaggtacttcagtatattgtttgagtcattgctctctttccaaatggaagaatcaagaaacaagtcaaagaaacagaagtctgctattgaccttcccaaagccccgaaagaagtggagggccctaaggtttctgagctaaaggctagggcagaagctgagcagcatgctgttcgtcgaatgaggatgtgcctccgagatatctgtaatcgcattttgtacaacaaaaggttcaatgtatttcacttcccagtattagaagatgaggtgcctgactatcgatcaataatccacaagcctatggatatggctactgtcttgcagcgggtggactctggacagtaccttaccagggcagcatttataaaggatattgatcttattgtctcaaacgcaaagacttacaacggggatgactacaatggatctaggattgtcagtagagcatgtgaactcagagatgtggtccaaggcatgttgtcacaaatggacccatctttggtgtccttctgtgataaaattgcttcacaaggggggccactgcaggctgtggatgatgaagatagagctattcttcaagcagcacctgttgctcagctggtttctggtactagaataagtgcaaggcttcgaaatgtacagcctgaagtaaacctgtcacaaagttatgaagtgctaaggcggcaaaagaaaagtgcagaaaatgaacaaagcatgactagagatgaaaagtctcctgaagatgtagatttgtcgaagccaactgacgcagaagaagctgcaaaagaaccagagtcaaatggcactacgaaagaagccaacgattcaccagccaaagaaccagaagtatctacttcccctgaacccatggagagtgacaacggcaaaattgccgcggctactggcgacgacttgttagaacagctagaagccctgaagcaacgcttcatggaactcactgcaagctatggcgtgccgcagctcgagaggctgtattccaagataatgaaaggagcaatagagttgacaagtaaagaaagcaacgaggatcataggcggttagtagttaggtatttgtggacattcgttgagaacagcaacaatttttaacctggcgccaataagattcttgttttccttgtacatcctctttggaacgaaacaatagtagccgttcatcttgggagttgtccccgttccatgccttgtaacaaatcttccaaatgctctagtgtcagtgacacagttttgccatgaaatgatgtagcaagtgaacccttcctagatttgtacctcagtttgatgaatttatgaggtggaattccctcttaatgcataacatgtgttaccatg

SEQ ID NO: 143877 - DNA, 3576 bp, Zea mays
  Clone ID: MRT4577_62693C.1
gcttcctttgttgtgagttgtgactccttgcgggctgcgagaccgaatcgatctgcatcgccccgccccgtgcgccatgttcctgcggcggctgagaacgtccgccgccctccgccggggcgcgaccgccggcggagtcctggccgccgtccgcgccgagctggccaacgagctctcctcctcggctccccctccattccgttccgaggtaacccgcatccctaacccccgcaccgcatccagcccaagctctgctcacgcctttgccggcccccccacccaacacccccactcgcagctggcgcccgacttcgacaccgtgtctgacgccccgcgcgcgcaggacgtgctcctgcgccgccgggccggccgggctcttctccctcctagcttttgctacttgccgctgctatgcttcaccccgtgcccatgctcaccgcggctccaggcaccctctcgcggcctcatctctctttcccttcctcctcccaacgtatctcagtctgtctatcctctccgctctgactccaaccaccagcgctgcagcaggaggcgccaccacctccgcgtgtgacatctggatcttcgagcccacctgaatcgaggagcaccgcccctcctgctccaatggcgttgcctctacccgccccacctgaatctaagtccgggttcgaggaggtcctcgtgtcggcgctgctcgccccgctgcggttcgtgggccaagacgcgctgcccagggccgcgctcgtcaaggtcttcgtcagtaagcctggcgcggcgcccgtcctgcacttcgactgccgtgcgtcttgggtgggggaggaacgcggcgctgctgactacgctatcaacgctgtccggtaccactcctctcctggcggcggtggggaagacgagtacgaagggccggcgttcagagcgcaaagacaggatagagcaggtcctatattccaagagattgagaacgtaagttagaagctgttggaaaggccatgacagagaaaatttttccccactgctgtcttccacaatttagggacagtaaattacatatgtacacataacttatgatgctgaacaaagcaagtgtaagtacttgggtgtagaacttggaaagactcaagatctggaggacaccaagagagcgcatgatctagaagaacaatacaatgaagcaaagtctactattaaagaaaaggaatatgtcatatttaatcttctgaaatcagaaaaatcattagtggactgtgcatataaccttcgtgcggagctagaaaatgcagcagcagatgtttctgggctattctccaaaatagagcgcaaagacaggatagaagatgggaacaggtcgatggtgcagagatttaggtctcaactgacccatcagctggatgcattgcataaaactgtatccagttctgtcatgcaacaggaggaccaccttaatgaaatggaacatgatatgcaatcctttgtttcttcaaaagatgaggctgcacaagggctaagagagggtgtgcaaaagctcaaagtcttgcatggttccggtatcactgctctggatgaattagcaggtgaaatcgacatgaactcgcggacaacatttgagagattaaattcacagatacagtcacacacatcagcccttgagaactgtttcggaggaatcgcttcggaagcagataacttgttagatgagcttcagcgcagcctatcgaaacaagaagagaggctagcccatttcgcagtgaagcagagggagggacacctgagagctgtggaagcgtcacgttccatctcaaagatcactgctgggttcttccactcgctagatgtccatgcatctaggctcaccagtattctggaagacacacacagcgtgcaagaccaacaacttcttgaccttgaaaagaaattcgaggagtgcgcagctaatgaagaaaaacagcttctagagaaggtggcggagatgctggcaagttccaacgcacggaagaagaagctggtccaaacagcagtgggcagcctccgggagagcgccgtgaacagaacgagccacctgcagaaagaaatctcgacggcccaggacttgacctcgtccgtgcgcgagaagtggggcttttacatggaagagaccgagaagaattacgctgaggataccaaagcagtcgacagcggaaggtcttgcctggccgaagtgcttgtagaatgcaaggcgaaggccaccgtgggtgcacagcaatggaagaacgcggaggattctctgttcagcctcggcaaaggaaacgtggagtcagtggattctatagtcaggaccgggacagaggccaacgaattgctgcgttccaaactgtcgtctgcggcatcggcaactcttgaagatatcgacgttgcaaacgaggctctcctttcttcaattgacagctcgctgaagcttgaccgcgacgcgtgcgcgaacatcggggcggtcctcacgccgtgccacggggagatgagggagctgaagggggagcatcaccacaaggtcgtggagatcagcgaaagccccgggaagtgcctggaggaagagtatctggtggacgagccgtcgtgttcgacgcccaggagaaggcggatcgacctgccgggcgtggagtcgatagaggagctgcggaccccgggctacgccgagcttctcaagtcgttccgggaggcgagggggagctggaagctggcgaatggagacgtcacagggcatttgccagaggcggctcaggatccggcatcatcgccgccgccggccgtgggttcaagaacccctctcgtaggaagaaactagatttaccgaaaccatgtagaaagaaaaaggaaaaaaaaaggaggaagaagaggaaggcatgtgtctactagagtacctttttcgtattggtgttgatagtggtgttggttaactactgctgctgcttggttgattgtttgttcgttcttaggtggtctccttgtatagtgattagtgagtcatatatacttgccgtcacacatatgccggtgtacatcaggtgtgctcagcatgtctattctaaagcactagtgtttgtctcaacaaaaaaaaaaaaaaaaagatctggatcctcggctacaggctgctttacgagagtatctggtagcgagaggcttcaactccaagctggcaagttcgattcttcaacacctccttcggaaggagcgcaaccagtatgtgaattggctgaagactttggaaaaggcgttcgccaaacatcactgacccaatgaaacgattagtggatccttctacatagccttttggcactctactatccttcagtgcctcccattggaaaaaaaatccggcgagagtgtaaaccttctacgtctattttccatgaccaaagctgtcgtgttttttcccattgaacactagaggtattcgatgactgcgatacagttttgcagagagctcggccaagactcctaaagttcaccgacagaaagaaatacggacaattatcttcatataactagcggcagatgttaatttttgaagttgtccaattttaataagctaaaagttggccc

SEQ ID NO: 143878 - DNA, 238 bp, Zea mays
  Clone ID: MRT4577_62694C.1
cggacgcgtgggtgcgctttctggcttcgttgcttgcgtgaaggattagtaaggcgcgtgatggcgctctcagcttgcccggctcaggaagaactgctgcagcctgctgggaggccgttgaggaagcagcttgctgcagccgcgaggagcatcaactggagctattccctcttctggtccatttcaagcactcaacgaccacgggtgctgacgtggacggacgggttctacaatggcg

SEQ ID NO: 143879 - DNA, 666 bp, Zea mays
  Clone ID: MRT4577_62695C.1
aggtatcaagtggatcaaccaagttttgacgatagattgaggtacttcagtatattgtttgagtcattgctctctttccaaatggaagaatcaagaaacaagtcaaagaaacagaagtctgctattgaccttcccaaagccccgaaagaagtggagggccctaaggtttctgagctaaaggctagggcagaagctgagcagcatgctgttcgtcgaatgaggatgtgcctccgagatatctgtaatcgcattttgtacaacaaaaggttcaatgtatttcacttcccagtattagaagatgaggtgcctgactatcgatcaataatccacaagcctatggatatggctactgtcttgcagcgggtggactctggacagtaccttaccagggcagcatttataaaggatattgatcttattgtctcaaacgcaaagacttacaacggggatgactacaatggatctaggattgtcagtagagcatgtgaactcagagatgtggtatcttgtttgttctcactttctcctacattagactgttgacaatgcctctacagattatcgttgttgtgtctaatgaacctctttttggccaggtccaaggcatgttgtcacaaatggacccatctttggtgtccttctgtgataaaattgcttcacaagggg

SEQ ID NO: 143880 - DNA, 743 bp, Zea mays
  unsure (1)..(743): unsure at all n locations
  Clone ID: MRT4577_62696C.1
ccggccgggctcttctcactcctagctgttgctacttgccgctgctatgctgcaccccgtgcccatgctcaccgcggctccaggcaccctctctcggcctcatctctctttcccttcctcctcccaacgtatctcagtctgtctatcctctccgctctgactccaaccaccagcgctgcagcaggaggcgccaccacctcagtgtgcgacatctggatcttcgagcccacctgaatcgaggagcaccgcccctactgctccaatggcgacgcctctacccgccccacctgaatctaagtacggcttcgaggaggtcctcgatccgtcgctgctcgccccgctgcggttcgtgggccaagacgcgctgcccagggccgcgctcgtcaaggtcttcgtcagtaagcctggcgcggcgcccgtcctgcacttcgactgccgtgcgtcttgggtgggggaggaacgcggcgctgctgactacgctatcaacgctgtccggtaccactcctctcctggcggcggtggggaagacgagtacgaagggccagcgttcagagcgcaaagacaggatagaagatgggaacaggtcgatggtgcagagatttaggtctcaactgacccatcagctggatgcattgcatgaaactgtatccagnntatgtcatgcaacaggaggaccaccttaatgaaatggaacatgaattgcaatcctttgtttcttcaaaggttgaggctgcacaggggct

SEQ ID NO: 143881 - DNA, 995 bp, Zea mays
  Clone ID: MRT4577_62697C.1
ggggtacccccgaggctggccggggctcttctccctcctaggcttctgctacttgccgccgctatgcttcaccctatgcccatgctcgccgcggctccaggcaccctctcgttgcctcatctctctcccttcctccccccaacgtatctcagtctatctatctgctccgtctccgacgctgaccaccaacgctgcagcaggaggcgccaccacctccacgtgcgacatctggatcttcgagcccacctgaatcaaggagcaccgcccctcctgctccaacggtgttgcctctacccgccgtcttcccccccctcgtggatccccgttgcctcccacctcgtgcctaccctaacctcgtcaacgcctccgcctactgctccaacggcgtcgccttcgactcaccgcctccctcgactcgcggttcgccattgcttctcgcatctcctcaagctcgccactactgccctcggaggagcccagatccggcggcgggctcgagaagccgacgctggcgcggatggaatacgaactccagctggcgcccgacttcgacatcgtgtctgatgccccgcgtgcgcaggacgtgctcctgcgccgccgggccgggtctgagtccgggtccgaggaggtcctcgtgtcggtgttgctcgccccgctgcggttcgtgggccgagacccgcttcccagggccgcgctcgccaaggtcttcgtcagtaagcctggcgcggcgcccatcctgcacttcgactgccgtgcgtcctgggtgggggaggaacgcggcgttgctgactacgctatcaacgctgtccggtaccactcctctcctagcggcggtggggaagacgagtacgaagggccggcgttcaggccactgtacatcgtgggatggaggtgagaccgatgcgatttagtttgcctcgatctgtaattgctcaatagctagcgtctgcaatttgggtactgccaatttcgttaattgatggttggttgactta

SEQ ID NO: 143882 - DNA, 999 bp, Zea mays
  Clone ID: MRT4577_62698C.1
gggtagaatgaaatcaataaagttttgagactccttgcggactccgaccgaatcgatctgcatcgccccgccccgtgcgccatgttcctgcggcggctgagaacttccgccgccgtccgccggggcgcgaccgacggcggagtcctggccgccgtccgcgccgagctggccaacgagatctcctcctcggctccccctccattccgttccgagctggcgcccgacttcgacaccgtgtctgacgccccgcgcgcgcaggacgtactcctgcgccgccgggccgggtccgaggaggtcctcgtgtcggcgctgctcgccccgctgcggttcgtgggccgagacccgctgcccagggccgcgctcgtcaaggtcttcgtcagtaagcctggcgcggcgcccgtcctgcacttcgactgccgtgcgtcttgggtggggggaggaggagcgcggcgctgctgactacgctatcaacgctgtccgctaccactcctctcctggcggcggtggggaagacgagtacgaagggccggcgttcagatcatggtatgccggttcaccaaggaatcataaacgatagatctggatcctcggctacaggctgctttacgagagtatctggtagcgagaggcttcaactccaagctggcaagttcgattcttcaacacctccttcggaaggagcgcaaccagtatgtgaattggctgaagactttggaagaggcgttcgccaaacatcactgacccaatgaaacgattagtggatccttctacatagcctggatttggcactctactattgggaaaaaatccggcgagagtgtaaaccttctacgtctattttccaaaaccaaagctgtcgtgttctttcccatttaacactagaggtattcgatgagccaatacagttttgcagagagctcggccaagactcctaaagtttaccgacagaaagaaatacgaacaattatcttcataactagcggcagatggttaattttt

SEQ ID NO: 143883 - DNA, 755 bp, Zea mays
  Clone ID: MRT4577_62699C.1
aattcggccgaggggaagccgcgtccgtcagtctctcccctgccgcatcttatagcaatatagaagaaccctagtcagttgactccttgcgactgccagattgggtcattttctagccaacagtccacaccgctggatccccatggcagcgtcgcaaccaaattggcgtaacaggctccgctgcacaaagcaaccaataccgtgaccaccaccaccaccacaaaaatgcaaatcctcttcaacccgacagtaggttaattggcttgccaatccacccagtaacttggcaatttccttcgtacttcactgtcgctattaatcccgagtcaaagtcaagagcaacgaacagggaagttctcaatgaactcatcaagttgtacgggaagacatccctgggcggcaaattgccggcctatgatggcaggaagagtctctatactgctggttcacttccttttgaatcagaggagtttgtggttactcttgttgatcctgaaaagaaggagaaagaaagggtggagagagagtacaaaatcacaattcgaattgccgggagaacagatttctaccaccttcagcagtttctgcttggaagacagagggatatgcctcaggaaaccatacaagtacttgatgttgtccttagggagtcgccgtcttggattatgtcacagtgtccagatcctttttctctacaacttttgtcacagaggtgatatcggttgagggcttgagtgttggaggggttactacca

SEQ ID NO: 143884 - DNA, 132 bp, Zea mays
  unsure (1)..(132): unsure at all n locations
  Clone ID: MRT4577_6269C.1
gccacaccactaggggaggggaaanatggcgaaatgatagatgttacaaataactttgtattacacccatgttcatatcatataattcgatctaacttgaaatttatctttttggtgaacagaaattaaccc

SEQ ID NO: 143885 - DNA, 1730 bp, Zea mays
  Clone ID: MRT4577_626C.1
ggcagttaaaaagggtgggacgccacctttcccgcggaaagaggagctcccaccgctaatccatcgtcctcgtccctccctacccgcggccggccacccacgccgttgctgctgttctggcgcgccctccacctcttctctcgaaggtgccgtcgtcggagcttgcttttggggaggtcgtgcggcatgatctgctgaccgccccaaatcaacccggccgcgcatcgaccgtcgtcatccagtccgacgaggaggaggaggagagggagagggggagccacaaaactaagatgtcttgctgcggtggcgccgaggaggacagctacggcccgccggccaaccaggcggttccaccacccaatgccaacgcccccggcaacagaggcgggccgagaggaccgggggcgccgagggtcggcggccccgccaagcccgtcagcattgacgtgcccgccatacccttcgacgagctcaaaaggatcaccaacaacttcagcgaccgcgccctcatcggcgagggctcctacggccgcgtctacaacgccacgctcagcgacggccgcgccgccgtcatcaagaagctcgacaccagcgcctcgcaggactccgacaccgacttcgccgcgcagatcgcgatggtctccaagctgaagaacgagtatttcctggagctcctagggtactgcttggaagacggcaaccgaatgctaacctatcagttcgccacaatgggttctttgcacaacatactacacgggaagaagggagtccagggcgcggagcccggtcccgtcctcaactgggctcagcgagtcaagatagcctacggggcagcgagagggctggagtacctgcacgagaaggtccagccgtccatcgtccaccgggacatccgctccagcaacgtcctcatcttcgacgacttcagctccaagatcgccgatttcaacctcaccagccagggcaccgacaccgccgcgcggttgcactccactcgcgtgctggggacttttgggtaccatgccccagaatacgctatgacaggccagatcaaccaaaagagcgacgtctacagcttcggcgtgattcttctggagttgctgaccgggcggaagccggtcgaccacaccatgccgaaaggccagcagagtcttgttacttgggccactccgaggttgagtgaagacaaagtgaagcagtgtgttgatccaaagctcgacagtgactaccctccgaaggccgttgcgaagctggcagcagttgcggcgttgtgcgttcagtacgaatccgacttccggccaaacatgactatcgtggtgaaggcgatcacgcctcttctgaacgcgcccaaaccggcagctccagccgcgccacagtcctgatcaacccagacgacagaattagcctggacctggacacggttcccctgatctgttcctcattgcagatgtatgctaaggaaccacgcatccttgctccatccatccattgcatacaggggaattttgtaaaatgttaatccggtactctgaattcgtgtgcttttccttgtttgtttgcctggcttgttgtgagtttgtgatataacatgtgcagctttagaaagtacacatatgctgtttccagctagaaaaattacgcgagacctccaaaacctttttagttcacatgaagtgatactgaacaagagcttgcagattgagtgctaaaaaaaaaaaaaaaaaaaaaaa

SEQ ID NO: 143886 - DNA, 386 bp, Zea mays
  Clone ID: MRT4577_62700C.1
cccctccagaaactcccgccgcgacccacgcgggcggggagtccttggggagtaaacccaatttactgtatggattggtcgggttctgctccacctgtaaaaaggggcaagagatgggtggggcgggggctggtaccaattggatccaccacattcagccccttatcgcggccaaagtgtctgtggaagctgtggagctgcgccagagccccgtcatcgacgcctccctcaacctaattctctagcgcgcaaagctcaaggcagaattgcttgcgtgctctgggtggggtggaagctttacccatgatcttaagggttccctttggtcacaactcatactttttacaaggccctgcatttgcttctcccccataccggaggccatt

SEQ ID NO: 143887 - DNA, 329 bp, Zea mays
  Clone ID: MRT4577_62701C.1
cggtctcggaatatcccgggctcgtacccacgtcgtctcgtgcgcactacacactacaactcgagatcttcctcccataatccacacctgtcggcaccctccgcgtgcaaggagtgcagatcgttatgtgacaaacccgtgactaggcaaagacgtatcagccgctcgagtgtgtgagtgcgtcatgacaaccgattgacacacgtataagtgccaagtatccagtgacacaggacgggccatccctcccagacgcagcagtcggtctcatcttttgcatggcacaacacgcttgaggaccgggccgcacgcctatgctgacatacaac

SEQ ID NO: 143888 - DNA, 275 bp, Zea mays
  Clone ID: MRT4577_62702C.1
gtagccaacgcaaaggcggacactcctagaacaaaccagaaaaaagagaaccaaagagcctcggctaggaggcggcaaaaatcaagagggaggcacatgtggcagcctgccctgaccaataaaagcaggagcacccctgggatgaccacgatggacacaaaaacgcagatctcgagctccacagagtaatcggaaaaaatgccccgcatcttgaagatcagaacagatccccaaagagaaggagaaaccccacatctaatacaggggcaaggaga

SEQ ID NO: 143889 - DNA, 664 bp, Zea mays
  unsure (1)..(664): unsure at all n locations
  Clone ID: MRT4577_62703C.1
aaaataataaggggccactcattgccttggaatagtattctgcaacaaggctggaagctagcagcagcgcaacatatctggagctgttcgcaattgaagctgaacctaagatgcagtacaacatctcgaccaaaataaatcccacaaccagcagctcagcgcagccgattgcaaaagggactaaaactgagttgcagtacatcatttaaaaccaaaatacacccggacaggctggcaaggaatcagacagccaccagacgtgctgcagcattgctccttgcttccgcttgcagattgcccatctcatcctgtatttcttctatagcttcacctgcaattcccatcagtgccttgtcaacgtgttcggtgtccggcatatgaatgttgaacagggcttccaaagctgcccctgcctccttagataatggtttctggaaccaagcctgaaagtccgcagagagattgaataagcgtcgatgtttagtgttctgagctgttgatgcagcagctgtggccacagcaggtgtttcctgcagaacagcagccggttcgaagggagcaccatctgcagaacctgcattagtaacagaactggtagaagacagtagcttgctgntgcccccagcctgcagcacaggcaacccaacctgcctaggaaaacctg

SEQ ID NO: 143890 - DNA, 244 bp, Zea mays
  Clone ID: MRT4577_62704C.1
gtgcaatcacacgtacatcagtaacaccatgaagactatgttcatcaatagctcctacgaccgctgtgccctaaccatcaccgtctgctccggaaccaccaactccttcactgtgaacgccactaacagcataaccaacaatcacttggccatgtgcaacaacacgaacagagccatgagcaacaccatggacagagccctgcgtcacagcattggcaactatatcagggtgatgacaagctgc

SEQ ID NO: 143891 - DNA, 409 bp, Zea mays
  Clone ID: MRT4577_62705C.1
cgggtcggcccactcgtgcgtcgattggtactacacctacatgctgatagctgacgaggcggaaatcggaggccaggttgctaccatctaggaggtgcgcctggtatcatgcaccaggtctactgctcccgagaacacgagcctacagacgcgctcacatgtcgagagctccgtttgccgcacaatacctcaacgacactgtgccagacacagtggactcaccatcgacagaggagtctaatgaccggagatcatccagcgcactatatatgcgaactggaactgtgggtggaattacaaaccgctagagtcatcgtgccgcctgtgggatgtgaaggattccatgcactccagtcatctggcaatcactcaaagaaattcatgattgacccattctactagcaagatt

SEQ ID NO: 143892 - DNA, 1417 bp, Zea mays
  Clone ID: MRT4577_62706C.1
aggtgacactatagaagagctatgacgtcgcatgcacgcgtacgtaagctcggaattcggctcgaggccgcgcaccagctgctcccgtggctcggcgcggcgcccttctccgagccggcggccgtggcgggcctcggcgccgccatgggggcctacgcctgcgacggcgtcggcgggctcgggcatggcggggtgttcggcttcggtttcgacgccgcggtgcagcagcagcagcagcagcagcgcgcggcggacgggagcggcaaggcggtggtggtgtccgggctgctggggagcctgcaggcggagctggggcggatgacggcacgggagatgatggacgccaaggcgctggcggcctcgcgcagccacagcgaggccgagcgccgccgccggcagcggatcaacggccacctcgccaggctcaggagccttctccccaacaccaccaagacggacaaagcgtcgctgctggccgaggtgctggaccacgtgaaggagctgaagcgccagacctcggcgatgatggcggccaccgacgccgacgccgacgccgacgacgaaggcgccgggcggacgcaggcgcaggcgcaggcgcagctgctgccgacggaggccgacgagctgtgcgtggacgcgggggccgacggcgccggccggctcgtggtgcgcgcgtcgctctgctgcgaggaccgcccggacctcatcccggacatcgtccgcgcgctggccgccctccagatgcgcgcgcgccgggccgagatcaccacgctcggcgggcgcgtccgcagcttgctcctcatcaccgcggacaggagagcggacgtccagcgcggcggcggcggcggcggcggcgacggcgacgacgacgaggaggaggaggatgaggaggagggcggcgagcgcgctgcctcgcaccggaggcacgagtgcatcgcgtcggtccaggaggccctgcgcggcgtcatggaccgcaggacggccagcagctgcgacacgtcgtcgtctggtggcggcggcgggagcattaagcggcagcgcatgaactacggcgcgcaggagcagtgttcggtgtagcattcatgcatgcgcgcgcacacacacacacggcgttttccagcagcgtggtatcgagctgtgcgtctttatgctttgcattgcattgcatggatgcatgaacgcatatatatctgcaagttatttagcgtagctacttgctagtataagtttagccgtcgtttcaaaagcctttgggcgccatggtttcttcttcgggtataatggtgtgtggtgcatatgcatcagtgcgtggcagcggtaactgcttcaggctcagccattcagtggggagcgttttatgtatcccttttgtatgttcatgttgtcacgcacacggtaccggttactgatttcttgg

SEQ ID NO: 143893 - DNA, 419 bp, Zea mays
  Clone ID: MRT4577_62707C.1
gtcatctgctgcacggcttcaccacgttctacttccatgataacccgcatgcgtcacctgccccatggctggctctccatgttggttagcctcggcatccagcctgtaatagctggttgcgaagttgtgcttcatcgaccctatctgtatatctaccccagccggtcgctttcagcctgagtgttctgctccctgatgccaaagttgctcgtgcctctggacccacggtcaatcctgcttatgacctatgatactcaacctccagctcgctgctcaggacttgcctaagtcccatcctgcatacttaagttccgatctccaacaggccgacctagacctagtcggtggccttctgttgcaacgttgtttacctctacctaattgcagaagcaccggtactgtccttgacgctaagcttt

SEQ ID NO: 143894 - DNA, 248 bp, Zea mays
  Clone ID: MRT4577_62708C.1
cggctcgagcaaggagtaccgcatgcacgtgaggctcgtgactggtgaaaccgctgggtgcacggagttatagtggcgcctgatgtgcttatcatcgatcgtttactgccgtgatgccgctatcatcgtcgtaggtcgccgcacccggaccttgcatgaccgggcctctgctctcgttgggtggtcgtagggattcgttaatgcatgtggaggctggtcgtagtatcatcgaagagacgggccttctg

SEQ ID NO: 143895 - DNA, 253 bp, Zea mays
  Clone ID: MRT4577_62709C.1
gccgcgccggaaataacttctgggacgaccattttctcggcggccgccgccctttttaattggggggttttttaaaagaatatgagggggtttgccccgggcgccacaaacacagacgcaaagatcacagcaacccatgcaacggaagcagacgagacagagacgacaagagcgaatgtttaagactaacaggaccaagcaagcaccccctcacgacttgggcatggctggatgaaaccctgaacagggctca

SEQ ID NO: 143896 - DNA, 290 bp, Zea mays
  Clone ID: MRT4577_6270C.1
ctcaatttcgcttacattataaaaacgcctatgtattgaccacgacgtcagataatggctcgcgacctctggcctgcggaacggccgacttgaaaccctgaaagggccaacacaaaacacaaactgatggaacttcgcgacaacatcaaggacataaacgagctcgagacccggatgctggctatgatgcaccccgtaatgaccatcatactcctgatgtagtaggagaccacgccgcaagctcaagatcattctagagaacgtgatcaccatcaccgtcacctactccg

SEQ ID NO: 143897 - DNA, 476 bp, Zea mays
  Clone ID: MRT4577_62710C.1
ggggggaggggcattctcttcatttctgccaaagccacaaacattaatcaaaaaactctattatcgaactataactgataagcaatctaaaagagggcaccaccaatgatgggtagcatggtagaacgctgctggggtggccaaagcaagatggtggggggggggggagtgttgcactcactagaggcgccacagttaggcgcactgtgcaggcagaacggttacaactgttgctgagtcacgaagggaggagggctgacatatagtacgctgttgaatggtgttagttagttgctgctgtaaatagcacgagagtttaatgctagtagtttgatgaaagtaagaaactgctgtgcggaggtacacagaatctggctataaggcaggagatagcgttgaacataaaaggcagcgtacagtgaacatccgtggaagagaggaataaactgctgttgttcataagctgcagcccggtg

SEQ ID NO: 143898 - DNA, 259 bp, Zea mays
  unsure (1)..(259): unsure at all n locations
  Clone ID: MRT4577_62711C.1
tttacactccagacccgctcttcgcagccacaatcttcacataactttcatcaaaccagtaagaatcaaacaacctgnggagctcttcaatgctttgaggatggtaccagtcgtcactggagactgctactgcagcaccatctgcattctccctaaaagacttgatctcagacttgacgaactcatggaaggtccatactgcagcactactgtatccaaggagtttgctgacggtaacaggttcattgcccttccttca

SEQ ID NO: 143899 - DNA, 267 bp, Zea mays
  Clone ID: MRT4577_62712C.1
caagaagctctttctcttctaacggtggctcgtcctcgtcggtttcggttggcaagtcggtgagaacgttcaggacaagggagccagcagttttccaagaccaaagccaagaactgcccgacgactccggtgatgatcgtgcacgcgctggacgtgcacggatcagaggagccgtacggctacagagcttatcagtccatttccaggttccagtacgagaggtccaggagcgaccctatctgggcggtgtggcagtctcgtcggatg

SEQ ID NO: 143900 - DNA, 134 bp, Zea mays
  unsure (1)..(134): unsure at all n locations
  Clone ID: MRT4577_62713C.1
ttgcctcccactccctggcgcaccaaaagcaacaacgtagctacaaggccacacgaaaacacgatggcctgcgccttcttcnttcgacaccgagccggtcggcgagcccggcgtgcacgccctggacgcgtgcg

SEQ ID NO: 143901 - DNA, 107 bp, Zea mays
  unsure (1)..(107): unsure at all n locations
  Clone ID: MRT4577_62714C.1
acccacacgtccaagcacggcaacctcaatgtctccgacttcggcctcagctcgctcagggantcccagaagcatgacgggctgctgcacaccacctgccgcacccc

SEQ ID NO: 143902 - DNA, 467 bp, Zea mays
  Clone ID: MRT4577_62715C.1
gaggggcaaaaccctggttttaaagggacaccaacggaccggacagtggggggaagggggacaagacacgaccggggacaaaagggaaaaaaaacctgggggttgggggggaaaaaaaggggcgacaatggaacacaccccgccagccttgtttttaaagccaaggaatgcccaaaggggcccaacacccccgggaaaaggccaggggggttctcgagccccaccttgaaaaccccgggggggccccccaagggggccctgaggaaacccaccacgggtcccccaagggccccccggggaagggccctgggggccctgggggcccccaaccacaaccaattgttgaaaaaaaagggcacccccccctcccccaaaattgccatgggccccgaatccctaaaaaaaaagggggacccggggggggcccactcggggaaaaaacccgggggggttaaccccccgggggg

SEQ ID NO: 143903 - DNA, 912 bp, Zea mays
  Clone ID: MRT4577_62716C.1
tttgcaaactgtgaattgttctctgttgcctggctggcaggtcccctccctttcctcctaattgtcctgttccaagtggccgtgtcacggacgacgaccagagaaggacgacaaagagcgaaaacaacgagtcgtacaagaagggtggcgatacacatatagggcgagactgggactccgccgtgagctccaccgcctcctccccccacgtcggcgctgccagccccgcccccaatataatctggtatttccccagtaaaatcattatctgatgcccgcagtgtcttcattcttgttagtctagaaaacgatgacggtaggggaccacttaggccggcactgtcaatatccagagattcaagattcacaaggttcccaagctcctttggaacagatccagacaatgcattggtgcccaaagtcatgtactgcatagcagtcaaattcccgaggaaagatggcaaagaacctgttaagtaattcttgcttaaatccagattgatcaagcgcgtaagattctgcagttcctgtggtatggggccaacggcattgagcgcgtatatcttcagcttggtgacgtggcagacggtgatgttgttctggtcggagcactcgcacttgatgcccgggttgaagttgccgttgtcttcgatgacggtgccgtccgtggcgatgccggtgcaggggtcgccgctgatgttccattccgacgacgctgtctggcggagcttggcgaacaaagcgttcaccgccgccgcttcgactggatcggtcttcatcctcgccgcttgctgggcttgcgcggatgatgatgcagctagaagcagcagcagcagcttcgggagcgcggaggcggagccatagacatagaggcaccggcgcggagaaggtctggaggtcgatccaggccgc

SEQ ID NO: 143904 - DNA, 222 bp, Zea mays
  Clone ID: MRT4577_62717C.1
attgatgcacgcgttgggaatgatccatggacaagggaatgacgggggcttggtgaagtatccatggctgcaggaaaagattcacatggctgcattaaatatctggaccgatctgcggtgcaaggtccgtgcataactggtgagaacgtacgcacatgagattggaagcgtctaacttttttattgaactaggcttctaactgatactgataacattattta

SEQ ID NO: 143905 - DNA, 593 bp, Zea mays
  Clone ID: MRT4577_62718C.1
cggacgcgtgggctcggactgctaatatttagttctttgagtaaaatttgtacccacataatttcagctgtggcattagcaatagccttatattctgactccgtacttgatctagatactgtgggttgcttacgagcactccaagaaataagattagatcctagaaacactgcaaaacctccggttgatcttctatcatcaatgctaccagcccagtctgcatcagaaaatgcgcttaccaaagttgagggtgatttgtgtatatgcagacccaactttgtgcactgtttgatatacctgaggattctctttactgctgcccagtgaacagttgtaggggcatgaaggaactgacataccttattaacagagaatgcaatgtcaggcctagtgagtgttaagtattgtaaagccccaacaatacttctgtattgtgtggcgtcattgctccccaacaatgacccttcatgcagggatagcttttcactagtggacaatggtgagctagctggtttgcagtttgacattcctaccttttttaataaatctgaagcatatctctcttgagtaagaataatcccatcatgtacctt

SEQ ID NO: 143906 - DNA, 239 bp, Zea mays
  Clone ID: MRT4577_62719C.1
ctacttatgtatcgttcttctcaaccccattctagctcttctccggtcacccttcaatccgcgcggccatttttatgaggaagaccacccatcccaattagttataactttacccttttacccactgtccgtaaatgagattttatctttaatttttctcacatctttacatccttcatttacaccttcattcatgtcactaatttgtctgagaaggaaactttggttcttatcacttt

SEQ ID NO: 143907 - DNA, 304 bp, Zea mays
  unsure (1)..(304): unsure at all n locations
  Clone ID: MRT4577_6271C.1
gccaactgtgggggggggtgccctctatacgccgggggcggcccgttggatgggggccgcctccccgctccgttccttctcccgcctaccggaccctgtcctaccttttctttttgtgcctctctccccttctttggggggggggccnnnggcngtgctccccgggaagggcgggggcgggggggggttcctaggtgccgtgtctactgcgggccgcatcgtcgctcttttgtcccctcggtgcggcctcccttgctctgngtgtnngtgggggggccgcccctttgccctcttggtgcggtgc

SEQ ID NO: 143908 - DNA, 978 bp, Zea mays
  Clone ID: MRT4577_62720C.1
agctaatatttttttttatttgaagcagtgaacgatgaattacaaagaatttttttataggaatgagtttatttttacataaaaacatacaaacaagaaaaagaaccacttttcaaaaggaccttacttttgttttttcttcgagataccctccagcatcttttgtaccgctcgtatttgggctcggacgcctctttggttttgcatgattggctgattgcatcccgcctccgccttaaaccctaaaccatgacctctcgcgccgctgcggaggccgccctcctccttccgctccgcctccactctgccccgctccgcctgcgcttcttctgtacctctgcctcccggctccgatgggcgtgttccgcggcggcgctgcttgccgtcgtttcgctcgtcaccgccatctgcgctatgcccgacgccggcgccggcaccaacgttgaagccgatgccgacgctttgcggttggagattgaagcgctcaggctaaaggtcgcgcggctggaatctcttctagaggcaaattcgaaggcattagacattaaggctagtatcttggaggaggacaacaaactcaatgaagcaatggaacgtgaaatccagcttttaacgaatggaccagacagaactaaggtgcggcaacttcagcacgagatcattaagataaacagcaattcttacaccgttgaatcattagcacatgatactgagaaaagggtggaagctttgagcttggaggtaaaaaagatagaggatatgactgcagaacaatggatccaaattcgacaacttgaacaagcatttgtgttaaccaagatgatgacgtcaaaagttcatgagagaagtaggccatcagatacagtttataagtggcctggaaaagaaataattgttaagtatgtcaggaatatcaagcttgatggtatttatcttacaggggcgtcatacgtgaggtcctgtttttcacatacatat

SEQ ID NO: 143909 - DNA, 1588 bp, Zea mays
  Clone ID: MRT4577_62721C.1
aaaaaaaaaaaaaaaaaaaaaaaaaaaaaaaaaaaaaaaaaaaaaaaaaaaaaaaaaaaaaaaattggggctcggacgccaaaaaaggcaaggatgattggctgattgcatcccgcctccgccttaaaccctaaaccatgacctctcgcgccgccgcggaggccgccctcctccttccgctccgcctccactctgccccgctccgcctgcgcttcttctgtacctccgcctcccggctccgatgggcgtgttccgcggcggcgctgcttgccgtcgtttcgctcgtcaccgccatctgcgctatgcccgacgccggcgccggcaccaacgttgaagccgatgccgacgctttgcggttggagattgaagcgctcaggctaaaggtcgcgcggctggaatctcttctagaggcaaattcgaaggcattagacattaaggctagtatcttggaggaggacaacaaactcaatgaagcaatggaacgtgaaatccagcttttaacgaatggaccagacagaactaagaactcccaaagcaaatcatattctgctggcaatattaaatctatggaagatgaggtgcggcaacttcagcacgagatcattaagataaacagcaattcttacaccgttgaatcattagcacatgatactgagaaaagggtggaagctttgagcttggaggtaaaaaagatagaggatatgactgcagaacaatggatccaaattcgacaacttgaacaagcatttgtgttaaccaagatgatgacgtcaaaagttcatgagagaagtaggccatcagatacagtttataagtggcctggaaaagaaataattgttaagtatgtcaggaatatcaagcttgatggtatttatcttagaggggcgtcatacgtgaggtcctgtttttcacatacatataaacagtccagaagttttgtacaagcaataagcagatgctaccatgagatttctcggttccgcaaagcaattcgtcacaggtatacatctgatattaacaagcctgatgtgttctttttgggtggtaccatttcaagatcaaacatttctcttccatataaccaattcaagattttcatctcattggcacggaagtttcattacaaggcccaatgttttatacgtgatgtgatggaatccaacaaatatagttgtggtttgtcgaacgagccagttacatttatcttggcatatcttgttgtcatttctccattgtggatcgcttggttcctttattcaacatggttcagctcaaggaagtgacaacttgttggaaaacaggaacgttgcagtcatgggttctttttttttcttcttttttaggttcaaaaggtatacacgtgtgacggaagacaaatatgtggaaaatttgcaatcaccaggacttctaagaaatataactgttatatatatatagaactaacttatcgtatataagtgtattatggactaggggtgggcaaaacacatgtccaatcgctgaccccgaattattacgccaacctggacttaaaatacctggataattttggatattaactataaaaaactgaatttaatttggttgt

SEQ ID NO: 143910 - DNA, 843 bp, Zea mays
  unsure (1)..(843): unsure at all n locations
  Clone ID: MRT4577_62722C.1
cattgggtacctcgaggccggccgggaggccgctccctctcctactgcatctccctcgctctcgtcgcctcgttcgcttcgcctcctccccgccccgccccgagccgagcagagcgcagccctatccggagctgggatggcggacgcgaagcagcagcagcagcagccacagcaggcggcagcggcagccaccggcgtgtggaagacggtcaagcccttcgttaacggcggggcctctgggatgctcgcgacctgcgtcatccagcctatcgacatggtcaaggtaccgtaccaccgcaccgctctgtcacccggcttccttcacagtgctcgtgagtgagctggtgaggcgggatcaggttgtgtcgggcttagatctacgggaatggggttgcttgccgcgtgaatcagtcggttagatgcttacccgcggagtttgcccctttttggttggatctgatgaatcgagcgtgcccttggggtcagcgtagtggaactaagcttgctgttaagtattttggtgcggctagctttagatccgtcggaattgccgtgactggatcaagcatgcgtgggttgctgggagctgaagttgtgaattttcttggccgcgcgatctgtttgttaaggatgacacaattcgtttgctgtagttacttggatccatggggatcggtttgtgtaccgcgattttaattgatgtgaggtggccatctgcgcgttgctccttggttctcttttgcgaagatcgggatatctatggaggttgttagctagccatttgatggttttcatttttagtanggtggttgtttttttaagatgcccctctgatttcctctt

SEQ ID NO: 143911 - DNA, 587 bp, Zea mays
  Clone ID: MRT4577_62723C.1
actgtttcccacacgaggtgtgaactgcctctgtccctaccgcagtcctgtgccgacgccggcgccagccgctgccggaaggcacgcggaacgcgatgccgaaggctacacacaaccgcccagtgtccttatcgacactaacaatagcccaggtttacagcgcaacgctcaatcaatccccgagataatatatgctggagataaatacaccagcggctatctctttacctacgataccatgaggaatcgaaagctcacggacctcaggtaccagatcatgtcttctacccggatttttctcgctggacagaaggtcatgcagatatcgctggtgcgatcccctgctgacgaagctaccacatgcctccacatactttcggagatccttcaaggcaactcaggtctgctattcatcgatcttccaaggcatgatgttgatcggatgtttcgatgactctgggagcatgattttgcgcgtacaggcactactgctatccatacccttgatcttaacaaaggacctctggaacacttcacacatgagatggaatcatttctactctcgtcacggacttccagttctcttg

SEQ ID NO: 143912 - DNA, 435 bp, Zea mays
  Clone ID: MRT4577_62724C.1
gaaaaaaaacaaaacactttgggaaaaaggggggtaaattaaggggaaacggccacccaaatatttcccgttggccaatgaaagggaagggaaaaaaaaaaaaacaaagcttccggggacaaaaaaaaaggcgggggcccaccccctttcggacacaaaaaaaaaaaaagtggtaaaaaaagacccggggaggtaactggccgggaaaaaaggggggggcgaagcccccccccttggaaaaaagggggaaaaaaagggggaaaaaggggtttaaagggggccccttgaagggaaaaagggcctggaaaaaaaacccgaaatggaaaaaaaggggggggggggccgttttgaccaccttacccaaaggcccggaaaaaacccgggggccctccccccgcccaggggggcaaaatttcccgccagggaaaaaggggt

SEQ ID NO: 143913 - DNA, 155 bp, Zea mays
  Clone ID: MRT4577_62725C.1
aaaagtacatatacatcccatcaacaatgtacatacatatatttacaaattaaaatcaagcaaacgctactaactgctaacacaaccttagattcttagaaggtattatttatcaacaacattatacaaataaatgtaccttgcatagtaacaca

SEQ ID NO: 143914 - DNA, 1033 bp, Zea mays
  Clone ID: MRT4577_62726C.1
aggccggccgggactccccgtcgccgacctcacccgcctcatggacggtggccgagccgcagccgtcggcggcgacccctctcccatcgctgctccttccaatcccccggcgctgagcagcaggcccgtcgacgtctccttgttcacccacaccccgtgctactgcgaagaaaatgtttacatgttatgtaacgagcttattagaaccggagtggctgatcctgcgggcactgatctttatgttgttttcatatccaacgaggaaaaaaagtgtttcatggtacttcttgatgtgcatatggaagtctaggcgaagcaaagaagttcttgattttgtttgggatctggactccgatcttcctttcccttccccattcatccaatatgtttctgaggcgattcaaccactatcattcggcaattccagatatgcaagactcttccgtgtggttcatgctcctgtgtttcttcaatcgtttgcctcagacagaagccatatgaaggatcctgaggggaactggattcagttacccccaaaatatgaaccgatcgtggctgaagatggaaccaccaataacctcaatgagtacatcatgatgtctgtgggggacgtggcagacagagaaaggatggctaatgatgtttattgcaacaagcttggtgtggtgctaaatgaaacgatcttccctgaattcttcgcccagctgcctgctccacatacttagcaagcgctctttctgttgtgatgggttactctgtacacttctatagtgcacccacaagattatgaatcaaaataattgggcaaatggtgcctctaagtagcgtttcagatagatccttgcctgttttggaatgcaaaatatggggatttcatagttctgttagcctagacatctgaaagctttatcttgtcccaaataatgatgactaggtcatgtttgacggcttcaaagcaaaatgtggggatctcatagttctgttagcctagacatctgaaagcttcatcttgtcccaaataatgatgactagg

SEQ ID NO: 143915 - DNA, 238 bp, Zea mays
  unsure (1)..(238): unsure at all n locations
  Clone ID: MRT4577_62727C.1
cactagcaagataatgcagcctcacagtcttatgacatcagccaatatataaattagaccatttttgttgctgcaactgcaactaatactatgttgaagtgtttttcgttaactctgctctgaaaatgctttttgcttcactctttgacatatctatatgactatatagccgatgcctgtttttactatatgcttantcatgaatnnctcatgttttccatatgaataatgctagctg

SEQ ID NO: 143916 - DNA, 1098 bp, Zea mays
  Clone ID: MRT4577_62728C.1
aaaaaaaaaaaaaaaaaaaaaaaaaaaaaaaaaaaaaaaaaaaaaaggcccagaaaaaaaagccggcccggcccgtcgccgacctcacccgcctcatggacggtggccgagccgcagccgtcggcggcgacccctctcccatcgctgctccttccaatcccccggcgctgagcagcaggcccgtcgacgtctcctcgttcacccataccccgtgctactgcgaagaaaatgtttacatgttatgtaacgagcttattagaaccggagtggctgatcctgcgggcactgatctttatgttgttttcatatccaacgaggaaaaaaaggttcctctctggcatcagaaagcaggccattctgatgatggatttatttgctgggattatcacgtgatatgcatccagtctaggcgaagcaaagaagttcttgattttgtttgggatctggactccgatcttcctttcccttccccattgatccaatatgtttctgaggcgattcaaccactatcattcggcaattccagatatgcaagactcttccgtgtggttcatgctcctgtgtttcttcaatcgtttgcctcagacagaagccatatgaaggatcctgaggggaactggattcagttacccccaaaatatgaaccgatcgtggctgaagatggaaccaccaataacctcaatgagtacatcatgatgtctgtgggggacgtggcagacagagaaaggatggctaatgatgtttattgcaacaagcttggtgtggtgctaaatgaaacgatcttccctgaattcttcgcccagctgcctgctccacatacttagcaagcgatctttctgttgtgatgggttactctgtacacttcaatagtgcactcacaagattatgaattaaaatatatgggcactattggacacatggtgtctctaagtagcgtttcagatagatcctggcctgttttggaaagcaatgtggggatctcatagttctgttagcctagacatctgaaagctttatcttgtcccaaataatgatgactaggtcatgtttaacggctttagctttctttggtcattgtttgtcgaaacttatatgaac

SEQ ID NO: 143917 - DNA, 1183 bp, Zea mays
  Clone ID: MRT4577_62729C.1
cgaattcgcggccgcgtcgactttttgctcgtgttttttctaacaaaatcgtgattctctttcccaacattatacacaccttatatataccctacattttgcatttacaacagccatagctctagcagaacaaggggcagccatcttggccgcttttttttttttttttttcgaaaccggcatactaaataaacaaacacgtcgagctaccaacattcaacatgtacaaacaaaagtcaccacaacaaaaacatagaatgcaccaagaactcaatcatccagctggtcattggtttgcgcgatcgaccacaagcccttgaaataacccgcagactggagggagaattccgacacagcacggaacagctccggcaggtttgaccgcagaagattgagggatttatccctgactaccctgcattgggtcctataattatcttccaggtccttcagtgcattctccaccctatccacgacggctttccgctcagctgcaggatcaacacgcccgggattgtcgccatcaggaatgcttgctcctctgtcccaatttttctgcgcccaactatcgaactgcttcctcttcttctcaaggtccctcctagtatcatcaatctttaacctcaacttcagttcatcatcctggtgaactaggattgtgttcaccacttctgcaaatgtgtgtatagccttctttgtttcattatcagggagcttctcaaggatatcatgccaagcatgcagcaacctcttgattggaggtgtggcctcatgtggctgtgacgaattaggcttaatgttcgtatcaatagggatcacatttagcttgatccagctgtagaggcttcctatgtactccttctgatatgtcatgaacctgtcaaactgtacatgccactcctgaacaacgttccacagctgcaaagttcgctcatggtgttgctcacttgtttcccgtgtagcaaccgagatatcggatgctttaagctctgtaatgatcttgagctgcgctttgtgacgagcgtacatgacatcccacatgtgtgcgaatcccttcaccagttcaaggagttttggtcccagctgttgatctcttagacgatcaatttctgcaattgttgactccattgtctgtaaatcaactatatattttgtgtgcaagtgactaacaatggactttgtt

SEQ ID NO: 143918 - DNA, 525 bp, Zea mays
  Clone ID: MRT4577_6272C.1
ccacaacccaccccaaagccaaccccccgggaagggggttaacccgcacccccaaaaaagggggggggaagggccccggcccagcccgcccccccaaagggaccaaagaaatcacccccccaaaaccaggaagcggggccaaattggcaaggttcctaaaaaaacccccccccccaaaaaagcggccgggccacaaccttggccccgccccaccaatacaccggaacccttaggaggcggggggtccgattaaccccaaccccagcccaccccccccgaaaaaccaaggccctgggaatcgcacccccccccaaaaaaaaacgcggcaactccaacaaccccccccgggggggaaccccccaaaggggaaacctttgcaatccgggccttggcggccggccttccctcccccagggcggcacccaaggtgtgaaggaacaccccggggggccctcccaggcaaagcggggccccccccctaaaacaccccccacaaaaacccgccccccaaaaggggggagcccc

SEQ ID NO: 143919 - DNA, 149 bp, Zea mays
  Clone ID: MRT4577_62730C.1
agagatgacaccaccagacaattgagagtagtagataagataactttatacagacgagtggccgacgttaaagtcgatcactcagttctgctgcaggaggaggtggtgctaggtggcgatgagcagatgagggtacttgtggttcgaca

SEQ ID NO: 143920 - DNA, 132 bp, Zea mays
  Clone ID: MRT4577_62731C.1
cattcgaagggcatattttaaagacaaacagattttaaacacccaccttaataacctctccccatccatatacacaactcaaaatttttttccaatcacaaaataatcaccccttaataaaactaacaattt

SEQ ID NO: 143921 - DNA, 231 bp, Zea mays
  Clone ID: MRT4577_62732C.1
agaccaacaggaacgcagaacggcctaccgtgttgatgcagggaccaaagaaaaaaagccccgaacagaaaggaagaaaaaccgggctcacacggggggggaaaaacaaaaggagtgcaagacaaccaggaccattagaacacgacgaccaaagtcttcaacgccacagagcggggtcacacgcggaacctatagggcttgaggcacccacccccgaaagggaggccgccc

SEQ ID NO: 143922 - DNA, 328 bp, Zea mays
  unsure (1)..(328): unsure at all n locations
  Clone ID: MRT4577_62733C.1
aaaaaaaaaaaaaaaaaaaaaaaaaataaaactggttttttaaaaaaaaaaaaaaaacccaaaangggaaatttttaaaaaatttttatggcccaccttcctccccttcatacaaagtcgccccccttttatagggtcccaaaatttcattcccttccccccgggttaacaacttcttttctgtttaaaaccatgccaatacaaaactcaattttttaaaaccacatccctttaaaaccacctgcctaaccaactaaaatccccttacaaatcaccctttttaacaattttccattataaataaaaaatccaaccccccttttatttc

SEQ ID NO: 143923 - DNA, 396 bp, Zea mays
  Clone ID: MRT4577_62734C.1
gtaacacaaaaatgtttttttaagaaaaaagaactttcttagttgccggcccgcccgtttaaaattctggggacgaaaccgggaaatattaaccaccccaaatgttgggctccctttttaaaaaaaactttactttgttgaggtgcatgggggggggtaaaaaatgaaaatttaaagctttgtttgaagtcaaaattccaaaattttttctgggaaaaaacccccctttgaaacttaaaagggggcgaagtttaaggcaagaaaccgttctttttgttttttttggagcggagtttcaaggggcctaaaagaagggcatataacctctccacaaattgacatacttccacaggtgacccttttttggccgcaacccttttaccccatttaaaattt

SEQ ID NO: 143924 - DNA, 458 bp, Zea mays
  Clone ID: MRT4577_62735C.1
ccgggttaactaatggttcgctgggtgccgccgcacagcaaacggaaggggggagcatgaaatcaatggagaacgcctggtagtgagctgggcgtaccagagcagttcaccaaattaaccttggggaacctgcgcatccgtcgggccgggtcgggcagactgtaaattatcaccgagggaaggagtgacctgtacaatagatagatgagtgattcctgcatctactaccgccgggggccgcacgccagcacttgtagaccgtgtgcaggggatcaccagagaaataagcaactcacaccaactgatgggtggtggttcctacacaaacaggtatactgctcgaactgatagcttgcttgcatgcttaagaggggactcgctcgctatacctaagagattaaaagatgttaatgtgctcatggatatgcttttctgtgctgtcaagcttaatggctata

SEQ ID NO: 143925 - DNA, 936 bp, Zea mays
  Clone ID: MRT4577_62736C.1
agctcggaattcggctcgagctcacttcttgcacgtggaggatcatctcatccgtcattccattctacacacagtcagacatgggcaacggcccctctctctcgccgtgcctgaacccgcacctgccggagtcgtccgcgacggtgcgcctggtgtactggggcgggcgggcgaggcagctggcgctcacgggcggcggcgacgacgccattgtcacggccggtgacgtcgcggcggagctcccaccgccggccacgggctacgccgtgtgccccgccgacgccttcttcatcggcctcccgatcccggccatgtccccgggcgaggagctcctgccgggccgcacctactttgtgctccccgccgcgcgcctcccctgcctcaaggcgctcacgcccgccacgctcgccgcgctgtcgcaatcgcacggcagaaagaagcagcagcctatcttcgcggtcgcggggtgcccgttcgagcacgtcaagggcgcccacggcggcgccccgctcatcagggtcctcccggagttcatcgagaagctcatcaccgcctgcgacgccggcgcgaacgcgagcgccaacaaggacacggcggccaagcaggccgcggagctgtgcagcacgcccgagctgaagcggcattacgcgcagctcgtcggggccggcaggagccgcccgtggtcgcccaggctggagaccatcgccgagcgcggtaggtcacggtggatgaggttggcggcgaggaccatgctgtcctcgcgttagccgtgcacatccgcgcgcgtagcgtaggtcggtgttattaattgttagcttgcggagatttccgtttatttaggaagaatgacgaaggacgaacagcaaaatgtacagatggctacgcatttttttccttgcaatttgcaaaccagaacgaacgtttgtttctctctct

SEQ ID NO: 143926 - DNA, 213 bp, Zea mays
  unsure (1)..(213): unsure at all n locations
  Clone ID: MRT4577_62737C.1
gacttatcttttccatttcataccatanctaaattacattccatggcatcgacttatcttttccatttcataccatanctaaattacattccatggcatcagtacttgctcatccccaagaaaggagctgccctttatgaagtccaggagccagctccagagcctgccaccgaggatctccccgcagcctacgcttttgagggcaagccccgg

SEQ ID NO: 143927 - DNA, 277 bp, Zea mays
  Clone ID: MRT4577_62738C.1
gaagtaaggagccaacaccaccggctcgtcggctggtcgtcagtattgcctgtacacgacaaacaagtggacgccaaagcctgcactgggaaccactcacgctgggctagcgatccttctagcacagggtgatggctccgctggctggccatgatgcaccaaccgaggtgaatgtaacaagactcagccacaagcacgacagggcaatgaacagcagcccaacgggtgacgtcctgagtgcataaactggataagaggaaatgcactatgatatatc

SEQ ID NO: 143928 - DNA, 185 bp, Zea mays
  Clone ID: MRT4577_62739C.1
gtcacgcacgcacatgcatagcgtagtagcaagctcggtcggtcttcgtagcttctgctgtctctctctcttcctgtctccggtcccatccacagcaggggtgagctgtgaagaccgagctccagcttctcccagcgtgtgtgtgaggtgagctgttgcttgcagcgaggtgcaccgtggccatg

SEQ ID NO: 143929 - DNA, 464 bp, Zea mays
  unsure (1)..(464): unsure at all n locations
  Clone ID: MRT4577_6273C.1
ggcgccttttttttttttttttgcgcaaagacttctttgaaccatttctgaatctgttaaagctgagtcactggtgtgtcatattgtttcttgcacattcgtgtgtcaaaaggtcaacattgaagggggggtatacatgtcattgtgccgaatcctcggggtctttgtcccagtctctattgctttttatttttacaccggcacggcacttcagattacactcacggggccagggatccagtctgtatgttttgtctgaacaccagggtcaggcagcggctatggtttggaagaactagcgcttggtctccctgaagcccacgacagataaggggagcatgggtgggcctgggcccggaattcggacggncctgagcgtccagtttcctatggagcgtatagagctggctatcatgtcatgctgtcctgtggaaatgnatccgtcccatcccacaacatacacc

SEQ ID NO: 143930 - DNA, 150 bp, Zea mays
  Clone ID: MRT4577_62740C.1
gaccgcacgcgtccgagcactcctattctaacgcctattctgtctacgtttactaaacttctatctaccataccagtaggtctactattctatgcagataaacatacacatcaccatggtgccttccttataaatcccaatcctcaacat

SEQ ID NO: 143931 - DNA, 259 bp, Zea mays
  Clone ID: MRT4577_62741C.1
ttttgggtgccttttttccaaatagttttcaggaggccggaacacacaaaagtcactcataaacagtacatagggtgatttttgtgtaccatttacactaatttacagggtttttaaaagggtggggatgtcattaaggcccaaccataattttacttccacacgcgtcaaaaaacattacttcaacctctttgttgatttcacatatggtcccggaaggacctgggcacctatcaggaggggatccgggtgacccctg

SEQ ID NO: 143932 - DNA, 283 bp, Zea mays
  Clone ID: MRT4577_62742C.1
ccggtacggatgcgtgcgtcggcccaagcgttcggcacatgaggatcgcgggcctacgcttgtacagctgtcagctgggcccaccttttcggcccgacgccctgatttccgcatcgtcttgctctcgcacccttcccactgccatcagcatgtgaaggaggcgcggcatcagcttggtgatttgtgagcgatggcgccgccacggtcgcgaccgtgggcttaccttcgcgtgattgtcggcaccatcctcgatggcgcactcggattctacgtcatgcaacta

SEQ ID NO: 143933 - DNA, 385 bp, Zea mays
  Clone ID: MRT4577_62743C.1
aaaacaaaaaccaagagagcaacaaggaaacaaacaagcggaaggcccaaaaaagggcgagccgaaaaccaaacccagagcgtgtgcgaacggaccgagccggacttctcttctcgggacccgtttgacggtgaactatgcctgagcgatgcgaatccagacgaaactctggaggaggcacgaagcgatactgacgagcaaatcgctcgaccgacttggatataagggcgaaagaccaatcgaaccatctaggagctaggcccctccgaagcgcccctcacgatagctggagcccacacgagtcctatcggataaagccaatgattacaggcatcgagggcccaacgccctggacctattcacaaactccaaataggtaggacgg

SEQ ID NO: 143934 - DNA, 525 bp, Zea mays
  Clone ID: MRT4577_62744C.1
cccacgcgtccggattctcacttctcggctccgcccgcctcaaaaaaaaaaaaaaattccccaacgcagccagcagcgcaaggtccagaagcccaggaccagacgacggacctccgcgccccatcgatccgcgcggccctcccccaacgcgcgtgcgtccgcaactagcgtctgccgccggtcgctttcttccgcaccccccgacgcggcaaggagcccccccgccatgagggtccacccggccccgcggaagcgcaccatcgccgtgcaacgctgcgcctccgcggcggcgggcgcgctcggcgggaagaagctgcgccgcctgccgcacatattcgacaaggtgctggagctcccgttcgcggccgacgcggacgtgtccgtcgaggaggacgcggcggcgctgcggttcgtcgccgccgccgacgagttctccctcgcgggcgcccgcgcgcacgccgtcgagatccacccaggggtcaccaaggtcgtcgtccgcggcctctcctcctcctccctcggggg

SEQ ID NO: 143935 - DNA, 264 bp, Zea mays
  Clone ID: MRT4577_62745C.1
ggggctcgaaaaactccatccgggacaaaaaaaattatccttttaatcagagggtttactagttttttaccgggggttcatgggacgggaataggccttatcccaacctatagataatctttgaaatcttgctcttggggaggcaaaaaagcactgggcagtaatagatcgggggcctcatgcggggctcaacttggggagggggcgctttaagggcttgacccttaaggggcgtgtttttggtcacccagcaaggttcagccc

SEQ ID NO: 143936 - DNA, 426 bp, Zea mays
  Clone ID: MRT4577_62746C.1
ggggggggagaaagcaaaaccattccatgctcaacacttgggcagggaactaaaggggttcacggtttgctcagttccatgggcggagtactggaaagggatgtctcaacagccaacttccaaactgaattaaaaaaaacccttccatatcgacaggggtgaggagaccctctttcaaaggccaaaggcaataagcccaggcatccaatcttattgggggtcctaaaattcccaattcatatggggggatatcagagggacccccccagctgcgggggggtgggctttatcaaggttaccgagcataacagattccataaggctttttaccccgtaggacatgttttttaatcgcccctttcttggcccttggggcgaagcgaataatccagggatttacgcccccttttttaagaacccccgggt

SEQ ID NO: 143937 - DNA, 445 bp, Zea mays
  Clone ID: MRT4577_62748C.1
gctgaacccgcctgcggacttgggtgctggccacccttcctcagccttcagagagaagttgagcgccggctcatcggatgatgaacatggctcggaggaggacaataaccttagctcagatgaagatggagaagaggaagaggaggaggaagagaaaggtgatggaaacaactggaagggctctgtggatccaaactctctggaagctgaagaaaagaacgggagctcggagagtctgatggcgctgcgaagagcaaagaacgctctactgttcgatctcgacaggaggctaatggacctgcaggcagctgatgcagtctcgaaaatggaggcggcgtcacgcttccgcgtccaggtgctcttcatctacacaccgaggcggcctgtcccttcagacgatccagcacagggggacacagtggagctgccgcagatccctggctcg

SEQ ID NO: 143938 - DNA, 308 bp, Zea mays
  Clone ID: MRT4577_6274C.1
gatccaagaagagaaactggaacctttatccagcttgcctacgggagatgagccgtgtctgcacacctaccacaggccgagctgtactacttactcaagacacaaaatgctttaccaaggcgttatctggaatgcgacacgtatggcgaaaggtggatacagtctgggtgaacgttggtggtcttcgtgctgcagtttacgttctgatacgtacacctcaagcttttgttcatccttcagaacaagacggagaaagaggaactctttggcaatgcaaagaatgaagatgactaatagtacttgtactt

SEQ ID NO: 143939 - DNA, 297 bp, Zea mays
  Clone ID: MRT4577_62750C.1
cggctcgagggcagcgatcacttctgcgatgatgacatatatgcgatagctgaggaccgaatggggctgcctatctaggacgatcactatcgggacgcaaccttctacaccctgggcgcgggctacgtgcacccggcgctcacattctatccaggcctgttataccacctccgagccgacgactacatacactacctctgcgggcaggggctgggcgacgacagagtcacccataatatcccaccgccaagccaactgcggagaactcagggccgccaccgaggccgagcatgatct

SEQ ID NO: 143940 - DNA, 407 bp, Zea mays
  Clone ID: MRT4577_62751C.1
cttgggcgctgcccgcagaggagtttcaggtttaggccgaaccaaatatatctggggattgggtcgcgttcaacaacatgccacaccccggccagcccgcgggtgcttctaagccgaacccgctcgactcggacttggactcggagaccagcaatgagccggcgaacaagtccggcgcgtcgtcgtaccatgccccagccgacggccagaagcgggacaaggactggagccgggcatggggccggctgcagaaccacccgggagcggcgctggagtactacaccgggcacaagggcgcagatacaacacgcccgctcagcgggtgtctgcgccatcacaaagacagtaggcctgacgcccgcgacactctgatcacagtgagacaagcgggggagcaaaacagccgg

SEQ ID NO: 143941 - DNA, 147 bp, Zea mays
  Clone ID: MRT4577_62753C.1
gtcatatttaaataccattaagttaatatattattctattatatttatcaaggtgtggctcgcgagccgagccgagccagcttgggagccaatatcgagccgatacgagcctcatccttgagctcgtgcaatgggcgagccgagcga

SEQ ID NO: 143942 - DNA, 235 bp, Zea mays
  Clone ID: MRT4577_62756C.1
ctcctcctcgtcggcgaatagatggctgtgccgctgcttactgtatcaagatcatgcagaaggggatcatgcagttcaagaggccccacctctactcttacaaatgccttaagccaacctatctcacgccaaagggaattgactcccttgtctcgattaatttcaaagaattcacaccgatgcccaacattatttatggaaatcacaaggttaccacgcactatattcccaacaa

SEQ ID NO: 143943 - DNA, 491 bp, Zea mays
  unsure (1)..(491): unsure at all n locations
  Clone ID: MRT4577_62759C.1
cctctcgcaaccctactcccctgctccattctnagacgccgccaatcccttcccgtgctgcgccaccgctccgtgacgacaagagatgtccgctacgggcgatcggcccgcctctcctcatccatctcgtcacgacgtactctcgcgtcgtcgcgtgcagcacgaccgctccgagatcattgtcaacgaccagcgtaaccgaaccacgccctcctacggcgtctccaccgactcccagcgcctcatcggagatgcctccaacaaccagcccgccatgaaccccatcaacatcgccccctccttcctagcgactcatccaccggaggctcagtgctgcctccctccagagcgctatcattttctggcccttcacgcccatttcttcccctcctgcgacgccaattctttcctgttccgcccacgcggcgcggagacgccagtcgcactcctcctcgatctcctccatgcttcttatccagaccctctcgcat

SEQ ID NO: 143944 - DNA, 241 bp, Zea mays
  Clone ID: MRT4577_6275C.1
ctgactcttatcgagttgatctaggtatccatctcttactaatctaaataggatgagacattgtctatagggggccgtctacatagccagcgatatcaacacaaatgacattctgatcctgaagatggttcacattgaaaatgaccacgatctgtagctattcacctattttaacttaatagatcattctgcagcgtttccaccatgtcttacatcgacgatctacaagcacgtcagtacc

SEQ ID NO: 143945 - DNA, 423 bp, Zea mays
  Clone ID: MRT4577_62760C.1
ttttttttttttttttttactttttttttttttttttttactcacactgagtcggtgagctcaccgaacagctcaatgtaacagacgatgaccacgaaacactgaaaagcacacgtacacaccagacataccacagcagagcaaccacaaacacacacgagtcgcgtcgctgaaacccaagacccgacgccgcgacgcgaccattcacctcgcgtccatgtcttcttcagccggagatctggatgctcttaacctcaggcttcttgacctcggccttgggcacggtgaccgtatgctcttaacctcaggcttcttgacctcggccttgggcacggtgaccgtcggggaggcggaatcgccgcccgaactgaccgctgctgcgctccacgcggtgccacttgtcgcccttgtcctccttctccc

SEQ ID NO: 143946 - DNA, 312 bp, Zea mays
  Clone ID: MRT4577_62762C.1
cccctcgcccttttttttttttttttgttttaagacgaaaacaaaaacaacggggaggggtatttttatattttcaataccccccacaaatatgttgatattgataatgacacaatttagaaatacagactaaaaaaattaaatcaacgataaaacaaagcatttaattcaaatacaaaaaaacgacctggctcctcacatccaataaattaaaaaaactgccgcaaatataactcccttggcggagaaaaaaaaaactatatgtattgcgacaacacctgagccaattaaacattcattccacctccacag

SEQ ID NO: 143947 - DNA, 256 bp, Zea mays
  unsure (1)..(256): unsure at all n locations
  Clone ID: MRT4577_62763C.1
gggggacgcatccntttaatataatatatcggcgtcnctgtgtgtgtttcaagtcaatcaaacaattgcttgcggtggcattctctggggcgtgggatgattattatagcttatggcggcttcttgtcctcccctggcctcctggggcgcttctggcgagcagggtgttttgttttgtgggtgccccacactaacaggctaaccatgtgccctgctgtgttgtgtcaccatccatttataatcttatccatacccc

SEQ ID NO: 143948 - DNA, 471 bp, Zea mays
  unsure (1)..(471): unsure at all n locations
  Clone ID: MRT4577_62764C.1
anttcanncancaaaangtatttctcttctggtttttttttagggttatacgggaaagaggcacccgattacaaaaaaagttccaggggcccccgtgggcccgccaaaatttgcgccattgctgctccaccaaccggttggacacacccaacatggttccaaacatttcggcggaaaaaaatttattcccgggagcccttttctccggggggggagaaaacaacctgctcgtataaccagaccttgggttcttcatcttaggtggggcggtacaggggggggatcaacacgaccccgcgggtgctgttttcccactcggtgaactcccaggacaccatgttctcgaatttgccccacaaggagaagccctccttaccaaaaaagatgctaaaccggttgtcaccctggaaatggggggaaacaaggtcctccttacctgaacccaggacggccttgaggataccttgtggc

SEQ ID NO: 143949 - DNA, 292 bp, Zea mays
  Clone ID: MRT4577_62765C.1
ccccgtccatttgatttgcgttcactgccctgcgtttccttggaggggactgttctctcctctcctctggcctccgaggtcgctccttcttctcctctctctctcagaggaaggcctgacgatgcaggaagaggacagcaatgggggaacgtgcaggtgaccgtgtcctgagccgcctccacagcgtcatggagcgcattggcgactcactctctgcgcaccccaatgagcttgtcgccgtcttcaccaggcggaaaaagcttggaaagggtatgctgcagccgcaccagat

SEQ ID NO: 143950 - DNA, 621 bp, Zea mays
  Clone ID: MRT4577_62766C.1
gaccgggccccgatctgcgatcccctcgtggatccaaagatgcacatcttcgacaagaccctcactggaaagactatcaccctcgaggtggagtcttctgacaccattgacaacgtcaaggccaagatccaggacaaggaggcaaatgcacccggaccaggagaggctcatctttggtggcaagcagttcgaggacgggcgcacacttgccgactacaacatgcagaacgagagcaccctgcaccttgttctgcgcctcacgggaggcaagcaaatattcgtcaagaccctaactggaaagactatcaccctcgagggggagaattctgacaccatcgacaacgtacaggccaatatccacgacaaagagggcatacctccacaccagcagaggctcattgttgtcggcaagcagttagaggacgggcgcacgctggacgactacaacattcagaaggagagcaccctccactcgtggctgcgtctcaggggcggcatgcagatcttcgagaagactctgaccggtaagactataacccttgaggccgggtcatctgataccatagataatgccaaggccaagatccaagacaaggaagccatccctccggaccaccaggg

SEQ ID NO: 143951 - DNA, 437 bp, Zea mays
  Clone ID: MRT4577_62767C.1
cgatgggcgtgcaccaagaggacgtgggggcggccatcacctccgatctcaaaccttacaatcttgtggagacggacacgtccgggaggtgtgggcgcgagctactagatcgaggtggtgctcggacaaggtctaggggaagcggctgctgaagaggcaccggatggggaacacctcagctggacgtgtcacatggctggagatccacgccttgctccatcatagaagtactcaccccgcatcaggccctatctattgcccagccagagccggccgccgataagccccaggcttaagtgcttaacaccggccggaactgtttgataccctatgtcaatgcaccattacatcgactatctgcttgtataatgcggcggatgcacttgctaaattggacgatgttatccttgactgagtataaaaaatgctccgcgctt

SEQ ID NO: 143952 - DNA, 293 bp, Zea mays
  Clone ID: MRT4577_62768C.1
gtccacgtacgcctctgacaccgttttgccgtgtggtcatgggtagtctgcaccagggatttcctctgcagggctaccctgcgtatgcactaacagtactttttccaccaatggcttatcctcatcctcgatcggcatatcatcgtccatctgagggataaccaccataatgtgggtaccgtcatccagtttgctacacacctcaaggtggatatcatcatgcacgctactctggcacatcacaacaccgttatggtaacaaccgccacggacgccacgtaggcaacattcag

SEQ ID NO: 143953 - DNA, 703 bp, Zea mays
  Clone ID: MRT4577_62769C.1
ggcgattgggaccctcgaggccggccggggggcaactcgcaacacagacgccgccgccgcccaaagaaagacgtcaactccaggagacaagatagtgagaactgaagagaaggatgggcttcgagaagcagatcctgagatccggcaccggccccaagccgataaagggccagaaggtcaccgttcactgcaccggctacgggaaggatcgtgatctgtccaagaaattttggagcaccaaggaccctgggcagcagccattcagtttcagcattggtcagggttcagtgatcaaaggatgggacgagggagttatgaccatgcaagtgggtgaagttgctcgtatccagtgcacgcctgattatgcttatggagccggcgggttcccagcctggggaattcaaccaaactcagtgcttgtgttcgagattgaagtcctcagtgcccagtaattcgcatctgtcagctatggaaacgttggccatgcttctcaagtaatgaaataattccgttgtcacctcatgctacatacagcagattggtgttacgagttaaatcctgtgaaactttagcattctgtaaccgtggatgtcgagtttatggagttccttgtgtggcgcctcaagtcaagttctcgtcaaaaaaaaaaaaaaaaaaaaaaacaaaggcaccaaaaaaaaaaaaaaaaaagcggcctagggcc

SEQ ID NO: 143954 - DNA, 711 bp, Zea mays
  Clone ID: MRT4577_6276C.1
ccggccgggaacttctctatccctgactatccggctcccaagactcattttattccagcatcaaattcttcggtcaagcccgaggaagatcatttcagttatatcattcgtttaaccccacgatcggcttgtcctcaacatgagtattgtccgaactccagtattttatcaggccccaaggggtgaattcagacaaactctggggcacggaattgctcgctatggattttttggttttttgaatagtgataggagcaaatcagacatgggtccctatgttcaatcaaaccttccgccgcagatgcaagctttgtctgtccagtatctggcgagaaagaagtcccaaaggaagcgaggccttaaaagacagctgcttgcacgcttgactcaattctccccttttggctttgtgggaaagctagcgtcgggcattgaccggaccagtagtgcggcagtggcgcccctggtgcccattgtttcagcggcggaggttttcagtgggatttctccggcgaagaacgaacttacccgggactccaactggggaacttcaacggtcaaaactgacagcttgcagggagatcttctgtggtctacaaccgtccgtgtgggatcctcatcgcagcctccccggatcaacattgacacaggctcggcggactttttcttgtttgatccgaaatgtcaaagttgtgcactcgacacccatgc

SEQ ID NO: 143955 - DNA, 687 bp, Zea mays
  Clone ID: MRT4577_62770C.1
cggccgctcgaggcgacgggacacttaagcaacagatatacaggacaggagtatcagggaggaagacgaggaaacgttgatggccggcagtgaagagctgaagctgctggggtggtgggcgcccggggtgagccccttcgtgctccgcgcccagatggcgctcgccgtaaaggggctgagctacgagtacctcccggaggaccgcgggtgcaagagcgacctcctcatcgcgtccaaccccgtgtacaagaaggtgcccgtcctcatccacgacggcaggcccgtctgcgagtcgctgctcatcctggagtacctcgacgacgcacccggccttgccggcaacggcacgtcgatcctccccacagacccctacagccgcgccgtcgctcgcttctgggccgcctatgtgaacggcaagttgtttccttcgtgcatcggcatcctcaagacagcgaagcaggaggagagagccggtaaggtggaggagaccctgtccgggctccgacacttggaaggtgtccttgcagagtgctccaaaggggaggcagaggcggaggcgccgttcttcggtggtgacaccatcgggttcctcgacatcgcgctcgggtgctatcttccctggtttgaggcagtaggccgcctggccggcttggggccgctcatcgacccggcgaggacgccgaaact

SEQ ID NO: 143956 - DNA, 480 bp, Zea mays
  unsure (1)..(480): unsure at all n locations
  Clone ID: MRT4577_62771C.1
cggacgcgtgggcggacgcgtgggcagatgctgtaacaactgatatttcgccacacctgtatttcatctgccttttgcatctggcaaatgagcacagtttgaagctgtgtgaccgccccacgttggatgaagtcgacatatacatgccgacttcaccgattgtgaagtaaaccatgctgcggttcaatgtgttgtatgtggttttgccatggaagccacctgcattgcatcatgtaatatatatatatatcctcgctgctattttattcataactgtcgtaccggggatgctaggaaagtcaagcggacccgtacccagtagtagatttccttaaatgaggtttctctgatctgttgatgctattaacttaagcttttatcttgtttatcgatggactgagataaaatatttgacagcctagactaacacatgattagcagtttctgctgatggtatagaatttctggctattgggcngt

SEQ ID NO: 143957 - DNA, 397 bp, Zea mays
  unsure (1)..(397): unsure at all n locations
  Clone ID: MRT4577_62772C.1
cccaagttaaaacctaatttacagtatgctttttttttttgcatccgcccccccttaaaatggatacccaaatacattttcccccccaaaggggcttgaacaacaaaaaaaaaaaaaaagggaatgacccgagcgaggccaaaatcaatggcaatggcagtaggaggggaaatggccgttttcccgccccgcccccgcccccgcgaagggggtccggccctgaagcggcggcnnncccccccccaccccnaaggttttccggagctcctcgtacctggggggggcaaacccccgggcgcccataacccccttttgtttggccggaaaccggttttcaaaaaaccttttaaacaacggttcttttttgggggggaggaaaaaggcgtagccggccatg

SEQ ID NO: 143958 - DNA, 473 bp, Zea mays
  Clone ID: MRT4577_62773C.1
ggaacaaacgggccccccaggggggggcccctttttattaaaaaaaaaaagttttaacagctaggggggaaaaaaaaaaaacaggaccccccggggaccgctaaggccaaaaagagtttttgggaaaccccttcgcaaaaagccccaactttggcccccccctaaaaagcttttaaaaaagtttttcgacacaccgaaaagcaaattgaacaacccgggctgaaaactgggaaagggagaaaaacccgaccctttttgaacctgctggcattgcccgaccccgggggggaccccggggttccccccggaaatccggaccgggacccggggggccaccaagtttccctaaaaagagggggaaaaaaactgggggaaaacaggggcaaaggggaatcccgggggaaaatggattccccccacaattcccccaaaaaacaaaccggaaaaaaaaggggaaaacccggggggcccaa

SEQ ID NO: 143959 - DNA, 959 bp, Zea mays
  Clone ID: MRT4577_62774C.1
cattactctcggcaacggatatctcggctctcgcatcgatgaagaacgtagcgaaatgcgatacctggtgtgaattgcagaatcccgcgaaccatcgagtctttgaacgcaagttgcgcccgaggccactcggccgagggcacgcctgcctgggcgtcacgccaaaaaagaagaaagaaaaaaatacacttaagcaacagatatacaggacaggagtatcaaggaggaagacgaggaaacgttgatggccggcggtgaagagctgaagctgctggggtggtgggcgcccggggtgagcccctacgtgctccgcgcacagatggcgctcgccgtaaaggggctgagctacgaatacctccccgaggaccgctggtgcaagagcgacctcctcatcgcgtccaaccccgtgtacaagaaggtgcccgtcctcatccacaacggcaagcccatctgcgagtcgctgctcatcgtggagtacctcgacgacgccctcggccttcccggcaacggcaagcccatcctccccgcagacccctacagccgcgccctcgctcgcttctgggccgcctatgcaaacgacaagctgtttccttcgtgcgccggcatcctcaagacagtgaagcaggaggagagagctggtaaggtggaggagaccctgtccgggctccgacacttggaagctatcctggcggagtgctccaaaggggaggtggaggcgccgttcttcggtggtgacgccatcgggttcctcgacatcgcgctcgggtgctatcttccctggtttgaggcagcaggccgcctggccggcttggggccgatcatcgacccggcgaggacgccgaaactagctgcgtggggcggagcggttcagcgtcgccgagccgatcaaggcgctgctgcctggggtcgacaagctggaggagtacatcactacggcgctttatccaaagggaacatcg

SEQ ID NO: 143960 - DNA, 349 bp, Zea mays
  Clone ID: MRT4577_62775C.1
tcccgatatcgggttcaaattaattgagatgcctgtgcaatggcctattatcatggatgtcagatgcgtcaagtgccgagatggatagtactttcgttgagacactatcagtagcagacttgagctacgaatttgcaaaatcatatctttgctacagcagctgccatctggcacttctggattacagcatgcagaatgttgccgtttttctacacatggaggtccacttgttccattccattttgttatttcttgtaaatgattctaggcctgaaatgaaaaaaaaggcatgcagttcattgtcagtacaattccagtggttactgtggacttagctcaatctagagtc

SEQ ID NO: 143961 - DNA, 288 bp, Zea mays
  Clone ID: MRT4577_62776C.1
attcgaaaaacaggggaacaaccctaagaattaattcatggcttgaaaaactgtacataaccaatagaaccaataaataaatgcccaaaaggcaaataagcagacacaaatcaacccccaacacttgccacttattaggacagggacagtacaggtcaaattgatatgcaaggggcagattaagaatcacaggaaggacccttaaataaagcatgataaagcccaagcacaccagaccagaccagacctaaccaaaagtttattacaaaacaaaggatgctcttttat

SEQ ID NO: 143962 - DNA, 203 bp, Zea mays
  unsure (1)..(203): unsure at all n locations
  Clone ID: MRT4577_62777C.1
agcgtggtcgcggccgaggtacgcctcgttacattgcacatggaaatactcttaattctcaaaaatccttgagagacgagtgttatctactctactagactactactacttttttctattncttgtgtttatgtctctggtggggggttatgttggacttgcccacctntttactncttttgtgctgttgtccctatttgttt

SEQ ID NO: 143963 - DNA, 856 bp, Zea mays
  unsure (1)..(856): unsure at all n locations
  Clone ID: MRT4577_62778C.1
attgggtacctcgaggccggccgggtttgtgatgcagcaccaatattcttggcatggtggctgacacggaaagctcagattcactgcctggcagttcaaatgctgcttctgagatgcctgctaatgggttagcctcaaaatatttttttggatccagttttgtacaactaatttcatagcagtaatcagtacatctgctcttagttagctacctatattgggtgtacataaaaatgctagcatccacagtccaccagatgattattatgtccccaacctcttcatttcatccactgcaagtaataagatctgaccaaaatgagcagagcaaaatttaaggtagactgtgatcttggaatagatgttgtagaagatacagaaatatgatttaaccagtagtttatggctgaatcctctttatttgcattcgttcctcttgttcagtttaattcttatcttcacctttttggggttttttggctaatcattttgctgcttgttcagtttcatgtcatattgagttctttaataggccagtaaagggccataacttacttaaagtttatgatcgttgagagagacagaggaggctatatgctattaataatcactacctctacctcataattaaagcagtgtcatctgctcccataggcatatcagtttcacctgcatgaatataaaatctaagactagccatcaattcaaatggtatgaaatcgcaggaagttctggctctgtnttctttttttttctgggnctaaattctgacctcacaaaaaatggacatagaaagtttgctatatataaaacacaacctccatatatatacattanaattactagaagaaaccct

SEQ ID NO: 143964 - DNA, 724 bp, Zea mays
  unsure (1)..(724): unsure at all n locations
  Clone ID: MRT4577_62779C.1
acagtcagttgagtcgattcccttgaccggaggagaagagaagacgggagaccgagagtccgagaagcttgctgtgaggaagatgagcagggtgtgcgtcaccggagccgccggctacatcgcggcctggctcgtccgcaagcttctggagcgaggctgcgtcgtccacgccaccttgagatccctcctgcgttcgtggcaggggatgagaagaagacagggctgctgaggtcgctccccggcgcggcggagcggctggtgctgttcgaggcggatatctacgacgccgcctccttcgagccggccatccagggctgcgagttcgtcttcctcgtcgccaccccgctgctgcacgactccagcagcaccaagtacaagaacataacggaagcgatcgtggacgcgacgcgcatcatcctgcagcagtgcgagcggtccaagacggtgcggcgcgtcatccacacggcctccgtcacggccgcctcgccgctcaaggaggacggcgacgggtacaaggacagcatgaacgagtcctgctggtcgccgctcaacctctcctacggttacagcaacgttcacctcgacgcgtacgtgtcgtccaagcggctgtcggaggaggagctgctggggtacaacgacaagtcggagggcaggngcgttcgaggtggtgacgctggcgtgcgggctcgtcggcggcgacaccatccagcccatcctgtggagc

SEQ ID NO: 143965 - DNA, 1156 bp, Zea mays
  Clone ID: MRT4577_6277C.1
aaacgtaaataaatttttttttataacacacctacattcgtttagttgttcgggaataaaattacaaacaccatctggtaggtaggtagtgacgaaaaccatacaagtgctgctaattaagaccctctcagcaaacctgtgtgcattaccaccgttggttctgcgattttcatgaacaaaccacctaccccaatccatatggattgagggggtttcaatccctagcaaatcaaaatcttctctaatccatatcaatcccctacaatatatatgaattgaaaataaccgaacaaaagccaaacggtgaaatggagcttctggacaagaatgtccttagccggagccagaccttctcttcagaccacacttgttgggctctatcagggttcattgaggcccataatcggttcgctgatacagaatgcagtgaggcccacgtccctctcgtctcgtacagacgacgacggaaagaggatgatgcggggagtcggaggtccgctgctcaccatcggggatctactcagcgacctcgctgtcgacgacccactcgtcggcgtcggagatgcgtctgtcccatcatctccatcggcggcgcagcaagcggggaaggccaatccgtccgatctcagccggctctttgaggaacactatgacgatttgatgaaggctctacaagagaaggatccttcatggccctcactgatgctgaagctgtgcgcgacgctgaagactgcggataggctgatgagttgcgcggacacgaacgcggaacagctgctggagaaggtgaaggcactggagggcgtcctcgacaggagcggtcatgcggtggcagagattgtagaagctctccagaggtcaggcctagccaatgatggtcacggttcccagtcaaaatcggctagcaagtagacgttctggtctgctttttgtttgtcttctatcccatgcaaatctctgggtattgtgagtgagttgtatgtcgacctgtgcctccacggctttgcggtctgccttgtttttttttttacccctcaccgctcttggaatgcgcgtttgtgtttatcctgtcagaagtagcgggcgatactggatttgcggtgtacaagcttcttcctttttggatcattagcttggtttcttgctaagttgcacc

SEQ ID NO: 143966 - DNA, 310 bp, Zea mays
  Clone ID: MRT4577_62780C.1
ctgactcgtgctcggacgcgtgctccgactcgtgggcagacgcttgtgcaccaggccaggcaagtaagcacccgcgcgcgtcaaagagttcacacccatggctagcaccaacattgcgtctgacaccttgcggttcatgcttggccgaggtcgtgcccactgtcagtagcggcattagacgtgttagcttctcctcagcgctcaaccggcttggctggaagcttgtggtccaggcctttgacgagtctccggcataactggagcccacggctgatggttagggcgccttggccaccattcttagggccga

SEQ ID NO: 143967 - DNA, 431 bp, Zea mays
  unsure (1)..(431): unsure at all n locations
  Clone ID: MRT4577_62781C.1
tttttttttttttttttttttttttttttttttttttttttttttttttttttttttttttttnttttttttttttnttttttttttttttttttttttttttggggttaaaaaaattaatccggggaaaaaaaaaaccccctttttgggggaggggggggttaatttggngggaaacggcaatttaattttttgaattggctatgcaagggaacgggaaaaaaaaaaaaaaaatgtttttgggaggttaaaataaataacggacgtttacccttttcggtcgcaaaggctaagaaagggcttaacataaggggtggccttaattgccgtggaacaaatctggggggttgtcccttgccctgtttttaactgcggcaggaatggggggaaggagggtcttaaacgggtccttggtcgggacgatggcgtgg

SEQ ID NO: 143968 - DNA, 586 bp, Zea mays
  unsure (1)..(586): unsure at all n locations
  Clone ID: MRT4577_62782C.1
cttgtgggggggnnngtgttgaacgttctttatttcggggcgatcccttggatggttgtggagngattccccccccttgggcccgtccctgcctggtagtgggcctgccctanaaaagctctccagaggcgagtccacccggtcaaaatttttttttttggccaggangncccaattcgggggggggttgccgtccgggcgggagacgggggcctcgcgccggagcctcgccgccgtctggctcaccgaaaaaggcggcggcggcggctgctcctgctgccggctcttgtctggcccggcctgctgggcgggggccctgcccaccggcncgtgccccccgtcctcnngccgccgctgtggtggggccctgtntggntccggnntggcctgcncngtgtcgcggttgcgcccgccccgcaggcnnggcnngcctgggggccggttcctccnncccgggggggtccgctcncnctccccccgggccccccgccccccgcccccccacctttgggtgccctttcncccngccctccttgccccccctcggcgccgccggccggcggtcggctggcccccctgccccccc

SEQ ID NO: 143969 - DNA, 309 bp, Zea mays
  Clone ID: MRT4577_62783C.1
cgaggccggccgggccgtgctccgtcgtcgtctccgcccccagagtgatcgagcccactgacctggcccccgagcctcagctcgtgagtccggcaccgcgcctcgccatggccatggtgcagccggcggacacggccgtcaaggccaacgagatcctggcgcggttccggcccatcgcgcccaagcccacactggcagcagccgccgccgccgccgcggcgcccgtggcgcaggccgcggccgagggcgtcgtggccgcgaaccgcgtgctgtgccatctgcagagcaggccgtgccgcgcgcgcaagc

SEQ ID NO: 143970 - DNA, 298 bp, Zea mays
  Clone ID: MRT4577_62784C.1
gggagggaaaacccgcatactcattcattttttacccattaaaaaggcaaatggggcttttttagagcaagacggcacacgttgacccacccacacaagttttgttggaacttcgacagtttcaaattcacgacgacgtccaaaatgggggtgacaaaggtccctggggatacaaaaaaaaaaaaactttggggaaacgtgccttaaacacgggggggcaaatactttagggggggtttcacaagggatttaacgtttagtttttttagggccgggtggggttggccccagccaacaa

SEQ ID NO: 143971 - DNA, 1194 bp, Zea mays
  Clone ID: MRT4577_62785C.1
cggacgcgtgggcggacgcgtgggcggacgcgtgggcggacgcgtgggcggacgcgtgggcggacgcggggcggaagaggggatttcgagccgcggcgatcggggctagagtggccctcgacgcgtccgcgggtggaattgccgagaagccgagagagaggggttggagcggagttgcgggaggtgggagagaaggcggcgatggggcgcctgttcctgatgcacctggacggcaacgtctacagctgcaagcactgtaagacccacctcggcgttggcagcgacatcatctccaaggccttccagccgtgacttctggagtaaaagaagaccgcatgatgatcacaggaatgcatactgtttctgatatcttctgtgttggctgtggatccatagttgggtggaaatatgtaagatttgcgaaggttgtttcatagtgtctccttgtatattgccttgcacctaactttttatgacgctcttctctaggatgcggcacatgagaagggccagagatacaaggaaggcaagtttattctggagaggtgatggccgcaacattgtcatggttttgtcgccttggatttgttctttttcccaaagaaatgtcctctgttcaaacagatctgtaactcggtttgcagattggtgcatcgattatattgttaatctggtggaatcagactcactgcaacaagatttgtcctgagcaggtacaaggtgtcgggccctgacggaagccaatactgggttccacaagatgctcacttgggcggaagcgacgccgatgacatataaaacacgatccaacaagctcaagcctgtcgttgatcccctgtaaataacctgggtggcgttgctctttaggcagccgacagccggggattgctccattgaaataattcgccggcgtaaattgttgctgttccaggtgacatgatcgtatccctccctccctcccgttgtccctggaagtcattagatgttaccgctgtatatgtgcgtaacctgtgttgcttataagtccatctgagttgtatgccaagcactagtgaccaaataagtaaagtaaatttctcaagtgtctggtcgacctgggtgtcaagcgagggcagtatgtacaaatctgcattgtattgtgtgttcggttccaacgtcactcttaaataaccgaatagctgcacgcttgttttt

SEQ ID NO: 143972 - DNA, 207 bp, Zea mays
  Clone ID: MRT4577_62786C.1
accactcgtcctaagactgaacatttggttgagctcactgacgaggagcgtaacgtactggctgttgcatacaagaatgtgatcgctgctcgccgcgcttcatggcgcattgaaccttccattgaacaaaaggaggactcccataagaacaacaagcatgtgaaccttatcaaagaatatcgtgccaagatcgaagctttactgaac

SEQ ID NO: 143973 - DNA, 1237 bp, Zea mays
  Clone ID: MRT4577_62787C.1
cattgagcacctcgaggccggccgggaccgccggatgggagcaaagcgagcgctgccatgccgtgctgcccgtgcagcttgcaggtggctgtgcgagcgcccggcctcccacgcactcctcccatccgaaaaccgaaatcccccactcttctcacccgtttccccactcgctcgctgacacatcgcacattcgcaccataccagataccaccgccgctgcacacaaacccagaaaccaccggcaataaacaactcccgctcccagtctccgatccgaggaagccggaagaggggatttcgagccgcggcgatcggggctagagtggccctcgacgcgtccgcgggtggaattgccgagaagccgagagagagggcttggagcggagttgcgggaggtgggagagaaggcggcgatggggcgcctgttcctgatgcacctggacggcaacgtctacagctgcaaacactgcaagacccacctcggcgttgccagcgacatcatctccaaggccttccagtgcaagcacggcaaggcgtacctcttccataaggttgtcaacgtgacttctggagtaaaagaagaccgcatgatgatcacaggaatgcatactgtttctgatatcttctgtgttggctgtggatccatagttgggtggaaatatgatgctgcacatgagaagggccagagatacaaggaaggcaagtttattctggagaggtacaaggtgtcgggccctgacggaagccaatactgggttccacaagatgctcacttgggcggaagcgacgccgatgacatataaaacacgatccaacaagctcaagcctgtcgttgatcccctgtaaataacctgggtggcgttgctctttaggcagccgacagccggggattgctccattgaaataattcgccggcgtaaattgttgctgttccaggtgacatgatcgtatccctccctccctcccgttgtccctggaagtcattagatgttaccgctgtatatgtgcgtaacctgtgttgcttataagtccatctgagttgtatgccaagcactagtgaccaaataagtaaagtaaatttctcaagtgtctggtcgacctgggtgtcaagcgagggcagtatgtacaaatctgcattgtattgtgtgttcggttccaacgtcactcttaaataaccgaatagctgcacgcttgtttttaagttgttttttgcaactatcatgtctgctgttggcct

SEQ ID NO: 143974 - DNA, 828 bp, Zea mays
  Clone ID: MRT4577_62788C.1
ctgaattcgacatacatacatatatatacttccttgcattgcaagaacctccaacaccatctttgtacccggaaaccccttgcccttacacttaccctcacatttcctcgcaccctaacgcccaagtggctatttacagagacatcatgctggccgctgcattttgcttgcttatcagcagcaggggaagcaggagaacaagccgccctttcctgcctccggtttgcttcttgtctccggctgcggctccgccttcgcttcaactactggcggtgctggcgcggccttgaccgcctccgtcgttgctgctgctgcttccggctggtggtctcgatgagactgcttcttggagtagttcctcttgtcctctatcaaatttgggaaggcgaaggagtagttccccttcatggcgctctcggggagctctgggatgctctcgaagggcggcgagacgatggcaggggcggccttggcatcgttgtcggcgtcgatgacggcgctgctgcgcggcggcgtggcgatgtccatgagctccgggtgcgccaggaagaagccggtgaagtcgctggacggcgcgacctggaggccgaacaccgactccgtggacatcatgctccagtccttgttggactcggacgggtcccgctcgaacaccgccgccgggatcctgtcagcatccgcctctgcctcggcgctgccgtctgacgacgagagccgttccatgagctgcgtcggcggtggcgtggccggcgccctgccgggaggccgttctgcaggggcaacgccatgcgcgcgcgcgcgcaccagccccggtcccgatcctcgtgc

SEQ ID NO: 143975 - DNA, 153 bp, Zea mays
  unsure (1)..(153): unsure at all n locations
  Clone ID: MRT4577_62789C.1
tttcgatgcgtccgcatgaacaagnacaaaaagtggggttttttttaggtggcgcggagcctgcccatggaggaactggacaagtacttgcagatgtgccacctcatggacaaggaccacagcggtaacctaacgctggaagagctcatggac

SEQ ID NO: 143976 - DNA, 323 bp, Zea mays
  Clone ID: MRT4577_6278C.1
aggtcgcgagggcagacacaacatggctgcgaacgtgagaaccaagagggcgccgacgcgggcacatgttgcgtaagctgtgaccaccggcgtcgcgatgagctgtccacggcaccgtcactgagaagcgtctcgaaccacataacataacccgcacttcaggcaaggaccgcgtgcacgctgcagcactgtctcaagcatggcatacaggcgcctggtcagacgaccactgacaagaccattggtacaggggctgaagctagcaacactttattaacttggactcatgctggaacacacgtatcctgagcgagtgtctggga

SEQ ID NO: 143977 - DNA, 313 bp, Zea mays
  unsure (1)..(313): unsure at all n locations
  Clone ID: MRT4577_62790C.1
accttactttcattaaaggntgacgacaaagaaaaggggggttttgtttttacaaagagtatatttaaacagccagatgaggaggttcgagacaccaagataaagtttcttttcagtgttaagcaactaaccgaggaggacaagtttgcctggtcagaacttgtggttttctctgaagtcagaatattcgaagttcacacctttgctttctaagattttgcaatgtgttctccacaaaggaactgatggtgataagattagccatgaaaaacagggcatttgttgcagccgatgaggttgtgggcagtattga

SEQ ID NO: 143978 - DNA, 241 bp, Zea mays
  Clone ID: MRT4577_62791C.1
acgatcctgctgtcggcagtaatggcggcacagtgcgcatgagcttgcgcgttgctgggcgtttaaaggttcactcagccacgttatcaatgggtgccacattggctcgtaccaatcagtttcaatgtctcgtctactaagctcagtcaaggtgtttttcatacctgcggcacataaacttcatttgtttcgggatctgatcttggtgctagacaccgacctctaaacgctgggggctacc

SEQ ID NO: 143979 - DNA, 314 bp, Zea mays
  unsure (1)..(314): unsure at all n locations
  Clone ID: MRT4577_62792C.1
ccggaccggaattgccgggtcgacccacgcgtccgcgccttgtttttcagcgaccgcatctccatgggcgacgtgctgtggaacctcgagtacgcgctggagctgcaggacgccaacccgcccgagggcgcgcggcagggcggcgacggggacgaccaggacggcgccgcggcggcgggcggcggnttttctgatccattttttacttaccccaccgacctcgacgtggtgaacccgcgccccggcacgctgcgctggggcgtcatccagcccggcccgctgtggatcatcttcgcgcggtccatgatcatcca

SEQ ID NO: 143980 - DNA, 417 bp, Zea mays
  Clone ID: MRT4577_62793C.1
atgacattgtgtagtgtttgaacaaataaacagaaaattacccaactcataatgtcatcctcttgatgagagttagagttcctctacttactccccggatgctatgagttcgcaattatggatgtttggatgaatcaacccctttttttctcccgaagggacaccaaaactttgctgtattttttattagacaaagaatgaatcaactcttgcagatatgctcactaaaaagataatgaatgctgctgctgcttcttctttttttaaatgctgtaatgtacaagatggttatgttgacttgtcagaggctatattagctcaagtacctaagaaagatgacaaaccaaccatgctgtagttgtagtggtgtccttttcttgctgcactttgatcaatcttatccattcgtctttttac

SEQ ID NO: 143981 - DNA, 192 bp, Zea mays
  Clone ID: MRT4577_62794C.1
atggaggcgaggagccgcttgacggttgcgccctacagcacgagctttagcggtggggcatctgccactggtccgacgttgggtctagtgctggagccgctgccgtggaggtggatggaagtgaggccgtctattggtggggagggagtgggagatgaagaggcagagaaggaggggcggtggagggaggag

SEQ ID NO: 143982 - DNA, 710 bp, Zea mays
  Clone ID: MRT4577_62795C.1
tcgagtttttttttttttttttttttttttttttttttttttttttttttttttttttttttttttttttaagggactgcaaacacaatacagttacttttttacataaaaaacatcaaccgagcccaaaaaacaaacgcaggggcaactaccaccggggaaacacacctaaccgtactactattgtactactgcaaaaaggaaacgagggcccgtcgcatggctcgcctaggagctagggaacttggggacggttttggggccctcggaaacggggtgcttggcgagctccccgggaaggacgaggcggacggaggtctggatctcgcgggacgtaatggtaggctttttgttgtaccgcgccagtttggccgcctccgccgccagtttttaaaaaatgtcgttgatgaaggagttcatgatggacatggccttggacaaaatgccaatgtccgggtgcacctgtttcagcaccttgaaaatgtaaattttgtacgtctccaccgacttttttgccttttttttcccctttttttcgccaccctccttgcctggggacttgcccggggggagccgtttttcggccttgggctttttccccgccgtggccttttccgccgccggttcctcctccggaggctttttgggggggggctttttctcggccttgggcgccattggaatagggcggggggttcgggattgggctt

SEQ ID NO: 143983 - DNA, 389 bp, Zea mays
  Clone ID: MRT4577_62796C.1
gcccagaaaaggggaggaaaaattttacctcagccagagctaggggtacgccctcccattgggccgaaaacacatcccgtatccacggacgaatgcatgcttctttatcctaccccgctgaaggtacaaaagggcttcgttgccccttaaaggggggcctctgaccacccggggacggcgaacggcatggccgggatttagagggattcggcctacccggcgggggggaggaccttgtggggggggtccatttcctcgaggatgcccccggggagcttggacaggatgggcccctgggggccgaagctcatggaaggggcccacaccgggatgagcgccgaggacatttcccggaaccacggaccccccaacagagactttttccgccg

SEQ ID NO: 143984 - DNA, 340 bp, Zea mays
  Clone ID: MRT4577_62797C.1
attcggctcgagcggaaatagaagacagccctctccctcccgaaagttaactgaaggaccggggggttttttacctagagcacgctacgactaactacttctgacccgcaaggacgaccagctttggcaaactcaaacctacataagtcgacaatgcggcgctcaatgcccacacgagtattctcatagacacaaaggaagaggtatctgatgatggctatacagccggagactaaacctacgcgcctgtcttgaacgatcaaaggaggcaccaaatcaatggctgcacctgcgcaaataatggaaggcttgctacttgcgcactaactgcaccccgttt

SEQ ID NO: 143985 - DNA, 179 bp, Zea mays
  Clone ID: MRT4577_62798C.1
ctctacacttcggtctcacgctcttccgccccgaggtgcgcctagacggcctcttcggtgactacagatttcgtgcgaggacgccctggcgggcgcagggcaggagaccggcagggagggcgacaaggcacgcggcggcgaactacgcaggggcggacctcccaaccctgaagcggggg

SEQ ID NO: 143986 - DNA, 234 bp, Zea mays
  Clone ID: MRT4577_62799C.1
ccaaaaaaaaaatcaatcaatcaatattggctgggacccaaaaatggaataagaaaaagccctgcttccccagggggccaataaaaaggtagttgacgacgttgcacttctttctgaccctcccctggcccccggtgagcacgcccacggagcccattttgaccatggacccggcgaaatcgggaaaaaactcctccctgtgggcgccccggggggggcggaacacctaagccc

SEQ ID NO: 143987 - DNA, 346 bp, Zea mays
  unsure (1)..(346): unsure at all n locations
  Clone ID: MRT4577_6279C.1
tgggtgctttctgcgcccacgggttgatggggggggaggaggaaaggaacgagaagatcatccgcgggctcatgaagttgccgcccaaccgcacgtgcttcaattgcaccagtgtggggccactgtgtgtgtgtcccaatttctggaccttcatttgcctgtcatgtagtggggtcagcttgggattcactcttcttgttaagtcggtgtctttgtccaaatttactacccatgaagtgcntgcccttggtcaggggggttaccggtgagcgcgtgacgtctacctacgggattgggattggggcctaatgagggttgctctgatcaccgctccgggtcggagggg

SEQ ID NO: 143988 - DNA, 447 bp, Zea mays
  Clone ID: MRT4577_627C.1
aattccgggtcggcaccacacccttccgaagaattgcaccaggcaggattaacctgccctctgataatatggtaaacgggtccggcggttggggacaccttgacctcaacggattgcggcggcggcggcggcggccccaaaacttctgggcctgaggtggtcggcctgaccttgaaggaccccaagaaggtgatcctaagggccaggccggcccccgccttctggtggctgcccgtcggttccgggtggaccggggttaatggccttaaccgggtccgatttttggtggacatgttcgcccaaacccccaaaatgggttgttaatttataagctggccgttttttcctttccttgcccaagaactggaattaattttttttccgttgaattaccgcggccttgccgattaagggatgggggaattctaactaattaagtaatgctta

SEQ ID NO: 143989 - DNA, 200 bp, Zea mays
  Clone ID: MRT4577_62800C.1
ataagacagtgaatggcagttttgttcgaccatccaatgctgggggcgatgtttatcctgtggaatcttacgagagctcacctaaccaagaacttgatgctaactggggtgttctgtataatgacaatgcaactgaacttttgttgcataccctttccattcttgctaatgactgccctggtggattaaacatctgtaac

SEQ ID NO: 143990 - DNA, 595 bp, Zea mays
  Clone ID: MRT4577_62801C.1
ggccgcttttttttttttttttttcttttttttttttttttttttttttttttttttttttttttttttttttttttttttttttttaaaaccaaacgcaaaaccggaccccttttaaaggatcctctgggggaaggcgggtttttcacaaacgcgaaaaaactggcgcaaaccgcttcacaaggacggacaacacaatggagccaccaaaacaaaagtgggttgggcccctcccatcgccccacccccgccgacccccccatttttttttacgaaaaagaaaaagttctttcccttccccctgcgctaaagcgataaccataaaaaaccctgctccccaacgggcattatgaaacggcatagccagccaaaagaaaacctagagcccagggtggcaaacttcataacccccctcggccggagggacctgcaagccgggcccctagtcccggaggggggccggcttgggagcacccttgccggcgccgtggtgcaaccggccgaacactgggagggctgggcccattcgcccccaagtttgcccaaggggaaagcaacacccttcatattagggggtggggggagacctcccccc

SEQ ID NO: 143991 - DNA, 285 bp, Zea mays
  Clone ID: MRT4577_62802C.1
cccacgcgtccggagatctggcgcacgaactaccttgtgcagctgagaggtccacttaccggctacaaccattggcaatgcgtagagattcagagatactcatgttaggaaagatgctgatggtgctggaacatgtgaccgagatatacatcctagagctgaacctgagcaatacttgacatccgatgatgcagctgaactcgcctattctggagcgcatgaattgcatgcactatcgatgcggacagctagagaaagcgatgatcctgtgagggctaagaattc

SEQ ID NO: 143992 - DNA, 834 bp, Zea mays
  Clone ID: MRT4577_62803C.1
gaagagttttttttttttttttttttatctatattctcattattattatttattacagtgccttgtccctattttacaggatccatcttctagagcctccggacgcgtgggggagaatatagaggagataaaggaaagtcactgagatccatccgtggagggcggcggtcgcctcctcttcccctgcggccgagctcgccagtcgcctgaactcgtctcgcccgctgccgatctcctctctctgctcgtcgcgccgcaacctggagaggggaccgcgctcggtcgactaccacctggggagcgggcgggcggcgtccgccctctgcaccccccggtgtccccgcgaccggctccggcgcggccggcacacaggtccgcagggtttgaaaacttctcatatgctcatgcgttcggcgctgattgttgaaagtagctttgggactccgaggacctaaattctaatcaattgtgaaatctgaaaggtgtagctatttgtacttctggaggtgtgggaagaaatggaatgcaacaaagatgaggcccaaagggcgaagggtattgcaaagaagaagtttgaagcaggggacttgcagggtgccaggaaattcgccctcaaggctcagactctctttcctgcgcttgagggcgttgatcaaatgatcgccatctttgatatctatcttgcttcagaagggaaggttgctggggagaaggactggtactctatcctttctgttcccttgaacgcaaacgatgaaaagatcaagaaacagtacaagaagttggttcttcagttccaccctgataaaacaagtcagtgggcgctgagggtgc

SEQ ID NO: 143993 - DNA, 1518 bp, Zea mays
  Clone ID: MRT4577_62804C.1
attctcggcaacccaaccgcatcgcacgcccgacgcgcagccgaaaccctagccccgccccgccccttcctcccccgcgcaccccgccgtctccgccgtcccgttcgccgcgccatggccgattccccgcgccggaggtactcaaggccctcaaggtccccttctccttataagggacgccaaaagcaaatgtcaaggtcaagatcacctgtagctcaatcccagtctagatctccatcgcctgatcctagagctcaggcgaggtcaagatctcgaagccctgcgagggagcgggagcctgaagctgtaaatcatggaaatactctgtacattactggactttcttctagggtgactgataaagaacttagagagtacttcaataaggaaggaaaggtggtttcttgtcatgttgttcttgaaccccacacacgtgtttctcgtggatttgctttcatcaccatggacactgttgaagatgctgaacgctgcatcaagtatctcaaccagtcagaactgcaaggccggaacatcacagttgaaaagaagacattgtgcaagctatgtgccagcaatcaagatgctgagttcatcaatttcaactttagctcatacatcttgatcagtggacagcccaaagggttaccatgcaccacgagattcacaacaacttaacatagcaaattttcaactaaacctgagcattcaccttcaacttccacatcaactaatcaacgggcattgccgactcgttagtcaagcatgtgtggtgccatgtgcggtagcaactttggatgcctgctagttgaagtttgggctcttcgttacttatttccttcattggtgtccgttattgcagggcgtgtattcattgatttcacgccgtggtcgcccaaggacaccaactcctggaagctatcttggccatcggtatgagcgcagggagcgtgggaggttccatagaggctatggtggtgggcgtgatgagtattacggcaatggcggcggcgggtatggctaccgcaggtctccgcctcccatgtactcttcatacagggagagtcgggattattatccctcctacaaggacagccgggactaccctccctacagggacggcagggactactctcctccccacagggaccctcgggactactacgaaagcaggggtggccggggctactcgccgcctccttatggtggtggtaggtcaaggagggaccgatcggtttcaccgtatcggatgccagaaaggggctacggtggaggccgccgggtgggtggcggcggatatgacaggtaatgtagaggttttctctccgccggtggctgctgctgcgatggctgcgtatggctctcgcagctctggtgatatggttagactgctgcctgtagctgtgtacttggtgtactgtcttcccgcgtatgtggatttggtgaaaacttctgtatgagcaccttttatttgtagcctgcaatgattccttcttaagacagactggggactttggctcc

SEQ ID NO: 143994 - DNA, 841 bp, Zea mays
  Clone ID: MRT4577_62805C.1
gaccctcgggctcgccgggggatggcacgcactagtaaagcagacccagagcatcactcgctacaccaagaaactgaggaaatgagacaaaacacattttacccaagaccagttgcaccaacagctgcacagattcattgtttgcaatttcttatatgtgaacttgtatctggtggtaatctgagaaaagttggaggactatttgggaatagtggctctggcatacctgtggaagatcttaaacaactagagacatttttctacaagcttagttttttcttgcatattttggattatacagcgactattggtactctaactgatcttggatttctttggttcagagaattttaccttgaatcttctcgtgtcattcagtttccaattgaatgctcgctcccgtggatgctggtgggccatgtcattgaatcagaagatgctggtcttctcgaaagcattttgattccatttgacctgtacaatgactctgctcaacatgcactaacttctctcaagcagagatttctttatgatgaaattgaagctgaggccgatctttgcttcgatcttcttgctcagaagcttaatgagatcatctttacatattataagagctgtgcagcaagtactcttcttgatagttcatttacatatgcatgcgatgatggtgacaagtattttgtcaaacctttgcgattcgacgcgattttcaagttaaggagagtaatggttttagggaggacaattgatctaagaagcataattactcagagaatgaacaaaatattcagggaaaatattgactttctacttgagcgctttgaaaatggagatctttgtg

SEQ ID NO: 143995 - DNA, 275 bp, Zea mays
  Clone ID: MRT4577_62806C.1
tcgctgagctccaggttttcacacctgacgtttatttatcatacataaggcgcccgcggtgcccatggattcgtgtcaccgcgtgccgagagcgcatatcattccgagcgacgcataaacccttatgcaggcacccgaccctttcatgggaaccaccaccaaccaggcaaggctcctcctctcgaagcaggtaacagaacttgcgaagcaccccgtggatggggtctctgatgcgctggtcctctacagcaatgtcttcgagtggcaggtcacca

SEQ ID NO: 143996 - DNA, 651 bp, Zea mays
  Clone ID: MRT4577_62807C.1
gcatcgcacgcccgacgcgcagccgaaaccctagccccgccccgcccctttctcccccgcgcaccccgccgtctccgccgtcccgttcgccgcgccatggccgattccccgcgccggaggtacacaaggccctcaaggtccccttctccttataagggacgccaaaagcaaatgtcaaggtcaagatcacctgtagctcaatcccagtctagatctccatcgcctgatcctagagctcaggcgaggtcaagatctcgaagccctgcgagggagcgggagcctgaagctgtaaatcatggaaatactctgtacattactggactttcttctagggtgactgataaagaacttagagagtacttcaataaggaaggaaaggtggtttcttgtcatgttgttcttgaaccccacacacgtgtttctcgtggatttgctttcatcaccatggacactgttgaagatgctgaacgctgcatcaagtatctcaaccagtcagaactgcaaggccggaacatcacagttgaaaagtcacgcagaggccgcccaaggacgcctactcctggcagctatctgggccatcgctatgagcgcagagagatgcagcgtggaggtagattccgcagaggaggctacggtcgtgacgactactat

SEQ ID NO: 143997 - DNA, 1294 bp, Zea mays
  Clone ID: MRT4577_62808C.1
ccccgccggccggccccggagagtccagtgctgtgctgtgcacgccaaccacaactgaaagggagagccgaagagggaagggggagaagcgaccgcgccgccaaaccctagccccgcgcaagcgaccgtgggggagctccactccgccgcgccgccccccgtccccgtttcgcgacatggccgattccccgcgcaggaggtactcaaggtccccttcatacagcagggggcacccaaaagggaggtcaagatcacaatctccagctcggtctcagtctaggtcacctgtccctgatcctagatctcaggcgaggtcaagatctagaagccaagagagggaggaggatgctgttaaccgtgggaatactctgtatgtgactgggctctcttcgagggttactgaaagggatgttaaggattatttttctaagcatggaagggtggttggttgccatgttgttcttgaaccccatacacgtgtttcccgtggatttgcctttgtcagcatggacactgttgaagaagcggagcgttgcataaagtatcttaatggttctgtaatggaaggtcgaaacatcacagttgaaaagtcacgccgtggtcgcccaaggacaccaactcctggaagctatcttggccatcggtatgagcgtagggagcgtgggaggttccatagaggctatggtggtgggcgtgatgagtattacggcaatggcggcggcgggtatggctaccgcaggtctccgcctcccatgtactcttcctacagggagagtcgggattattatccctcctacaaggacagccgggactaccctccctacagggacggcagggactactctcctccccacagggaccctcgggactactacgaaagcaggggtggccggggctactcgccgcctccttatggtggtggtaggtcaaggagggaccgatcggtttcaccgtatcggatgccagaaaggggctacggtggaggccgccgggtgggtggcggcggatatgacaggtaatgtagaggttttctctccgccggtggctgctgctgcgatggctgcgtatggctctcgcagctctggtgatatggttagactgctgcctgtagctgtgtacttggtgtactgtcttcccgcgtatgtggatttggtgaaaacttctgtatgagcaccttttatttgtagcctgcaatgattccttcttaagacagactggggactttggctccattgtgtgggatcgccgccaccgatcaaaaaaaaaaaaaaaaaaaaaaaaaaaaaaaaaatag

SEQ ID NO: 143998 - DNA, 223 bp, Zea mays
  Clone ID: MRT4577_62809C.1
gggctggtggcggccggccgcgacgacgaggctgggcggcctcggggtaggggcggggctcgcgcgggttccggcggagagccggagaggcgacgaggagaccgaagggtccatggtgcccactgcgtacgggggaagcggagaccggaagccgggcggcgggattcgcggggaagcggcgaaagaagacgagcgagcgagaacgcaacggggagtcggggag

SEQ ID NO: 143999 - DNA, 717 bp, Zea mays
  Clone ID: MRT4577_6280C.1
ctcgaggccggccgggccgggacctgggcctcgacctcccctgtgactggaccgtcgagatcccctcctacgcgctctccgtctccggcgtcgacaccgccagcagcggcggcaactcgccggcctccggcagctggcgcatctccagccccggtaatcgtcgactaaaccgtgacaccccggcccaatcattgacgttaattactctgcctatagctagcaggtttcttttctgttgcccatctgttttgtcaacgagtgctccggccgatcggcttgtccgtacgcacgcgagttgcgtcggtccggccgagccgatgaggtcgctcctcgctcggcccgcgtcaccaaccaggtcaattcgtcgccgcgcgcacgtccatttggcatcaagccgacggggacgggggggcatttgcacgcacagcacctcgcacggcgcggaatcgcatccgacggccgcctcccctctctgtctttgccctgccttgccaggcagtgcactggagcgaaccaagtttaaagagcacgcgcgccaggtgctatggtcatgcagcaaaaagcacgcactgtgcatgggaatgtgattcaccagcggctgtgggtgtggaatggaattggactcgtggcgatcaaccaaggctgcgccaacgctgcttcccttgccccgcggagacgcgccttcgatgctatctgctgcactgttctcacactgct

SEQ ID NO: 144000 - DNA, 314 bp, Zea mays
  Clone ID: MRT4577_62810C.1
acgcaaaggcctttcatttttcttccccaactgtgcaggctgctacagggcctccggggacgccggacgcgcccggatccagatccaggggcgtaacatggcatcaaaacgtatactcaaggaattaaaggacctgcaaaaggaccctccaacgttatgcagggctggaatgagctggatatattaacggacttatgaatgatgccgcatggcttgaatctgagtatcgatgcattttgcgacatagctggatactaattaaactgtactgatacagggtagacccccacggcacaaaatactaatggggctat

SEQ ID NO: 144001 - DNA, 288 bp, Zea mays
  Clone ID: MRT4577_62811C.1
gaaaatccctggaggtgagatatatattctaatattatttgtgcacggaatggttcagcagaatcagtagctttttgcattatttcggttacccaaggaagtttgcaattgaacgaaacgactccccttctggtctcataaacatttactgttttattcacaactgggcaccatgcttttcctgagttgaaatgcctgaacttctgaagttaggagttaggatgcatacaaaagttgagaaacatttgtgattaagaccatcagttttcatggaagttctgtgatctt

SEQ ID NO: 144002 - DNA, 1972 bp, Zea mays
  Clone ID: MRT4577_62812C.1
ctcgaggccggccgggagacaaacagtcgagctcgggaccctgagaaacaaccagggagggcactagggcagggacaggacgaccagacaggctccgcgtttcccggcccgcgaacgcgagcgcgagttcatcgccttcccggttcccgccgcgccgcgggctttcccgccttccccgagccctcctcccccgcacacccacgaccagtgtgtgggtgggtcatgggtgtgtgtggagactagtgggagtgggaggcgttataatcggtcggcgcaaggacgtgggggagaaggggggctaatccggccgtgcacgcaaccggaccgggcgcggtagccagtgcgtaggcgccgttccgccgctgccgcctcgcccggcgttcctcgccgccagcacagggcgtggccggagtccgcgcgccaccatggcaaggtcatggctgataacttgtaggggaattgctaagaaaataaggtacacaaatcctggcgctaatcaccatataagtgaactggttgcagaagcacggagggaatgcccaaactgcagttatattattgataacagcgatgttgccatgcagtggcctgggttgcctgctggagtcaagtttgatccttctgaattggagttgcttgaacatttagaacagaaagttggcctgggagattcaagaccacatgtgctcattgatgaatttattccaactatagacaatgatgagggaatctgctattcacatcctgaaaatcttcctggtatgaaaacagatggtagcaatgctcatttctttcatagagtttcaaaagcgtatggttgtggtcagcgcaaacgtcgaaggaccatcaactgcagtgatcacactgtttctgatgagcatgtgagatggcacaagacagggagatccaaagccatatatgaaaatggtgttataaaaggttggaagaaaataatggtgctgtacaaaatttcgcaaagaggcagaaagcctgatagagctaaatgggtaatgcatcagtatcaccttggaaaagaggaagatgaaaaggacggggaacttgtagtatctaaaatcttcttccagttggcaaataagagtatggaaatttctgaaacagaaactgcttgtgaagaacctgatgcacctgcttcagtgattggtccgaaaactccaaagacaatcacaccacagccacgccatcctaaaagtagtccatgtgaaactgagcagaatattttcattgtgcaggaccagctactactggacggtgaagacgagcctaccatgcctatcgttagtctggcggatgatgcaatgaaccctgcatggtgtgctgtagctgaagaagagcaggttgttggagaggcatctcgggctcagtcaaactcagatgaacctcttctctgtcgcgaagacccaaattccttaaacgacgaagcattgcttccctgggactatccgattctgtcgcaatgcaggagtgagatttttgatcggaacctgaatggatacgggttgcctgatctccataatgtggatctcggcacgcctccagatcttcagcttgctgatttccagtttggctctcaggaaagcctcggcagctggctggatcgcatctaggaagatactaaagtacgtatttggtagagcagctcagcaacctgatcgatgggcatcttttttgcacatgatatggtaaccggtggcagctatttttgggcttgcaacacaaagattgcattcttgcattagtgttgtattagtgttgcgctgtcaaactttatctggaaaccaaagaacctttcgctcttttctattttctttagaacctttaacagctggctatcagaacactagccttgaaatatagctgtaagttttgtggcatggttggtgcaaacctacattgccccgctgtaggtaagatcggtgccttgagatctttgactttatgagttcagagtgtt

SEQ ID NO: 144003 - DNA, 444 bp, Zea mays
  Clone ID: MRT4577_62813C.1
tatggcctagatcacctgcgggctcgcccgagtggacgtaagaagggtcgagggctttggacaccagaacgccatgcgaggctctcattacatcatgtgggacacgttggatcgcgccacatttgacatcccgaggcatcccaggagcacggcaccactccacactggggcggagcgtgttcactcacaccggaggaagaactatgcgctcaataaaagctttcacgagcctgacactgggaaccgagataagtaggtagagaggaggtactttatcatgacctggatacagggtagtctacaaagcatgctgttcaacatagatgcatatgctgaacagctcactgctatgaacatggagataaacgcacatagtgccttgaacaatgcatactttgatgtttacccggaggaactggcatggaagaaatttaccttcaaatg

SEQ ID NO: 144004 - DNA, 572 bp, Zea mays
  Clone ID: MRT4577_62814C.1
ccggccgggattccattgccgtcctccccgtggtctcccgctgccggagcgccgccgtcgtaggaacagaaatcctctcacagcacgttctcctccgtgtagccagagcaccatgccgagtcgagtacccgatctgtcccagcgaaggaagaggacacggctactcatcaccgaccgtgaacgacttgtgaccgctaaaaaccctggaccttgctgacaaaatcatgaaatatcggggtaatcttcgagcacgttatcaggctagatacttttccaacacgatttccgacgaaggatatgagtctgaataagttgcattaaaatcatataccgtgcggataatcagacgatcgtatactctgtggtttgcagatccagcaacatcttgccgacataatacatctagtgagaaggccatctctccaccgatgactacgtgttgccgtggcatatgactaagcgcctgattaatacccgactcctggcatgtgtgctactatccatcatgaccacccgacagctatcaaccataggtcgcgtcaccaacctgtatctgtaatccttaaaatcat

SEQ ID NO: 144005 - DNA, 178 bp, Zea mays
  unsure (1)..(178): unsure at all n locations
  Clone ID: MRT4577_62815C.1
aaaaaaaacacaacccggngnggcagcagcggaatttgagggagnaccgcaggggggagggcacgcacaangcacccacncgcccgggggcgccaagggcacgcacgggggcagcaacccggcgagggacacaggggcccngaaaaagaacggcaagggcaaggaaggaccgggaaca

SEQ ID NO: 144006 - DNA, 306 bp, Zea mays
  Clone ID: MRT4577_62816C.1
acgtgttattcgtgttagtggaatgatggatggtctcactaggtataatatttattagatagcctgagtcgttgttatttttgtggaattcgtggcgggttaataatagtactctggtttactactaaaaaaaaaaaaaaaaaaaaaaaaaaaaaaaaaaaaaaaaaaaaaaaaaaaaaaaaaaaaaaaaaaaaaaaaaaaaaaaaaaaaaaaaaaaaaaaaaaaaaaaaaaaaaaaaggggggccccccaaaaggttcaaaccttaattacccgtcaaagaaaaatcaaaccccttcaaaactgc

SEQ ID NO: 144007 - DNA, 414 bp, Zea mays
  Clone ID: MRT4577_62817C.1
gttgatctacgcgtccgcaagcccagaaggggccatcaaaggaggcgacggcccaagctggtattccataaagatatcttgtctggtcataggtcactgtccgggcctgaagatatagaggaagtgcacttgttcgacgggttagtccacgcttctggtggatcctgggagtggagtttatctacgccacgacgctttggagggcggactcgaggtaagaaacctcggacaactgtagtaactcgagttgtacaagacgaaggctaagttagtccaccggggaaacctgttggtactggcgacctcgaagccgacgataggcgattgggtggatggggcataacaacatggcggtgttaaagagcgagattgtccgtacgtaacaacttggctgctgcactttgagaaagggta

SEQ ID NO: 144008 - DNA, 1593 bp, Zea mays
  Clone ID: MRT4577_62818C.1
gccggcagagtagacgaattcggagaagcagaagctagcagctagtagacgagcgacgagtagctagctagctagctatctagagagctcatcatatcgctgctcgctctcatccaccattatagagaagagcagatcgagctgcagctggcagaggccgagttgttgctagctagctcctgcttgctaaatttgcatcgtatccgatccattccatgaagaagtcgtcgatgatggcgcccatgacgatcatggcgagagttgccgctgtgctcgtcctctcgtcggctgccatggcttccgccgcaggagcagctgggctggacatgaatttctacggcagcacgtgcccgcgcgtggaggccatcgtcaaggaggagatggtggcgatcctcaaggcggcgccgacgctggccggcccgctgctccgcctccatttccacgactgcttcgtcaggggctgcgacgcctccgtgctcctggactcgactcccaccagcacggcggagaaggacgccaccccgaacctcaccctccggggcttcggctccgtgcagcgcgtcaaggaccggctggaggaggcgtgcccgggcaccgtctcctgcgccgacgtcctggcgctcatggcgcgcgacgccgtcgtgctggccaacggcccctcctggcccgtcgcgctgggccgccgcgacggccgcgtctccctcgccaacgagaccaaccagctgccccccgcccaccgccaacttcacccgcctcgtcagcatgttcgccgccaagggcctctccgtcagggacctcgtcgtgctctccggcggccacaccctcggcaccgcgcactgcaacctcttcagcgaccgcctctacaacttcaccggcgccaacagcctcgccgacgtcgacccggcgctcgacgccgcctacctcgcccgcctcaggtccaggtgccggagcctcgccgacaacaccacgctcaacgagatggaccccggcagcttcctcagcttcgactccagctactacagcctggtggccaggcgccgggggctcttccactccgacgccgcgctgctcaccgacccggccaccagggcgtacgtccagcgccaggccacggggctcttcaccgccgagttcttccgcgacttcgccgactccatggtcaagatgtccaccatcgacgtgctcaccggccagcagcagggcgagatcagaaagaaatgcaacctcgtcaactgacaaataatacgtacattaattgctgctggttttgacgatgcctttcacttacgttcatccacttaattcatgcatccatgttggttgggttcattcaattattatattcgttgcttacctttacttttgcttggttaatcttaattaaatcgtgtgagttttcttttcttttcttgagtatatatatgtatgtacgtagagcgtgatgagtgccttttcaagtttattgtttttttttactttttcctctcgtgcatatggttcaaatccattatgatgatgatgtaatgcatataattaataatgacaatcaagtcaataaacacacatgcaatttatatatgatatgttcatcat

SEQ ID NO: 144009 - DNA, 296 bp, Zea mays
  unsure (1)..(296): unsure at all n locations
  Clone ID: MRT4577_62819C.1
ttagtataggcaccaaatcaaatctgcaacaggaattatttaactccaattaccatgattctggngctgggggttcttgctttcattgctttagtatcaagtgtttcttgtacacagacaggcgggtgcagctgtggtcaacagcaaagtcatgtgcatgtcacattatccacaacaacattattcacataaacttcaacatcaaccaccaccacatgcatcacccgctgaagcgtcaccaacagcaacatgttcacatgcttccacattaacatcagcaacgacaagaagttcat

SEQ ID NO: 144010 - DNA, 464 bp, Zea mays
  Clone ID: MRT4577_6281C.1
cgcgcgtgcgcgcgctcggatgctcgagagcggtcgagcggtcgtccttttttttttttttcaacctgagggggaaaaaggcgcacggctaccattgtggcatattcacaatgctcgcagacccagcattggttacaacgaacaccaacatgcggtgtatttcagccgcgatatgctcaccaaggctatagggtctcctagcctgtgctgcacggtcatattcccaacctaaaacacgtgtgaaggatcgagagcccttaacagcgcaaaagcaatggggcggggacatgggattgcgcgtgcccgcggttctacagattgcaaaagccgatgatcgctagcatctactttgccttacttttaactggttggctgcgggcacgcgctgtccggcaccgccccacaaatttgcgaaccttttcgatctgcacaacggggcacgatcccaaacacttgagcgagga

SEQ ID NO: 144011 - DNA, 305 bp, Zea mays
  unsure (1)..(305): unsure at all n locations
  Clone ID: MRT4577_62820C.1
tccacacccgggaacgggcaacacaacaaaagaagcaaccaaaaaaanaagccacacctccaccaagaccacaaatnggagaaccggcagcgcaccaaaaggcccacacccaacaacagcggaaccaccagcagacaacgcacccagacacgcccaggccaagaacaaacccgcaggcaacgaacagagcgagccggcacccaaaaccaaaacacaaccaagaccaagccgaccgcaacgcccaaaaaggaagagagccacacataaggaaaacaaggaaacaaaaaaccacccaaacggcaaac

SEQ ID NO: 144012 - DNA, 672 bp, Zea mays
  Clone ID: MRT4577_62821C.1
ctttgcacaccggctgctgctcttcttggtgcactcgtcgccgcctctactcaagcggcgctcggcgcacacgctcagccatggcgtcgggatcctgcaccctgtccacgtcaagctccctctacgtcacgtcctctgtgcctcgcgctgtcctttggtgtgtattcctcagccccatggccacacccctgctcctctgccgggcaccaccagccgagcccctccacctagcgctcgacctacgacgctgtttccccgtcgttcgagctccaccacgccgatgcgtccgccctgctcctccatgctaaggtctgctcggagcagcagcggcaacaatgtttcttccattttctcgcgccgagcttcctccccatcgcactctgtcgtgactccctggtgcataccaccgcggttggcctctccctcgccgtctgcgcttcggcagacctcgctggtccatgattcctccgcgcgggctgtcgtgtgctagccgtcgcggcgtccttagtttgttccggcaccgtcgtctttagccccagctcgaccaggccgcgccgttcctcccttgttcgtgtcggcagctaccgtctcggaccgtcgtcgatccggccgtccctagtatttttctcaacaccgagtctctctgacctcgctgctgcaatttttgtgtga

SEQ ID NO: 144013 - DNA, 287 bp, Zea mays
  unsure (1)..(287): unsure at all n locations
  Clone ID: MRT4577_62822C.1
gacgcacagnacccaccngaaggggggttaattaaaagaagacgcgtgcaaacaacgcaaaggagggcaacagcacaagccacacacacangcacncgcaaggagccacacgaccgagcacaggaaaaaaaacgggnggcncagnaaacaanaaccaaaacccacaggagaaaggcacgaacaaagggggaaaccgcaaaaaaacgacccacagcgcaaaccaacaaaacaaggggcccgccaccaagggagaccccgaccccaggggagcccgaaacacggaggga

SEQ ID NO: 144014 - DNA, 238 bp, Zea mays
  Clone ID: MRT4577_62823C.1
acttctacttactagcccacgccatcaaccaccacatattcaacaatgccttcatcatcaaccataacatctctttacttcaacattcaatcacctccactctatgacatccaatcaataccgcaatcattttctttaccttttcctactagatctacttactcaattatcactctactactatccacatgactattctatcacatcaaacccttatctaccgacccacatcaatata

SEQ ID NO: 144015 - DNA, 361 bp, Zea mays
  Clone ID: MRT4577_62824C.1
cagtgcttgatgcattgcatgcctccattggattgtgccaaaggaattcacagcgcttggacccagaggaatctcagtccctttggttccaactccttgactccttctcagagccattaaaaaaactgtatgggatcaaggatgtaaatggaaaaggtgtcaagtccaattggagtgaagcatcaatggaacatctgaaggaaaaaggactatctcaacaaatgaggatttcaactaaacaaaagtgcctaaatgttctgcgaaaagtattttcacaatgtgttggagaaataatagaggccatggctgggtatattcccctaccggcaatcatggcaaaactgttatctgataatgggaa

SEQ ID NO: 144016 - DNA, 1227 bp, Zea mays
  Clone ID: MRT4577_62825C.1
agccaaatcagtagaaatgaactcattggaaagtcaaatcctccgtcctctcagtgaccccatgcaaaattgtagtaaactgcccaaaggtgtgctgaaaataaggactggttgtgcttctgttgccgatggcagtgaagggacgcgtcatagacctggaccggttctagcagatcaaccaggagcacagagctccagaatttgcactccacctcttgtttttagacatggtgttcatggcttttctgagaatccatcttctcacaccaacagaatcaacagcacgtctgacagctacaccgtactcccttacaacgggagggtacactagaaccgtacgcaccaatgggcaaaatcccacctcgagtccaaatgacagttccacaggagcacagtgcggtttacccttccatgacaggcttctaccaaccagcagctaaccatagcttagcatattccagtgaagcatacggcaccagagaacgtgcccacatggaagaccttctgaagaacttcggctgcggtcaaaacatcgtagcccatcagatttctcctgatccatatgcgagagccatggatggccttcaaacaaacggatactccagttcgaaaaacgctgagagtatctcagacatgctgagccttggtacaaggacatacccgcttcatagcagtgcctcggagctgctggaaaccgtgtgcaaccaccgtgaaggcgcaccatctgccaatgctgttgctgaagctgaagagtctcgtcagttcacttacacctacgcgaggaggaagccgcacaagagatcgactatggcggagcgtacagtgccaccaagtgcggtagacggcatggccatcatgaaagcgaaggcaatcagactctgaactggatcttgtcagctgcaaacattgagaactgaacatagttggggctggggacagaatttagcatccacctaacatagtaaataagcatgaaccgttttaccttctatagaccagaccctcccagcagaatatatgcctgttgtcattgtcaaacgggataagtaacttagcttacactgaaatgctgaagtatgtaaatcagctatatctttctcctgttttcaggagcaattttgccccgctattatagatgtccaagagtgccgttcgaaaaaaaaaaaaaaaaaaaaaaaaaaaaaaaaaaaaaaaaaaaaagaaaaaaaaaaaaaaaaaaggccccta

SEQ ID NO: 144017 - DNA, 220 bp, Zea mays
  Clone ID: MRT4577_62826C.1
gttgggttaataaaactaattagatgggttacaacaaggaagtacacatggaacataggggaatgactttctggcacaaattcatattttacacattattcactaaagccaaacttcgggtttagtaaggactacatacaaaattagcgatctatcaaaatcaaatcgaaatttaattaataggcacggcgcttgacacatgttgatatcctgggaaaac

SEQ ID NO: 144018 - DNA, 604 bp, Zea mays
  Clone ID: MRT4577_62827C.1
aaaacggggggccccggctccagtttttttacctaagggttaacccctttttctaatcgggggcctttaaaggaggatcccaaacaatggttttttttttggaaaggattttggacccccccaaaaaccccccaacaaaaacaaaggacctttccccccccgggaccggggattttttttaaaggaaaaaaaacaaacccccctaaggcccaaaccgggggtaaaaaaaaaaatcccgggcccgggttttcaacaactttggtttggatttcggtttttaaaaccccaaggggccccccaacccaactggtgggtggccagggccaggggcccctttaatttttgaaaacttccaatgggtggcacccccgtttaaaacaaacccttttgtggcccccccttaaaaggcaaatccctggttttttgcaaaccccaaagggaaaacccccaaaccattttggaggagttggaaaatctgacctatttaataaaacccagggtttgccgaggggcctttacggactttaaggccttttgaaaaagtttttttccaactttttgggggcgctaaaccagttggttcatcccctcctttaaggggggg

SEQ ID NO: 144019 - DNA, 514 bp, Zea mays
  Clone ID: MRT4577_62828C.1
ttgtgtttttttaaaaaaaaaatttttttttttttttttttttttttttttttttttttttttaaactaaaatacctctcatatttccctattattatataatgatccctcccttttttacatccactttccccttaccaacttgggggcgggggaaaacccctttacaaacctagggtgaccaaataggtgtaaggcatttacatttccctatctcaaaaaaaatcttacatctaaaaacaaacccaaaaaaaactgctcccttcattctctctcactaaactaacttttacccctaaacatcccaaacttctcctcaacacttggtgggggtggtgctcatcttcttccttttgcccaaaaaaaaaaaaacccttgcaatcttcacctttttcaccaaaaacccccatttttccccattatcccccgcctttgcaacccccttattcttctcctgctgcttaaacctcattcaaaaccgggtttttcaactgtccttgccgtcccaaaaccc

SEQ ID NO: 144020 - DNA, 468 bp, Zea mays
  Clone ID: MRT4577_62829C.1
aaaaacctctttttttggtttttttttttttttttttttttttttttttttttttgcccttttaacgcacagttgccgattactattactgggtgcagtggtccatttaataccccggggcaagacaacagttcttttttttttttggcaactgtgttggttgtggggggggctcagcctgtcccccataaatagggttttctgaggcgggggcgacgtgcaaatcattttagaactgaccagatgccgaggccggaattctcgaggggggctacacaagggtgcaccgggcactgcaatgcccaacaacaaggttgtcggcagcagaacatgggaaaagaaaggggcggggggcaaggcaggcgtttcccatgacgagtttccggggtttacaatgtttgctggtgcccaaccgcggggaacccgccctagatctttggggagcttgtgtagcttgaccaccgggtt

SEQ ID NO: 144021 - DNA, 711 bp, Zea mays
  Clone ID: MRT4577_6282C.1
ggccgctttttttttttttttttgttttttttttttttttttttttaagcagactataaccaaaagttcaattatttactggtatagcttattagttctacatcaaccataagattgtggaggtgcacaaggctatatctctaggtttataattgacgccaagcttgcaaaatggcactcaaaattactaaacaagatatgaacccacaaaagcaaaatatcatcttggaatttcagatgaccgtatgaactctttctccaaactgtatagtctagttccttcattgcctttgttttggttctgtgtctggtctttaagagcaccttgacttgtccttgaaactcgacagctcgaatggacatttggacctagcacatcttcaagtgttatctcaacttgcctcattgtaggcctttcttcacctttcaagcttaagcatacttccgcaagccttgcaacagcctcggcatctttagcccttccctcttcaacaatttgtggatctagaatatccaacaaactacagtcttttatcacagacacgaagtgtgatgctaggcttttgccctctgatgaatgagtagagaataccggtttaatccttgttagtagctctgctaagattacaccaaagctataaacatcactcttctcggtgagtcgactagtgtaataatattcaggatcaaggtaaccatgggttccttgga

SEQ ID NO: 144022 - DNA, 380 bp, Zea mays
  unsure (1)..(380): unsure at all n locations
  Clone ID: MRT4577_62830C.1
cgaggaggggcgaagagccggngcnggaacaggggggcgagaagggggagcngnccagcnggccgcagcccaggaaccaccgggagngngccaacannaagaagacagagaagacaccccagagcggcaggagggggcggggcggagcngccgggnacacacangaggaagccngngngacgccacggcccgaagngagcaaccagggagaggnggcggggggagcggnggagacaaggccagagagggcgaccnnggcnccccccaggancacaaggggcaggacngcaggacgggacgccnagaagngggacgaggacaagaagcnnggggagaagagggnggccgacnacaagcgccccanaccagcggcggagaac

SEQ ID NO: 144023 - DNA, 249 bp, Zea mays
  Clone ID: MRT4577_62831C.1
gctgtacagtcccgcccgcctgcgcactctccacccccgcgccgccttcggcgccggcgagccctcccgacgctcctcgagcgatccgtccctctcgcggcccttctctctgccgcttccagcccaaggggaggagagggagaggatgaatccacacatacaacaacaccgtctcggccgtaaggggcgcgtcttttcctcacccacagtgtctctgtctctctactacactacacgaaaaaacatctt

SEQ ID NO: 144024 - DNA, 322 bp, Zea mays
  Clone ID: MRT4577_62832C.1
cccaaatgtggtggctgtaaagcactgtttcttctcccaggctcacaccgagccgcacaaccacgacgccgtgcttcgctaccaaccagacactgctaatcgtgcgctacagcaatacactaagaggaatcagcccaagatttttatatatgcacaaagttatatgtgtcagacttctcgacaagcggcatacattcgtagcccaatccgactgcgccaacggcacattaagcctcaagactacgaggttatgctcatgcccactacttacactccaaggactttgccagcgcttacgtagcggatcaaggcgaaccagaca

SEQ ID NO: 144025 - DNA, 396 bp, Zea mays
  Clone ID: MRT4577_62833C.1
aacaataccagggggggggatgtaccgaatgatttatacacacgagccgagtgccttaatagcccccacccaggtacaaacacgacacgggtaaactatgggcgttcgggggtatgtaaacaacccgcgcacaatggaaatagagactacttcacccgcgcacggaggggggagctgcatttggactattttatgcgcgccggcccggtcgcgctggttggtatatttaataaggagcggcggccgcaagaaagcacccttgcggggcgcgagaaaatccccgtttttttcccccgagcacgggtccaagatcggatccgtggtcccctggggggcctcaacattcgcggcgagggtgcccaatggggaggaaaagacaatgattatttggtccct

SEQ ID NO: 144026 - DNA, 1029 bp, Zea mays
  Clone ID: MRT4577_62834C.1
aaacacaatcaactacacgaaggaatgatgatagctgtgctggacagctggagcaccaactctcatcaaaccgactccgcacacgttgacgaatcggggtctccctttcgtgcttagtgcaagcgaattcaatcctcagattctacgcaaaaaaagcttaatcggagagccacggagatcagatcatcagctccgcagacgcgcaaatggcatcgccaacgaatagagcgcttgaacggtacaagagcgccatcacggccgccacgtccgtggtgggcgcggccatgctgctgcgtcggctcgtcgctggcgtcctcccagccggcacgccgccgctggtgggcgcgctgctcctcctgccgccgccctccgcccggcgccacgccgtggtgatcgaggagttcgacggcgccttctacaaccgggtcttcctagcggtcagggcgtacgtctccacgctcctcgccgcggcgccgaccggcgcgccacccgtggtcaaggccagcctgccgcgcggcgccggcgccggcgcggagcagatcaggctcgccatgggccccggcacggccgtcgtggacgtgttccgcggcgccgagctcacgtggcgcctgaggagtcacggtcacggcggcggcgcgggcgaggcgttcaggctcagcttcgacgggcagcacagggacctggcgctcggcgcctacctgccgttcgtcatggcccgcttcgaggccatggcgcgggaccggaggcaggccaagctctacagcaacgagtgggggaagtggcggtccgtcaggctccgcaacgcctccacgttcgcgacgctggccatggacgcggcgctgcggcaggacgtgctggacgacctgggcaggttcctgggccagaaggagtactacgagcgcacggggtgggcgtggaagagaggctacctcatccacgggccgccggggaccggcaagtccagtctcgtggccgccatgtccaaccacctccacttcgacgtgtatgacctcgacctcggcgccgtcc

SEQ ID NO: 144027 - DNA, 649 bp, Zea mays
  Clone ID: MRT4577_62835C.1
agacgaacccagaatatcatcatccgttagccgtcgccaccaccaccagtccagcaccatggcagcgcccccctcctccgtgtccgtcagggccggcgcgtccgtctcggcgaagctgacccctcgccaggccgcgagggctgggttcggtggcagggtcagcgtcagctcgggcaggaagtgcggcggccccgtgcgggcgtcgctcttctcgcccgagcccgctgtggccatggacgcgaggccgaccaaggtgcaggagctgcacgtctacgagctcaacgagcgcgaccgcgagagccccgcgtacctccggctgagcgccaagcagagccagaacgcgctcggcgacctcgtccccttcaccaacaaggtgtacaacgggagcctggacaagcggatcgggatcacggcggggatctgcatcctgatccagcacgtgccggagcgcaacggcgaccgctacgaggccatctacagcatctacttcggcgactacggccacatcgccgtgcaggggccctacctcacctacgaggagtcctacctcgccgtcaccggcggctccggcgtcttcgagggcgcctacggccaggtcaagctcaaccagatcgtcttccccttcaagatcttctacaccttctacctc

SEQ ID NO: 144028 - DNA, 793 bp, Zea mays
  Clone ID: MRT4577_62836C.1
ttcgactacacgcgattattgcatcttaaaacagccggcccggccgggtcctctcttcagtctctccccttcgcggctcccaccgcgtgccgccgccctacgccaggtgcccctacgtacgtcgtcatcgtgcccgtggccgccggcgacgaacgcccagcagggggaggaggatgggcgagttcgacgactactgggcgcgggcgtacaggggcgaccccgcggtcccgcactccgacccgcagcggctcatctccacctggaccggcgcctttgccctcggcgcggccgcctgcgtccaccaccacgcctccgcgctcgcatcccacctcaagtccctaccggcgacttggcaagacatgacattggcccttgatcaaaagcgatggaagaaagcttttgagaaaaaacggcagcaaccttaagctcattgttctttccaacttcttgggccagttggatgagcactgtgtctggtcatcaattgtggcgcatgaagcttcaaagttctctctatatacacatgatgtattgactgaggttctacttttggttttcttgtttagcgttacaactttctcagtttgtgtatttgctccatctcagatcatcagatgacattcagaatgatttgtctattcttaaaatctctattatctttttaacatgctgctccctcattggctctgttcgaaaaaaaaaaaaaaaaaaggcccctaaacaccctataattctctgttccaaagttcctgcttttatatatattaaaaaaaacaaaaaacccgccccccca

SEQ ID NO: 144029 - DNA, 853 bp, Zea mays
  Clone ID: MRT4577_62837C.1
ggacggacgctttctatcgcaatcctatctatatatttatcccaaggcttcgtggtttttgttgttgttgctgctgctaggtgctagctcacgagtcacggccgccttccactcccacaagcttcaactagccttcttactcccgccgtcgcccccgatccgagagcgagcatggcgcactctctcgccgcctccttctcgccggccgccgcccggcgccagatgacaaatgtgattccaagctggagctcggtttccttccagagccacaggagggcttctgtgtccatccgctcaagaccaaattctcttgggtttaagatttgctgttcggctaagaaagagacagtggacaaggtttgcagtatagtgaaggagcagctggctcttcccgatgggaccgctatcactggcgaatcaaaattcgctgaacttggcgctgattcgctggatacggtcgagattgtgatggggctcgaggaggcgttcaacataacagtggacgaaacaagcgcacaagacatcgcaacggtgcaggacgctgcggaccttatcgagaagctcatgctggaggcacctccaaaggtcgtctagatccagcaaccttgcgatcgacgaccttgcgtttgatctatgttgtgtgttaatttgttcgtgttgccccatttgttttttcttgatgattcaagatgaggttttgtattggtgttgctgaggtgaattagatagccccaaaggccacatgaagcagatgaggacagttcattccactttgaatttgtatgttgtagtgctgctatagagaaaccaatggactgttatgaagagtcaatgcaactgttgcttttcgttt

SEQ ID NO: 144030 - DNA, 365 bp, Zea mays
  Clone ID: MRT4577_62838C.1
catgcgcggaagagccatgggcagcgagcacgctgcggggtgcgatgctactcatgcggccgacgccgagcttgttgtacaacgcgtgggtgttcgtagcggacaacatcgcgcacatatgtaagcctgccgccatctctgtacgtgatgacgttaaacggcgtcagcacgcagtgcatctcgctgcacagcaccgtgaacgtctgcaacccctacgactaccactttggcatctgcgaggtgacctacacgctcctgtacgcctgcaaggtcgtggtgtgctccaccatgcgactacacctgctggatcctcgacagcctgtgcatctcgcttgagatgatcgtgaaggtgccctacgacttcc

SEQ ID NO: 144031 - DNA, 374 bp, Zea mays
  Clone ID: MRT4577_62839C.1
ctattttctttttttatcaaacgcgcccagggaggacttccggaacaaaagcgagccaacaccgacccgacacaggacacgaacagcaggaactacgaccacccccaaaaggagagggcacccgaccacacaagcacatgggcggcaaaaacaacccctgaacaaaagaccaccagggaaaccgagcccaaggcggagggcgccccccttccggagggaggagccggaccaggagcggacatgccccacccgttagccggggaaggtcacacccaggagggagggagggacgcccgcccggacacaggaccgggccgaaacacagcccagggggacccagcccacaggagcaaaggggaaggaaccaccagaca

SEQ ID NO: 144032 - DNA, 317 bp, Zea mays
  Clone ID: MRT4577_6283C.1
cgcaatcaactacctaagctatccacaagcacccatgtaagtgcacgcagagaggggctgcgaccaaacaaatccaatccaatggctgatggcaccggtgcgcatcatgcgtcaggatctgtccccagacgctcagcagggtcaaccgtcgggcccagttccgctgctggtaccggtacaagctacgctgcatcgattgcggcgaatgaagcaaactggacaccgcccatgctcacatgctctgcatatgccaactacataaatgccctggtaccggaccaagatgacgctccaatgatgcacttcgtgagggtgat

SEQ ID NO: 144033 - DNA, 208 bp, Zea mays
  Clone ID: MRT4577_62840C.1
acccttccgaattcccttgccgtccttgttgattggcctaagctttcccggcaaccaaacccggatggggttgaaaatgaagaacggcgacaaaatcaacccactccttaacaaaaccgaaggcatcgttcttagaacaacttaaaaccttcgtttggttttcggtcttccttattataaaccaaatggaaaaaatctttttaaagga

SEQ ID NO: 144034 - DNA, 135 bp, Zea mays
  Clone ID: MRT4577_62841C.1
ggggcccatctcgaccggggacccgcccccaataaaccaaaataaagcccgaaagcaggggaattaatggccacgagggctaccaataattaccccaacttaaacctaggaataccctaccaagcctcctaaatg

SEQ ID NO: 144035 - DNA, 543 bp, Zea mays
  Clone ID: MRT4577_62842C.1
ccccgggcctgcaggacgactcggcaccgaggcaagcaggagagttgaccaacacgggcgcctcgttatgccgtggcagagactataagagggtaacgttgagtatgccttgatcacacgctccacaattacagtacacctctgggagcaccactcattagaaacctctagaagcctagagtagttatattcatgccaggcctgccacttcaccggacttcatgttcctacacctaaactatgacatattatatagggcttgttgctatactagttcctacaaacaattaatttcattgtacaatttatcatgaaagaacaccattataccttattaattacttacattaaagccacctgccttaatactaattactccatcaactcactccattactcagaccaagcatttgcttgtgcgtatccaaataccaatctactacatgattccctcattgctataaccacacggctatgaaactgtatcactaccctatattgtattatcatgccttatgacccttaaatcataatgtatctatc

SEQ ID NO: 144036 - DNA, 356 bp, Zea mays
  Clone ID: MRT4577_62843C.1
aaacatcgtccttctcgattgagggtggtgcactgataaacagttcaactagtgcgctagaacaaggattgttacttcatcaatcacagttagcaatagagggcaaccaaaagtaaggttgatgtagcgccggccatcaactgactcaaagacaaaatcttgcaatggaagaccatagccaatggtgaacgtgcagtgccacccaccaaataacggatatctgggctcaatttctagatcggacttgtgtgaatcactgcgcaaatgggatgaggagatgttaccaatctcatcacgatagtaaactgaatgaacccgaggtggcagccttgcaagaagattttaaaggacgaagc

SEQ ID NO: 144037 - DNA, 203 bp, Zea mays
  Clone ID: MRT4577_62844C.1
gtgaaccaccccacgagggccagaagggggggggctaaagagaaggccggcggcaccccccccaggaacgggagacccacacagaggccgcggccagcaaggcgggcgcgcaccccgggcgaaggcccacaggcacagagcacgacagaagaccaggcggagacgaggcgcaagaggacaacccccccaaccgagaagaaaaa

SEQ ID NO: 144038 - DNA, 1999 bp, Zea mays
  Clone ID: MRT4577_62845C.1
acccgggcgagcttcaattcggcacgagggtgccctcctcctgctcgtcatcgcgtccgccgtttcctgctcttccttgccgccggaggacggcatccgggtcgtctctgcagagaaaagagtatgtatgctctcatcttctcctgtcactatatatttctttgaaagacccgattactcctgcgatccgctcttattcacttgtatcggtggcggaagcttctcttgagaatcccttgctaaagccccctttatccgcgccaaatctcttcctcccaaatcgtcgttaattgttatgtatgccattttcttcatctacaaatttcgattgcctgcagatcgacctcacgggtcccatcgtcaaagtcttcctaacattgaaggtaatgtcttgctcagatgggcatcctgttgcttcctccagcataggcatctcccacaacttttcaacccctttgtgccaggttgagaatgctcccacggcctctgaagcatcacgagttctcctcgccttcacgcccacagagtttcaacatctctctattgtcaaggccacaagagcggaggggaagcgcaagaagaaggcattcgtacccctctcggtccaagcctctgagctcgccaccaccgctcccgacgcccctcgcctctactctgttctgctcagcactcctctgaaaccgggcgatgcaaccactctagaagtgctatacatgctcactcactctttagagcccttccccgctgagattagccagtcagagtcccagttggtttactaccgtgacagtgcggtgcttctctcgccctaccatgtcctggagcaggttacctacatcaaaatgccaagcaataggatcgaatccttcacaagggtcgatcctaccacacgagctggttctgaagtgaaatatggcacatacagtaaccagatgccaaactcctatttgccagttcttgtgcattatgagaataaccgcccatttgctgttgttgaggagcttgtacgcaaggtggagatttctcactggggaaacatccaaatcaccgagcagtataaactgaaacacggtggtgctcgtcacaaaggagtcttttccaggcttgagtatcaatctaggccatctatcagtggagcttcgtcctttaagaatcttcttgcaaggctgccacctcgggttcattcagtttactatcgtgatgagattggtaacatctcctcatcccatctgcgcactgattcacacaagtccgatctagaaattgagcccagatatccgttatttggtgggtggcactgcacgttcaccattggctatggtcttccattgcaagattttgtctttgagtcagttgatggccggcgctacatcaaccttacttttggttgccctctattggatactgtggttgacgatcttacagttaaagttgtgcttcctgaaggatcaaaaaatccagagcatgtagttccttttgtgacagagaaacatcttgagactagttattcataccttgacgttgttggaaggacgacggttgtactgaagaagaaaaatgttgtaggggagcacaacgttcctttccaggtgtactatgaattcaatccgatcttcatgctggcggaaccattgatgctgatatctgcagtgttgctgtttttcgttgccttcattgcgtatcttcacatggatctttccatcagaaaatcatcataggcctgttggcaattctgtccaccacagtattttttgaggcacatgttctgctaactgtgattgatgaagtaacaatccttgttctagcgcactagttgaactgtttatcagtgcaccatcctcaatggagaaggacgatgttttttttttttgtgtgtgtgtgggtggaatatgattgcttcatgtagggctcacaacgatcagaaacgatatcatctataggaaaacgattgcctagaaatttagctggtttcagaattaatcaacgtggtgactacaat

SEQ ID NO: 144039 - DNA, 270 bp, Zea mays
  Clone ID: MRT4577_62846C.1
attctgcacatgtatcccagaacttaaagtataataataaaaaaaaaagcagcagctaatagaccacaccagccatgagaggaacccctgcctcctaaactcctcgagtgccaagcaccaggccagggctcttgtgtgtatccctccagtcaatgaacacacaattgccccctgaaaaccgcccctttgctctgcaaatattgacacgggaggtaacgggtagatcataactatttataagaaccatctgtgtttctaaacagtcattta

SEQ ID NO: 144040 - DNA, 677 bp, Zea mays
  Clone ID: MRT4577_62847C.1
ggccgggccgggaccagatcaccgcaatttagctagctagctaggccaaaccaaaccatcaacaatgtccagggcgcaagcagcaaggagttttagggggaaaccatgtcacggccacaacagcaaggcggcgcggaggtggccgtccaggctggtggacggcttcaggaggatgctggtggggcttttctccttcccgccacggccacccaaggtgaccttctccgtcgtccacgaccaccgcgccgccgccgccgccgcaggtgcaggggcaccagctacagctacaggagggtgcggcggcggcgacgcgtccaagcggtcgtcgtggagcagctccaacctgcacccgctgaacgcgcactacgacgaggccattgctgactgcgtcgagttcttcaacaagtccgccagggtcgacctcaggtcaaggccacacttttgatatatagtataataattaatccaactactgtgatcgatccgtctctcgatctagtgacgatccatacgtcatcgatctccaaacaggttctgtatgtagaccacgctgtgcatgcatgcgtgacgatgtcgatgtgtgtgtatatctgtccggccgtgtacgtctgctcaagattattaatcagatcactgtggttacacgaaaaaaaaaaaaaaaaaaggcccctagggcc

SEQ ID NO: 144041 - DNA, 791 bp, Zea mays
  Clone ID: MRT4577_62848C.1
aagatctccctatcttcttcctccctataccgagctccatccatgatagctcttccactgctccctcacgccagcatcaggatgcgcagagcctttcctctccttcttcgaggcgcgtgtgttcctcccatggagccaggcttccctctgctcggacgtcggagctccgaaggccaccccctagcgttttctcctccccatggtggacgtcgagctcccctctgatctggttcagcacagggagcagcagctcctgctctccatccatgggcgcgcaccccctccctgcgagctctctgctcggctcccctgctcccatggtgtccaacgccttcctctgtcctaggcgcaggggccacttcagcctcatcgaactccccatggcgtcgagcttctccgtcgcgccgctgtgacgtgcccagcacgcccgccctccatccctgtgcaggcgcccctttcccccagcgggattcctcctcttctcccccaaggcgcctcgtcttctccccacctccgcccaagcagcacgagcttggctccatgcttgcccctggccgaactctcctacagaagctccccacgacgccttcttctgcaaacgcagcaagcaacggacgccctcctcctctcttgtcggcctcccatggcgctgctgccaccttggtgtactctgcagttccaagccagtcgccagtgctccctgcttcaccctgcacgacgctcactccctgtctctcatcctcgcaacagcctttgcaacggcctggccgtcggcctcccctagcagcgag

SEQ ID NO: 144042 - DNA, 486 bp, Zea mays
  Clone ID: MRT4577_62849C.1
aaaaacaaacccccggggaaaaaaaaaaacccccaggttttgggaaaaaggccacaaagctaaaacggaaaacttccaaagggccggtccgatcccagaaattaaacccaattaaaaaggaatcaaaaaaggaaaaagggaaacaccctttcaaaaaagggggtcaaaaaaaggggaaaaaaacaggcccaaacttaattgggggtttaatggattccaaaaggggaaaatttggaagggaaacccaaaaaaacttttaattttggcaaaaaaaaaaaggccgaaaggcccacaaaaagtctttaagccaaaaaccaccccccaaaagtttcgggaaaattaaaagggcatggaaacccaaagggcttttaaagccaaccccaaaggcaaaacccagggccaaaccaaaattttgggccattagtgggaaaggaaaaccccactaaagtccctggagaaggggccacctcccaaaaccccaaaaac

SEQ ID NO: 144043 - DNA, 370 bp, Zea mays
  Clone ID: MRT4577_6284C.1
ttgttttttctggctcattcctttttacttagaagtcctgaacttgcaaagaaaagactgtccggtcaaggggggttattttgggcacgggaacccatggtccacccagaccataataatgtcccggctcataccgggacatttcatttcgagacactgtgagcagtttggccggtaaacctgaaatggaacacgccctagacttacccattgtccttccgggttgccgtttggtgacaaacaaaaccgacaggtgtacatgacgcgggtgggctgcagacacccggaaaaaagtgcaggtcttcctgggcctgatttcgagctgtcgtaccactgcatgccgcgttgtacggctttttttgtgtggcct

SEQ ID NO: 144044 - DNA, 553 bp, Zea mays
  Clone ID: MRT4577_62850C.1
aattcggcacgaggcctcccgatccggacgtcagaactcgcgtggcggcacgcggatctgagggtttctctagaggcggcggcggcggccggaacggccggaatagggactctgcgcgtgggggctctcggtcttcatcagcgaccctcctccgacgctcgttgcctcgaccctgcttcgatgctcctccgacgctcgccccgctgtgcgacctccgctggtgagcccctcaccgccgagggagccgaccaggtccatcgtctccgcaacatcgtgctcgcgtccctcgctcgccagcggaggtccatgcctcactcatggagttcaacctccttcaacaggccatgctcccggactccttttccttcacttgcctcctcaagacggacgagttcctcaagaggggcgagagcgggggcacgtgctgcgtcatagcccttctccgaaagggtagactggttgtctccaatattggagactgtcatgtggtgctcacccgagcagggaaggcagaggggctcacctctgacccatcggcctcccagaggatgag

SEQ ID NO: 144045 - DNA, 263 bp, Zea mays
  Clone ID: MRT4577_62851C.1
aagcagtggtaacaacgcagagggcttttttttttttttttttttttttttttttgacagcaccaattaatatttaaataattgacgttcttgctttcccagaatgaagactggagaactgagtttgaatgaggagccggatctgcttttcaggagtaggtatctgattggggggggaggaattcaaataatgtgcagcaagagttcagcaacaaatagtatccccgtccttctcccgcgtactctgcgttgttaccactgct

SEQ ID NO: 144046 - DNA, 516 bp, Zea mays
  Clone ID: MRT4577_62852C.1
aaaatcactgactgtacttacttgttatttttctgttatataataattttttgttacattttagttctttgcgtgaactccaaatccgtggtacaagtagaatctactgaacaacaatccttgcagggaagcgcttgttggggtattaacggaaatcatacacacactgggtcatcgcttattaacattattcttatagtcacttgctagaccgggaagaacaccatgcaatgcacacccaatccccaactatttctatataaaacgtttaggagacgcatccggagaatcacatgttattgaataatagcgtgacgatcaagcgtcagctttggttggggtgatctctaactccggcggacatcaaaaggatgcactcctgccgcggggccgggagctagattggatccagaaaacccccaacctccggggcacgggcttcgcacctcccattatgagacctcttccccgacttggaaaccgactggaagacgtcctccaaacttgacattgcct

SEQ ID NO: 144047 - DNA, 285 bp, Zea mays
  Clone ID: MRT4577_62853C.1
ctggtggacgtgagcggcaccgggaccctatcccagagctaccactacgaggtgtgtttgaccggagactcagatggtctctgagttcaagttcctgaagccgattattcctaaccttttgccccagggcgctggtgaagaaatagggcaaactgctgccttccggaatagctttggattaaattagagatctcgtgatgacgcgttgatttctgccatttatcccaaactttttcagatctagaattcgagagtgtcatggacaaaaatttcaccttgagattg

SEQ ID NO: 144048 - DNA, 602 bp, Zea mays
  Clone ID: MRT4577_62854C.1
ttggaaacctgtagccaacatttaccagcgactcacatagccagatcagctctctcgcagatatgtaggagcagctctaggatcgtggtacatgcgtcctcctgatctcctcgccgcttggcgtggagctcgagcctggccctcgctctatcgcgcgcctcctccttcaccgaccgctgctccagaaaaaacatagagatcgaccgcctctaccacattgccactgcatggagcgtctacgtttacgcctacgctcgatgggggacggggacggatacgaaccaatgcggagactgaaacatggcgagcggagaccgagacaggcctatctacgacgaccgcactcgatcggctttgcaccggtggatcgctacgcttctaggatgcactgatcttctgatctgatacagaactcctctctgtaatactgatggtacatttgctcatcgactatgactcatcatatgtctgcgacttgatatctaccatgcatgttctgtcttgttactcccatgtaaaatcaagaagtgtgcctataatctagcctgcatgaatgctaaagcttccccctgtaataatagacttcggatactctgctttac

SEQ ID NO: 144049 - DNA, 116 bp, Zea mays
  Clone ID: MRT4577_62855C.1
aatacatcctacaaacaataattctaggctatatttaacagtactggtaatataaaatcaggcaaaaaaacactacatggcatcagacagggcaataggaggtggaaggacaaatt

SEQ ID NO: 144050 - DNA, 322 bp, Zea mays
  unsure (1)..(322): unsure at all n locations
  Clone ID: MRT4577_62856C.1
ttnttttttttttttttttttttgtttttttttttttttttttttattttttttttttatcacattaaaatctggaaatgtaacttcttatttctggttggccacatacatcaaccaaaaaacattatgaaagaatcacaactaataaggaggggaaaagagggcacctttttttatgtgcagtcggcaggaggccccagggcctgtcaaaggagggcggacaaacgccacccattgttggagttgaaacacggttgccgggcaaaccgcaaaccgccaggaaaaaaacaggaaccccggcaaccagggtcgcagacccacc

SEQ ID NO: 144051 - DNA, 132 bp, Zea mays
  Clone ID: MRT4577_62857C.1
atacaacatacatataaccatcgctatttcactacacacaaataaaatgcttaaacatgggcgggtaaattcaaaacttgggggcgcattctataccacaccttacaataccccattatataataccactat

SEQ ID NO: 144052 - DNA, 792 bp, Zea mays
  Clone ID: MRT4577_62858C.1
ctatctatgaactcaatgctgcagtcagcatgctgaagatactgcagcagttactgctgtgaagttctcagctgaacacccctatggcaaagcagtcgcgctagttgacactgaatcggaatttatctcggtggatgaggattggttcctgcttccctggatcgcgatatcattcttgttcctgaattccattggcaaagatggtgcgaaactcatcgaaggtgccatggtacagaaggctgaaaccgttgagactgatactacagtggtttctcagacggtgaaaggtggagcagcaggcgccactgctggttcggcgcaatgtggcgcttgtggcacggctggtggcggtgacatggtcatggcaagtgacaaggctgggcatgctagctcagtcattgcaagcgcgaaggtggctgattctaagtgtggtggttgtggatcaggctgtggtggtggatgcggtgtctctgtggtcaccatgagctacaagaatggtcatgcgagctgtggcattgttgcaggcggcgagaatggccatattgagtctactgggtgtggatcgggatgtggcagttcctgtggtggcaacatggttattgagagctccaaagaggggaagaccaagtcaggtggctgtggttcaggttgtggtggaggaggctgtggcagcatggccattgaaggctccaaggctggcattgccaagtctagcggctgcggttcaggttgtggtggcggttgcagcggtatggtggttgaaggctccaaaatggccatgccaagtcaggc

SEQ ID NO: 144053 - DNA, 506 bp, Zea mays
  Clone ID: MRT4577_62859C.1
gtgggggggggtttttattgacaaacatctacatccagatatagaatataaatagcgaaacatatacacgacagtgagggcaccattatcgaggacatactcatatgaaataaaaaaaagcaacctccaacgatgggttgctatctaacacaagacggggtggaggagagagaactgatagaatggcagcaatagttgctgctctaggaaggcacaaaccaatgggttagccactgctaggggattaagtaactgtcgtccctgatgacggtacccaacaaagttcaacatagccagattgttgaatggaagcagctgttgcaagtaggcagcagggtttgccacaactagctgactcagagctgctacaatctgatgcaacaattgttgttgcaggtatgtaggtgcattggccacagcgagcgggctagatgaaagcagctgttgctgttgtaggtaggcggtagggttcaccatggctagttaactgagctctggcagaaact

SEQ ID NO: 144054 - DNA, 222 bp, Zea mays
  unsure (1)..(222): unsure at all n locations
  Clone ID: MRT4577_6285C.1
gcgccgcgcgacagcgctcgacaacgccccaaccccgcncgggagagtagaaccgaaggcgccgaagcggacgacgcggttgaagcgggacacgaccgacaggcangaccgacgacgccgngggaggccccacggggacacggaagaccccggcgaccaccggcgacgaacgccagccgagggacagcgaagaggacgagaaggaggaggagaaccgggaaa

SEQ ID NO: 144055 - DNA, 304 bp, Zea mays
  Clone ID: MRT4577_62860C.1
agggagctcttaagccagcccaggtttaacaacacggaacttggcaccgcacatgcaccgatatatccaaaccatagactgtccaatacaatcacagtggagcacacactgaatgaaccaggccagcacccttccacgggcgcccaaaatgaatatgcacaatgtgacgagacttggcatttcacaacaggactgggacggtcgctcccatccaaaccgaatgcaacgatacacatgttttgaatataacatacaacccttgactcttacctactaactaaaaaagtgagaaacaaattacact

SEQ ID NO: 144056 - DNA, 364 bp, Zea mays
  Clone ID: MRT4577_62861C.1
cttctcttgtcacccaataagtcagtcagtgggggggcgtggtgttcttctcctgcctaccctcgacagacttattaaggtgcaggcagctactgggcgcgcacagcacggcacacaattaactgactcctcctgcattggctgataatcatggagtaaagctcccctcatactcaagctggtggggcgggcaccgacatcaactgctccctccattcagataagacgaataaggtccccctatacaagctcaagcgcccaatatctccctcagcgtcaccaactgatgcgcctccatcaactccgttgagctgctcggactccaaaagggctatcactgagggggggcttggctaccacacca

SEQ ID NO: 144057 - DNA, 663 bp, Zea mays
  Clone ID: MRT4577_62862C.1
ggaacagtgaatgatttacaaagccgctgcgttccttattggacccgtccagttcgatcggttcgtccacgctaccttgtttctttgcgccatggaggccacgaggaagcccgcggtgtgccgtgcccttcttgtgctgctcatcgtcgtctccagcgcggcggtgtcgactgcccaggacgagagctgctggaaggacgacgaccaccaccctatctgcttgcccgaggactgcgtggcgacctgccgggatcacggccacgcggacggccgctgcagctgggcatggtcgtggaggccgtattgccagtgcttgctggcggactgccaatagacgcgaaaggctgcgttgcatggcgttctggctgcctcgccgtcgccggcagacgaaggataaacgtacggtttgcggcctcacgacgtcgcgacgagccgcctgaacccatcgatctgtgcgttggcggtgtcgaccactctttgttttgcccccttttggccctgtgcggtatcattgtcatgccacctgtgggcatccatcagagaattcacaggcacgtacgtacagtaccaatagatgcttctcttccctgttcagttcaggtgtcgacgctagtgttcatggattttcagctactgtaagttttcatggattcacaggcggcc

SEQ ID NO: 144058 - DNA, 1136 bp, Zea mays
  Clone ID: MRT4577_62863C.1
cggacgcgtgggttcagcacccagtcactgcactgaaggttctcttacaagtaacattttaatgaatctacaaaacaagggcatcttgaacaatgtatcctcttccctggacgcatcctctcctaatcttcagagttcacttccctcatcatatgtttcaaaaactatgccatctgtgattcctgatcaactaggagcagcacaatccacttctttgtggagacccacaacatatactgatagaatgagctcatcatctgtttttagtgatggattagcttcagcatttggctcacccaaatcaaagaagacaggagcagaagcaaaagatgagttgctcagtaacattttgtcaagacaaacagcagctggctcttcatctgcaatccctttagcaagcaatggggtagtgccaccacaactggcgaacacaggttcttcatctgatcaactcggcgcttcttccttctcacttcagtatgtgcagcgcatgcttgaagaatctcttgggtctgtccagaagtccatccatgaggatgtgagaaatctccacattgaacttttaagacagtttcacatgcacgagatggaaatgtcaggcgtgctgaacttggtcctggaaaaggtggaaggcctgacaaaagaagtgcagcaactaagaagggagaaccaacagctcaggcagcagcttctctaatatgtgcctttgggcgcctctctggcaatcttatgctgtggaagagtgcaatttgctcaggagtcctaggtaggcccaaacctatgtagaggcctggcgatggttgattctcatattggttggaagctcgtgtttgactttgacacggttgtacatataatcctcttaatttagaagcatattttgatcgaattattgatttgtctgtttgccgtgcttcttggactggctccatgtatcttggtggaccttgggcgtcctgatggcatatgtgagaggtcaacacaggtttccgatgtagcttttgttaatataattccttgattaggctcaaaatactctcttaacgatggtatatgatattttgtgatgtgagtagattattactctttgtccaaaaaaaaaaaaaaaaaaaaaaactcgagagtacttctagaaa

SEQ ID NO: 144059 - DNA, 1344 bp, Zea mays
  Clone ID: MRT4577_62864C.1
tgggaccctcgaggccggccggcgggtccctcccttatcctattccctcgtgtcatggcgcttctcctgcgcctcgctgctccgtcggtgccgccccggcggagctccggcctcagagcattgccgcgcgtcgtccttccggaggtcgtttccaaacaatcatttcttcgtttactagttgacagcactgcaagtatgccctgtcctattaagtgttctgcggctcggtgtgccccatcattgactgaacacaacgattctaggaataatggcatccatgcatctagtgtatatggacatgatctcatgaagtccatgtctgatctccaggaagttgtattttcctcctttagcaaagcatgtcttctcagtagttgtatcatatatggtctaccacccagttgtatagcagaaccatgtgagcaagaatactttctccctaacatgcctttgctgttcgcaatagccatggttggtgctactgttggagggctccttgcgagacagaggagaggggagcttgcacgtctaaatgatcaattgcgtcagataaatgctgcattgagaagacaagccaagattgaatcttatgctcctgccttgagctatgccccagttggtagcaagataccagaatcagaagttattgttgatcctcagaaacagcgcctaattgcatatctcaggaccggaaagaactatctgagaaaccaagctcctgacaaggcatttcctgagtttaaggcagctcttgatcttgcacgatctttaggtgatcatgttgaagagaagaaggcagcacgaggattaggggcatccttgcaaagacaaggcaagtacaaggaagccataaattatcattccatggtgctaaacatctccaaggtgaccggagaggatgcgggtgtcactgaagcatacggagcaatagcggattgctacaccgagcttggtgagctcgagaaggcaggcaagttctacgacaagtacatagcaagattggagaacgaatgagaaaacagtgctgattggcaaatctgtgagagcagaaacaaagacaaggctaatcatatctctactcttgtcgtcatgtattctactatagatgtgcagttcccagctggaactgatgtttgttatcatgattcaagtttctttttggcagaattatcccagatgtttaggtacagatcagtatcatgctgtgcacgtagttgttttgttaattagggtctcaatggtccgtacaggcattcatgtcaaaaaaaaaaaaaaaaaaaaaaaaaaaaaaaaaaaaaaaactcgagcctgctagttgcgccggcttaattttatagttttgcc

SEQ ID NO: 144060 - DNA, 455 bp, Zea mays
  Clone ID: MRT4577_62865C.1
agaattctggggacgacccacccgtgcggggacgcgttttggaatttaatgaagcctattaatgagttttttgatcactgggtaccagatgaagctgtgggggtgttcacagaacgctcagcacatatcaacgctttcaaccgcacgcatgaatgtcgcaactgtggtgatattttctgctatcagagcacccatcgaagaactactctgactacacatgcacatgctcaacccgttctattttgtgacagatgcatggcttacgtaacgcaaagacttaacaatgcaagagcagtggcttctacgacctattcgttcacagccaccaagatcttgccaaaaaacttcaggaagccatggatatacataaaaggtcgtttttcacgaacactgccaacaaatgttactgccaagcggctgcggtaggtcccatgcccaacctgcactgcccattc

SEQ ID NO: 144061 - DNA, 102 bp, Zea mays
  Clone ID: MRT4577_62866C.1
gtcgcacacggtcacctacgctttgactttcgcatagtatatgccacactcactataaccggagtgggcatatacgtatactgaggggtcatgcctcaaatt

SEQ ID NO: 144062 - DNA, 1753 bp, Zea mays
  Clone ID: MRT4577_62867C.1
ttcaagaatcagtcctccatggacgacacgacgaaggtcgtccgacacaaaggacagctggagagccctgtcgcactcgcactcgcacccgcacgcagcggcggcagcgcagctgcgcagatcgccatctcaattctcgacccaacccccacgctggccgctgcactgagcagcaaccaccagtccttctgtccgcagcctaccacacacgccacgcctcgcctccggtctacatggccggcgaactgcgccaccgccgcgcgccgtcggaggacgagggcgtcgcctcctctcaaagactcgactccgcccccgcaggcaacggcaaggctggcacttcgtccggcggcggcgagggggcggagccgcggggcgggaagagggacgcgctagggtggctggagtggtgccgcggttggatggccatcgtgggggagttcctcttccagcgcatcgccgccagccacctggccaacccgctcgagctgcccccgctcgatggcgtctccatcgtcgtcaccggcgccaccagcggcatcgggctcgagatcgcaaggcaactcgctctcgctggggcacatgttgttatggctgtaaggagacccaaggtggcacaagagttgattcagaagtggcagaatgaaaattcagaaacaggaagaccactaaatgccgaggtgatggaacttgacctgctctccctcgactcggtcgtaaaatttgctgatgcttggaatgctcgtatggcaccgctgcacgtgttgatcaacaatgctggcatcttcgctataggagaaccccaacatttttcgaaggatggacatgaagaacacatgcaagtgaaccatcttgcacctgcattactggcgatgctgcttataccttcccttctccgaggttctcccagcagaattgttaacgttaattcaatcatgcacagtgtaggttttgttgatgctgaagatttcaacttgagaaaacataaatatagaagttggttggcgtattcaaatagcaagttggcacaggtaaaatttagtagcatgcttcataagagaattcctgcagaagctggcatcagcataatttgtgcttctcctggaattgtcgacacgaatgttacaagagaccttcctaagattgttgtagctgcataccgttttcttccctacttcatattcgatggtcaagaaggttctaggagtgcactgtttgcagcatgtgacccccaagttccagagtactgtgagatgctcaagtcggaagactggccagtctgtgcttgcattaactacgactgtaatccgatgaacgcgtctgaagaagcgcacagccttgaaacctcgcagctggtctgggagaagacgctcgagatgatcggccttccgccggatgccctggacaagctcatcgccggagaaacagtgccgtgccgttatggacaataggatgtcgtcgcacagatccaaacaacaccacttttcagttaacagtttcgaggtggtttgttccagcctttgattagagcacctctgttgtatcctttttttatcctaaatttgcaggggggaaacaccgtgtaaggaagaaaaagaaactgttaacatctacaacctttgctctttcttgtactgtgtcgtagaaacatttcaatatgttgactgacttgatttcttgtactgatggcccctaaaacagggcccactactttagatttgataagggatctttctatctttgagggccaaaaaaa

SEQ ID NO: 144063 - DNA, 249 bp, Zea mays
  Clone ID: MRT4577_62868C.1
ccccaaccccaagctctagcaaaatgattggggcgggtcaaacattgacaaacttaccaacccaaacgcaaaacacagctcattcactatccccaaaaaaaaaactggcccactccaacaaaaagaaccggctcagcttattcaagaacgcacctacacatccttctaacccactcactccgcccattgagccacccaatccaatatctacttaatataccatacatctactacgttcaatttagattt

SEQ ID NO: 144064 - DNA, 538 bp, Zea mays
  Clone ID: MRT4577_62869C.1
aaaacgcctcgagactttggggtaacaaattcagcatttaggatggaaaaattctgtttctcgagtcaatccccacctggataggaccctacgggtgtattaccatatataaggactagtaacggttctttccaacatgaaacacggttcatatgtaaacgtgatctctggttttcctctggttacactggcctaaacaatactgtgatgcctgagcacccttgactaagaggctgtagcctatatcatggtgggtttattgcttttcttgcaccttctcttctttttttggctgagctgtactgagcagctccggctgcatgcggtgaagctgccgtaacatctaccccaccggcaccacatggcagtgaagtgaagttctccctgtccgtgtcaatgagtctagaggatggtcttaccgctcatgtgggacagcatgagttccgtcctttcattgataacttcacactcgactgtcttcagtatggtggtcaaatccttattcaggggctggcgttcccagacgaggacagctagc

SEQ ID NO: 144065 - DNA, 284 bp, Zea mays
  Clone ID: MRT4577_6286C.1
cacataattgcttatgtcgtgatcaaatccatacctctgaggagggactctgcaccagttcttggttcctttcgtaacgcaatgggcatatcatctgatggcaggtcctcaacctcaatctctggagctcgagcttcttcaatttcttcctggccactttcttgtataggagttaattgagccatgtcttctgtgtttgttcgagtcctgtacttccgtcttgtatacattttgagattactctgtcatgtatactttctcctctagaattctgggcttgaggt

SEQ ID NO: 144066 - DNA, 1864 bp, Zea mays
  Clone ID: MRT4577_62870C.1
aggaacgtgagcggtgagcaaccctaccccaggcccagcttgcgctctctctctctctctggacgacgacgcctacgccagggccccaggtcgctgccgccctacgccaggtccccttcgccggcgacgagcaccagatgattagctcattgagcaacatacagcaacagatagctacaaatcgtggcatatgactccaaaatggagtgcatgctcttcaaatagctacagagaactacctttacatgaaaatggagagtgcaaatcaaccttaacagagtcagtcccttcacctacaagctgttttggcttacacactgcaaacacaatgtgctccttatcttcacaaaagaaggatggcaatgtttataaaagaaggaagatggataaggattcaaattctcctataacatttgaagaggctaaagaaatggcaacccaaagttgcacaatttctgatgaccactcatcattactgctacccattatctcctcagagtcagaggcattgcttttaaattcaacagcaggcgtggcaggtcctatcctagattgtgaggagcctgctgatgttccattggagccaaattctggtacagatgatagatgcttcatttcaaacatgtctccaacttccatgactccggacaaaaagaatgctgctgaatgttcctcatcgaatattggccctacagaatcaattaccgagcatatttcaccaagggatctttgcattgccatactgatgaaagatggactaataaatgaatcaagaacaagaatggcacataaagaggaattcactgacaatgatgctaaccctttgttggcatgcaataattgtggctgcttggaacattcattgaagatgctgatatgcgattcttgtgaagcaggatttcatttgtcttgctgcattccttgtattaaggagctacctactgatgaatggtattgtgctccatgcttgtgtaagaaacccaagagtctttatggcaaactctcagagggcaggataaatccttccaggaatactaacacaaggcctcatgggatgagtcacatagagtacatgctgaaggatgctgaaccatatgtaactggggttcgacttggtagagattttcaggcagaggtgccagaatggtctggtccatcatccagcagcgatgtttactttgacgagccctgtgcaattgattctgcagaactaactacatttaatttgtgcaaaatgagtaatcaaagtcattcttccattggtaattggatccaatgccgtgagaccttgaatccaggagattctgacaagcaagttgtctgtggaaaatggagaagggcacccttatatgttgtacagtcagataattgggattgtttttgttgtcttctttgggatccagtccatgctgattgtgctgttccacaggagttgaagactagtgaagttctaaagcagctgaagtttgtaaacatgctaaagaatcagctggtggaccaaaaccagaagcctgcttaaataaatgccagtaccagagtgggcgattccttaagagaaggatacccattatgatggtatgaatgagttgccgtatgtggcgttctcttgtagtaactagccgtctgtgaacatgtgagaactatgttgttctagcctgttaaacgaaatgatctgtactgtcttctatagggtcttggtacacaagagttgtacaacatagatctgtctgtgcagtccagggagcagcgtgtcgctactgctgtgatcgccgccaaacgatcctgtgatcctgcgccaagttttgtttcttggtaacttctggtattgcgcgtgccactgcatggcgtggatgacgttttctgt

SEQ ID NO: 144067 - DNA, 450 bp, Zea mays
  Clone ID: MRT4577_62871C.1
tcacacaccccctcccctcccctcctaccctacacctaacacccttccgccgtcctcgtcgttgaccctcattcaccctccttggatccgattaccttacattgttcatttctctcgagccgtgatttccattaagcaccaacttacaccatggacaaatccgaggtgtttaacgaaaagactcttgcagaggagaaaaaagatatccatgatatcgagccccagatagatctcgatgaagaggatgactctcctattgaagaggtccgggtcaccgttacaaacacggacgatcctagcctgccctacaacaccttccgcatgtggttcctcggcctcaccttcacggctattatctcgttcgtgaacgagttcttctatcttcgtcaaacgaccgtctctatcggctattcagtcgttgctttgatctccctgcccatcggacacttc

SEQ ID NO: 144068 - DNA, 376 bp, Zea mays
  Clone ID: MRT4577_62872C.1
agcatgtctttagttttgattaaacttggatgtgttcaatgtactgttttcagtttgttaactgttaatgtgtgacttcaccagatcaatgttaactgtcataatctctattatgttttggaaccttggttgtgtaagcaataagcatttcccttctctacaaatattacaattatttttgaaatgttagtaatgtataagctcatgtataaagttgatgttgaccatctggcatcactatgtgtttaaatagtaagtatagtagctacatattcaagtggcaccgtggaaaataaggactaagacaggaccagcgtattttctttggggaaaacactgtcattttgcaccccttcttcacaatggtttgaaatgt

SEQ ID NO: 144069 - DNA, 1759 bp, Zea mays
  unsure (1)..(1759): unsure at all n locations
  Clone ID: MRT4577_62873C.1
cctcgaggccggccggctaccccaggcccagcttgcgctctctctctctatctctctggacgacgacgcctacgccagggccccaggtcgctgccgccctacgccaggtccccttcgccggcgacgagcaccaggtctgttgttacttctctggtgatggaccggaattcagatcaaaactgaaagattggaggagcatataccggtttgagtgtaaatagaggatcttccttatgtttgaggattagctcattgagcaacatacagcaacagatagctgcaaatcgtggcatatgactccaaaatggagtgcatgctcttcaaatagctacagagaactacctttacatgaaaatggagagtgcaaatcaaccttaacagagtcagtcccttcacctacaagctgttttggcttacacactgcaaacacaatgtgctccttatcttcacaaatttcaaacatgtctccaacttccatgactccggacaaaaagaatgctgctgaatgttcctcatcgaatattggccctacagaatcaattaccgagcatatttcaccaagggatctttgcattgccatactgatgaaagatggactaataaatgaatcaagaacaagaatggcacataaagaggaattcactgacaatgatgctaaccctttgttggcatgcaatanattgtggctgcttggaacattcattgaagatgctgatatgcgattcttgtgaagcaggatntcatttgnnctgctgcatcccntgnatagggagctacctactgatgaatggtattgtgctccatgcttgtgtaagaaacccaagagtctttatggcaaactctcagagggcaggataaatccttccaggaatactaacacaaggcctcatgggatgagtcacatagagtacatgctgaaggatgctgaaccatatgtaactggggttcgacttggtagagattttcaggcagaggtgccagaatggtctggtccatcatccagggatgaggggattcctatctcgcacttgagccatttattatattgaatccaagagcagcgatgtttactttgacgagccctgtgcaattgattctgcagaactaactacatttaatttgtgcaaaatgagtaatcaaagtcattcttccattggtaattggatccaatgccgtgagaccttgaatccaggagattctgacaagcaagttgtctgtggaaaatggagaagggcacccttatatgttgtacagtcagataattgggattgtttttgttgtcttctttgggatccagtccatgctgattgtgctgttccacaggagttgaagactagtgaagttctaaagcagctgaagtttgtaaacatgctaaagaatcagctggtggaccaaaaccagaagcctgcttaaataaatgccagtaccagagtgggcgattcctcaagagaaggatacccattatgatggtatgaatgagttgccgtatgtggcgttctcttgtagtaactagccgtctgtgaacattccagggagcagcgtgtcgctactgctgtgatcgccgccaaacgatcctgtgatcctgcgccaagttttgtttcttggtaacttctggtattgcgcgtgccactgcatggcgtggatgacgttttctggtagactgccgagcgtttgtgtatctgttgataggcgtttggcctgctatgcatttcatgacgagaggcatattgcattgtgtgcctgcattcttgccagaact

SEQ ID NO: 144070 - DNA, 947 bp, Zea mays
  unsure (1)..(947): unsure at all n locations
  Clone ID: MRT4577_62874C.1
cagttacctgatgcaaattattaaataccttaaccagaacacnncaccatgtcannattcttgaatttcttgatggccagcttttccgtgcccaggggacccggcgttttctgtctcattgaaacatnncaaagaccagtctcatggtgtggggggagaggcgttcctcttacattctcctacagtttaccgaggcaagggtatagcgagagctagccggctagcgttggggtaaaaaacacttcattgcatgcgcgcgcatcnntcttatcatctcacctaacaccagagcaaccaaaagaaaggactctgtgccgtttggttccgatttttggattctacacattaaccaagaaaatcaacttgaaccttgattgtgagataatgcacagaatccaaggtgtaatatcctgtttgtttggctctctcttagcagattttgatgggtagattctcataatcaccataaaaccaaacgggaatgttcggggggcagccgcctcgtcgccttcgccatcacgtctgcttcgcgtgctgcacctgctgatcaccctgctctgcctctcctggccgtgcaggagcagccgcatcagcagcttccgtctgcccagccggcccggcgccactgccagcgccgtacatgtgagcgaacgccgccggcagcgagggcatcgcctgccccggcacgccgaacatggcccccggcgggcacgggaagtgggcgccggccgcgacgcacgggaacgggagcatgtcgaaccccgccgccgcgcccatgccgaagcccaggcccatgccgagatgggggaagtgcgccatggggtggtggtgcaggagctgctgctgcatcgctggcagcagcatcgccgccggtggcatgcacagcccggtccccatcgacatcatctgcacttgcagctgcagcgtcttcaggtactcgatcgcct

SEQ ID NO: 144071 - DNA, 876 bp, Zea mays
  Clone ID: MRT4577_62875C.1
cctccgggtttttgactggaacgtgagcggtgagcaaccctaccccaggcccagcttgcgcgctctctctctctctggacgacgacgcctacgccagggccccaggtcgctgccgccctacgccaggtccccttcgccggcgacgagcaccaggtctgttgttacttctctggtgatggaccggaattcagatcaaaactgaaagattggaggagcatataccagtttgagtgtaaatagaggatcttccttatgtttgatgattagctcattgagcaacatacagcaacagatagctacaaatcgtggcatatgactccaaaatggagtgcatgctcttcaaatagctacagagaactaccttcacatgaaaatggagagtgcaaatcaaccttaacagagtcagtcccttcacctacaagctgttttggcttacacactgcaaacacaatgtgctccttatcttcacaaaagaaggatggtaatgtttataaaagaaggaagatggataaggattcaaattctcctataacatttgaagatgctaaagaaatggcaacccaaagttgcacaatttctgatgaccactcatcattactgctacccattatctcctcagaggcattgcttttaaattcaacagcaggcatggcaggtcctatcctagattgtgaggagcctgctgatgttccattggagccaaattctggtacagatgatagatgcttcatttcaaacatgtctccaacttccatgactccagacaaaaagaatgctgctgaatgttcctcatcgaatattggccctacagaaccaattaccgagcatatttcacccaggggatctttgcattgccatactgatgaaagatggact

SEQ ID NO: 144072 - DNA, 695 bp, Zea mays
  unsure (1)..(695): unsure at all n locations
  Clone ID: MRT4577_62876C.1
ccggccaagtacacaacgcccgtcatgcttcatgaaggtgggccaggacgaataatgatgtctgtatgggtgcctgcgaatgcttactatgcaccaatatgtgtgaaaacattaaaagaagagatgggcaccgttggcgattatacatgaaaacttgttaatttacattaggaatacaacgaggatccatccagggcgatccatgtactgacaacttgatcgattattaatgcatgctggtggatgtatagatgataaatgtgtcgtgcgtgtggtgacatttcgtctaaatataaaaaaaaaaatagcggccctacaagttcacatgtattgtttgctttactgagggatagttgtactcttgttaaatgcatggcgataactgccccctgtgtgaaattgaaattggctcgccatttgacttaatgtatcagcccgcgagcgtagagtggaagagctctgggatgggtagtgattgagcttacctcactctatagtatgcgctgcgctcactgcctcggttgcgaggcaggaaatctgctccagtccaagtgggttattgaattcatccacacaatcggggaatagcgaggtgagaattgggcgctaaaggccattaaaaggtcagtgaccgcaataaggcccggnctgctggcgtgtttccaaacggtccgaccccctgtacaaggatcaca

SEQ ID NO: 144073 - DNA, 301 bp, Zea mays
  Clone ID: MRT4577_62877C.1
aaacccaggggtgaaaacaaattttctgtttagtagaacaataagggtgctagttttcgacaaagtaaaatttttaacccaaacagacaggtttgttttaaaatacagatcattattctgggtgccctttttaaagagcacaaaggggggaaattaaattcttccagattggttggtttaaagggaaccattttcagacgggtggttactcccctattctcctttttttttaggggtccttcccatttattatggcatgttggttggggggtcaattttctcaagcagttttcttttgttt

SEQ ID NO: 144074 - DNA, 385 bp, Zea mays
  Clone ID: MRT4577_62878C.1
ggcgcgtgctaaagatacatcacacgcgccaggaagatggctagtggaaggccctcaacggccgcacctcgggccgaccctgatagtctatgaaaggttctatttggaccacaactctctaaactcccaaaatggaggaatatacctgatctgggcgacgcccaattaaactatcttataaactcaaaacgattctgtcctgctaaccgttcttttgactaggaaataggggcgcaagactaattaaaccatctagtaactagttgcctccgaaggtattcttatgaaagcctatatcccacaccatgatctatcgggttaaaccaatgattagagacatctggggcacaacaccttacatctattattaaactttaaacaagtt

SEQ ID NO: 144075 - DNA, 136 bp, Zea mays
  Clone ID: MRT4577_62879C.1
cccacgcgtccgagactataagcgtgagcggacgatgtagaggaagcatacttacaaacaggtgattagctatgagaaagctagtatatagtgttacttaaattcaaatgaatggtgctctttttactacgtcaaa

SEQ ID NO: 144076 - DNA, 402 bp, Zea mays
  Clone ID: MRT4577_6287C.1
ccggccgggttgaaaatattgctgatatcattgggaggaatttggttgctccaagaacagcactgtttgcgtgcactgggggacaaaaatcaagctgatcctaattcgacctggatgatacgtgccaaattggtgagatcatcagccgttttgagaagaagggcttctacctcatggacttgaagcttgtgaacgtggagaggtcgattgctgagaagcactacgccgatctcgcctccaagcccttcttccagggcctcgtggactacatcatctctgcgtcctgtggtggccatgcccctgggagggcaagagagtcgacacaacctgcccccaagatcgttggcgccaccaaccccctgcgcttcgagcccggcaaccttcgcggcgcactttgcctgc

SEQ ID NO: 144077 - DNA, 930 bp, Zea mays
  Clone ID: MRT4577_62880C.1
cattgggacctcgagccggccgggagcaagctcttccggtcctgcattttggtgtcccctctccgtagcggagacgttcgttcactttctctctctcgcctcccgtttgccccgcgtgcgctctgtgtcgctccctctcttgtgaggagtgaggacgactggggcgaccgccgccgccgccgccgccctacgccagatgcccaggtaggggccattcgctagctcttcttcgtgcccttcgccggcgacgagcattcaccaggatcattgatatgatcatgtttctcgtgttttatctttcagttgctgatgcaaggctttcaaaagtttaacagtctcacttgatgcaaaagcaacacaatcactctaaaggtttggatcagtcatttcagagcatgggttcgcggtttccatcccatcagctaagcaatggcttgtatgtctctggccgacctgagcaacctaaagagaaggccccagtcatttgctcctcggctatgccgtacactggcggggacataaagaaatctggagaacttggaaagatgtttgatctccatagaaaatctggtccattgggtaatccgccttcaaggaatacttcctttggtggtgctgccgccaactctggaccagtttccaatgctgtcggtcgctccaactactctggttctatttcgtctgcagttcctggcactggaggatcttctaggacaaaatctaactctggacctctcaacaagcatggagaaccaacaaagaggctatctggcccccaatcttctggagtaaacccgatggcccgtcagaactctggccctctacctcctgtacttcctacaactgggctaattacatcaggtcctatcacatctggtcagttgaattcgtctggtgctcaaaggaaagtatcaggccctctttgatcta

SEQ ID NO: 144078 - DNA, 144 bp, Zea mays
  Clone ID: MRT4577_62881C.1
cccacgcttccgaccagctttcaccttctttcccacgactccctatcgctgggcacgttgcacgcggaagggtggcgactgataacttgatcagcatggtgtcgttcgacttgcccaatgtgtatgtcttgttcaccaagctct

SEQ ID NO: 144079 - DNA, 1402 bp, Zea mays
  Clone ID: MRT4577_62882C.1
atacaaaaaattgggaacctcgagaaaggccgggaagcccttccggtcctgcattttgttgtcccctcccctctccgtagcggagacgttcgttcactttctctctctcgcctcccgtttgccccgcgtgcgctctgtgtcgctccctctcttgtgaggagtgaggacgactggggcgaccgccgccgccgccgccgccctacgccagatgcccaggtaggggccattcgctagctcttcttcgtgcccttcgccggcgacgagcattcaccagttgctgatgcaaggctttcaaaagtttaacagtctcacttgatgcaaaagcaacacaatcactctaaaggtttggatcagtcatttcagagcatgggttcgcggtttccatcccatcagctaagcaatggcttgtatgtctctggccgacctgagcaacctaaagagaaggccccagtcatttgctcctcggctatgccgtacactggcggggacataaagaaatctggagaacttggaaagatgtttgatctccatagaaaatctggtccattgggtaatccgccttcaaggaatacttcctttggtggtgctgccgccaactctggaccagtttccaatgctgtcggtcgctccaactactctggttctatttcgtctgcagttcctggcactggaggatcttctaggacaaaatctaactctggacctctcaacaagcatggagaaccaacaaagaggctatctggcccccaatcttctggagtaaacccgatggcccgtcagaactctggccctctacctcctgtacttcctacaactgggctaattacatcaggtcctatcacatctggtcagttgaattcgtctggtgctcaaaggaaagtatcaggccctcttgattctagtgtatcaatgaagatgcgtgttacctcttttgcacacaacccagccgtcacaaatatcaatggtgggagatggttactcgattaggggcagcattccgaccacaataatctggttggtcgcgttgctctttttggttgggtttgtagctggtggcttcattctcgctgccattcataatccgatcttgcttatagttgtggtggtgatatttggctttgttgctacactggtgatctggaacatctgctggggaagaagaggtgtgattggttttatcagtcgctatcctgatgcagaccttagaaccacaaaagatggggagtatgtgaaggttactggggtatatggtaatttatgtacactaacactacaggttgttacttgtggaaatttgccccttgagtcctcgttccaacgggtgccgcgatgtgtgtacacttcaacttgcttgtatgagtacaggggttgggattcgaaagctgctaactccacacatcac

SEQ ID NO: 144080 - DNA, 250 bp, Zea mays
  Clone ID: MRT4577_62883C.1
agccaacaaaaagagaaaacctaaataaaaaaagccaccctatacactaaaaaaaggaaacggggaaaagggcatggcgagagaaacgagagcaacacacacaatggggagctcaaagaccatagatgcgtacacactgccactaaacgagctcctgctccagactttcgcgaccaccgaaaaggtaaaaacagtgcacgaactgaattgaaaggaccaaatccaaaagacattcaaccaagtgcactaa

SEQ ID NO: 144081 - DNA, 287 bp, Zea mays
  Clone ID: MRT4577_62884C.1
tttttggggggttccacagggaccttgattgaagaaatggacaaaagaaccaatgcaaaaattgctttatgtacaggttgaagctatcctatacctttacaacaaagaattcaaaacaacgcaaacaattatttacagccacccggtcaatttattccttggcactacttgaatcagaatctgcactattctttatgaagggcgctggcaggtttggaaattttggcatgacccttttccttttggtatctggttcgggggggttttgggctggggctgtttgacca

SEQ ID NO: 144082 - DNA, 292 bp, Zea mays
  Clone ID: MRT4577_62885C.1
ctccttttttttttttttctctttttttttttttttttttcggactctttggtttttcttttaaaaaacggaccaggagcctgttgacctaccaactttacttaaagggggaccctaaaagggacaaagctatcatgaagagagccgcttagggagggaaacagggacccgaaaaggggggcacacaacatgcgagccggaaacttttaaaagaccgcccgccatacctaccgagaaaactaagcaaaattcctaggggggcaattaccggccgctttccatttgaaaaacc

SEQ ID NO: 144083 - DNA, 613 bp, Zea mays
  Clone ID: MRT4577_62886C.1
tgggaccctcgaggccggccgggccgggataaacgaaaaacgtgcttctgtgcctctcctgccataatttcggctgcttaccttctctgctgaagattttctctatcccacccgtcacctcttcgcgtcgcacactatcttccccaaatcgccagagcctctaccagcagcacgagatacagatccagatgtgttcgcgcactgtgaaactccgaaagccggcgtgaacatggagcctgtgacccttgacactgagatggagaaaaagagtgaatctgtggctgttcgggcctcggctcatttcggatacagcgatgggccctggtatgcaatgaactgacatcctccgacttcaagatggtaccaatctccaaggtcaagctgcttgtcagcagctgttgacatggtcgatgcgcctgatcctgccgaactgcatgtataggaccctgatacacagccgcggagaccttgggtgagggtctgatcacttcagttccctctctcatgctcgggcgcgtccccaatgacgctctggtgcctactgacgatgggcccacgatattccgtctccctagctgcagatctgctgtcttcttcatgaatggcatcgaga

SEQ ID NO: 144084 - DNA, 221 bp, Zea mays
  Clone ID: MRT4577_62887C.1
gtctgctgctgttttgaaaattcttataaatacggggtctgtgtaacgagcaacggagcgcggccctcccaagagagcgttctataatgaaaaaaatatcctttgtgagaccaaaaaatacaaccagcacgatttttacggggccaaaatgccccataccccagggaaaacaaaaaaacagtacccgccgctcttggcgggggtccgggtcctcatgtact

SEQ ID NO: 144085 - DNA, 510 bp, Zea mays
  Clone ID: MRT4577_62888C.1
catgtctattgtgaataaacaggagatcatatagaaatgaatgagagggatgttatcaaaaggagaagatttcatgaaatacgggtaagaacggaaaccgcacagcaagagcagtacaagaacccggttagtgttatgtgactatatggagtgagtgatgcgatggacatggttgattataatctgatcagtgcttcctctgcagcatacttgacgggttacaatcttgaatgacgaaacggacaggagatggattagctataaatataaaaaggtacagcccatttacggcgacgctaataagtttaaccacacccacgcgctgaaggacattaagaagctaatcatgtactaaatgacacgtgtggaccggtacagtaagatgaaaggcgtggtgtatatgtactggaagaaagcgcgcttgagggagatgaagaacgttgtgaacgttgtcggtgaacaatgattggagtcctatgactgggaggagcaggcggagttcaagaagat

SEQ ID NO: 144086 - DNA, 486 bp, Zea mays
  unsure (1)..(486): unsure at all n locations
  Clone ID: MRT4577_62889C.1
cgtgcgaactcaaacagctcgcaagagggatctcttatatggaagggaaatgggagagtatgcgtggaagagatgctagtnggcacacgtgacttgagttccaacagtggtagcatacataggttctgactggacacacgttctgttggatccngccgtatgcgagcaattctatcatgtcttgtgagagacgtggatgacatctcaatgtgacaatgtgtggaggtcccaatgcaagccttacattttctacatgcggagaatgatgtggatatggttactgccccatattgtatgcctgccatgactggatatgatctcctaatgcaggtgtaggactcaccaagactaaagctcattgcagcggtggtcatgtctagtgcccacatgcctcatagaaggcaaactggcgtggatcccactgcattggatgacctcatgaagcctagcaaagctattgctgcgccaggtatcttgagctgtatt

SEQ ID NO: 144087 - DNA, 167 bp, Zea mays
  Clone ID: MRT4577_6288C.1
tatgacaactcatgcacgcgtaccgccacttgttatctctacagcggcacgccgggttatttgttcttttggtcacgcaccttgcggaggcggtcaaacaactaatctttggggctggaatcctccataaaataacgatggccctcaagggccctgatttcgccaaa

SEQ ID NO: 144088 - DNA, 1139 bp, Zea mays
  Clone ID: MRT4577_62890C.1
gccggccgggccgggacaccttgagtgtgccaacattaagaagacatataagacaccccatatctgcaagagtgacaatcctgatgctgcctggtacacacagatggaagcctgtgttactccactgcctgaagtgagcaaccagggagaagtggctgggggagcggtggagaaatggccagagagggcgttcttggttccccccaggatcaaaaggggcatgattccaggactggacgccaagaagtttgacgaggacaagaagctttgggagaagagggtggcctactacaagcgcaccataccaattgcagagaacaggtacagaaatgtgatggacatgaacgccaacatgggtgggttcgctgcttctctagtgaagtaccccgtgtgggtgatgaatgtcgtccctgttaactccgaccgggacaccctcggggcaatatacgagcgagggttcatcggcacgtaccaggactggtgcgaagctttctcgacgtatccaagaacctatgacctcctgcatgctgacaatctgtttagcatctaccaagacaggtgcgatataactggcatcctcttggagatggacagaatattaaggcccgagggcacagctatcatccgcgacacagtcgacgtgctcacgaaggtccaggcaataaccaagcggatgcggtgggagagccgcatcatggaccacgaggacggccccttcaacccggagaaggtcctcatggcggtcaagacgtactggaccgccgaagccgaggaggagcactagcacacgagtgacacggagctcacttgaaagcgtgaaccaagcctgttctactaccggtcgagagggatggcgtcagggttttgcgtctcagtgtagtatgtatgtccctttcaccttttctttagttctttgtagctagctacaatcagatgggaaggtaagggagagttttggggggtagttgagatacaagacgcggtttcgtagcaggggaaggtttcgctggtcttgcgtaggttcctggccctgttccacgaggggttgaactaggttttagtttgtaatacgatggcaccgagcaggcagtgttactctcgtatattggggtgaccataatagtaacaggtatttattc

SEQ ID NO: 144089 - DNA, 2660 bp, Zea mays
  Clone ID: MRT4577_62891C.1
gtggccttattcaacacccccgctttctttatttatgaatgaaaggttagctgggggcgccgctgacaacatgtgagcgtgttcggcattactccacttcactccctccctccctcacctctggctcatcagtgcctgcctcactaacctcaccattactgaaatgcagagctcgcataaataggcaggacccgcggtgctactctcctgtccccttccggccttttccccccttctggagcttggggggaggcactctgcaccttcgtcttcgtcttggcgtcctccagcgctctgccttcctgagctggcttcttgtccgcaggatccatggcgaaggactacccagcttctccgaaagctcagcagctgcaggaatccaagaagcagcgcctgacatacatcctcgtcgtaagcgcgctctgcatcgccttctacgtccttggcgcatggcagaacaccacgcttccaaagcccataggcaactcggcgatcacccgggttggctgcgatcccactgccgccacgacacagtcctctggctctgtgccgtcgtttgggccaggctccggcgaggtgcttgacttcgacgcacaccaccggctcaccatcaacaacacggacggcgatggggaactgcagcagttcccggcgtgccctctcaacttcagtgagtacacgccgtgtgaggaccgtaggcgcgggcgccggttcgaccgaaacatgctagtgtatcgggagcgccactgtcctggcaaggacgagcaggtccgatgcctcatcccagcaccgcccgggcaggtacaggacccccttcaagtggcctcgtagcagggactacgcctatttcaacaacatcccccacaaggagctcagcattgagaaggcggtgcagaactggatccaggttgagggcgacaagttcaagttccccggtggtggcactatgttcccgcgtggtgctgatgcctacatagatgacatcaataagctcatctcgttatcagatgggaagatcaggacggctgttgacacaggttgcggggttgctagttggggagcttacttgctgaagaggaacatcatcgccatgtcatttgcgccgagagacacgcacgaagctcaggtgcaattcgcgctggaaagaggtgtccctgccatcattggtgtgatggcgaagcagtggttgccttacccatctagggcgtttgatatggcacattgctcacgctgtctgattccttgggatgaacacgatggactgtacctcggccgcgccacgctgaagtcgataggattctaaggccaggaggatactggatcctctcgggacctccgatcaattggaagacacaccacagggggtgggagaggacgaaggacgacctcaagcgagagcaggacaagatcgaggatgttgcgaagagcctttgctggaacaaggtggtcgagaagggggatctgtccatctggcagaagcccaagaaccaccttgagtgtgccaacattaagaagacatataagacaccccatatctgcaagagtgacaatcctgatgctgcctggtacacacagatggaagcctgtgttactccactgcctgaagtgagcaaccagggagaggtggctgggggagcggtggagaaatggccagagagggcgttcttggttccccccaggatcaaaaggggcatgattccaggactggacgccaagaagtttgacgaggacaagaagctttgggagaagagggtggcctactacaagcgcaccataccaattgcagagaacaggtacagaaatgtgatggacatgaacgctgcttctctagtgaagtaccccgtgtgggtgatgaatgtcgtccctgttaactccgaccgggacaccctcggggcaatatacgagcgagggttcatcggcacgtaccaggactggtgcgaagctttctcgacgtatccaagaacatatgacctcctgcatgctgacaatctgtttagcatctaccaagacaggtgcgatataactggcatcctcttggagatggacagaatattaaggcccgagggcacagctatcatccgcgacacagtcgacgtgctcacgaaggtccaggcaataaccaagcggatgcggtgggagagccgcatcatggaccacgaggacggccccttcaacccggagaaggtcctcatggcggtcaagacgtactggaccgccgaagccgaggaggagcactagcacacgagtgacaccgagctcacttgaaagcgtgaaccaagcctgttctacacttctactaccggtcgagagggatggcgtcagcgttttgcgtctcagtgtagtatgtatgtcccttttcaccttttctctagttctttgtagctagctacaatcagatgggaaggtaagggagagttttgagacggggggggggggttggttggtcctctagttgagatacaggaagcggttttgtagcaggggaaggtttcgctggtcttgcgtaggttcctggccctgtttcacgaggggttgaactaggttttagtttgtaatgcgatggcaccgggcaggcattgttaatcgtatattggggtgaccataatagtaacaggtatttatttagttttcatctgaaaaaaaaaagagaaaaggcggcc

SEQ ID NO: 144090 - DNA, 625 bp, Zea mays
  Clone ID: MRT4577_62892C.1
gcacgagggcggccgcggcgtgctggacgagctggagcgcagcctcaagctcagcgcctggcacatggagccctcgcggatgacgctctgccgcttcggcaacacctccagcagctcgctctggtacgagctcgcctactgcgaggccaagggccgcatccggaagggcgaccgcgtctggcagatcgccttcggctccggcttcaagtgcaacagcgccgtctggaaggcgctccgcacggtggacgccagcgaggagggcaacccgtggacgccggaggtccacgtgctccccatccacgtgcccagggtgtcgcccatcgacgagaccgcatacacgttccctgacggcgccacgtacaaggtctctgtctcccatgcctgaaataatacatatttacatgattgatttctcatcatgtaacttataatcgagataatgaagaagaagaagcagcagctagcagcagcgccgttagtaggagtattagttattagggcttgatttggttactctgtttgccgtcatttgcatccacattgcatttgcatgtggtgtacgtagagctctatgaactcacgcgccaagaattattgatttccacgattcatctgctaaaaaaaa

SEQ ID NO: 144091 - DNA, 182 bp, Zea mays
  Clone ID: MRT4577_62893C.1
ccaggcggatccaatagctccagagagcctaccagccccgatctcttcctgtaaccaagcggccgccttgatctctcctgcttgtttactggggcccacctactaccatgcatctcgtctgccctctgtggggcgggggagcttcttgcctcccccgcacgttgttgctcggtctcccagca

SEQ ID NO: 144092 - DNA, 611 bp, Zea mays
  Clone ID: MRT4577_62894C.1
gggtaccccgggcccctcctcgagttttttttttttttttttttttttttttttttttttttttttttttttttttttttttttttttttttttttttttttttttgaccaaccaccggaaaggacccctaaatttcttccccgactagggaactaaaagggtgaaaaagcacaccgccacggttaagggggttccccaacaaaacgggccccctctcacatctcccccccgtaaaataaggggggaaaccgggtgttcgcccgcctcttttttaaagggggggcccccaaattttcccgaaaaaaaaaaaaaaaacggggttctacaggggcctccccaaaaaaccggggaaccgaatgcaacggaaaagtggcattaagcacaggaaaaccctaggtgaatttttggagacccttaaagccgtttttcagaccccttattgaatcctgcttggggccccccccaaattttttcctaagggcccccaagagaccaacaaagtccacatgggaatagttggacaaaggtctcttaataaaaaagcacgacccttggaactactccaaggtgggggatgcatgcatgcaagagggcaaacaaaaaccctgtt

SEQ ID NO: 144093 - DNA, 634 bp, Zea mays
  unsure (1)..(634): unsure at all n locations
  Clone ID: MRT4577_62895C.1
aattcggcacgagggtccagcagcttctccagaaacagctgctcatccagctaaacatggcaaggatcatggagctcccgttgcagcaccttcaaatgttagtcatcaccattccatgcctgcaaatattgtgcatggaaaaactcatgcaactccagttgtggtaccagaaaagagaaggcatcaccacttgcctgcaaatattacgaatgtgaaaggacctgctgtttctccctcaaagtctcccatcatccacaggaaagaacatggcattccagttgctgcaccgccaaaggaacattcgagctatttaccacctgcaaatcatagacatcacaaaggttcccctcgtcctgctccacataaaagtaacagtacttctgcaccaagccatggatatcctggtagtactgcacctgcacctgtacgtttgcctccgccaaaaggaaagggagaaggaaattttgctcatgctccaaaccatcccaatcaataccatncaacgtcatattctccaggatcagctctaccacctgcgcatccacctgacattcctgcatttagaaagcccaagattntggcaccagcgcctagtcaatcgctgctaccttcaccaacaaattcatactgcacg

SEQ ID NO: 144094 - DNA, 383 bp, Zea mays
  Clone ID: MRT4577_62896C.1
ttagaacaatgccgagaccgagatgagctagacggttttgacagaatggaagggcctcgcttcggtggtttgcgcttgccaagcgccgtgtggcccacgccaagcttggtaccacgataatacttacaagatatacattaaaggctagtttatatacttacaagatatacattaaagactagtttggaaactctatatttctaagagaatttccaaattccaaaaaaataatttaattttacgtgaaaaaaatagaaattcttttgaaaaatagagtttccagactaaccctattactcctacaaacgcgcgtgtctgggaaatgagtacaatttggactcgcaatgttttttgtactagcaacttctgctttccgcttggga

SEQ ID NO: 144095 - DNA, 501 bp, Zea mays
  Clone ID: MRT4577_62897C.1
aagggcttgcattattttttttcatcatatatgtactatttttattcttttctacgggcggcacactcaataattcatacaagtatagttaggaaaacggtctcatacggaacaagcttcaaacagcgtcactacgatctgtatcatacaaactatgtcattacattaacatagcacacagtttgaaggtgggagtactacgccaaactttggcacaagtagtgaggcttggaaccaaaccttcagcaatcgcttcagggcttagggcagttccttcacctttattggactcaatgccttgggggggcgcagcttctccttgcgtataaacacgacacgcttggggggaccctgcatgatgcttatggccttgaagacaattccatccatctagatcaccttagaaaccgcttgcctcttgtcggtaacaactctccaccatcgattctaatgttggtgtttgatgggcgccgaattgagcgggcatctagccttttaacc

SEQ ID NO: 144096 - DNA, 539 bp, Zea mays
  Clone ID: MRT4577_62898C.1
aaatcccaaacaggggaaaactaaaagagggaaaggaatataaaaggggcccacaaaattaacccagctcggctaaaggccctggggaaagggcctaaacctacaaaccaaggttagggaggtaggaacatgaccaaaaaaatttcaaaggctggggaaaaaaacagatacaatcaaaccagacgtttgcagagggatttattaaaacatccgagcaaaaccccaagctatccagagggggctaaaacaaaccaaccagtttgtccgggtcctgaaccccaaatcgcgggccttgttgcccaacaacaacagaagttacccgcgaccccaggagtccaatgcctttaagggcaaaaacaccccgggggaccccgaacaaaaacccaaaagcgtatgcctcgccagccccacaagggtccacagccacccattgggggggggggaggaatatgggttcacctttcaccccaatgtaggagccatgcatgccggcagtcacagatactaggggaacagaggggcttaaaaattttgggggc

SEQ ID NO: 144097 - DNA, 451 bp, Zea mays
  Clone ID: MRT4577_62899C.1
aaaaaaacgggggggatcgaaccgggagttctggatccagggaccccggttattcctggatcaacatccactacacccccatgggggggggggggaaaccacaatcgactcgactggttcaaaaagccactgccactaccggatcgagcagcccacccacgggcgccgccgccggaagctaaaacaaaacaattgggggggggggggggggggtccccggccttgggggccccctcgggctcaaactggaagggggggacagggaaagcccggcccacccccccgggggggcggaacacaaacttggggccggaggggctgaggaccaactcggaaaaggggacccaaatgaggagctccttggttttcaccccggggagggcgggcatcccccccgggtccaaaaacgccggaacctccctggtgtaccaaacctggttgccgatggacc

SEQ ID NO: 144098 - DNA, 856 bp, Zea mays
  Clone ID: MRT4577_6289C.1
aattcggcacgaggcaaaaccttcccagcaaaagcccggtccttctcagtctccctcgtctccctcagatctaagccaccgtcccttcccccagctccggcgatcaccggagtgcctccgccttggggcacgatggacctcctcatcgcgcagatcaccactgaccttcgctcctcggacgcgctccggcagtcgtcggcgctgctgcaggccctgcagcagtgcgccgcggggcgggacgtctccgcgctcgcccgcaccgctgccaccgagatcctgtcggcaccctcctccgcagtctgcaagcgcctggctctcgacctcctccgcgcgctcccgctgccgccagacctcctcgacccgctcctcctctcctccctccgctccgacctctcctttccggaccccgacgtcgcctcctcttccatcgcctcgtttccatccctgccctcccaccttctcccatcgctcctctcctctgcccatgctgaaatcgctaatgcgctctcctcgcccgctgagtcgctgcgcctcgccgctgtcacatctctgtcctcgctcctcccgcgcgatgacctaacgctcatgtgctccacaaacccctccctcatggcgcatgccaccacgtggtggggccgcctggccgagcttgcgctggactctgcagacgctgtttccgccggtgcgtttgaggctcttgcacggctgttccaggagctagaggggcgccgcatgagccggctagctggagacaagcttgttgatggagaaggtgcgcttgcagtgcgtgcccagtgggcggctgatgccattgatttcatttggtcaaggcgcaacatgctgattgcgcgctcta

SEQ ID NO: 144099 - DNA, 391 bp, Zea mays
  Clone ID: MRT4577_628C.1
aatacagaaccaacattggcagaacaataattttgcttccttatgctcctgggactatctggaagggttggtacgcgaacattgtcccacattgctaacaacgtcttagcttgccttatttcgccaacctgtaacaagcggccgtctttaatgtttgaaaccccaattgaatcaacacctacaggatccaacatgaaatcgcaacaggcatcataccattatcacccttgattgtccaacaaccgtgatccctattacaacaattacctttgaatgcatttggtggcacaaaacataagaacacaacaactacaacaacttgtgctatcaaaccttgctgcatactctcagcaacatcagtttctttcaatcaaacaacttggttgaatgg

SEQ ID NO: 144100 - DNA, 319 bp, Zea mays
  Clone ID: MRT4577_62900C.1
cagccatggacttgagctgagcaggcggtaaggagaagaagggcacggacgggcgcaaggccggctggccgacaaaaactcggtgtcgcggtcctgcagggccgggctgcagttccccgttagacgtgttgggcggtacttcataatggggcgattcgcgtaccgtgtaggcactggtgcctacgtatacctcgccggcgtactgtagtacctagaaggcgacgtacttgatctcgacggctacgctgtaattgacaacgagaatacgcgcatgatcccgcgccacgtgctcttctccatccgcaacgacgaggagatc

SEQ ID NO: 144101 - DNA, 362 bp, Zea mays
  Clone ID: MRT4577_62901C.1
aaaaacgggaagggccggtcaaaaaaaaaatccttcctggcccaaaaggccccaaccccaaagcctgggcccaaaaagcaaaatacaaccccggctccagttccaatacttttctttagcccaggttttcagcccattacaaagggggaataaagcccccccaagctccaatccccctacaattcatccccaaccgaaccttttttttggcccttaacaaaatccataccttggaaaactcccgtccctttgaaacttcaaacgggccccaagtttccggcttttttattcaaaagggtaaggggaacccctttaaaggggggggggaagaccaatcacccaggggtttttttttgtttttt

SEQ ID NO: 144102 - DNA, 563 bp, Zea mays
  Clone ID: MRT4577_62902C.1
tcgaggcttcggccaaaaaaaaaaaaaaaaaaaaaaaaaaaaaaaaaaaaaaaaaaaaaaaaaaaaaaaaaaaaaaaaaaaaaaaaaaaaaaaaaaaaaaaaaatttttagggttttttggaacgggggctattcaacgctctgtttttatcgctgaagcggaggagggggctgttattgaacccacccacctaaagcgggggtggccgaaattgcttttggacttctgaggaacccaatggagcctccaaaagcattaatctaggggggtctgctatggaaggatacaaaggcctggatgcataaacaaaatcttatggctgatcaatgcctggaaatcggaaaacacacgaaatttttatatggttttataaaaatgcatgcattttttggaaggttttcctgaaaaaaaaaaaaaaaaaaggggccctcgaatttaaagattttgaacccttaactgggggtaaatagggccctgggggaaaccagggaaatagtggtttccggtgaaaaatggaaaaccgttaacattctcccacataatacgacccggatgcttaacc

SEQ ID NO: 144103 - DNA, 1076 bp, Zea mays
  Clone ID: MRT4577_62903C.1
ccacaccctggactggagtggctgctgctcgtgcccggcgatgagcggcggcgggcccggaggtgcgtgcgggccggactcccgcgtggagaccatctcccggctggcgcagtggcgcatcgataccttcggcccctgctcctaccgccggtcggacccctttaagctcggcatctggaactggtacctgtcggtggagaagagccgctccatctttgtgcgcctcttcccggagcccggccgggtggccaaggagcagccccctctcgcgcgcttcctgctccgcgtctcctgggccggcccgccgcgacgctcctgcgtctcccctggctacggaatcgtcatcggtgtggccaaacgaaggcatggtgcagaagatcgcgagcaagagcgccctgggctgcctgtcgcacatgctggcggactccatccacgcggacgtgaccatcaacacgacggacggggtgctgaaggcgcacaaggcggtgctggcggcgtgctcccccgtgttcaagagcatgttcgtgcacgacctgagggagaaggagtcgtcgacggtggacatcggcgacatgtgcgtggagtcgtgctcggcgctgctgggtttcgtgtacgggacgatcgagcaggggcagttctggaagcaccggctgccgctgctggcggcggcggacaagtacgggatcggcgacatcaaggactgctgcgaggagagcctgctggaggacataggctcgggcaacgtgctggagcggctccacgtggcgtggctgtaccggctggagcggctgaagaaagggtgcctcacctacctgttcgtgttcgggaagatctatgacgtgagggacgagatgcacggcttcttccaccacgcggaccgcgagctcatgcacgacatgttccaggaggtgctcagcgtgtggaagcccatgtgaatggaagtgtccctttccacgcgagctgtgtgtgtgtgtgtgtgtcgtgcttgttcagtcagcagtgtgtggagagcatgctggttatgcatatttgaaacgaaaaggatgctcagaatttgaatggaagctaaattatac

SEQ ID NO: 144104 - DNA, 918 bp, Zea mays
  Clone ID: MRT4577_62904C.1
gggtttcttaaatcaatcgatcaatcacgcgcacaagatttggcaataaatcgcggaattcccaacgccgcaccttcaccgccgggctccccagtccaatccaacccaaccccagtccggcgacggttccgggcagcgcgcgatcggatcgtcgcgggttcggcttctcgtcgaacggcgcggattcctgcccccgatcggagggcgtcgggtgcggcgtctcggcgattgatctgttgtggatcgattcttcttggaagaggagcgggatggacggggaagtgatgcggatgggtggggggctgtcggcgtgctcccccgtgttcaagagcatgttcgtgcacgacctgagggagaaggagtcgacgacggtggacatcggcgacatgtgcgtgaagtcgtgctcggcgctgctgggtttcgtgtacgggacgatcgagcaggggcagttctggaagcgccggctgccgctgctggcggcggcggacaagtacgggatcggcgacatcaaggactgctgcgaggagagcctgctggaggacataggctcgggcaacgtgctggagcggctccacgtggcgtggctgtaccggctggagcggctgaagaaagggtgcctcacctacctgttcgtgttcgggaagatctatgacgtgagggacgagatgcacggcttcttccaccacgcggaccgcgagctcatgcacgacatgttccaggaggtgctcagcgtgtggaagcccatgtgaattgaagtgtccctttccacgcaacctgtgtgtgtgtgtgtgtgtgtgtgtgccgcgtgtgtgtgtgtgtgtgtgtgtgtgtggtgcttgttcagtcagcagtgtgtggagagcatgctggttatgcatatttgaaacgaaaaggatgttcagaatttgaatggaagct

SEQ ID NO: 144105 - DNA, 555 bp, Zea mays
  Clone ID: MRT4577_62905C.1
gtaccctccgagtcctgccgggaatttggcaaattgcgtccagattccagaatcagaactaaaccaggtgtgatcactctggccccattgttgttgggataaggccctgaggtcctgctgtttcaacagtcggggcactccagcaacttctgaagctctagttgtctaaaatctaaatatgaacaataaaccatagcctgctggcaaaaagggcgaatgccaggatgactcaaagtatgaatatgcacaagagagttgaggacgaaaggtgaagggtacaggtgaaagtcttgtatggttgtattaatatcgcagctcgatgctacttttccgtggagagtcgaagagtaacttggcagttgcagaagttttcaggtgcgcttacgcctcaactgaccaaacagctgtactgatcagagttctgatgcatcagttagcactaatttgaaagcaaggggagccaaacccaggcctcagggagaaaaaacctcataacagcttgtttgagagtaaggggactgaagggactaaaacatctaagggctggtttgataa

SEQ ID NO: 144106 - DNA, 478 bp, Zea mays
  unsure (1)..(478): unsure at all n locations
  Clone ID: MRT4577_62906C.1
ggaaccaaaactgggaaaaatatacaaaccccctcacactggatatgaaaacctgggggcaaaaaaaaaatataggcttccatttccctccataaatatttaacacgggtttgcccaacaataacatttggggcaacaaaaacattgggggcctttatatgcaacaacaatatgggtggggacgggattaaaaagcacgggacaccacctagctagctaggggcagcaagcccaaaaaaaagaacctgctgaaccctacctagctaggccttgggggtttcctcctcggccttggccggctcccccacggcaggggcagggggagccttaacttttgccggggcctccccaaagggctgttttgtaacaactgctgcatcagcaggaggagcagtctccgcggcgggcggggcaagggggncttctttcttttcctcttcttggggctcttccttcttctcaacaggggggggggggg

SEQ ID NO: 144107 - DNA, 1425 bp, Zea mays
  Clone ID: MRT4577_62907C.1
aaggaacagtttttgtactcctcgcctgtgtcgtcaaatcctccacaccctggactggagtggctgctgctcgtgcccggcgatgagcggcggcgggcccggaggtgcgtgcgggccggactcccgcgtggagaccatctcccggctggcgcagtggcgcatcgataccttcggcccctgctcctaccgccggtcggacccctttaagctcggcatctggaactggtacctgtcggtggagaagagccgctccatcgttgtgcgcctcttcccggagcccggccgggtggccaaggagcagccccctctcgcgcgcttcctgctccgcgtctcctgggccggcccgccgcgacgctcctgcgtctcccctgtgcacgagcatcttctgcgtaccagcgatgattttatatggcaagtcgatgcgatgccccatgggcgttttacgattgatgttgagtttctagacctgaggatagccacgaacaatgctacggaatcgtcatcggtgtggccaaacgaaggcatggtgcagaagatcgcgagcaagagcgccctgggctgcctgtcgcacatgctggcggactccatccacgcggacgtgaccatcaacacgacggacggggtgctgaaggcgcacaaggcggtgctggcggcgtgctcccccgtgttcaagagcatgttcgtgcacgacctgagggagaaggagtcgtcgacggtggacatcggcgacatgtgcgtggagtcgtgctcggcgctgctgggtttcgtgtacgggacgatcgagcaggggcagttctggaagcaccggctgccgctgctggcggcggcggacaagtacgggatcggcgacatcaaggactgctgcgaggagagcctgctggaggacataggctcgggcaacgtgctggagcggctccacgtggcgtggctgtaccggctggagcggctgaagaaagggtgcctcacctacctgttcgtgttcgggaagatctatgacgtgagggacgagatgcacggcttcttccaccacgcggaccgcgagctcatgcacgacatgttccaggaggtgctcagcgtgtggaagcccatgtgaatggaagtgtccctttccacgcgagctgtgtgtgtgtgtgtgtgtcgtgcttgttcagtcagcagtgtgtggagagcatgctggttatgcatatttgaaacgaaaaggatgctcagaatttgaatggaagctaaattatacatgatgagacagaaaaaaaaatagtcgatccagatgtgttcaagtctaatagatcttgtgtgggtacgaatggaagcagccaacttgggcttgaatgctccctagttggctgagaaatgttgacattgtttgttctagatgagggttacctggcctgggaaatgttgtagctaaaaaaaaaaaaaaaaaaa

SEQ ID NO: 144108 - DNA, 141 bp, Zea mays
  Clone ID: MRT4577_62908C.1
attcggctcgagggttttcctagcgcatcttcttagcggagagtatgccgaacacacggggccaattgaaaggggttttccgtcaaataccccgcatgagataaactttccatactgatgggcaaggctgggcaatcccct

SEQ ID NO: 144109 - DNA, 306 bp, Zea mays
  Clone ID: MRT4577_62909C.1
gggtacctcgaggccggccggggacacgtttcacaccaaagagacaggaggcacgtcgtgcccaaggagcatggcggttatcggcatcccgacagagcccatctaacagccccgcattcccttctcatggagcatgtcttccgcctccatgcccgagacgccgaccgccgaagcgccgcgacgggccgcgtagagtgcttgatggctgccgcaaggggcattaaccagacttcggaagagaaatatacagaaccagaccgatgggcaatggctgctttcttcattacggggaaaacatgaagacga

SEQ ID NO: 144110 - DNA, 205 bp, Zea mays
  unsure (1)..(205): unsure at all n locations
  Clone ID: MRT4577_6290C.1
aacaggcgggacccacccatatatacacccccccgggacgaggccaccaggggggcacacagggggnncgggcgcgaaaaaccccaggggcaaaacagggggaccaggaaccgaaaccaccgcgaaggagcgaccgcgaccggcaacggacaagaacgacgcacgaaaccaaagagcaccacgaccagaagaccaaaaacccggg

SEQ ID NO: 144111 - DNA, 196 bp, Zea mays
  Clone ID: MRT4577_62910C.1
attgaaagtgccacaggtcataacatgggctgctagcataatatttccgcctggtttgtgctaaacacataccctcgggcacaaatggaccaggcccagttatctttgactacacatattactacccgaacgctcgactttctgtaaaacgtatgttaccctaccagaggtacacaatccatggatgcaaaaccat

SEQ ID NO: 144112 - DNA, 398 bp, Zea mays
  Clone ID: MRT4577_62911C.1
aaaaaatgtgatgacaaaatgcagcatcaaaaacatgggagctaagcagccatctggcggcgcgatggccacatccaaatcccttctttacaagaagatacctacggtcgccgcatcgcgcaattgaaggcagaactcggatcggcgagtcagtcggcattgtgcatggatgaatctgggcctcgccgcccccgtctacgccatgggctgcgtgctccacctcaccgcgtgggcgctcgtggccgccgtcccgtgcccggaccgcggcaacgcgctgcaggcgcaccacctgccggccgcgccgtcgcgcgccgcgttcccgtgggcgccgaccctcctcgccttacaagaacgcctcgccgaggagggcaagcgcaaggacaggcgccactcgtgcg

SEQ ID NO: 144113 - DNA, 178 bp, Zea mays
  unsure (1)..(178): unsure at all n locations
  Clone ID: MRT4577_62912C.1
cttaacaaaattagacagtngcnnatgggggagtgatgtttgtctttgatcccnccnnggaagccaangccatccttaatgccagggtgtctcccactataaagcatactacgagcaaatttaaatttttcattctctaattcatgctcggcaattttaggcattctaattttcaata

SEQ ID NO: 144114 - DNA, 312 bp, Zea mays
  Clone ID: MRT4577_62913C.1
ttctcaacatctagcttcctccttcccttattccactttctcgagtgtcgcggcgaacatatctagtgcttcaaactcgtgagatagtcgtcctaccgcctacgcgatctggctccatccatctccgctcgtaatcggaggaaccatgataacacgccctaccggtcttcagagaacaacaacatcatcgacttcatcacgtatgaggcataaccggaagctcgactgactgacgaactcgggatcctgtgatataatgactgcatctcagccaatcgacttgctagctgactgctgcctcagatcctgtca

SEQ ID NO: 144115 - DNA, 568 bp, Zea mays
  Clone ID: MRT4577_62914C.1
gcacaaaattttgccaacacaaagggttttcccgtttaaactttttttcgggtggacttttttgggtccctagtagtagcatttttgggtcccatttagtttttacataaaacaaaaaaaacttggcccttgacagttgatcacggggggggatttttttaaaacaaaaaacccccccccccaaacgggttttcaacccggccaaaccgaacaaggacatgctttgccaggtttcattggggcccctaaggaattttgggctaatgcaaaatgcttttccgggggatgctcataaacttggcaacaaatttttccaatttaagcaaagcatttgccccaacaggcaaccttttgttatagaaggcatgccaaaagtaaacttcccttttcaccccagtctgaattcccttaaaaaaaagttctacaacctttgggagttttattttaggggggacaaattccaccaaaattttttggagcttgcctcgggccaaaaataaccttttagggggaggatcatccaaaatttttacgggaagttcctccaaaacctcctcccatcctaggg

SEQ ID NO: 144116 - DNA, 265 bp, Zea mays
  Clone ID: MRT4577_62915C.1
tgccggcggagcaccccaccaccgggggcaacaggctttatacggccagtatgggatacagagaatgaccttaggagacatacatacgcttgcctttatccggctgagcgttcttgaattgtatcaagcataaaccgatctagtgaataatcgtctctctatctatgtatctcactgtgactcaggctctctgactctataaacaccctgccaactcaagatcttatgttgcttgttacgaacgaccaacttatataaataccgg

SEQ ID NO: 144117 - DNA, 971 bp, Zea mays
  Clone ID: MRT4577_62916C.1
ccggccggggatggaccacatgaagttggtcactgactaaacatactgggtcccaaataaattatgtgttaatacaaaacacttctataatgatgatctgcaagcgaatcactctcttgttactctaaatgttttcatacaattcagaaagcagaacttgaggcctctcccctacccctatgttctgtttctccacgtgtacggcatccagcaaacctacttccacttccacgcccccgacgcgccgatcgtcttcagcgccgagctgcccttcctcgcgttcgcggggcgcgtcctcgtcgggatcccgaccatcctggccgtgaaatcgtgcagcaaggcgctctccaggtggctgctgcccgtgatgtgcagcaccctgggcatccccatcgtgtcgtcctgctacgtccccgccctgaaaatcgacggcggcagcagcaagagcaggcaggccgccggcgggcacctccagcgccttctctctcacttcccccagaaggcgtacgacgtggacaccggcatcaggttcgtccagtacgccagcctcgcgtggtccgtggttgacttggtgccggccatcttcgcccatttggatttgtagccagctacttaaaatttcagtttcgttttttttttctggaggtctcaataaggccctcctactcgtaagacatgtgtcatcttatgaggctgtaaatccgatgatctggccctcttctttttttgtattgtattgtgtgtatgaatggacgaatggttccctagctgttttcatccagggtgttcagtaagtagaaatcagtagtacatttcttattctttaaattagatatggttattgtcttatatactaggttagagagggtattgatttgtagctatgagactatcgatattgttcggttccatgataagcaccactaagggtctatttggttttggggaaaaaaaaaaaaaaaaaagcggcc

SEQ ID NO: 144118 - DNA, 377 bp, Zea mays
  Clone ID: MRT4577_62917C.1
cccacgcgtccggttgatcatccacatttcatatagccaatgtagacacctatgaagatgtgtaagtcaaaatggatattgaactgatttagagtttgaacaaactggttttcttttctgttactgcacttttttgtggtcctaacttctttttatggttgtagcaagcaagtcaggtgtcttgggaagtacttgagcattagttttatatggaactgctttaaatggttcttcagcggtgttggagattcttgtggtttcgataatttcccttctttgggacttgcagcatttaaaaatacgtaagtttgctatgactgttttgatattcctttatggctagtcggatgcccattccagtattccacatattgatt

SEQ ID NO: 144119 - DNA, 168 bp, Zea mays
  Clone ID: MRT4577_62918C.1
atggacaattagtaccgaccactcgttggatcaagaactgcatcaaggagcactgaccctgtaacggtgaacgggtcagataccctcgcagccaccaatcggagatcccagattggcccatcgcatattaacgcattcgcaggaaccaatactaccgatacccccaca

SEQ ID NO: 144120 - DNA, 231 bp, Zea mays
  Clone ID: MRT4577_62919C.1
ggaatcccggtcgaccgcacgcgtccggcacgcgtgggcgggggtcgggacctgaatcctcaatccgcttcctcaccaaatacgcgacgcttttgcggcgcgctggcgtacccacaatggcgctcaccaccgcctccacggactcctctccctcccgaatcatacgccgcttctcttcttctcaagactctcgccccccttcctcgctcctacatctagccccgcgccgag

SEQ ID NO: 144121 - DNA, 477 bp, Zea mays
  Clone ID: MRT4577_6291C.1
atggaaacgggggaaacccctcccttttttttttggatgcatgaaagggggggggggggttggaacaatgcgtttttagccccgggggtggaaagtttgcctccaaaaccttttgggggggaaaaaaacaaaaaatttttgggtcaaaaccacaccccaattttttatggggtgcccccacataatggggcccccgatttttaagggggggaaaaaatttttttggtggggtttttcgggggggtgaactgtttaaaccacttgggaaactcctttatgtagcgcgggcaattattgtggggggcgacgaaaacaatgccataacgttgggggaagccggggaaccattaaaagttgtccaacaaaaaccaaacaaagaagccttgcacatttgaccccaagtttattgattccttaaaaaaaccaatggggccctggaagaaaataacccttttgtagccatttaaggcatccccc

SEQ ID NO: 144122 - DNA, 185 bp, Zea mays
  Clone ID: MRT4577_62920C.1
gtttcacgttggaccaccggtgctctgcgcacgccatagtcacaaacttgaagctgaacgtcctcctatataagtgcatgacgaccctgcaaagaatgatgagcaagaacaagtatctgtaacccaggacaacgttatacaagaatccactgctacagccatacaggaaaatgcgagaccgacac

SEQ ID NO: 144123 - DNA, 210 bp, Zea mays
  Clone ID: MRT4577_62921C.1
cgaccaaacggaccgggcaaagttagaattaacagacagaagtgtaaccctgaacaaaggcatacgtatcatctacaattatactacacctctctttatacataaaagtagtaaccactgcacaagctagcagccggcactgtttaaaaaaaactatggttaggtacaccgtacacacacaccttacaatgatgctacaatttcctttgt

SEQ ID NO: 144124 - DNA, 802 bp, Zea mays
  Clone ID: MRT4577_62922C.1
ttgggaccctcgggccggccggatttatggctcccactgcttgagagttaaaggctttccattcacgagaagctgcttgtgttactgcttcatcactgggaagggttttgatgcttgatctgatactgcggaatgaggacagactcccatgccgtcagcttggttggcgtggtaatcctgcaaacctgatgatttcagataaatcatccttacccaatttggacaggttggatgatttcaagagctctacagatagtcccaaccaactaattacacattttttgcatagagagaagcggtcacactctttgaatggaaaatttggttcaccagggttggatcccatgtcaccaaaactagaaccattgataaatgaaaaggaaaatgctgaaagaacaaatggcgattttcgcattgtagcaattgatactggtgtgccccgccgcccccctgtggggcgacgtgtcaaagatcatgagaggtaccccaaagttgtggaactcattttgaatagttcggactactcagcaagtatcctatatgaaatttctggttgtaagcttggacatccacgacctgatgaggttacttccagtgattcttgttgctccctttctgatgaagataatgctggagtgattcatgaattccgaggatcattccgtgcagctcttagggacctggaggggttccatctatttcttctccagctttaccaaaaactggatggtgttttgcgagttttcttgtccataattactaaaacctctgaagaatctgacaataatgatgctgccctttc

SEQ ID NO: 144125 - DNA, 386 bp, Zea mays
  unsure (1)..(386): unsure at all n locations
  Clone ID: MRT4577_62923C.1
aaaaaaaaaacaaaaaaaaaaaaaaaaaaaaaggatttttttaaacagnagannaggagaggcaggcaaagaaaggaaaccagaagagaccagacggaaagaacannccggaggcggagagccacagggaggaggagncncgagggacgacgacacagcggaanaaggaacgggagggggcagacgacgncgncgaagcggcagcagcaggagaagggaagacccaaacgagggagccccgagagaggagngnggnaggcaggaagaaagaaaaaggcgagccgagagccanncgcanggaggcggcgaaggaacngaagcggcggangccgccacggagccgcggagacggcgcncaacgcgcngcncncccnccnccccgacca

SEQ ID NO: 144126 - DNA, 377 bp, Zea mays
  Clone ID: MRT4577_62924C.1
gagagcgtagtactggatgatggaacggtagtaggtgttgggaacccagttggccgggatgacctggttggccaccagcgtcttgccggactcgttggtgatgcgcaaggagaagggcgcggctaggcggtggcctgaatccagtcgtcagattgaccctcacgactcgcgcatcgagctccacgaccctgagttgggctctatgaggtccatctgcaccaggtctgcgtaaacttactttaactagactagctcccacaagtacactggattcgacccctgctctgtgtataacgattgcttctgaccagggtaggtacacgctatccattataaatagatgtctatgattgaccaattgcgaactttttaacaac

SEQ ID NO: 144127 - DNA, 1092 bp, Zea mays
  Clone ID: MRT4577_62925C.1
agcagtggtaacaacgcagagtacggggttaaggagcctatattacctttgcacgagcagacgcctcagaagtacaatggatctggtttgcacaaccatcacaactttaggggccgtggaaggggtagagggagtgcgttttcacagtctgtaacagcattcactgaagaatttgatttcacggccatgaatgagaagtttaacaaagatgaagtctggggtcatcttggaaagaaatcgcagtcaagggacaaggatggtgaggtgggagatgatgtgtttgatgaagacctggaggttgaggaaactgataacccagagctatctgttaagcctgtttatgtcaaggatgatttttttgattccctctctagtggaacatttggacgtggaggaccaaatggaaggggcagaccttctgaacggcgcagagtagatacagagacttttggcgaatttccacggcacaggcaaccctaccgtggtggcgcccgaggttaccgtggcggtggacgttcccgaggttcatattatggtggcagaggctatggaaacacagggaccggaggctatggaaacacagggacaggtggccctggaaattcttattctcaccggggctatgggagagattgattatagcagaaatgtgcaggcaaccatacttgtgggtgttgtagtcttttaccacatgtatgatgtatcccttactactggtgcagcggtgagaagtcgttttcccactgagccgagccaaaggtttaatgggctctaaattttacactataagatttaaggattggattaggatcggactctatttctattcatttttaaccggcctttatttagggccctaccaaaaaaaaaaaaaaaaaaaaaaaaaaaaaaaaaaaaaaaaaaaaaaaaaaaaaaaaaaaaaaaaaaaaaaaaaaaaaaaaaaaaaaaccttggggggggggccgggccccaatttccccttttggggggtgttttaaccccccctcttgggccgggttttaaaacgggggggcggggaaaaacctgggggttcccaatttaattcgcttggaagaaaatccccttttgccc

SEQ ID NO: 144128 - DNA, 312 bp, Zea mays
  unsure (1)..(312): unsure at all n locations
  Clone ID: MRT4577_62926C.1
cataaaccgtggcccctccggtttcccatgtgccggatgcggcatcatctatgactactagccccatgagtactacaccggcggcgagaagagtggaatgcttgttcttttttttcagaagaggtgatggggatncaatatttnaacaancaaaacaagcnnncnctatccatttaatgcccccttttcttnntnncaaatcttccaactctannanctttactnnnactnnccnacttcttacatnnnatacattaccatctncttcacctcatnaaccantaccanttcnaataccccacaatatacatt

SEQ ID NO: 144129 - DNA, 1769 bp, Zea mays
  unsure (1)..(1769): unsure at all n locations
  Clone ID: MRT4577_62927C.1
caaattgcctcctggggggcagttccagaccactccagcagtaatatgggcttaagccaacttttcaataaccttctttaccaaccggaatgctccacggggctcttcacgacctcacagaaatgctccgggggctttacaaacctcacagaacgacactttggtccctcatgactggcatggatactatgcgccttaagtggctgccctatttgcagcacctctgctgcttcaccaacaccagattgcagttcccaaatttaatatccagactaatcttctttgcctctgggatgcgactgcagaactccaaccttattgatgccacctattaaagtcaagttcttcagtatcctgcctactacacagctcctgcttctgctaccttattagctccagaaagctcaaagcctcaggtgccaaacatgggatctttgtttactcctgcaacatctcttggtgcaacttttcctttttccaagccagccaacaccggtggctgaaactagtgcaacagtgtcacagaacataacttcatttagtagcaacaaggctactgctcttccaggctcaacactgtcataccaaactgcatctcagtctgtttcttcgactattgccccatctagctcagcacaagtggagatggctgtgcctttgttggcatcatcaggtcaactattgcagaacacatcatccatgctttcatcatcacactccatgcaggcaccattacaggtggctagcaaagaagtcaagccggttgagccaaaggctaaggttgcagaaccattactgcctgatcctttgctaccagacccaccatcacagtctctgcctgaaaataaggagcctatattgccattgcccaaacatacacctcagaagttttcacagtcagtaacaacattcactgaagaatttgatttcacggccatgaatgagaagtttaacaaagatgaagtctggggtcatcttggaaagaaatcgcagtcaagggacaaggatggtgaggtgggagatgatgtgtttgatgaagacctggaggttgaggaaactgataacccagagctatctgttaagcctgtttatgtcaaggatgatttttttgattccctctctagtggaacatttggacgtggaggaccaaatggaaggggtagaccttctgaacggcgcagagtagatacagaggtttaggaactaccctttccctcccttgatttttctgctagtgctttacccatttttattggcgtgcagacttttggcgaatttccacggcacaggcaaccctaccgtggtggcgcccgaggttaccgtggcggtggacgttcccgaggttcatattatggtggcagaggctatggaaacacagggaccggatgctatggaaacacagggacaggtggccctggaaattcttattctcaccggggctatgggagagattgattatagcagaaatgtgcaggcaaccatacttgtgggtgttgtagtcttttaccacatgtatgatgtatcccttactactggtgcagcggtgagaagtcgttttcccactgagccgagccaaaggtttaatgggctctaaattttacactataagatttaaggattggattaggatcggactctatttctattcatttttaactaaaatttatttagggccctaccattctgtgaagaatcatttggatcctaaaaaaaaaaaaanaaaaaaaaaaaaaaataaaaaataaaaaaaaaaaaaaaagggcggccgt

SEQ ID NO: 144130 - DNA, 149 bp, Zea mays
  Clone ID: MRT4577_62929C.1
atcacagctagaggaatgcaatctaagctaccacaacagtgttgctgtctgaaagcgtacaggtcaagctaggacatgagtgaacccctcgaccgctctacgtacaacaagaacaactgactttcatctagcccgctcgatgtgggcaa

SEQ ID NO: 144131 - DNA, 115 bp, Zea mays
  Clone ID: MRT4577_6292C.1
gtccgcgaccgcgcgcggcaggaggtgtgcgtccgcagcgccgacgggtacccgatccggtgcgaggccgagagggaggtgctcggccagtggcgtccaagccgccatagaccgg

SEQ ID NO: 144132 - DNA, 257 bp, Zea mays
  unsure (1)..(257): unsure at all n locations
  Clone ID: MRT4577_62930C.1
cggaatncggctcgaggngtaagnacccaacgacccaccattcatgtatatcaaagcacaagaccaccacagcaaagatttatttaanccatccaccccgcccttctccaacaccntgtacgacccctaccacgagggtactcactttctgcgtcgaaaccccttcaacctcacgcagggagctcacaccgacgtcttccacaccctgtgagagaacatccccgactatgatactcccacacacctgtgtcaagccc

SEQ ID NO: 144133 - DNA, 588 bp, Zea mays
  Clone ID: MRT4577_62931C.1
gacgcctgcggttctcggtccggaattcccgggtcgacccacgcgtccggaggactgcgcctcgtcttcctgaaggttgagaacaaaaagatgcacctggactttccccggagccctctgcgtttttaaggcgtcgggtggagtttgagttcgtaagccgcgttccttactgaatatagaagtcacttctaccttcctcccctggaaaacttgttaccttccattaagtgtttcctacagaaggcatctgtggtggttctttaagctacaaaaaattgcccaagcttgtgtgacatcagccctgtcaagtgtccatgatgctgggccctgagggaggtgaaggctatgtggtcaaactccgtggcctaccctggtcctgctcaattgaggacgtacaaaacttcctctccgactgcacaattcatgatggggtcgcaggtgttcatttcatttatactagagaaggcaggcagagtggtgaggcttttgttgaacttgagtcagaagatgatgtaaaattggctctgaaaaaagacagggaaagcatgggacaccggatattggaggtgctcaagtcacacagaaccg

SEQ ID NO: 144134 - DNA, 538 bp, Zea mays
  Clone ID: MRT4577_62932C.1
cccacgcttccgcggacgcgtgggttctagctgaacagtagcttattgaaagtaaaactcatcatggaagttaagtttacaataaataatcgtcagttttcggtgaatccatcaatagttcctgttgatacgacattaaatacattcatcagaagttatgcaagactaactggaacaaaatttatgtgcttagaaggtggctgtggtgtttgtattataaatattgctggattaaaaacagattcaaatcaaacacgttcaatagctgtaaattcgtgtctatggttggtgtatgcttgtcatggtttgaatgtaacgacgattgaaggtcttggtggtcgtgaatatggctatcatccaattcaacacacattatatgaatataatggtagtcagtgtggttattgctcacctgcaatgattatgaatatgtatagtttactcgagcaaaacaatggaaaagtaacaatgcaacaagttgaaaattcatttggtggaaatatttgtcgatgtactggatatcgacccattttagatg

SEQ ID NO: 144135 - DNA, 206 bp, Zea mays
  Clone ID: MRT4577_62933C.1
ctttgtctctttctctcgtgacctctcggtaagcagaaggtacactgggcctcttccctttccagacaagcctcatgagcagccaggcacagaggaatccgtgttagctaagtgtgtaatttagaaaaaatgataccaaactcaaactgactcttctggtctaagattgggaaccagacctatccaaaggtcactgaggtaagact

SEQ ID NO: 144136 - DNA, 471 bp, Zea mays
  Clone ID: MRT4577_62934C.1
gacagctcgacccggatcatctctgactccctgcagaatcaatcatcggttccacactatctcttccaaatttcgttgataacacctggcaagttttttatcgcacctaaaattctatctgtctgttgtctggcgctgctgtatcactctgaatttttggttctggcccaaatcttgttctttttccggttcttctgatcccgtctttatcctctcaaatccactaaaccactccaaagatagaatttttctgcatccgaagcccagatatttttttccttcggtttgttccggcggcaggggtgcgaaatccctcaagctggcaaccccggcgcggccatggacctccccgagagctctgtcccccgcgcagacaagggcccggcccctcgccgtctttgccccgtcgaccgcgaggagctggtgcgcgccatggcacagtcgctctactcgctcgggtacaggcgggcg

SEQ ID NO: 144137 - DNA, 439 bp, Zea mays
  unsure (1)..(439): unsure at all n locations
  Clone ID: MRT4577_62935C.1
aagaatccagtgtaaaatatcaagggttaaacaccatggtatattttgcaagattccctatgtatcatgtcaagaagaaatagtggactctgcgtcttaaccgtctgtttccttgtcatttttggttcatggtaaccattttctagtttattttatgagtctgctttcgtggtaaggtttaaattaaggtcagtagtgatgtgtaaataattgttgccctagcaacatcacttgctgaatcagcctgttttgcttttcttctaacagtggaaagctgcaaaagaggaacttcgcgacgaagacgaagaggagcctgaaagtgctctggaggcattagaaaggaagcggcaaaaggaaatagaggaatggcggaaacaacagatagctagtggagaagctcanganaatgccaattttgttcctgttcgtggtgattggt

SEQ ID NO: 144138 - DNA, 288 bp, Zea mays
  Clone ID: MRT4577_62936C.1
ccccggcaaaaaagtaaagaaaaattggcatgcatccaagtccaaacggggcttacattacatgcatggggggacaggggtctcccttttttgaaaacaaagggcttctaggggggcaattatatacagggaaggtgtttgtggaagtggaaggagatttaaacaggggggggaagcaaaaattcatgtttttgtgtcagcatccagaaatcccccccccctgaaccaaacaaaagctaaatatttgttccgggggtttgcacctcccaccaaaaatgcctttttttt

SEQ ID NO: 144139 - DNA, 2712 bp, Zea mays
  Clone ID: MRT4577_62937C.1
atgtctccgctcccacgcgctctgccgcgctcgctcgcgttcctaggctgggttctgctgatcctcttgcccgcccgcgccgcggacgccgggccgctggcgaccgagctcctgcgacctcccttcaccgcctctaacatcctgtacgtcgacacaggcggcgcgttcctagagtccacgagcggcgcgttcagggccgccgtgttcaaccccgggaagcagcaggacaggttctacctcgccgtcctgcacgtcccgtccgccacgcttgtctggtcgggcaaccgcgacgcgccgacgacgtcgtcgggaccggtgaatctcacttcgcaggggatcacggtgtcgaagcccgacggaacattgctgtggtcgacgccgtcgcagctgcgctcgcccgtcgtggcgctgcggctgcaggacagcgggaacctgcagctgctgggcgccgggaacgcgaccctgtggcagtcgttcgataccgccacggacacgctgctcccgggccagctgctgcgcgcgggcgcgtacctgtcggcggcgacgagcgccaccgatctcgcggaggggaactaccggctcggcgtgacggccgcggatttggtgttgacgtggcaggcgtccacgtactggcggctgtcgaacgatgcccgctcctacaaggatcggaacgccgccgtggcgtccgtgtcggtgaacgcgtcgggcttgttcgcggttgctgccgatggaggcctcgtgttccgcgtgaacatcggggcggcggcgttccccgtgctgagtctgggatacgacggccggctgcgcatcacgagctatgcgctggtgaactcctcggcgtcgctcggaagcgacttcgtggctccggccaacgattgtgacctcccgcttcagtgcccttccctcgggctctgctccccggcggcgggcaacagctcgacctgcacctgcccgccactcttcgccgcctcagcgacgacgcccggcgcgtgcacgccgggggacggttcagcgctcgcgtcgccggccttgtgccagagcaacaacagcaccgtgtccccgtcttacctcgccctcaagtcgcaggtggcctacttcgccaccaagtttgatccgccgatcaagacgggcgtcaaccacaacgcgtgccgcggcctctgctccacgagctgcggctgcctcgcctacttctacgacaacctcgcccaaagttgctacctgatccaagataagcagctcggctcgctgtattttagctcttctgcttcagccttgggatatatcaagacggtcccttcggcgaacaatgctacaagaaacaatccaagctcgtcgtctgcgaaccgtgccatcccaatcatcctgccatccatcgcagctttcctactcctcgccgtgatcatatgctacttgtgctggaggaggatgagcaagaacggcaagaaaaggaaaggcaagggcaccggcgtcaagcaggtgtacatgggccgtcaaaaggacaccggtagcgcggacgacgacgaggacgacgacaacgtcgtcgtaccgggcatgccgacgcggtttagctacatggagattgcggcgatgactgccaacttcgggacgaaaataggctccggcgggttcgggtctgtgtacaaaggggaactccccggcgtcgtcgaagggctcgttgcggtgaagaagcttgaggccgtcggcgtgcaggccaagcgggaattctgcaccgagatcacggtcatcgccaacatccggcacgtcaacctcgtgcgcctccgcggcttctgcgccgagggctcgcgccggctgctcgtctacgagtacatgaaccgcggctcgcttgaccggtcgctgttcggccgcacggggccggtcctggaatggggggagcgcatggaggtggcgctcggcgcggctcgcggcctcgcgtacctgcacaccgggtgcgaccagaagatcgtgcactgcgacgtgaagccggagaacatcctgctggcagacggcgggcaggttaagatcgctgacttcggccttgccaagctgatgtcgccagagcagtctgcgctgttcaccaccatgcgtggcacccgcgggtacctggcgccagagtggctcagcaacgccgctatctcggaccgcgctgacgtgtacagtttcggtatggtgctcctggagctgatacacgggaggaagaacaggggcgagcagaccaacgacaacgccgccgtcgccgtcgccgccgccggcagcagcgtgcagtcggactggccgtccgggtggagcagcgcgacggcgacgtcttcgccgagtggcgccagcggcagtagcgatgagtacttcccgatggtggccatggagctccacgagcagggaaggcacttggacctggtggaccggaggctagaaggccgcgtggacggggccgaggcggcgcgtgccgtgcgcatcgcgctgtgctgcctgcacgaggaccccgcccagcggccgagcatggccgccgtggtgcggatgctggaaggcaccgtggcccctccggagccgcgcgtggaggcgctcgggttcctccgcctgtacgggaggggccacgccgtgccgaacacctccctgatcgccatggctggcacgtcgggctcggcgggcacgtcatcgtcgatggccggcgtcgcgcagttgactgatacgtcgcagagcgtgtcagcgccaagatag

SEQ ID NO: 144140 - DNA, 1212 bp, Zea mays
  unsure (1)..(1212): unsure at all n locations
  Clone ID: MRT4577_62938C.1
tgntgattttgctgctgctgctctctctctctctctctgtgtgtgtgtgtgtgtgtgtgtgtgtgtgtgtgtgtgggtgcagcgctgaggaggatcggggtgaagggggtggaggtgcgcaagccagagcagctcctcggcatcgactcgctcatcatccccggtggcgagagcaccaccatggccaagctcgccaactaccacaacctgttccctgcacttcgagagttcgtcggaggtggaaagcctgtctggggaacctgtgctgggctcatctttcttgcaaacaaagcagtagtgttgctttcagggcaaaaaacaggggggcaggaacttgttggaggattagattgtacagtccaccgaaacttttttgggagtcagactgtttctcttgcagcttcaaagctttgagacagagctttccgtgccaaagctttcggagaaggaaggagggaatgatacatgccgcggtgtatttatacgggcacctgctatattggaagtaggtccagatgttgaaatattggcggattgccctgttcctgttgacagacccagcattacaatatcatttggggagggtactgagttccttttagttctttaatgagcagtgagccagtgaatatggccatttcttggaaagcaggaagaagagtattcaaaagatcgggtaattgttgcagtgcggcaagggaacatcctcgcaactgctttccacccagaattgacatcagactccagatggcatcgtttcttcttggacatggataaagaatccccagcaaaggcgttttctgcgctctccctgtcgtcatcgtcaagagacactgaaggcctgccaaagaataagccgtttgatctgcccatttttgagtaacgctacagacaagacaaaccaaaagattgaaggaacgaagaaactgaccgtatttattatcgatcatcatttagccggttacaaaaacagccagctgagaatctgtcatactcagccgaaaaaagtgttgtctggtagctaacttgtacgggtcaaaaataatcacgctgtgtgctgtacgcaattctcttcagataaagcgaaacattgtttttctggtgaaaaaaaaaaaaaaaaaaaaaaaaaaaaaaacccaaaaaaaaaaaaaaaaaaaaaaaaaaaaaaaaaaaaaaaaaaaaaaaaaaaagcaaaccacatataaaaaacaa

SEQ ID NO: 144141 - DNA, 200 bp, Zea mays
  Clone ID: MRT4577_62939C.1
aaacagaaagcatcagcctgttgggtaatttcaaaggggtcttgggtgattcattaaacagattcaactacaaactgtattcaactgcaatcattgtccataacactcaaagccttacagattcacacatcattgttaagcaagtaatttttattactcataattatatattgatgtcatcattgttacttaaacattca

SEQ ID NO: 144142 - DNA, 358 bp, Zea mays
  Clone ID: MRT4577_6293C.1
ccgggctacaagtctgcagttctgcttggtgtggttttggcctcagtccttctcggcttcctggacgttgtgtacgcaagggagctcactgaagccaatggctctggagtgaagaataatgtgaagcctgcaggagagcctgggctcaaggatgagaagtggtttggtggtggatacatgcatggtggagggtctggaaacggccagccaggtatacggtggcgggggaaacatgcaacctggatacgggggtggaggaaacattgagcccggattctgtggaggattcaggcgccattactgtggtggcggcttcgggtctggacacggaggggctgtatgtggatgtggtggtggg

SEQ ID NO: 144143 - DNA, 1278 bp, Zea mays
  Clone ID: MRT4577_62940C.1
ccgggtcgttccgatacggccgggtgctgtaccgcgcgacggggacccaaacgtttcgatatccccgtgtggtgtggccgccgccggcggcttctttctccccttccattccgctccccgtgacgtcaccgaccaggcaagcactccgctccaccagagcctcctcgcctgtctgtccgacccacacacctaccggagcgcgcgtcccgaggtcggcggagcagggtcgggaggagggaatggcggtggtgggcgtcctcgcgctgcagggatcctacaacgagcacatggccgcgctgaggaggatcggggtgaagggggtggaggtgcgcaagccagagcagctcctcggcatcgactcgctcatcatccccggtggcgagagcaccaccatggccaagctcgccaactaccacaacctggtggttccctgcacttcgagagttcgttggaggtggaaagcctgtctggggaacctgtgctgggctcatctttcttgcaaacaaagcagtagggcaaaaaacaggggggcaggaacttgttggaggattagattgtacagtccaccgaaacttttttgggagtcagcttcaaagctttgagacagagctttcggtgccaaagctttcggagaaggaaggagggaatgatacatgccgcggtgtatttatacgggcacctgctatattggaagtaggtccagatgttgaaatattggcggattgccctgttcctgttgacagacccagcattacaatatcatttggggagggtactgaggaagaagagtattcaaaagatcgggtaattgttgcagtgcggcaagggaacatcctcgcaactgctttccacccagaattgacatcagactccagatggcatcgtttcttcttggacatggataaagaatccccagcaaaggcgttttctgcgctctccctgtcgtcatcgtcaagagacactgaaggcctgccaaagaataagccgtttgatctgcccatttttgagtaacgctacacacaagacaaaccaaaagattgaaggaatgaagaaactgaccgtatttattatcaatcatcatttagccggttacaaaaacagccagctgagaatctgtcatactcagccgaaaaaagtgttgtctggtagctaacttgtacggataaaaaataatcacgctgtgtgctgtacgcaattctcatcagataaagcgaaacattgtttttctgggaattaaatgcaacacttgaacatggtaatactttccccctctccagg

SEQ ID NO: 144144 - DNA, 300 bp, Zea mays
  Clone ID: MRT4577_62941C.1
agtttcactctaatcaactgatctgcttccggacgacatggccatgtccatcaacctcactgcgcaaaaccattcgttcatggcacacaagaacggcattaagacagttaagctccatcgccatacctctagtaaagggatggacaccaaattcctgaagaatctgtagtagtctacgatgggcatcacaatgattcttgatgctgacactgaggagtatgaatgacagcatggttttgtttcctcagtttttatcacagttccaactttacgacatggggttttgcgaaagatcgacat

SEQ ID NO: 144145 - DNA, 446 bp, Zea mays
  Clone ID: MRT4577_62942C.1
ggccacaaaagaatctgagctttatgcttgtactactaataaatgactcattgggctgatacagacaagatgatgctaaccgaaacaaattccatggaatccaaatataaaaggcgcagaaaacccaacacagaatgcagtaagatctaagcaaggactcgtatttacatttagcaccacagcaatctttcatcaaacctcgaccacgggacactggtgaaagggaaaccacaagagcacacacacacacacaaaatcaagaacgtagcgcttacagcgatcaaattaagcgcggcgcgagcgacggacgtggtagcagtacgtgtcagaagccacggcggagtcaccgggtctcctcctcggcgcgcctcgcggcgccggagagcgcggcgagcaggttgaggtggtggtgctgcgcctgcgcctgcgccattgggacgtaggcc

SEQ ID NO: 144146 - DNA, 451 bp, Zea mays
  unsure (1)..(451): unsure at all n locations
  Clone ID: MRT4577_62943C.1
cattgggtacctcgaggccggccgggttagatttgttaggttcatacccntgttggcttataaaatatttagatgttactccctcagttccaaaataactaaacttatagttataggattagatgttactccctctatcccaaaataactgacctttggtcccaaaatacttgaccttcttacttttcaattcatatttctcttcttttagtacacctttttattttaccaatacatctatatatctatctactctatctctctcctaaatcccacacctattcactcctaaattcatgtgtccaaacctaaaaagtcaaatattttgggactgaggtagtattttcttgttctactttctccaattcaggtttatagttgatagtccaatactccaatgccatcaagtgatcaaatgagttgaaacctgtcaactttcccagtagtttca

SEQ ID NO: 144147 - DNA, 123 bp, Zea mays
  Clone ID: MRT4577_62944C.1
cgggcacgtgacacggagtggcttgagcttctgaggatgcatgtccaccgagcccctgacgcctgtctgtcgccgctcctctaacacgagcgggtgctcatctgacaggcgtccgtgcaggcg

SEQ ID NO: 144148 - DNA, 207 bp, Zea mays
  Clone ID: MRT4577_62945C.1
aacccggcaaaaatggtggagcaaaagggtgggcccctaacaaagggcccaaaagggggggccatacaaattaggaataatttcaacaaacaacatactttttggtcgggaacaaggccatttttacatcctttacaggggggcctttttttaaaggtcgggtggggggaagccccaaagaaaccttctgttttggaaggaccgggg

SEQ ID NO: 144149 - DNA, 230 bp, Zea mays
  Clone ID: MRT4577_62946C.1
aaaaaaaaaaaagtcaagggtaaaaaacaaaaaaaagaggggaattttaaagaggaaatgaaaaaaaaaatagagctctcccttaaggttcctaattccatcctctggctcgcgactttacagctgtaaaactggggaatcccaattgaattcacatgttagtagttttacaacttcatcactggaaaacccgtggcgtgacccacttaaaggtccttgccgaacatttt

SEQ ID NO: 144150 - DNA, 429 bp, Zea mays
  Clone ID: MRT4577_62947C.1
gcagacgcgccgccgctgccgaaatgcaaggaccgcgacgaccagaagtttctcgaactcgcccgcgccgcgcaggccgattggctcgtgtcgaaagaccgcgcgctgctgaagctcgcgaagcgcaccgcgcgcgacttcggcttccggatcgcgcaacccgcgccgtttgccgaggcctgcgcgctcgacgccgcgccggccgcccctgccacatcggcctgacgcactccgcaccacccgatttcgaccgtatcgatgaacgctccttcagacatgccaacgactcccgttatcccctcgcgcctgccgaacgtcggcacgacgatcttcacggtcatgagcgcgcttgccgtcgaaaaaggcgccgtgaacctcggccagtgtttcccggatttcgattgcgacccgtgcatcgtcgatgcggtc

SEQ ID NO: 144151 - DNA, 740 bp, Zea mays
  Clone ID: MRT4577_62948C.1
gggggggggtgggggaaaaataaattagtttataacttaaacatgagcaacccgactatttacatcttcccctcatcgtgttcttcaccccaacatcatgttgcaggactgaacacccaataacttaatgctcttcttcgtcaccattacatcattttgttatcttcctccgagtgccgacgccgcggtttcgaccgttccaagcaagcatttgtacaccttctgcttcagctggtcaacggtttcggccaaaccgtccgcggaagtgtccgcctcgtcctgcagcagctgatcgagccagttgctcgtctccttgagctgcgacagcaggaccgcgatcctcccgtccccacccttgggtttgggttgtccccgcacgcgttctctcgtgttcttggtggtttggccctcggacatgaatcctgattcaagtgcatcctccaggaagctcagaaaccacgaccgcgattctttcctcagaacaatccatgacctgcagatctccttgaaaccgtcctcccgggcccattccgtcttctcactgccctgggcaccttcgggattcttagctgtgtcgcgtgtgccagctttgttctggtgatgatgagatgcagaagctttcctcgacggttttcttcccggtcgagatttttgtaggtcaggagtgtaagctttccagacagcactttgctgaacgataagcctgtgcagctcgaaaaactggtgatgcggacgcgggg

SEQ ID NO: 144152 - DNA, 386 bp, Zea mays
  Clone ID: MRT4577_62949C.1
acccacgcgtacgcagccatataaagcacaaaactataccttcactaccatccaaaacatcatactggctggtcctacttgcactttcttcaatacctgctacccaaacccttttaccacaatactcacattattctatagtatacctactacacccatacctctcatcacacataccttaactatcttaaaacaccaatctaaatacctacacaatccaccactatctctatacatgaatcttaccataatcacacattttccactacaacccacatacatataacatcaaacatatctaccacatttactcaaacacaacatcaggccacaccaacaactacacctctaactatcaaacacaattacctacacttaaaaccacc

SEQ ID NO: 144153 - DNA, 284 bp, Zea mays
  Clone ID: MRT4577_6294C.1
ggtccgggccgtaccacaggtcgttgcccatggtgatccggccgccacctcccgcatcgtcgcggccaagacgccgtttcttggccagggtcgcgccgccgccgccgccgccaatgccagccccctccgcgacgtcgccgccgccgatgctgatggtcggataatactggaataaggactgtgtgatggcgaggaccgagtaacgcacagggccgaccaagaccaccaccatcatagccacaacaaagacagacaatttactgcacaatgatacgagctatcaa

SEQ ID NO: 144154 - DNA, 1720 bp, Zea mays
  unsure (1)..(1720): unsure at all n locations
  Clone ID: MRT4577_62950C.1
attgcttctctctctccctccagaagacgggggagaagcctgccgagccacgcggcaccggatctgacagcctgaatcagaatcagcccgcgcctcccctccgacctgcactcgtttcgctcctctgaatccccccgggccccggcacggaattcccccggcacaccccccaaggccaccggacgccagcagccccgcccccgcccacacctacgtgcgagcgcaatgctggcggcgtccctcaggccggggccttcgctcgcggccttccccggtaccgcccagaggagcccagttcctttcctccccttccctgcccgcctccaccaccggcccgtcctcctctccgcgaccgccgagggaaccggcgcccccgccggccagggagacgcctcggctgccccgctcgacgaggtgcgcctgccgcagttcgctgcggactgggaatccgcgcgcgcgtgcaaggaccaggggaggatcttctcgctgccggtgctgagggccaacagcggcgggctcatcgtcaggttcaactccctgcaggggttcgtgcccaaccctctcctcagccccgcgcactggtgtaaagaccccaaaaggcccatccaagatgttacgaaagacctagtaggaacgtccatttctgtcaaggtggctgaagtgaatgaggaggaaaagaaacttgtcttctctgagaaggatgctagttggtcaacatactcttcccgaataaagattggcgacatctatgatggaattgtgggctcagtgttccactatggtgcatttgttcacctgcgatttcctgatggattatatcatcttactggtcttgtacatatctcggaggtgtcttgggatcttgtccaagacgtcaaggattttctaaacgaaggggatgctgtcaaggtcatagttgtgaacattgatatgacgaagtcaaggatagctttatctatcagacaactggaggaagatcctctattggagacattggacaaagttatccctttggaagctgatcaatcacctaatcgaatgattggtctcccggaagttgaacttctgccaggacttgatggtatatgcaatgaactattgcaagaggatggtataacagacgtacagtttgggcgccaggcattggagaaacgtgtcgtttcacaagatttagagctttggatttccaatgttcaagctaaggacaacaggttcacacttcttgcacgagctgggaggcaggtccaggaagtgtatttgaccacttccctagaccaggagggcataaagaaagccgtgcaaagagtgctggggcgtgttccttgaacccgacacgcagcgtgtagaaaccgattttctaactaaagcattacaaggaatcaaaagtacgagcgaacagcctgaaacatttgccactgtcagtctgtcacaacacccggctaaatttttctctgttggatactacgacaaccaaaaatctgtaaatatttgcagtcctacacgagtaggttaggcaccttgggccctcccttcaaactaagacgttgctaagcagtggttctgtgtatttgctggggtctgtcttttgatgccatgtgcacttgtcatactgtgacttcagttcactgctttgcgcttgcacttggctgaactccccgagtaacttgtgtacatgagtatnactatgtgagtttatgtcagtgctaacgcttactttagg

SEQ ID NO: 144155 - DNA, 323 bp, Zea mays
  Clone ID: MRT4577_62951C.1
agtgtaccagtactgcttgagagggtctgaagaacagagtctttgaggtttgccctatctgatcttcagggcgacggaggatcaagcttacaggaaaatcagcctacgtgctgcacatgtgcagggcaaggaatgtgctcacaaacttttcggtgtagtgagttttaccaatgataacctgagatacctaacgaagaagtggctgacattaatcgaagcccatggttgatgtcaagacaaccaacaactacatgttgccggtttgattctgcattcggcttcacgaagaggcgcccaagccaggtcaagagaacctgctatgc

SEQ ID NO: 144156 - DNA, 725 bp, Zea mays
  unsure (1)..(725): unsure at all n locations
  Clone ID: MRT4577_62952C.1
gattggtatcttttttttttttttttgcattgttgcatagttggatagcaagttctttactgtcacagatatgccgccaagtcacacaaaggttctactgcatatccacagacgaactggttttgttatattaacacccatagtctaatcaattgtattatctttacagtataacagacgtacagtttgggcgccaggcattggagaaacgtgtcgtttcacaagatttagagctttggatttcgaatgtactatcccagtcattttcatagttgcagctcggaggagatgatggatgctataaacttggattaacttgttggatctgactacgcaggttcaagctaaggacaacaggttcacacttcttgcacgagctgggaggcaggttaggtttcttctggtgaccgcaatgatttgttttgttttcagaggagtttcattgtactgctgtcgggccttggctggttcgtttccgagtaaatagaattatatggattgtaattccttcttattacttggcaggtccaggaagtgtatttgaccacttccctagaccaggagggcataaagaaagccgtgcaaagagtgctggngggcgtgttccttgaacccgacacgcagcgtgtagaaaaccgattttctaactaaaagcattacaggaatcaaaagtacgagcgaacagcctggaacatttgccacntggtcagtctgtcacaacaccc

SEQ ID NO: 144157 - DNA, 283 bp, Zea mays
  Clone ID: MRT4577_62953C.1
agcgcgtcttttcaggggaggcccggcatcgatttcgaaggggctacaccaaggccaggatctggtgagcataggtggatggtgcgagcctcggacctacactttgacttcgataatgctgaacaagtacaacccacacataaggaatatgcgaggacatctactgtgcctatttgtatctacaatacagacaagaccagaggttgataccctgttgactatggcacagttgacaaagggagcatgcactatggcagtgcacatttaataccgagatgcagtg

SEQ ID NO: 144158 - DNA, 268 bp, Zea mays
  Clone ID: MRT4577_62954C.1
actaactgcacgatttaaaatgtctgaaggacaggaaggatgagacaattggaaaactgcaaatagatattgggtcactgaaactccagtgcgactacttgtagactttgctgtccataaaggagtccgagaaagataaccttgcctttcaggtgcttgagctgagaagatcccttgagacccgtgaagaaggggcctaggctaatgttcaatattcatacgcgaagaacaatcctgcatactaataataagcgcaggtagcacaata

SEQ ID NO: 144159 - DNA, 139 bp, Zea mays
  Clone ID: MRT4577_62956C.1
agctcacggacacggagtcacggaccgtggctctccgccggccaccaccagcagccgccccaagtagcaaattagcaacccgccgagcaatagcaaccgccggcgtgccggcgccgaccctggcgtccaggagtccagg

SEQ ID NO: 144160 - DNA, 129 bp, Zea mays
  Clone ID: MRT4577_62957C.1
tttgttttttgataaaagacaggatcgcttacttacaagatagatggaaaacaatttgattatggcttcacaaggcttagatctgtttcttgaggccaccccacctatgcttcatgggcagcaaaaact

SEQ ID NO: 144161 - DNA, 1797 bp, Zea mays
  Clone ID: MRT4577_62958C.1
ccatacaatcccgctgcttccgccaccgcctaccctcgcggcctcgcccgtggccacctcctttcctctttccatttccgttcctccgctcccgatccctaaaccctacctaccccaaacccgcggcggctgcggcggcgactgttgggtttccttggtcatgggctgcttcctctcctgcttccggggcggctccaacccgtcgggcgatctccgcgacccgctcgtgagggagagccgcatcggggacgcctttgtcaacgacgagaagaagcttgatgaagcgactgcaaagctggatgtcgaggcggctactgaccacggagtcgacgacgagcttcggagagaggccaattatctcaaatcatgtggcacaatatcacagaccccaccggaatttctagattcaatcccaatcaactcagaagatgctaacgagtgcggcgatacaccgaccaacgtgcagcagacgaaagatgtagtggtagttgaagagaactcatctgaactgctcaactccgatgatcacgatgtactacataagcaggacactgacgaagggaggactctgaggacgggatcagagactcaaccatccttagaagaagtcaagccttcgtgccaccagaacgtggtgagagaccaaagcaccgactccagtgactcgccctatccaacccctctggtgctcaggggtgacatccagactcctggcaccgtatacgccgccgctcacaaggaggcttggaagcctgggaagcgcgcgagggcgttcatctaccctgtcctgcgccccatcgagaacaagatgcagtggatggaactgaaagccgccgagtctcctactgtgctatcacccaaccctccaaaaagaaggaacctgagcgcagcaggttccggcgacaaggctcaccagccgcctacacgttcagcgttcgccggatcttcagagcacggatccttcccaaatacttacagccgtgcagcgcaggacggagtgatgtcgcccgatgaacccaagtgccagaacggcttggaacagcaggacggacgcgaagagctatcgacgcgaagttctggacgcgggaagcgtggtgtcgcaagcctgtctcattggctgaagccatcgtcatcgtccgcggatgacggcagccccgacgacggcagcagcaattttgttggaacggaggagaagacacggtgtggggcgaacgtctctgatgtgcccttctttcctgcgttcgggttggactgggagggggagaccgacaagcctactcctgtgctgcccaaggcgtgggacggcaacggcatcccgaacaccacaaccaaatacaaggaggaccagaaggtaagctggcacgcgacgccgttcgaggagaggctgctgaaggttctgtctgacgagaagcctcggcatgaaaggaggatcagcgggaagcttatccacctcgacgaaaacgccgagtagaggggccttttgcgccgtcctctgcatcaagaaccgtctaaagaatggtccaggtggtggtggccgccagcccaccatatgaactccgtttttcagccgcatgtcacctgtagatagagtttctttcgctgagttatgctctgcactctgcagtgctgcgtggaatgttacaagcatatgtgatgacgtgtcaataaaaggacaaacatgccagtctcatagtctggtttcatgagaaacatgaacatcctcatatattaaaaaaaacctgtgcggtggttttcgtggcctaaaaaaaaaaaaaaaaaactcgagagtgctctaga

SEQ ID NO: 144162 - DNA, 815 bp, Zea mays
  unsure (1)..(815): unsure at all n locations
  Clone ID: MRT4577_62959C.1
ctgattcaaatcccgctgcttccgccaccgcctaccctcgcggcctcgcccgtggccacctcctttcctctttccatttccgttcctccgctcccgatccctaaaccctacctaccccaaacccgcggcggctgcggcggcgactgttgggtttccttggtcatgggctgcttcctctcctgcttccggggcggctccaacccgtcgggcgatctccgcgacccgctcgtgagggagagccgcatcggggacgcctttgtcaacgacgagaagaagcttgatgaagcgactgcaaagctggatgtcgaggcggctactgaccacggagtcgacgacgagcttcggagagaggccaattatctcaaatcatgtggcacaatatcacagaccccaccggaatttctagattcaatcccaatcaactcagaagatgctaacgaggtaagaatctttcatccgcaagcttgtcttaaaattcgccatctgatttttttggggggtgtttacagtgcggcgatacaccgaccaacgtgcagcagacgaaagatgtagtggtagttgaagagaactcatctgaactgctcaactccgatgatcacgatgtactacataagcaggacactgacgaagggaggactctgaggacgggatcagagactcaaccatccttagaagaagtcaagccttcgtgccaccagaacgtggtgagagaccaaagcaccgactccagtgactcgncctatccaacccctctgggtgctcaggngtgacatccagactcctggcaccgtatacgccgccgcttcacaggaggc

SEQ ID NO: 144163 - DNA, 170 bp, Zea mays
  Clone ID: MRT4577_6295C.1
tttttctctacttgctactgtcagctggggtggcggggggggatggtaagaaattgagccctgctggaactcccgctggttatcttgccggagccccatgctgcgtgccatgttaccgacctagctgcagtaagggcgcgattccattcttgacacaccatctgtctgct

SEQ ID NO: 144164 - DNA, 371 bp, Zea mays
  Clone ID: MRT4577_62960C.1
attcggctcgagcatggatggaccgcacagaatgctggacagcccggaaagattcatagggcatgagtgtattatccgactatagaggaaaacaccacctcatctggaactgatattaaagggggtatagtgattcaggaaaagccacctacggttattagaggcaacacctcgagggacgcaatcaatgagccgcgggaattactgatgtgggatatcctcaagttctaccgcacctatggtgcattggcttgcagattggacaaggcaggactgacttgacgcgattccctattgctgaaagagctgatgaggcacggaagcagatagatcttgctataggtattaaagaaactgtgggtgatagtaag

SEQ ID NO: 144165 - DNA, 711 bp, Zea mays
  unsure (1)..(711): unsure at all n locations
  Clone ID: MRT4577_62961C.1
agtacggacgcgaagagctatgacgcgaagttctgaacgcgggaagcgtggtgtcgcaagcctgtctcattggctgaagccatcgtcatcgtccgcggatgacggcagcccngacgacggcagcagcaattttgttggaacggaggaggagaagacacggtgtggggcgaacgtctctgatgtgcccttctttcctgcgttcggcttggactgggagggggagaccgacaagcctactcctgtgctgcccaaggcgtgggacggcaacggcatcccgaacaccacaaccaaatacaaggaggaccagaaggttagttggcacgcgacgccgttcgaggagaggctgctgaaggttctgtctgacgagaagcctcggcatgaaaggaggatcagcgggaagcttatccacctcgaggaaaacgccgagtagagaagagagagagaggggccttttgcgcccttgttctgcaagttggagtcgcccgcgccgtcctctgccgtctaaagaatggtggccgccagcccaccatatgaactccgtttttcagccgcatgtcgcctgtagatagagtttctttcgctgagttatgctctgcactctgcagtgctgcgtggaatgttacaagcatatgtgatgacgtgtcaataaaaggacaaacatgccagtctcatagtctggtttcatgagaaacatgaacatcctcatatatt

SEQ ID NO: 144166 - DNA, 439 bp, Zea mays
  Clone ID: MRT4577_62962C.1
ataatttacggtacatcgtttattgcttttattgagttttttctcttcacgtggcgggtagttccagagagaaatccgttagagctgggttcttgaaggaaactaaaaaagaaaggaggtgttgttgttagcgggatccctaatcaaaactacaccgtacccttgtgtgagggggacggggtggccaactacagcctgtattgtttattgtggcccttgagacctcttgagcgctgggctgacggccggtcaccaattgagaagggtgttcacccctcgtaaataataacaagagggttatggagcgcacactagattgtagagtggccatctaacatgcccggctttgcttggacaccaccgggccggtaaaactgggttttgtggaagtgtaatctgggatccagcgtggctcatacccttttttttttttaatctt

SEQ ID NO: 144167 - DNA, 268 bp, Zea mays
  unsure (1)..(268): unsure at all n locations
  Clone ID: MRT4577_62963C.1
gacaaacacanagacaacccggaagaacaacgaacgacgaccaacacncnngaggaacacagggacccaacggacacgggcacacgcccaagaaaacccgaaacgaaaggaccaaacgggaccgacggcgacaccgaccgaacagcaggacccagagaggaacgcggcgaggccggcgcgccgcccgacggagagcaccagggggaacacgaccacgagcnncaccccgaggacggcgcgcgcgccgaacaaccgcccggggaccggc

SEQ ID NO: 144168 - DNA, 771 bp, Zea mays
  unsure (1)..(771): unsure at all n locations
  Clone ID: MRT4577_62964C.1
ggcctccgcggctccccactcagaaaccagccgccgccgcatcggcctcccaggtaagcagtagcgtccaccccagtcggcggcatgaagctcactccccgcctcacgcgctcccgccgggtgcctttcnctccccctcggccgggccggtnttcccctcggccccgcgcgctgggcgctgccctgccttgcgcctggccttcncgctgccggtcccntgcccggtgcccccccccttgcccgtggtggcgccgctctcccccccttcttccccgncactgtttgctcgcgcccccgccccccgcgctgnttgtcggtgcccctctccccctctcctccccccggtcgccnctgcccccttccgcccgttttgcccccctgcccccctcttcnnngccccccgcggctgccccgcccncctccgcccgtgctccttgccccccgccccnnngctccccttccccccccctttcttcccnccccccccccgccccccctcccctcccccgtccccccccgcttcccctggcgccccccccctcccttcccctcccccccctcctctccccccgcccgcccccttccccccccccccctccccccccccccttctctttccctttttctctcccccccnctnncccctttcccccccctgcccccttttccccctttttccccccccccccnccgccccccttcgcccccccccgttttcgttttccccctctcccccgggnntctttggccgggtcgcctgccccccccctt

SEQ ID NO: 144169 - DNA, 657 bp, Zea mays
  unsure (1)..(657): unsure at all n locations
  Clone ID: MRT4577_62965C.1
gccgggtaatacccgcagcggccagatcccaccttggctactcccgccccggctcctcgccgcaatcaccgcagcggctagattcgacctcgcccggcccatggcacacgcccgagctacccgcgtcccccaaaatccgccccagatcctccatcgtcgacggagtgtgcagcctcaatcttcaccacgcccccgcctccgcctcgcgcccaccgcgtacatcaaggtttgatctgttctgggtttcatgtaggaatcaaggaactagctgaggtctccttccctcaagatgacaaacaaacagaaaaaattaccctcaaggtgacctaaacacaaagggagctacataataccctacaagactagaccagcacggtgcactgccattctgtctgtcattggctatgctaattgtgcaagcgacccccttccatcctaagtgccctcctaccatcggcggcataggatctcggtgatggaagggcaggggcagcacaggatctactgcattttttatgacacagtggtggacattggagacgggttcatgtgggatgccgactcccagctctactaccacgccagggcaatttatgctgggaatgcactntgtactgtgaaatataccggcgaggatccttgcatgatgagtattag

SEQ ID NO: 144170 - DNA, 381 bp, Zea mays
  Clone ID: MRT4577_62966C.1
tctttctttgtctgatgtgatgtcactgaagggcagcaggggcagccacaagccagccagtcagacagtcagccgggggttttacggattttctgctgctactgctactttctcctgctgctgacgcgacttctgtttcttcctaggagggggaggagccaccctcgccgttcgtaagacctccacgggatctccagggagctcctgcgacagtgcataactactccggttaccgtaccctggacctgcgccaagtcccacagcctagagtcgctgatacgagcggacaacgtgatgacgagacagctgtacgatcctgaacgagtaggaccttgtgatcgcgcacctgccccaagctgagggcgagcattcgtgcttatg

SEQ ID NO: 144171 - DNA, 303 bp, Zea mays
  Clone ID: MRT4577_62967C.1
ttctcaccaatgcagaaactttttttgtaaaacccactacctcaaccctgggagctctaatctccaatttcatcacccatcttacctttatcacccttgttcctacaacaaccgttacccctattacagcacataccttagttgcatttatttgcacaaaacatcaattcacaacaacaacaacatctattgctaggaaacaccgctgcctactctcagcaacagcactttctgccattcaaccaactgtctgtattcaactcattttcttatttgtaacaccagcttccattcatttaacta

SEQ ID NO: 144172 - DNA, 803 bp, Zea mays
  Clone ID: MRT4577_62968C.1
aattcggcacgaggttgaggagatgacatgtcggccttcctagaccagttcccgccgtccaaccacgctctgtaccctcctcctcctccgcagctccccacctgtgttttgccagcaggagtaagaatatattcttcagggctggacacagatgatgtctcaacttatccacgtagttatcctatagttttaacagagggagatggctcaaaaatttatgtcagttgtattgcatttcgggatcctatttgtgaagacataattgaggcttaccaaattccggcgaattcgtttgctgataaatgcatctgccttgtgtcccattctcctagtttccaagtccttcgtgatgcccttgaggaaatatttgttctttgtttttctccttcagggtgcagcaagcctttgtgggacataatatctcatatggtgtcacatgtgacattacccacaccaggaaagaatcgtgtcttatttgccattgagaaaattctgcacgaggcggaagctcctccaaaagaatggcttccccatgctgatatatcattccagccattggtgcagtgtctggatgttgataaactaatacttctctttacagctgtcctgcttgaaagaaggatattgcttcgatcaaataagtatactctactgactctagtttcagaagccatttgccatttaatatacccaattaggtggcagcatgtctatattccaataatattctgtagtgggggtgattacattgatgccccaacaccctacatgatgggacttggttgtggggttggcgcatgtgc

SEQ ID NO: 144173 - DNA, 508 bp, Zea mays
  unsure (1)..(508): unsure at all n locations
  Clone ID: MRT4577_62969C.1
gttgttcatcaaaagnaaaaatactggaattctggatttttcaaatttctctcattaaaatattccaaaattaagaatgggtttagctacttaaattcaaaaagtgaatcaaagaatttcagtatctagttattagttaaaaaaaaatatatttattaaaatacaaactaatcatttttgtatttctttctgttaaaataaaagagctctgttgtttcgtaattgattgattggattccaaagaaaacctatatttataggaaattctcgaatattgcttatttcatataaaaggaaatcctaatgactagaattctctaagttttagaatgtcttgtttaagagacttggaattcaattatgcaatagctttctgaacttaattaactatttgaattgaattttaccttccttctttttatgcccccctcttatatgagggcttatcccccataccatatatttatatatggagtatatttgatatataaattgatttaaatagaaa

SEQ ID NO: 144174 - DNA, 316 bp, Zea mays
  unsure (1)..(316): unsure at all n locations
  Clone ID: MRT4577_6296C.1
tgacaaccccgaccagccactatacaaggatattgttccacgcctggttcacgactaatttgcccgtcaaggtacagagacggagagttatcccactcccactgttagaactacaacgcnagtgcgttgctagagaactatcaggacgaaataatccaccattccgaagacagcgggatggangatgtgaaggctttttattgaaaactagaagcacatggatggcctacgagatgcgcacgtactatctgaggctcccaggtagagtttgatgatgggctggctgagaaacgtggccatccaccagctgaagaat

SEQ ID NO: 144175 - DNA, 439 bp, Zea mays
  Clone ID: MRT4577_62970C.1
tcctctagagcggccgcccttttttttttttttttgagatggttagaacattgcttaagacatgcccgccgctagttgggggctgactcccaaactcctgccggcagggctacaagttcaaaggggtaaaaagaggcaattcacacctcgagagtccggcatttatcccacatattgcgctgacccagctgaggcgtgggaattcccttaaacagaacatgccgtgtgcttggggctgggcaatccattgcactttctggctactggaacctgagaaactcgattacgcttcaacacactaggcctggtggttcctctttctggagatcaactctgtacgcttatatcacatgctccttgacttaaatattgccatgccggttgtgacccttatactgctaactagcaatgatccattacactggcttaacaggctcct

SEQ ID NO: 144176 - DNA, 287 bp, Zea mays
  Clone ID: MRT4577_62971C.1
ccttcttagtctacctcggaagccatcttaaaccctcggacataaaagacccatggctcatactagtgactgtttgtgctatctaaaagaacttggcgctgcacacccctactgctactaaaatgggagcactgccaattgattgcatgggtctgcgcattctctacgcctcgccgttgaagccgtactgggtcgtcatttcatatatgcattcactaacaaagacttgtctttgaggacactgacaatacacgaagtcctgcagccggtgcttattggcctctccc

SEQ ID NO: 144177 - DNA, 1120 bp, Zea mays
  unsure (1)..(1120): unsure at all n locations
  Clone ID: MRT4577_62972C.1
ccgggttcaatatgtccaggnacagtggactggtaaaactgaatgatactttttttttaattttgctaatgcaattgatcttacttttgccttgaaggaggtgaatggaaaatatgtaggaaactggccaatcaaattacataagtgcacatggaagaacgagatagacttagaagctttggagaaggaaatacccaaccacagaagaaaatgaaaggggggaaaaaaaagtgtcttcacaagtgaaaattaataattctgcttgttcatcgtctgtattatgcttaattgttagggtccgtgcatgcacgtagagcgaaacaaagtgcatttcggctcctactctcctagccctcctaccactggcagcactgtataggcataaaaggcactgcgctcatgattgctggctccccgtatcgggcagttagacttcctcctgcgttctctacgaagctagcaaggtgggcatgattgctggctccctgtatggggcagttggacttcctcctgcgttctctgcgaagctagcgaggcaggcgacagcaggcacttctccagtgtaggcaatactgggttcaaaggtcattctccgacacgctcgactcgtggtggcgtcacacattggaccaggggcggtgctcgaggacgaaagcgctcgccatctacaactctacagggctgacagagtacgatccggatggggtggatgcgagggcgatcaaagagatcattgagggggttcatgtgatcaggcttggcaagtatagactcactaccaaagaagctacgttcgatggattagtgcttagtatcctacaatgacttaattcagtatcctatatttctgtattggctaattacacctcttaaaagcttgatttcaacttaactcaatatcttatatttccattaggttagaagccaaccattcatcaatcttggataacactgtatccccatgttacagggtacaaccttcttgtgtgattcgtatcctagaggttaatatgtgacacggtcttagtgattctgtttacacattctagacaagaatttggatgtctcaaccggtcattacaaattcatgattccgttaaaaaaacccaaaaacaaaacc

SEQ ID NO: 144178 - DNA, 424 bp, Zea mays
  Clone ID: MRT4577_62973C.1
aaaaaaaaaaaccccccccaaattttttggcccggggccccaaatccaaaaagttgcaccccttttttccctttttcccccgccggccaaaaaataaacggttaaaggggccccggggaaaacaaaccccccctttgggggaaaaaaacccctgggttttttcgggaaaaaaatttcctcccgggggaacccccggtctttaaattttaggagcccctctttttttgccccccgtgggttttgtaacccccgggaaaatcccccttgttttgaaaaaaggggggccccaaaatttcgggtacccaaaacaaacgggagggccggaaagggttttcggcccctggtcctttaagggggtgaaaaattttgggtcccgggggggcccccagggcagggggggggtccaaacccttttgtgggcccc

SEQ ID NO: 144179 - DNA, 638 bp, Zea mays
  Clone ID: MRT4577_62974C.1
aaggaggtggtagcacggatgaactttccttctctatggcactgttatatccagggctcggagatgggtttcccttctgagaaaccttagataaaagtgccatagagaaggaaggtggtagcacggatgaactttctcttgcgctgtatgaaatgtcctctctgccagaatttcttccagttctttctgtcattcctgagcttccaccggagtcccaacagcagttgcttcttctgccagcggatttaaccaatcgtattttatctcgggctgtcgcgagaaccattagaagactgttcatgtaaagccaaagaaagagtttatgcaaaggtatatgtacaattaaacaaacaagggccatatgttgtgagcatccttttgctcacatacaagcaatcagtttctgaccatggtcttctcggtaagaaaactttccatctttagcaatgcctgaaagagttgaggtgaaaatctcagttagataggtagacatagttgtgaagaccaattctgctaagacagaacaggaagaaaatagaatttcagaatacctcaatggcgatggcactaggtgtaagtatagtgacatcattatggccttgttttaatgcaatatctgcatcataaagaatttggtc

SEQ ID NO: 144180 - DNA, 668 bp, Zea mays
  Clone ID: MRT4577_62975C.1
aattcggcacgagggaaattttctcttctcgacaccgtgcccgcaattctcccctacccaacaatcccctgaatctcgcctctcgctcccgtctttctcctttctctcttcgacaccgtagccgccacgccgacctcccccaacaatcccctgcatccacgcgaggacgcggagttgttcgtgcagcggcatcttcctcggcggaaccccgcccccgcgcggccatctgttgcgcccctctccgcgccgcaaattcctcgtctcagaagtcacgctcgagctccaccgccacgccgccgcccgcaacgccgccgcccgccaccccacgtgatggtcgcgtccgccgtcacacatcagtcccaaacccatgcaccgtcgtccactccccacctatcccactgtcacgcccgccgccgagagccatcgacgacgaccatcgaggtctgcgtccccatgtttgcgggcaggcggagatctgatctgctctcctctgcttcgccgctcgacggtctcgtcgtggcggaagaacaagcagctcgccgtcgagtgattccatgcgtcccgtcccctcgtcggcgtcacggctgcactgacgtgtgcgtcaccagcgggagacgagggcaggtggtggtggcgatggcgtctgccgacgcgcgcttgcggggatc

SEQ ID NO: 144181 - DNA, 186 bp, Zea mays
  Clone ID: MRT4577_62976C.1
tctaaatccaacgtacaataacctcaacgacagctcagaccacattgactgaacccttaagtatgacatatgacataacaaatctgtactacagtgtcctcctccctgcctttagaacatatcaaaacaaacacatgcactcaccgattatacgacacaagctatgcctaatacatcaacgatcac

SEQ ID NO: 144182 - DNA, 609 bp, Zea mays
  Clone ID: MRT4577_62977C.1
tttttttttttttttttttttttttttttcgaaacatgaggccaacaactgagcattactattccatatctttcacatttacatccaacaacacatcatcctagcacttccacgaaagcattagacaacaccaaaaacaggggagttagcatttctatttcgccttctccacatctacactatgcaacgggcgccgcaaaccgaccatgctatagtttcacagctaagcaaaccgatcatgttttagactttgcacacccactctaagacccatgcatcctagtcccctagcaaagagagggcgccggactagctagcacgaccacagaccacagcacgaaggttagacagaacgtttcacctccgtgatggaggcggttgcaaattgagcctctggatggcgcagaagagcttgcggcgtgctccgacagcaccaatgcccatgtcccggaggtcgtccatagtgagccaggggagcacctcagcatccacctcgtgcgcctcgaacgccgccgggtagcgccccatacccatcccccatagccagctcggcacgtccaccacttcctcctgctcctccatttccgtttccgtctccatctccgaatc

SEQ ID NO: 144183 - DNA, 125 bp, Zea mays
  Clone ID: MRT4577_62978C.1
gctaaaccttttgtttatattgggggggatagcacaaaatatcgggggcttatcgaatccgccccattgccgaatggtttattgacaaatgcccaatgacggccttgtacaaaaaaagggtggtt

SEQ ID NO: 144184 - DNA, 250 bp, Zea mays
  Clone ID: MRT4577_62979C.1
attcggctcgaggtgagaaactttgttttctaggggccacttttttcatcttagcctggctgcccataataatgcggcagaacatggtactacgggttcatatgaagaaggcactgcccacatattgggggaggcacggtgctgccaaggtcatgcttagcatgtggatgaaacattacctgggctcagattgacaagttcatcatgcaaagctgtacagatcatcgcccggatgaattaactgataggt

SEQ ID NO: 144185 - DNA, 600 bp, Zea mays
  unsure (1)..(600): unsure at all n locations
  Clone ID: MRT4577_6297C.1
tttaaatattaatagagctcctgcagagatctgggggggggggggggggggtgggggggggggggcactacccggcgagctgtagcgaacgagagtagactccgcgacacgaagaggcactcccactacaactcggataaagtgccaagtggcaccaccaatgcactcatgggtgggacggtaaactcaccaactctctgaatcccgacgaggacttgtatcccggtcatgtgacggtaggttcaggttacgatgacgagtctaaggatgacgatgactcatcagaacagagtggcttggaggacaacaacggcgacaactggggctagatgggagagggaggcatagtgggaggaggggtaatgggacttataggaggttagtgaatagaagactagtagggacgaagagaagaaagaatactggatccagactagcgagaggggagaggagttgctgaatacgaacggatgtagctcattgaagtagagagaagaagacgggtaatcgcagttgttcccgacaactctaactctaactactcgtcaaagtcgtntggcagtcacatacactttcacggcgaacgtcgtataagtctag

SEQ ID NO: 144186 - DNA, 1552 bp, Zea mays
  Clone ID: MRT4577_62980C.1
gtgattctgctgagagatctttgactaacgtcgcgtcagaaaacagagaagataaaatttgccatgaaaacactagctctggtgatgtctgtgctgaaccaaaagagtcgatgcttcttcaagaaaatggaataccagttgggactggaaacatggtagaagagaaggttgatgcacaaccacatgtggttgtccagcaatataaggaagaaactaacttatctccgttaacagatgccctcaagaagagcttgatgcaggaaaccaccttatctccatttgcagcttctcacaaggatagcttgacgcaagaggatggcttcatgcaagaagctgatttatctccgttgactgctaatcacagggatagcttgattgaagaaaccaaattgctaccaacaacagcttttcacaaggtcagcttgattgaggaaactggcttaactcggacaatatcttatgagaataacttgaagttacaatttaaggaaggaacaaagatcggtgatatcgatatgctgccacaagatgtggacctgattgagttgcccgatcaaaggaaaataattggtcatgatgttggtgctgaaactgtaatagaaatggaaaagggaaagctggatcaatctagctcactaaatctatccgatcttgacctagttcgtggtacagaggttgccgctgtacacaattgtccagcgttggtccagccatctgcagctggatcttctgcagagtcaaataataaacagcaagaaggtcctgaaacttttacaggcgccaatgccagtcatacatatgatttatgccagattccattagataataaggatgttcaagtaattgatatagaatgtggcacaccagttgaagttgatggatttgatttgtcaaagtcaaagaatgagatgatgtgctctagcatggatagcatgatggaccccggccatggaatacatacggatattcttcctggtattcaagatggatacagccttgcattttctgattttcttggttctgatataccatgctacccatcaatgcaatcagatcttcatgctggaataggtgccaacgactctgagggcattgctgtcatggatgatccaatatatgggtccctctctgatattggtttcatggacgtgtgggggcagcccactcaagactacgacaaattcttctaggctgccgccgggggccgaggttcagtgatttgacaggagaattagttgagttacctgagtacaggcgagaataaatagatcgggttatctcagagaaatgttgtaatcattcctaattgtagagctagagaaactctcttttttttcgatacccatttcgacggagttactgatccaaagactggtcttatgcgttcaatggtttgagtgcggtattttttcgttttacgtagccggacttgtgtccaccaaagcatcagttgtaattagttgcagtccatgataattcttaatcccgttgttagcccgactgtggagataatttgcaatagttgaccaaaaaaaaaaaaaaaaaaggcatc

SEQ ID NO: 144187 - DNA, 772 bp, Zea mays
  unsure (1)..(772): unsure at all n locations
  Clone ID: MRT4577_62981C.1
gnaaaaccttatgcactctcttgacgcgtccgcttttgtttaagatataattttgtatcatgacctcttatagattgtaggaggggagttttcaaacacgtactaaataatttgttttgctattgatcagaaattagaatctttttgttagttagttctttaagttgttttaaccaagtatgtcatatccactgtttctgatgtgtgtgtgtgtgtatttctggattctatatatatttctaagaaatacctgtgatcgtccctaactgagcaatttatcaataactgaaaaaacgtaaacaaattaagtcttaaattttaaaatagatttttttacaaatccaaatgctacgtctacgtgcaataaattggagcaatcaacatctaaattgataactacttattcttatttgtttccatccattcataatgtgttttatcatgagaataaaattttgggaaatcatgagaactactcagccctgtttcaggatccactctttgatgagatagccctatgaactagtaaagctagtacttccctgaaagaccttttccattgctgaagagataaagtaccaccatcaaagatgatattgtttctatgacaatttgttattttatttctttctgnatgatgtgtatctagctatctgtgacttactaatggtttcttgcaatgttctgatgtggcggtgcttcagtttatctaggtaacttttgttaattcactatcttcatcttgggtnttggggttttgggttaattattt

SEQ ID NO: 144188 - DNA, 846 bp, Zea mays
  unsure (1)..(846): unsure at all n locations
  Clone ID: MRT4577_62982C.1
gcagtcgaaatgtcaaatttatacacactaacacaagttagaactgaattgatatataaaacagagtcttatacttaaaattcagaatttaaaataataaaatgggccattctgggcccttgaaaacagccaaggcggcctaccaggcgggccaggcagcggcctggtggccagcacgccggcccagcctggctggccagcctaaacggcccaactgaggccacgaagcccattagaaataggggcgattaggttttccaaaccctaaccgctccagccgtcgtcttccagggagcgccccagccgccgccagggtgttcggccgccgccggacctgcgccttcaccgcaccgccgccgagcgcgctcgcgtcgaggagcgctcacgcccaatccacgtcggctgggccgtggccgagccgccaggagcgctccagccgaggagtcgcgcccgaggaggaccgccgtggtccgccggggcttgccgaggccggccgaccgggcacgcgccgcgctgggatgcatgggtgctggtgctggggtcggaccgcgcccgcccctgcgctaggtccgaggccgaggccgaggccggctgtgcccttgcccggaggcagagcatctcgctgctcgtgcccacgtggaggccgagcaggcctgcttgcgcgtgtgggggccgtgggggcccgcctgccctctgccagagtcgatgccgcgccgcccgggtagcgttcgtccgccgtctcccgagggctagctgcacccgcgccggggccaaccgctgccgcgcccgagcgtcttcgggggccggacgcgctgcgtcngcgccaggagccagcagcacccggcg

SEQ ID NO: 144189 - DNA, 542 bp, Zea mays
  Clone ID: MRT4577_62983C.1
cgatccacacttccacagtcgccaatagtggctcgccggaacggtcgccgccgggtcctcccccggggcgcgcgccacggtgtattcgcacgcgcgggtagcctagcctagcaagcaacagggagcaagcctagactagccgaaagagcagagcgaaccgagggacggagggacagctccgagatccagctccaggtccagcgacgcgacgggtacggaggagaacacgacggagatggaggagaacgcgacggggatggaggagatctagcgacagaaaactgacggcgacggcgcttggggacgaaacccggtttcaacgagactaatactgctctaaacctattaatagagtagtcatgtccattttagagtgttggctatgtccagcttttccataatggagaaatcctctcctgagcctccatttcgtcgaagccgcactcgtcgtgtttcataatgtcaaatttctcttgggaaacggggaaaagaaagcaaaacttgtcggcctttttggtttgaaaaaaaaaaaaaaaaaaaaa

SEQ ID NO: 144190 - DNA, 390 bp, Zea mays
  Clone ID: MRT4577_62984C.1
gtacgcaagctcggaattcggcgcgagggctggccctcgtttgctttagccactgctggcgcgatcgcatggggagagctatagaagatactgctgaggtcagacgcacacgaaaaacgagcagagccgagcagaggggaacatgacggagcgcgggcaggcccgaggggacacagaagactgcgggttaacacggagctgcagccaaggactgcagagggaaattgctgaggtcatgcctaaacgagaggcactagcactttccgggtgggggcacgatcgcacagaccaacagggacaattcgaacaggcagtgcaagtacaggtactactgatccgccccataccacagcgtgaatggccagaggcgagatgtcttccgagaggaca

SEQ ID NO: 144191 - DNA, 907 bp, Zea mays
  Clone ID: MRT4577_62985C.1
gtaccctccgggtctgccttttccccgattctctaatcgcccgcccccacctagtattctggaattgcggacacaaggagatgctgtccgtgcaggaagcccttgagcttgcgtcgtccagctgcggcacgacgatggacgttaccacgtgcgggttcacgccgtgggggcccgagtcgtgccctggcctggagcaggtgatggcggcgtcgacgccggccgcggcagcgaggcacccggaccccgaggaggaggaggaggagcggcgccggcgtcagcgccgcaagctgtcgaaccggctgtcggcgcgccggtcgcgcgcgcaagcagcagcggctggaggagctccgcgcggaggcggcgcggctccgcggcgagaagcgggagctggaggccagcctgcaggccctggcgcggcacggcctcgccgtgcgctgccagaacgcgcggctccgcgccgaggccgccgcgctcgcgcgcaggctcctcgccatcgcgtcgtacgcccagatgccgcagcataaggccggagtcgcccgcgcccgcgcccgcgccggcggcggcgctgctggggccgctggcgtcgctgacgacgtaggcggctggcgagagggacgttcttctgcccggtggaacgaagtctcgcgcccactcgcgctctcgtctcgcgctctcgtctcgcatgctatggtgaactggaaacatgcatgggcagttgggcacacacaccgacggcttgctagtacggtgcatgcagcggtcagccggctagccctatactatcactagtacagagggttccgtgttgacgtgtaaattgcataatcgtgctacgtgtagcttgatgtgaatattatatttatatcacctagaagggtcggagtcgctgaatctacgtcgaatacct

SEQ ID NO: 144192 - DNA, 439 bp, Zea mays
  Clone ID: MRT4577_62986C.1
acctttatttatttatttttatttttttttttttatttttaaaaaggaagggggtgggatgggaaataaaaatgagtcacacgcgatgggatgtaaactaaaaattgggtacaaaaaaaatatttttagttaaaaggcaacaccaacaaaggtgtgggggaaaaaaaaaggggggaattagaagggccatggggttgaacatgaaggggaacggggggggaaaaaaaaaaggaaaaagggggttccaaggacatggggggaacataatttgcgaaattaggctcggaaggacaattggggaaaacatgctggggataaaaaagggggacataaaagttaggggtaatattgggggggaaaaaaactgggatgggtggaaggggataggtaaaaatttgggtgggaatagggagggataccctattatcagggaagaccc

SEQ ID NO: 144193 - DNA, 566 bp, Zea mays
  Clone ID: MRT4577_62987C.1
ggggaggaaaaagggaaagctttcccacccgattttttattattaaacacacaaacttttgaaaacaaaacaaatgggcaggcggggaagggggggcccctttccgggggggaaaaaaaagcaatacggggggcaaacttgggtaaaatttcaaaaaagaaaccctcatacgggggaagacccaaaagcaacagcttggttatagaacaaaaaggaagttagcccgcccaaacaatgggaggggcacaaacaactgaatgatcaccaaggaccggggggtcccccccttacccggagaaattaaagcgggactttttttttgcctgcacttggaagaaccccccggtgaaaaccccggggggaacccctggagcatctcggggtaaagggagcatgccaacctttacccaaacaggctttaactgagcgccattgaaaacatcgggtgaaccccccaactcttcaaaggggacatcgggattcacattcattttcctcgaggggatctggaggattctagctcttgcttcccttgagggaagagggaactcaattttacgggccaa

SEQ ID NO: 144194 - DNA, 1003 bp, Zea mays
  unsure (1)..(1003): unsure at all n locations
  Clone ID: MRT4577_62988C.1
gccggccgggctgggatctttgcgcttggggcaatgacgcagctcatgaggttataccgaggcgcgtcaattgctggttgaaaactatttccaaaccccctctgcggcccgcaagggccccagagaatttctggaagggctccctctaaccagggtaaagcccacatctttgcgcttggggcaatgacgcagcttatgaggtcataccgaggcgcgtcaattgctggttgaaaactatttccaaaccccctctttggccctctgggccactgagaatttctggaagggctccttctctttgtagaggggaaagccctaatttatttttggatcccaccttactggatgggatgcaaacgacaacgtttacagctacgccaagtctctgtctggcccatggtcagtggaccgaatttgctcctgtcggatcaaagacctatcagagccaggtcagctacatccaacctctgggtaacggtaacgccatctacatcggcgatcgctgggtatccaccaatctcgccgctagcacctacgtctggctacccctcaaggttgaaggaaccaaggttacactcagttggtacgactcttggtcaccaaatgtctcaaagggaacctggtccgaaaccaagatgacaaaactcgaaggcgaaaatgccgtgatggctaacgatgcgagggtcatttcttgcaacgagtgcagtggtagcaaagctgttggatacattggtggagacaagaagggtaccctcacgttcaagagtgtcaagagctcgggtgggttaagcaccatcaacatcaagtaccgaaatggtgacacaggttcccgttacgccaactgtttcagttaatggaaagtcgcagaagcttgcgtttctatcgacgaggcatctctcgcagactggnnntgagcccgtgggttcttttgacctgggagagggagacaacactatcaccatttcccacacgacgcttggngccctgatgtcgatgctttact

SEQ ID NO: 144195 - DNA, 133 bp, Zea mays
  Clone ID: MRT4577_62989C.1
atttttattttttatctatctatactatatcttaactacatatccgcctttggggcccttctatttttatacttacccacccattaaattaaatttccctctttaaccaaaattattctcaccactaaatata

SEQ ID NO: 144196 - DNA, 583 bp, Zea mays
  Clone ID: MRT4577_6298C.1
aaaaacacatgagagcctggcttgctggttcgtcaagcccgcgaccgcgggacagacgatatctagcttatcgggcggattggcgtcataatgaaaacgggccaagggaaagaggtgccaggaaggggcggagtcgggcggcatcgcatcgggaatgagtcagcggcggaaacagggcattatgtggtgtcaggaaaattagggtcagactcgtagatgttgtcccagaggatccaacgagaaggctcatgacatggttgttttaggccatgttccaaacctttagagctaattgttagttgattttagctgggttggggcatctaataactaatacttatttgaggggtatagataacaattagttgatccattctaaacctcttagctaattttagccactagctattaattttagaggtttagaataagactttatactttctgaaactttaatttttttacatataacactaaataatcaaggcataaaagggtgtaaaaaattgagggggggccatggcccactttgcccccccccctatggatccgcctctgaccaagacaataaaacttacctctt

SEQ ID NO: 144197 - DNA, 194 bp, Zea mays
  Clone ID: MRT4577_62990C.1
tctgcctcactcccgagctctactgactcccaaatgatcgcccaagaagaaaatggccataagtggagtccctgtgctaggatttttcatcatggctgtgctattgagcgctcaggaatcatgggctatcaaagaagaacatgtgatcatccaggccgagttctatctgaatcctgaccaatcaggcgagttta

SEQ ID NO: 144198 - DNA, 274 bp, Zea mays
  Clone ID: MRT4577_62991C.1
ccctgtatacttccaacttggaaaagaacccagaaacggtaccaacgaaatttattggaggacccctctatccacaaatctactgcgatcattacaattgcctatgatacattgacacacatcgatcaaaacatcaacattctaaatcaaacccagactaaagaaaaggaaaatctctttaggattaattagacaaaacatcatgacactgccttagacacaaattactatcatgccctaccctcacccacatttgtactacagacggtcaaaa

SEQ ID NO: 144199 - DNA, 674 bp, Zea mays
  Clone ID: MRT4577_62992C.1
cctggcgcagccacctgcgaccgcgacccggctagctaacctgcacgcgctgcgtgatgcaatcgctgcacacgcacctgaggatatgtcctacgcgcggggcaacaggtggggggacggccgacggactgctcttctgcaccccatagctcgtgccggacctggaaaccccctgcttgcgaccgcctaccacatgctgctgtcgtaccagacgaagctggcccactactaccccagcgaggtctggctgcgggaacccaccccttacgctccgtgtgccatgttctagttctctgaccctatagatcgccacgaatacgtgctagacccgcacatggaataccttggacctgctgagcgctccagatacccagactgaaagtatagcggactcgataccgctgtggtgagtatgcgcatcgagaagctctgtgagaaccctcatgacaccatctgaaggtgcatggtgataggaagcaagctcctagctaaactcagagaatgctcttaggagccgtaactgatcacggcgggaccaacgcatcgtgccctcgcagcgctgtgaatccctcagcacgcgaagttgactcgatgaccgaagcgcccgaactggctgctgctatacaaaaagacctctgggctcactaagatctagcactaaatcgcagctacca

SEQ ID NO: 144200 - DNA, 303 bp, Zea mays
  Clone ID: MRT4577_62993C.1
tcgtagtaaaaacaaaccggaagaaaatcaaaaaaacggcaaatctataaagttaaagcaaaacttaaacaatagaaaaactaacatcgttttggaacatgcggaggctcggttgcatccaccttaaaatagcacaaagggctgcatggggcccggccttcataccttggggcggccgtttaaggggacccacggttcactccgggtgcccttgaggatcgacttttttcaggcttcccaccagggcaaagggggggccacgcctttcacacggcctgctgggtgaacccctgtgcatccctc

SEQ ID NO: 144201 - DNA, 355 bp, Zea mays
  Clone ID: MRT4577_62994C.1
gctgggtggttttttttttttttttttttttttttttggttttttttaacaaaccaggggaaagaactgagccatttagttgttacagggtacatgccaacgaccataaaataacagtttcctcaatgaattgacatgggaatttttagagggagagggggggattcgtgcaaaacaaaatatattaaggccttgtaaatgtttggtgggagccttatggaggttgtgtaggcgggggtgggggaaatgacatttgcatttggattgggggggggatttgtgggttgaacaccctttatattacctttatcggggatgcctgtgttaatgggagcattagggttgggcccaaaac

SEQ ID NO: 144202 - DNA, 1332 bp, Zea mays
  Clone ID: MRT4577_62995C.1
ggcaggcaaacaccgagcgcagctagcatcatatcatcgtccagagctgcttgcattgcatctcccagcggccgatcgagctgtgatcaagctaagctaataatatatagcctatccatcatatggctgcctctaccacgtcgaggacgaactcgcgggtgaactactcgaacgagatccacgacctttccaccgtgcagggcggctccgcggccgccgccgccgccgccttgttctacccggacagcaaatccatcgccgacatcttcccgccgcaccttgggaagaaggtgatctcggaggtggtggcgacgttcctgctggtgttcgtgacctgcggggcggcgtccatctacggcgaggacaacgcgcgcatctcgcagctggggcagtcggtggcgggcggcctcatcgtcaccgtcatgatctacgccaccggccacatctccggcgcgcacatgaaccccgccgtcacgctctccttcgcgtgcttccgccatttcccctggatccaggtgcccttctactgggcggcgcagttcacgggggccatgtgcgcggcgttcgtgctgaaggcggtgctccagcccatcgccgtgatcggcaccaccacgccgtcggggccgcactggcacgcgctcgccatcgagatcgtcgtcaccttcaacatgatgttcgtcacctgcgccgtcgccaccgactccagggcggtgggtgagttggccgggttagcagtcggttccgcggtttgcattacgtccatcttcgctgggcccgtgtccggcggatcgatgaacccggcgaggacgctggcgcccgccgtggccagcaacgtcttcacgggcctctggatctacttcctcggccccgtcgtcggcacgctctccggagcctgggtctacacctacatccgcttcgaggaggcccccgcagccgccaagcccgacacccagaggctctcctccttcaagctccgacgcatgcagagccagtccgccctcgccgccgacgagttcgacaccgtctgacggcccgcccgcccgcccgcccgaagagatcgagtactactgtgtgtgctccctcgctctgttcaagatctcaggtgggagagagctatagctagctgcgcgcgcgcgtgtgtgctggtaggtacatagtccgtgtacgcgtacctacctacgtgtttgtgttttttgtgtcccgtcggccgtcgcctacaccacgtagcagcggatcggagcagtgtcacatgtttttatgtatcttcggctttgtgccacgtcagagttgcaaaggttaattgatgcaaaaaaaaaaaaaaaaaaaaaaaaa

SEQ ID NO: 144203 - DNA, 922 bp, Zea mays
  Clone ID: MRT4577_62996C.1
aattcggcacgaggctgagcttcccttttcctccgtcccgtcacgcctgattgcctcgtttgtcagtcatcactagccgccacccaccaccaccaccgttgctggcggcagtcactccagtcagcccctcctccctctacgctccccaaaaatcgcgcctcccgagttcgtccgcccgatcaaccgccgccctcgccagtcgccacgccagatctgacgacgacggacctcaccgccgcgccgatcgcttgctctcgtcccgtcccgcacgcaccctcattcgcacacccaccaccactccgattacttcgtacgcgccctccgaattgcgcccgtccgggtgggaagccgacgccgcgggcggcaatgcggggcgtgccggccggggggacgtggtaggggtccgccgtcgccgccgccaccgccgcgatggaggtggaggccgtgggctgcgtcggcgcggggggcaagcgggcgcgggcgaaaggcgcgggcgcggagccggagcctaagcgccgcgcggtggcgatggccgtgccggcgcccgccgccgcgccgtgggcgcagcagcaccctgcctcgcggatctaccgcatctcccggggctccggcggcaaggaccgccacagcaaggtgtacacggacaagggcatccgggaccgccgcgtccgcctctccgtcgccaccgtcatccagttctacgacctgcaggaccgcctcggctacgaccagcccagcaaggccatcgagtggctcatcaggggcgccggcgacgccatcgacaagctcccctcgctcgacaccgccggaagcttacccgcgcacccggccttcgccaaggaccacgccccgcctgctggtgacaacgacgaccaccagcagcagcagcagctcacgaggtccggatgcaacagcacgtccg

SEQ ID NO: 144204 - DNA, 602 bp, Zea mays
  Clone ID: MRT4577_62997C.1
cccggtcaatgcattgatctgacttttgacagctgcacatctatacattacatatgaacacgagagagtatccatgacgaggacgtacagttccaggtatacatgtatatatatgtatactaattaccacttccctaaatacaatgtaaacaagatgatcgatggaaacaaacaaataagcaaaaaaaaaaaaagaggtggcaacgttgacgttgacgtgacggaccggcgcattctactagttgacggccctgcagttccggcggatctccccgcgggcggcgcccgttcgcacgccgacgcggcccatcttgcgcacggcgctctggaactcgtggaggaagtatccctgcctggtgaggcggtggatcatgccggcggcgcggcggtcggcgagcagcgcggcgtcggaggcgaagaggccgcggcccagcttgaggttgacgtagtagtgcgcgtcgaaccgcgcggggctgccggggtccatgggcaccgcggtcacgttgttggacgacgcggttgacgccggcccgcaccgcgcccgcagttgcgccgcgtaggccgcgttcagcgccgggtccgcgcccccgcccgagcgctgg

SEQ ID NO: 144205 - DNA, 1322 bp, Zea mays
  unsure (1)..(1322): unsure at all n locations
  Clone ID: MRT4577_62998C.1
gggtccctcgggccggccgggtccatatccatccgtcccaacccatagagagccagtaaacaccgcgcacgcaaacgcaacagcgagatcgtgtcgagcagccggggcgacttgcgaggcatggacttccaccacggctgccacagcagcagcatccacgcggcggcgccgccgccggcgcggccgtggagcaaggaggagaacaagatgttcgagagcgcgctggtgatgtggcccgagcatacgcccgagcgctgggcgctcgtcgcggcgcagctccacgggcgcacgccgcgggaggcctgggagcactacgaggcgctcgtcgccgacatcgcacttatcgagcgcggcggggtcgacgtgcccgcctgctggaacgacgacaaccaagtccgcggcggctgcggcagcgagggtggcactggcaacagccgccgcgccggcgctgaccgggcgcaccgcgagggccggcgccccgggaaaccctggagcgaggaagagcacaggctcttccttcaagggctggagaagtacgggcgcggggactggcgtaacatctcgcgcttcacggtgcggacgcgcacgccggcgcaggtggccagccacgcgcagaagtacttcaaccggcagctcaaccccgccagccggaactccaagcggaagagcatccacgacatcaccaccccttgaccctggccgccgacggcgacgcgcgctccctgcttccaacaaatcgcgacagccactcatcctcatctcgagatcagaatagaagaaacaagtaggcattactcgtagtccatgacaatagctaaatccttaggtcgcatgggtcgttccaaacaaaagctagcacatggtttaggcttactcgtagtcattaaaatagaattaggagtccaaacatctaatggagtctgacgtggcaccgtcgcgtcgagtttaggcgaatgcagaatgggatgagtttctcgctcgagaaacaccggtttcctgcctttaaattttcttgttcccgctactgacccggaaaccaaaaacggttccgttttcagtgttatttaggtttagaatttaataatacaagagtcaaacgaaaaacggttcggttttcagtgttatttaggtttagaatttaaaaatacaagagtcaaactttggtcacaaaacggcatccgaaaaatgcagaaccaaattgtaatcctatcaatgcccgagtcactgttctagtattgtattggtttacaatggtgttttattttaaaaaaaaaacccccccccggccgtntagaggaccaagctaacgacgcgtgcaacga

SEQ ID NO: 144206 - DNA, 776 bp, Zea mays
  unsure (1)..(776): unsure at all n locations
  Clone ID: MRT4577_62999C.1
ccgggattgtctgaacatgaaggcacttgaatctgaagaacatctggcattggcacaccagtcccaagccaaaacgacgatatattttacttactagaaaacattctaggtgtatcatagcgaagcatcccctcacttgattcctgaatcttttgaacaaggggtattttctggaacaggtgctcctggagactcaacttcagcttgaggccttccttgtatagattatcaacatggtggaagccttggaagccatgggtctcagctgacatggttgcaatcatcgatgggataagcgtgtgaagtactgctcgcagcctccgtgatgagaaggcgccttgcttcagctcctcaaacgcctcatcctgaggtacatatatccggccagcaaggtagcatcagccttgccctaagttgaagtctgacaccatcctgcagcagggctcctttttttcaggctaccaagaaatatacataggtatgatcttctgcgtgttcctgacggagtcgatgcggctgcggagctcgcggagggagcaccacaccacgaggcccgtgcgcgaggcggagcgccactgggtggaggaggcgctgctggcgagcaccgatgaggaccaggcggtggagaggtgggaacacgacatgactactggcccccggcaacgggggaaacataagcgacaaggagtgggcggaacgggatgccactacaagcagctccttgccgncaccccctacttcgacatgctcaacaacgcctntcgcaaccgcgcgta

SEQ ID NO: 144207 - DNA, 389 bp, Zea mays
  Clone ID: MRT4577_6299C.1
aagggggccaagggaacccccctcattttattggtcattccaaacaacccacactaacagcaaccatttaaaaaaggcatcattgtttttacccaaacgcaaacatcccaacccaacgtacgctgggcaagggggggggggaacacaaatcgcccgtcacccccaaccaattcgaaagccaaagcctcacccccgcccacaaatacccagtttactcacaggccaaatccacatcccataagagggcctaaaactcactcacttcgggcccttgggggggagccccaaccccaacgggaaaagcgggtcgaagggcgcgtcccccacgttcatgggcaggggggccaccgacttgaaccacgtccggggaagtttccccgggaacccgg

SEQ ID NO: 144208 - DNA, 2850 bp, Zea mays
  unsure (1)..(2850): unsure at all n locations
  Clone ID: MRT4577_629C.1
gagaatacatacattaattattgcatgaattctgtctgtctctctctctctctctctctctctacatatatatatatatatatatatatatatatatatagagagagagagagagagagagagagagagagagagcatgaccataaccaagttgggtcttttttgaacttttgaagatgcataaacttggattgctgacttgcatgcctaagtatgtaatcttgatctattggaagtttccaacaaagaaaaatgataaaggaacatgcaatgtgtgagtagatgcaagaaaaaggtgctgggaaatgccatgtcctggatgatgaagggaggagtgggttgtttcagatgctagggaggcgtcagccaaagcaaaaacacccttacattacatgcactagtttcttcacttgaagttgaggaggaaggagggaatacaggcatacgggtgctaccatcacacagcagttacacatcgagttaactgttgtccaccttggctgacagatagctctgtctgtgccagctacatactaagggtgtgtttggccgcgctccggctctggctctgcggcagctctggcagcagagtcgcaccaaacggcgacggaggtaggagcgcttctgcacgtactgaagaggagccggcgccctcctgcgcgtacggcggagccacgatttgtagctccgtgtctcctgcgatggagcagcgtgggtggagcctggccaaacacgccctaatgatggcattcttctgagtgacttaatgatttcgtttttcctatgagtgccttctccgccgtcctcccccatggccgccgccgccgccatctctctatcctttcgtttccgcccgccctttacccccacgcgccacgctcccttttccttgttctccccttcccttcttgccccctgccgcctccgcgtcgctcccggccgcccctcaccgtccccgtggcgccccgacgtgcgggcgcgcgctggaagcaccatcggggcgccgcctgcgcttgtgcgcccaggcggagccgtggagacggaccgcctcccctccgacgtgcgggaccgggccatggaggcggtcgaccacttcggcggtcgcgtcaccataggagacgtcgcttctcgcgctgggctgcagctcgcgcaggcggagcgcgcgctccaagcactcgccgcgactacttggagtatcggaggacggggaggtgctatacgtcttcccaagggcaaagctggctggcaaatcgtttaggatgcgggtcgagcctctggttgcagccaagcaagtgggtgcttatctggtacgtgtttcatttggcactgcgctcattgcctcaattgtgctggtgtacactacaatcattgccattctctcaagctcaagtagtgatgaagatggtcgtgggaggcggaggagatcttatggttctactatcatcattccgacggatatgttttggtacttggatgcagattattatagaagacgtcgagtagaaaacgaaaatgggatgaactttattgaatctgtattttcatttgtgtttggggatggtgatccaaacgatgggcttgaagaaaagcggtggaagatgattggacagtatatttcatcaaatggtggagttgttacagctgaagaactggcaccatttcttgatgtgccacctccatcagaagagtccaaggacgatgaatcatttgttcttccagttcttttacgctttcagggacatccagaaattgatgagcagggaaatatcctgtatcgattcccatcgctgcaacgtactgcttcatcaaaaagtggtaggagcagggaatatgtgggtaccaaatggtctgcaatgtttagcggagttgaaaagtacttagaggagaaaccgtggaaattcagtaaagcgaatgcaacagagaaggcgatggttgctggtttgggaggactcaatctctttggtgtcatcattcttggaaacttgttgaagcaaatgacagtgacacctggtggactaatctcatttgccgcacagttatatcctttgcttcagatatacgctggctccttttttgcaatacctttgtttagatggtttctgctacgcaagaccaacaatggcattaaaaagaggaataaggccagagaacagagagctcaggagctcgtgtcaccagattcttctctaagaagaaagttgctcagtgcacgtgatatggctgaacggaaagtaatcacgccagaggagattgtctatactactgaaaaggatctattggagcaggattatgaagtcaaggagtgggagaggagatttaaggagctcgagtcagagtgatggacatgaccgatatacttgacacttgcagtagctctacatggtcctcaccatacttgtcggtgatttttatccgcatccaacggagtggaagatggatctgactgaaccactcgagcaagcgaaactggatggtactggacctcactaattgtcgtgtcaccaccagcccaccactgaccacttcgctatggaagttttgtggaagctgttggtttaattggaaccgaccattatttgcaagatgatgttcgtatctgtgccattgacctgcatatatgtatagttccaatcacggatcaaattcagaatttgacacgaaaaagaaaaaaaacagggaatatggctaggatgctactcggtttgaatggagtccaatcaaaacatgtaaaaaggtcagcctgtgaacagggactcagactgtttgctgcggctttaatccactggctcctgttttttccaagnagacgaatggacgaatagtgcgacatgcatatatgtaaagacctct

SEQ ID NO: 144209 - DNA, 340 bp, Zea mays
  Clone ID: MRT4577_62C.1
acccgtcccaacaacttgggggtttcaaaccgattcgaaaccttccttaattttccttgggctttcccccttccccgtattgggatccccaaggggtctttgtaccccctcgcgggactttttgcgctcgcctttttcgcccccctcgcaagggaaggcttcttcccagaaaaattccaaaaatgctgggaaaatccgtgggtccagtcccagtggaaaaaagatgaaaacattgcttgtgaatggaaccacacttccggaaaatggaatggagatgcccaggaccaaagtattcaaaccttccaggattaccgggtctattccctttcaacccaatacc

SEQ ID NO: 144210 - DNA, 226 bp, Zea mays
  unsure (1)..(226): unsure at all n locations
  Clone ID: MRT4577_63000C.1
gtcacgcgtcgggctgatcaggtcgagcagctagtagcgagctgctcgatgatcagtggagagtgtcggtaggtgtctgtgtctcttggtggctggttgcgacggtcgtggctacggcgtctcgtcgggtgcgcgtgctgctgctgtgcctgggcgtgctggtgtcctgctcgtgtcgcggcgggcagcttggaccaggagctggagatcacgttncgcgacgggc

SEQ ID NO: 144211 - DNA, 868 bp, Zea mays
  Clone ID: MRT4577_63001C.1
cctcgaggccggccgggaagatgtctacggcatcgcgaaggagctaaggaaactccacagggagggcatcaacaacgcgacgaattcagtcacggtcgtggcggtgctcttcgccacagtggcgttcgccgcaatcttcacggtgcccggcggcaacaccgacgacggcgtagcggtggccgtgcacgcgacatccttcaaggtgttcttcatcttcaacgccgtcgccctcttcacgtcgctagcggtggtggtggtccagataacggtggtcaggggcgagaccaaggcggagaggcgggtggtgggggtcatcaacaagctgatgtggctggcctcggtgtgcacgacggtcgcgttcatatcctcctcgtacatcgtggtggggcggcacttcaagtgggcggcgctcctggtgaccctgatcggcggggtgatcatggccggcgtgctcggcacgatgacgtactacgtggtgaagtccaagcgcgtgcgcaagatcaggaagaaggtgaagtcgacgaggaggagcggctcgaactcgtggcaccacaactcggagctctcggattcggaggtcgaccgcatctacgccatatgagggggccggtgcagctggttccttccttcagaccgtctggccgtgatgcagcacggatgcatactgtaaacatcgaatcacggcccttgagatggagatgcgctagggggtggttaactctgtacattccaataagctggtgtaaactgccattccccttgttcatggatcgggcgggaggcgactgtcttggctgtatactactcacagatagatttgtcatcaggttatatatagtgtattatatatgtgcaaaacccccacccc

SEQ ID NO: 144212 - DNA, 358 bp, Zea mays
  Clone ID: MRT4577_63002C.1
tcatcctcccactcatcctcgcactcttccaccgactcaagcgcaccgacaacctctccatcaacagagctttctgcacaatcctctacctcctatcaactcactcaatacatcctcaacatccactcctacacctcctacgacaccaaaacctctaccacctcaacacctgccatacctttacacgcacgacctactcaaacagtactactacctcatctcaacaccaatacaccctacctctacttcatcatcaaccactatctcatccaccacaacttcacctacccctacttctacaacttcaactactataccatctacaagctgcccatcaacgactccaacaacgccaccc

SEQ ID NO: 144213 - DNA, 457 bp, Zea mays
  Clone ID: MRT4577_63003C.1
aatttctcctccggtacgggtgtcgctagggttattctgtccgtcgttgacgatacagagtcacttggaccgagggagtgaacatgcagccgcgtgtggggtatgtgctgtcgaacaacatgaagaagtccgtggtgactgctgtggaccgcctcttccaccacaacgcatacaaccgatacgtcgagcgcacctccaacttcgtggcacacgacgattcacaacatctgccatttggggaccgtgataagctgaatccttctatgtccttgaaccgacacaatgactgccgtgctgatgaaattctcctatcagctactgtgtacattccaccaattgcaacagctttcatggaacgtgagaacaaatctcaacaaactgtgtgtggctatccaatgatccatctgaagattctcataacaagatgcatcctcggcttgattgtctctctctgcat

SEQ ID NO: 144214 - DNA, 330 bp, Zea mays
  unsure (1)..(330): unsure at all n locations
  Clone ID: MRT4577_63004C.1
cgcagcggccccgcgagcccgaccagggagggcgacggaaccaaccnngaggcggcganagagncgcnccggaagggcgagaagcagangaggcgggccggagangncgccggcacgcggaaggccgggggggggagcgncgagcncngcnacaaggccggcgcggggaagacgcnaaacgaccagancgnncnccnancaaagaggagaggccagcnnaagcaggcnannacggggagggggcagaaagcaagggaggacagggaggggacaccaggganggacacaagcgaggggcggagaaaaacacggggcagggggggggggggg

SEQ ID NO: 144215 - DNA, 457 bp, Zea mays
  Clone ID: MRT4577_63005C.1
actccctctctctctctatctccctctctctagctccccatgcaacagcagcccccctcccatggagctgacgaccgagccctcccaagctccactctcaccttggcaagctctcccatggcgtctcccccacctctacggcagtaaggtgtaggactgagagatgacgatcgtgcaagtgatgtggtgccaaccacaagatgcagttggtggacgatctgaagagatgatggacttatccagtggatgctcgccaagcgagtacccaccccagcaaacactatctaagtgtaaaaataaaggcaagccccggttttatgcataaccgttatatatgctattttactgcacttaatgtttgtaggcttgtaatgtgcacttaagttgtaatacccaatttgtaaacattgagaaaagagtaaatctccttatatattttgcctgtaggaatttatag

SEQ ID NO: 144216 - DNA, 335 bp, Zea mays
  unsure (1)..(335): unsure at all n locations
  Clone ID: MRT4577_63006C.1
gnaaaacaggcgtttcgattccaacaggtaagaatcacagcgcgcatccgacagggcagcagaaccactcaaggggggtgtcctcaccttcgtcttttgtttgacatctcgggtagtcgcgaaggcctccgcttcggctagctttgacgtttctgtataccttggtacccgtgttttgctgttcctaacctgtggtgcttgtaaccgtctcctgctccttcgtccctcatgtagcgatcctttccgatctgttcacgataccgtacgtccctcgaagcatcttcatgtctctgatctcacggtgtgcgtgtgcgtttctgataagcttctcgcat

SEQ ID NO: 144217 - DNA, 311 bp, Zea mays
  Clone ID: MRT4577_63007C.1
ggggaagatgctcaattcatcgatgggcttgttaaaattggcaggacggccagtagctggcatcagcgactgcgagctctggtcaatatgcaagtcatttacttccgccgcattttcctgacagaggagcgagagcgtgatgtcttatttaacaatgtgtcagacatgcttagcgatcctcagcttgaggttcgagcatgcgcggcaacgacgctcgccggaatgatccgctgttccccaggccgcatccgcgatcccctgattgtgcgcctcaagcgtcgcttcgagatcgagctagaccaaaacccgat

SEQ ID NO: 144218 - DNA, 246 bp, Zea mays
  Clone ID: MRT4577_63008C.1
ctagaaaccaaacatgaccttatataggctggaaggtgggtggttacatgacagatctaatcttgtacttatctgttacaatcctatcctaggtgggtggttaactgacagatctaatctcatacttatctgttacaatcatatcacatctgttaggaactctaatttatctcttttatcccaataatatcgttgttaatttatactaatcatattagaccttcaatttaaataaatcttagatta

SEQ ID NO: 144219 - DNA, 277 bp, Zea mays
  Clone ID: MRT4577_63009C.1
cccactctttctcccacgcgacacgccacgcgaggggggggtctttcagccgtctgaggggttcaccccccgctcccgccgcagacctcaagggggtcccagtagtaccgcgccctgaccgttccagagctgaccatcagatgtgggacgcgaagaacatgatgtgagcggtcgacccgcggaacgggcgctacctgacggcgtaagccatgttccgtgggaagatgagcaccaaggaggtggacgagcagacgcagaacgtgccgaacaagaactc

SEQ ID NO: 144220 - DNA, 108 bp, Zea mays
  Clone ID: MRT4577_6300C.1
gtttgtagaattgtaaccatgaagcaacttgttgttgggtggctcgctggatgttgagactaacccttcatgtgaaggacaaatatgtagtattcatgcctctacatt

SEQ ID NO: 144221 - DNA, 1168 bp, Zea mays
  Clone ID: MRT4577_63010C.1
gctgccggatcacggggccggccaggaggtcagtaagccaccagctgcagccgccagcacagcgcagggcagagggagagggagggcaccggcacaccatggccgtggggggccttctgcggggcctcgtttcgccccccgcctggctaccctgccatgagctcttcgcctcctggcaccactggcttccctccctcccgcgcctccgcccgcccgcatccgacggcttcaagcttctcttggtgctgctgctcttctccgccgctctagccgaggtccgctacatcgcctcctcctccatggcgcccacgcttcgtccaggcgaccgagccgtcgccgagaaggttacatacttgttccggaggccatctattggggatatagtgtttttcaaagtaccgactgctgtgcagaattatggtgtcaataaggatgttgtctttattaagagagtattggcaacaccaggagacttcattgaggtccgacaagggcagcttattgtaaatggtgtcgcactaaaggagcattacgcagcagcaacgtcattgtacacaatggaagcaatggtccagagatctttaaaagtcacaagaaagaagatgatcaaaaactggactggctgctccatgttgttgacttcttgagtgccccgttgtaatcaatcgatcaatgggcctcagatggtggatgatctttttcttattggatggatgggtgggtacctggatcctcagtcagctgaaagtaagtattctcgtactcctgcagcgccttcctgaaggtcacgtatttgtcatgggtgacaaccgcaataacagctgtgattctcgtgcctgggggcctcttcccgttgccaacatcgttggaaggtacatgacatcatttacaagatcctctttccagtaactggggttccactcaatgttcgtcctcataaatcaatcatagttagagagttgtggagccaggcggctgctatcttgtcaatttgtagcgatgtttgttgtatatgattctcacttaatttggacatgcatgattgtgtacttgtgttgttataaagtaagcatgttttgttgttgtttgtgttcgctcgcactttggtcgggcatgcttgtgtgcgtgtgttgtataaagtaagcatgtttgtataaaaaaaaaaaaa

SEQ ID NO: 144222 - DNA, 155 bp, Zea mays
  Clone ID: MRT4577_63011C.1
tctcttttgagcctacaccttctcctcgtaggagggttttattcattctgggggggctcccctcttcacaacgaaaccctagtgtcccgctacatggcatctggtctggaggagaaactcgcctaggtcgcatctctctttttctgtcataatcc

SEQ ID NO: 144223 - DNA, 242 bp, Zea mays
  Clone ID: MRT4577_63012C.1
gtctcctctgcccatctgctctcctggaagccgcctcggtcggacccggacaagatggccgccttcttcagtgctgcaccggcgccggctctcgcttcgatccgccacgaggaggacgacgagcagcatcaggacgccgccgaggaggcgtaccacgtgtactatgtcgacgagggccgcggtaacggtcgtggtcattgaggcgccggccagtggaagcggagcgccaggggccactggcg

SEQ ID NO: 144224 - DNA, 265 bp, Zea mays
  Clone ID: MRT4577_63013C.1
actatatcaaggtcctaaaatcacctctatttctaactgatagaataaataaataacaaagaacccattttggatttaaagtctcttatcaattttaaaataaaattcctcaaagttatctgcttttctaaaaatatttgaaccttagggaatcattttgttcgtaaaaaaatataggaaaaatgtatcaattcatgttaatttgaataccataaaatatatagatcaataggatatggagagcgaaagggctctacgtaatggt

SEQ ID NO: 144225 - DNA, 426 bp, Zea mays
  Clone ID: MRT4577_63014C.1
gcgcgttctttgatgcggttttagttggtccgacgccttcgaaaactggtgtcggctatttgcctggtgacgcatacaaattcagagaaatcatagcgttgttttacaaactacggtgcgtgaacctttgaagcgacaattgtatcaggttacatattcgattgtgggaactcctctacattaagcaagagggccaggggcccagctcgtaacatacttgcggatggataatctcagggatgtcctgtcactgccgtggatttagtagcttctgcaggaagaccttggatcttataacctcctggctcgaaagcttaggaacacgggatgtacagcacgacttgactatcggcgtggctggatcaagtgagatgctatccccaactgagacgtagattggcttcgacaaaccattgcaggagcgca

SEQ ID NO: 144226 - DNA, 216 bp, Zea mays
  unsure (1)..(216): unsure at all n locations
  Clone ID: MRT4577_63015C.1
ctgcttaggaaggaaatacatcactgtattagccttgttccaatttactaccatgatcgctatgtacnnccttcaaccgttctcgttggtaagcataaaccttgtaccaggtaattactaatgagtcatgacatattccctcatttctgtggggaccgtgggttctaacaatgtgcaatgtaactgcctcttcttctgaaccaaacggaaaagtct

SEQ ID NO: 144227 - DNA, 376 bp, Zea mays
  Clone ID: MRT4577_63016C.1
attcgtgggcaagcgcccctcatcacacagaagactttattattgagctatccctcatttaaacttaaggaggcaccaccaatgacgaggtggcaggttgaacgcttcagccttggtcataccacgttggttgaatggatgacattgttgcccttgggagacggtgctcggcgcaaggcgcagcgggccggcagcaccgacacctctgtggtatgtatcacgagaggcctactgttcacaccagctggctgtttcattggacctactagctgcttggtgctctgcttaggagaggccactgctgccacttcctttcatgcaagaaactgctggcgtgtccgcgccagtttctggcttgaaggcacttggcggtttt

SEQ ID NO: 144228 - DNA, 391 bp, Zea mays
  Clone ID: MRT4577_63017C.1
gagcgttttgctcttcggggaggtcgcaaaggcactcaggtcgccatgcatcaattcccttaatctgagcgttgttcgctcgctcggttgtttgctcgctcgataccttgcattacagaaactccggcccgcctccagtgccgtgaaacacctcaaaggcccaaccactctgtatatcatggggctaccgaacacgcttttcgactgacaccatccaacaagcccttttgatactgacaggtaacaagttggtcctacacctcgcacttgcccagacacgaacccaaacgaacctgcttgtctccccaatgctttggcaaccaagccatgtctccccatatacatgataccgtgtctcttgtaataaacgagagcttcccaacatccaatg

SEQ ID NO: 144229 - DNA, 146 bp, Zea mays
  unsure (1)..(146): unsure at all n locations
  Clone ID: MRT4577_63018C.1
cgtccnaattcccttcagaaggggggattcccctcttcattccttaccatgattcgaccctcccaactaaaacgcaggctcttcaaatcatggggaggttctactacagagagggaggccaccctttaacctaaacttcttaagac

SEQ ID NO: 144230 - DNA, 339 bp, Zea mays
  Clone ID: MRT4577_63019C.1
acccacataaccccccaataaaaaaaaaaaacttttaaaaaaatggcgttgcacgaacttgacacagttgaattttttaaacccccaaaaatcactcaaaggccctccccttagggggataacttcaacaaaatgcttcattagggtttacaaccacccggtaagctccctcacattaggggaaagacaactggggcaacccttgtccaatgggaaatggcgtttttgcacaacaacattgcttttataaggaatggcccccatttgggacctaaaaataccacgggcgcctttaacgttttattgtttgcttggggggtttcaaggggaatttttttt

SEQ ID NO: 144231 - DNA, 133 bp, Zea mays
  Clone ID: MRT4577_6301C.1
gtagaaggcactgaatctttaccgtctccactgcgatttgagaccagaaaggagtagactctagtttcacttgcgtctagtccgagctacgccttgtaactagcgagcaggttgaagcgcttaggctacttca

SEQ ID NO: 144232 - DNA, 525 bp, Zea mays
  Clone ID: MRT4577_63020C.1
gcgggcgggatcaacactgaggacaaagcgaaaagaaaaaaaaagggaaaaggggctggtgcgcaaaaccctagcgcagtcgcatccatcatggcgatgtccgtcttccccttggttgacctggcaggtctcatggtgctcgcctggtacgtgcgtttccacttcctcgctcactctcggggctggcgatatccgatgtctgcgactagctaaggcttcctgggggtgctgtactgctcaactactgccgattcccttatggatgcgcgtcgtgggtttcgtaaacctgcctgaggcaagggcgcggcttgacacactatcaggccgttctcgtctgttcttcgcttcactttttgctgtaagcaaggcatggaggatgctcttgaggttatgaatggactgtactaggacatcaggaacatctctgctgatcaagtcagccacaacgacctggaaaagaccgtaatggagaccgcgaatgtgtaccgcgagcgcggatctgctcatgaacgcgcacctgactat

SEQ ID NO: 144233 - DNA, 641 bp, Zea mays
  Clone ID: MRT4577_63021C.1
cttttgctcaaacaaaatcgcatcttttcgcatcccgcaaacctccaccgataacgtcacttctatccgcaactcaaactccccaagcttccaaagccattcatcaaaatgtcgtctccccaagaccgtgtccagggctacctgaagcagctcgacagcgagctgtccaagtaccccgtgcttaacaacctcgagaagagcaccgccgtccccaagtcgtacgctgctctgggccttgtcgccctgtacctgttcttcatcatcttcaaccttggcggtcagctcctgaccaactttgccggtttcgtcatccccggctacttctcccttgaggctctgttcacttcgtccaagaacgacgacacgcaatggctgacctactgggtcgtctttgctttcttcactgtcgcggagagcttcgttaacgtggtgtactggttccccttctactacaccttcaagttcatcttcctgctgtggctgtctctgccctacttcagcggtgctgaggtcattttccgttcgttcctggtccccaccctcggccgctacttcaaccagtcgggctccgctggcctgcgtgccaagggcgactctgctgccaagaccgagtaaacacagcagcttgactcgcacaggca

SEQ ID NO: 144234 - DNA, 862 bp, Zea mays
  Clone ID: MRT4577_63022C.1
cgggatcgcatcagcgtcaccaataccacgcgagccgtccccccctccttgtccatccccggccggcacgacgaaccgcctgaggagggagcaatagctcggggctctcgctcttggctgcgtgtctgaagctgttgatgcgagtgaaggctcggtttccatggctctcatggcggcggggatggacgaccacgacgagtacgccaagctcgtcaggaggatgaacccgcccagggttgtgatcgacaacgaggcctccgacgacgccaccgtgattaaggtagacagcgtcaacagccacggcacgctgctcgccgtcgtccaggtcatcgccgacctcaacctcgtcatccggaaggcatacttctcctccgatggaaactggttcatggatgcgttcaatgtcaccgaccgtgacggcaacaaggttctggacgcctcaaccatctcctacatccagaagacgctggaggtggacgactggtactacccgggggcgcacaacacggtgggcatcgtgccgtcgggggactacacctccatcgagctcacgggcacggaccgcccgggcctgctctccgaggtgtgcgcggtgctcgcggccatgggctacgcggtccagagcgcggagctgtggacgcacaacacgcgcgtggccgccgttgtgcacgtcacggacgccgagactggcggcgccatcgaggactccgcccgcatcgccgacatcagcgcgcgcttgggcaacctgctgcgcgagcacagcgacgtgcgcgctggcggcggcgcgggcagcctggcactccacaaggagcggcggctgcaccagatgatgttcgacgatcggggagtggaaggccacgcc

SEQ ID NO: 144235 - DNA, 634 bp, Zea mays
  Clone ID: MRT4577_63023C.1
tcgccgagcaaggtgtcgaggtgtttgaacaacgacgcctcgaagcgccgcgccaggctatgccggggcaaggccagcacttgcgccagggtccgcagtcccatgcgcgacaaagccgtggccgcctctttttccaacccgacccggtcgatcggcatctgccccagggcctggcgcaaggacccgttgtccgccagggccagaccatcgtaggcattggccaggacccgggccgccgccggattgggcgcgaccacgatccggtgacgaaagcccaggccggtcagttcttcacgcaagcgcgcttccaattgcggccagggtccgaacaggcccaggctggattcgatctcgaacagcaaggcccgcggataccgcaggctgacctgggaactgaagcgataggcccaggcggcgagaaactgctgccactgttcgatttcggcgggatcgtattcggcgctggcaaaggccttggtcaaggcatgggcggcggtcagcgattgaccgggacacaggcccaaggcccgcgccgacgcattcaccgcctgcaccaccggcgttgcggcgaacccgtcaacagtgccagcggcgcgtcaggctcaggggttcgccgcagcaccccgtccagtgc

SEQ ID NO: 144236 - DNA, 727 bp, Zea mays
  unsure (1)..(727): unsure at all n locations
  Clone ID: MRT4577_63024C.1
attgggaccctcgaggccggccgggaactccctccgctccaccatcaacaccaccttcaccccatccctcacccgctccttccacgcatcttcagcaacaatggccatcaagacctacttcgactgccagtggactggtccccagatcaccgttgacgacaacggcaaggtcctctccaaggacgactccgctgttgcccgcaccggccgcatcaacttcaccctctacgacgatgtcgtccccaagaccgctgagaacttccgcgctctctgcactggcgagaagggcttcggctacgccggctccaagttccaccgtgtgatccccgagttcatgctccagggtggtgacttcacccgtggcaacggcactggtggcaagtccatctacggcgagaagttcgccgacgagaacttcaagctcacccacaagaagcctttcctcctctccatggccaacgccggccccaacaccaacggctcccagttcttcatcaccactgttgtcacctcttggctcgatggccgccacgtcgtcttcggcgaggtcactgacgccgagtccaagagtgtcgtcaagtccattgagggctgcggctcctccagcggcgccctcaaggtccagggaggtgtcactatcgtcaagtctggcgagcagtagagacttcgcatcacnacgagttacgatgagtaggagaaaagctgccttctaatgcattgcaagcga

SEQ ID NO: 144237 - DNA, 184 bp, Zea mays
  Clone ID: MRT4577_63025C.1
cccacgagtccgcccacgcgtccggtgatgattcagtaagctcaaatacagataacagcagttctgacagtggaaatggtggtcattataccgagcgttccttgacgacagatacagagagtaccagaatgactcattcagaacaaggaagcacgtttccagatgtagacatcgtcagacaaac

SEQ ID NO: 144238 - DNA, 2293 bp, Zea mays
  Clone ID: MRT4577_63026C.1
gggtaccctcgcaggccggccgggagctccaattcggccctagttttttctgagaccgcttgccgcaaacctcctgaccgcgcgtccgctagaccgctatcccaatcgccgccaccgctcccctcatcgccggcgccgcaccctgcatccctgccgctcggtaattctcgcgacagaggcagctagggcatcccagatcctccgcccatgacccggaccctggcgccgtgtgcgtgcgcctagataggagggtttgcttcttgcggcccccggcctcgctgaggtgcgcgccaagtcggcggggcgggggtgggactgtgggggcgcggctcgccgtcggatggacgccgatgaggccgtggggagcagtgggaggatggatctgaacctttacctcggtcccccccgcgccccgcgcccgcgccgctctgacctcggctccgatctcgccctcagcaccccgatgccttcctctccttcgtcctccgcagcgtccgtcgacgcaccgccgccgccgcctgagtccatgcacccgccgtacacccactcccgcgccgacctctcccctccgccgcttccgctggaggtgtacttcccctacaaccccgaagactcgcctgttccggatgcgcatatgtcgtacatgcagcctccggaactgcttatccccgggccgcggaacatgccgcctccggattcgcttatctcggggctccgagagggaattcgggaacttcggtacgccttccatccgccgccaccgcccccgcccccgcccccgctggtgcgggccaacgaactgctgggctgggaagagcgtccttcctcgtcaacggcctcttcatctttcttcccagacaccgctgctcggtgcgggctgctgctcgagcagactggaagccggtggcttcgcacgaggcggttcaggtctgaccttccacccctcagctccgaggctcgcccttctgggcaggacgccaccgagccagtgccccagcatgagcctgcagctgatgctaatgaattaaacaaggtggctcccaatggcttagaattaggtgccccggagaattcctctgaggaacgcagcaagactgccaccgcattcgagtgtaacatatgctttgagatggctagtgagccggtagtcacttcctgtggccatctcttctgctggtcgtgcttgtatcaatggttgaatgtttactccagccacaaggaatgcccagtctgcaaaggcgaggtaactgaggcaaatattactccaatatatggtcgagggaattctgatgcagagaagactgtggaggactggaagtcaccaggtcctacaatcccgccgaggccacatggacatcgccttgaaagcttctggcagcaattccaccatattcgacctatctcaagaaggcttggtgaggcgcatgggatactgtcatcatggaggcgtcttctggatcagcagatcctgggcagcgtgagtaggcttgaagggccatctgaatcagccacgcaagaaataaatgacattcgtcaacatgatcacctaagtggattggcattggcctcaaggatgagggcaaggcggtttcaaatagaagctttgagccgtcctgatggttcttccactagcccccctgataatggtctgacaggaaacaatccatcagaaattctgacaggaaacaatgcattgttggaacgtctggcaggaagcaattcaagacgacttgaattgttggaacgtcttgcttttggcattgcaaacacagctggtgccatgagtgatgactttagaagaatcgcttcaccaaaccaatatagaggatctgcttcatcatcgaatcttcaaaataatgagccagcagtcgatggagctcgcattgcgggtgcaccttctgcagaccaagcgtctaattcaagcactgttgctgtgatacaaggggatggtggtatctctgaaagtgcaggagagcctagcaatgcaggttcttcgggatccctgaggaggagagggaggagcaatgcatcaggttcattggatgtggatggtggaagcctccaacagaacaagagacacaggatgaactgaatcctctttgacatgtgtgtttgtcccaaaccaaacttggcctctttcgctgcattgtagcatgttgtagtttcgtctcttttatgtgttcactgaaacagtttacagttccttcaggttgcttaaatttggatcttcaaacatattaaaaaaaaaaaaaaaaaaatcattatgatatcggaaatggactgcctttgttgg

SEQ ID NO: 144239 - DNA, 501 bp, Zea mays
  Clone ID: MRT4577_63027C.1
ccgtccggggccctctgtctttctcgccctctgtcttgctgctcctaccggtcgcgttggtgcggctggcgctgttcgggctctccatcgcaatcggctatgcggccacgtgggtggctctccacgggtgggcggacacgcacgggagccagcgggtgggtggcgggcctatgctagcgtggcgtcgccggctcatgtggatcacacggatctgagcccgctgcatcctcttctctttcggctgctggtagctagactgcatggcatgcggtggaattttggaaagtttttgtaggttcagattaatgatatggtaggttgattatacttattcttaattgtaaacggcagcagactgatcatcacctggtgccggttcattttcgcatgtctcgccacctgctgatcaaatatttgtgccatatgtgtcttgtaaacggtggtggaaatgggaaattgaatgctaattcattaaaaaaaaaaaaaaaataaaaagcggcc

SEQ ID NO: 144240 - DNA, 987 bp, Zea mays
  Clone ID: MRT4577_63028C.1
caactgacaacaagaccaagcatcagactatgagaggtctagtgccattcatttaaattaattaatctggtccgtttctggatatcacacagcatcaagaagggtggcccaaacccttcatccaacacaactttatcagctatactagagaaagcaagggaacttgatgtccctagagaaattttggagcgcaacatcaaaagggcatcagaaaagggacaagatacttacacagaaaaggtttatgagattcagacaagctcgagtggtgaacataaaagttactgatgcagataaggaccaactgctcaccgttgcgttagatgctggtgctgatgacgtccttgaaccaaattttgatgatgatgactctgaagaagaagcagaaaggttctacaagatagttactacatcagaaaactacccagttttgctatcgaagcttcaagaagaaggattgaagtttgaaactgataatggctacgaacttgttcctctgaacccaattgaggtggacgacgaggccgtggaactaaacaaggaacttgtttcaaatttgctagagcttgatgacgttgatgccgtctatacagaccaaaaatgagtgaattcatgagctacagctctcaattcaagacgcgctcggccaatggactttgttcgagtatattcacttttcattgatgggaaaaaaatgttaggtctttttatgaagcctggttgagcaccatcggctctacccaaaaacttaacctagttatccagcatctttttgatactttggcatttcgcaagctcatgtctataccttggtttcttcccagcccatcgtgttgggatggtttgatacatgttcagaaagcagatgtgagaaaccatagtaaaataatacgttgatgctgatccatttttgggtcttgttaaattgcaatggaaatgctatgattttggtaagcattgaaatgaaaatgctttggctctctccat

SEQ ID NO: 144241 - DNA, 308 bp, Zea mays
  unsure (1)..(308): unsure at all n locations
  Clone ID: MRT4577_63029C.1
cacgaagccccgagccgagcccccaaaggcagacagcagaccagctcccggcgccgacgacgccggcccncccgccgcgccgccgcccgagccgaagcccggagacggcggccagggcaacgccgaggagccgggccacgacnccaccgcccccgcggcgaaagcggacgccggcggccagggagagatccgctgcaccaaaggaagcggaggacgacaccaccgggggagggagcgccgcaggcggagaaaccgcgagacagagagaggcagaggaggaccgagaaccacggacggacggagggaac

SEQ ID NO: 144242 - DNA, 366 bp, Zea mays
  Clone ID: MRT4577_6302C.1
agggaggggaaatttgaattattttttttgacataaagtaaatgtatagtaaaagcttaaaaaatacaagagccgcattgggataagtataatgaaatgttctaaggggtggaacagtttggaaacaaaaacatgttgaggggtgtggagaataatacccgatataagatttgggaaggagtgattaggtgaatataaaaagatggaggggaggaaagttattatttaaaagtatgcggggaggatggggtatattggagaatttggggatggtaatggaggagtacgagttgttcctataaagagtggtgttagaggttggcgtaatgatggaaatgagatgtggggctttttgaaaatgggatg

SEQ ID NO: 144243 - DNA, 426 bp, Zea mays
  Clone ID: MRT4577_63030C.1
cggacgcgtgggctcgggcgcagcaattcgtcgagcatccgccgcgctcgacggccaccggcccacgagggcaccatggcgtccgccacgcgtgctctgggggcgctcctccacagggcctcgtctctgtcttcctccgctcccgctctccggggagcctcgctcctccgcggggacgggcctattggaagcgccggactgttccggaggcatgcggcgaggcggcggatttcgtcgttccagccgctctgcatgggaagacgctcctgcaaaatcgctggaaggaagggaggcaatcctttggatttcaaaatgtagttgatctaattcatgcatatgctgccaaagctgttactgaacaactagaccaaaatgagaaccttgtatcagtcaatgcagatgtctgccaattctgggaaaagatgt

SEQ ID NO: 144244 - DNA, 1979 bp, Zea mays
  Clone ID: MRT4577_63031C.1
ggaccctcgaggccggccgggccggggcacacccaggctcctcacctcaccaccgcggccgcctgcccaaagcagcccaccactcgggcgcagcaattcgtcgagcatccgccgcgctcgacggccaccggcccaccagggcaccatggcgtccgccacgcgtgctctgggggcgctcctccacagggcctcgtctctgtcttcctccgctcccgctctccggggagcctcgcccctccgcggggatgggcctattggaagcgccggactgttccggaggcatgcggcgaggcggcggatttcgtcgttccagccgctctgcatgggaagacgctcctgcaaaatcgctggaaggaaggtgatgttctcttgccatgatgcacaatgtcacattaacgaagttcgggacggctggctgtgcatattctggttggcaaagccgtggaaatatcccgtgcaatcaatcatgttgtgcatgcgtgcaatcaagcaatcaaattcatccaatgaaaatccaatagtaactgctagtttacctttaactccttccgcgtgaaaccagcaaccttgtacttatttttacatttaaccccatttcatatgaaaccgttggatctagattggattcctggatgatttgattggatgatttgattgcatgcttgcaccaaatgtgtgattacagtggatatatccccggcaaagcctccatttggaataatagaaatggatgcaacaacaaatatcattgtgtttcgaattttcggttgtctcttgaggatctgagctagcttttgctgctaagtagctgttcgcttcggattaaagccgactgtttggactgctgcagctgtaatctatagagacaaaaacattgtagaaacagtagaagccggtacggattaaaaccaagcgaacaagctcggtccattagcgtaattgagtatggaaaaactgaaaacagaaagtagctttagtttcttgtttataaaatgtagttagctttaacgtctcaatatgtatcctcagagcaactccaacagccttactaaattgaacaaaatcagtaaaaaaaaagaaaagcctggttaaaaacgcatccaacaggctagctttctacctctcttctccatccggctcgtcatctactcccctcgctaggcatctttgccgagggcgtacggctcgccatttccttttatcgcgcccaactgccctcccgccgtcacggcaaattccagctcccgctcccgcgacattgcaccctcgccaccgcgaccagcccgtgcctccacattcatccgtcgccatgtacaaacctgtacggccccattcgttgaacaagtgaagaaactggattgtggaatgctcctctttctcagtgttcgccaggaaggatagacccggaggcgcatcgtacgggtggagatttggaccaatccactgtaggattgatgcaccggcgtttgcttcctcctacaagcttcgaaggcctaatgtcagcaaatctgtcccatgccaatcgaataaacagggatgaatcctacacagggaggcaatcctttggatttcaaaatgtagttgatctaattcatgcatatgctgccaaagctgttactgaacaactagaccaaaatgagaaccttgtatcagtcaatgcagatgtctgcaatttctgggaaaaggatgttatgccgatgcttttctgtaggagttgcagattttttttaaaaaaaaacttcagccgaaacaggatgttatatcgaaacattgaattagcagtggatcgtgttcagaaagttgggttcattgtagggatcagcttccaggggttggttcattgcaggatcaattgccaacctacgactgagtctaaatttagagtctgttggttacccacccttcaggaagttctatattttataaagccatctccaaaactctaaaattagctaggaattatagctatgctgttggag

SEQ ID NO: 144245 - DNA, 714 bp, Zea mays
  Clone ID: MRT4577_63032C.1
tccgaggaagtagggatgcacgattgcggcgccgctgatgcgggcgccgtgcggcaggggctcggcgctggcgcgcatcgccatgtggtgcgcgatgttggcgcccgcgctatcgccgccgacgcacaagcgggagaagtcaccgtggtcggtgagccagggttcctcaccggatccagtggcgtgggatgcgacccagaggagcgcccgccaggagtcgtcgtacgcggcggggagcgggtgctccggcgcgaggcggtactcgacggagacgacgatggcgcgggcacgcgcggcgagggaggtcaggtaggcgtggaagacgaagttgaaggcggtgtggaggcagaagccgccgccgtggaagtacacgaggattggaagcttcttactgcttccgccgttgtcttcggtatccttggcgggcggcgggaggtagaggcggacggcgacgtctggggagacggcgcggtccttagaggcgacgcccgtggcggcgtctgtggaggccgggacggggtcggagccgaagtagcgctccacgcggccgctcttgtagacgcggatgaactgcgccatctcgaagatgacctcaccatcgctggcgccggagccggccattggtgagtcggggtgtggcctgggaaagcccaaggggaggctagggccgagcaggttgaagtgcggtcgctgcaggttcccgacccggccggc

SEQ ID NO: 144246 - DNA, 648 bp, Zea mays
  Clone ID: MRT4577_63033C.1
ttgggtacctcgaggccggccgggcctgtaagtttcgagggcggcgaagcactagggcatccacctcggcggtggcggcggcggcctccatgtcgggcagcaacgggaacggcggcggcgcctcctccgcgctctatggcttatacggtcccaacgtgaaacctgatgttgtttttaaggaggctgctttaaactctacactaaacctgcaggatgttcagggtctagttacttgggttattggtgacggcatgctgccttcttgggtgtttgttaagaacaaacctcttatacccaaagtcgtcctactatatgttcctggccttgatgcagctttatatatgtcacaaactcgacttctctcttctctgaaagaattatgtggcaatccaaaacctgttctagcttcaagctgtataccggatgataggcacacaattgatgcactcctaacctgcagagtaaagagaaagcttgatgtaaaaacatcaaatcagtcatctaaacctgacagggatggaaaactatcaagtctggatgatcttggggacataccatttcctgttacgtattacacactttcagagaaagacttggaagataatggctaccccttcaatttaccagggttttgtccctactggttca

SEQ ID NO: 144247 - DNA, 403 bp, Zea mays
  unsure (1)..(403): unsure at all n locations
  Clone ID: MRT4577_63034C.1
cggacgcgtgggcggctatctgtggtacgaatatatctacatgctggacaaacgtacatgtgggaagtaccatccctacgcgtggtggatagctttaactatttatgtctgcctacgcaattgcacccaacagttgaggagtactcatttgttgctcttttgtttggattgggaaaattacaatggagtgttatatttctcagtttctcatttggctcangtaagtgccggacctggcttttttacataaagaaatgttttattgaaaatcaaaacaattacatcagtgattnactaccatcctgagctactcctggcagcaagcaggagttcatgaaactgaatctctgaaagaaaaatgctgaaatgttttttgagcttctgctgcgcaggttcaggtttt

SEQ ID NO: 144248 - DNA, 402 bp, Zea mays
  Clone ID: MRT4577_63035C.1
cctttctttttttttttgtttttttttttttttttttttttgtatatctaatcggtggttgataccaaatttggcagtcacaaagtggccggcatggggtttgtctactgtacaaaggacatgtattgccggtccactaccccttttttttctacatgctgcgtgggcgctttaaacggcttttgacccacaagactactaattcccaagagagccccgcgaaatgcctacctgtctaaactttttagagctcaactttgttcttggaacacgacaaaccgaccttctttttggtttctccgcgctttacacaaagcgaagcaaatcatctttgtcgaaaccggctccgattatatctgtacagatcatgtgcgcatcttgcattggggcctctttagggcc

SEQ ID NO: 144249 - DNA, 384 bp, Zea mays
  Clone ID: MRT4577_63036C.1
gctactaggagcaggccgagtttcacatgtgttagcagatgctactctaaaatcatcatctcccatctcgactaccacaaggtctcaagaacagtgtacatgtatttggttctgcagaatcagaggaagttcagtaagttgcagagccacaagacagataatttgatccgcaggcactggcagggaaagaacagaacaggatggatatccttttaccttatgacttacgactcaattgctgccacccttactggcttcatcacccttacaatggtcctcatgaggccaaaccccatgagtatcatgcctatgagataaaggaagctcagttgcagcttcccaagcaagttatagaccgctgcggtagcgtctacccctggcttt

SEQ ID NO: 144250 - DNA, 366 bp, Zea mays
  unsure (1)..(366): unsure at all n locations
  Clone ID: MRT4577_63037C.1
gcagtggtaacaacgcagagtacgcgggagataacaaataacgtttgatcaaaaaaaaaaaaaaaaaaaaaaaaaaaaaaaaaaaccaaaaaaaacacatatgaaaaacaaaaaagaaagaaaaggtgctttgagccaatgccaatttttagagtaccaacgcgagactgtgggagactgttcttcaacttacatcaagtcgcaacttttgcatcgacatcatccttctgtgcgtcattcttgggattgcggcctacctttacaatgccctaaaaaagtgaggcggngtcttcttgccttgnggccgctcntgtcgtggtccctttgttcccntggttttatgcagttctttgggtcgcctgtttg

SEQ ID NO: 144251 - DNA, 398 bp, Zea mays
  Clone ID: MRT4577_63038C.1
agcagtggtaacaacgcagagtacttttttttttttttttttttttttttttaggaggaagagagatgagcggcaggtttctaagtcgagcaggaagaacatgaaccacccttctcatggtgttcatgctcagcctgttcagagacgtcggcctagaggtgctttgccacttgctactaggccttaggaagagagaccatgtggtggtcatgcccgatggggtgctggtcatgtgcgaacccatggtagtggctttgcttcttacttctctagtggaccacagtttccttcttatggtgatcgcttcccttctggaccggagatgggtagtgtttttcctaacactttttatggccaggtgtcgcaccccccgcgtcctctgcgttgttaccactgct

SEQ ID NO: 144252 - DNA, 211 bp, Zea mays
  Clone ID: MRT4577_63039C.1
ggcctcgtgattcctttttcaaattaaaaccgaaaggggctttgggttcttcacattgccctaggggggtccgatcaactggctatgggggggcggaccccgattggtaaccggtccctgggccatttgcagaatatctttttttttttctctatctagtatcttgggttggggggaacggggcttggcacctgggacaagggaaaacagc

SEQ ID NO: 144253 - DNA, 273 bp, Zea mays
  Clone ID: MRT4577_6303C.1
aagatgcagcttttgtgtttagctgcctgttatttataactgaaatgtttacaagaaagagtcatgctcaagtaaataacagctgcatgtagtggctcctagaaactatagctcacaaatgaggcaactgacccactaactaataactacccttatgcctggaagccaggccaacactaactctgaacataagactcgacactaagctacaggttgacactaagttgtcacaaactgtaggattacacaagtttatcaggaacttcagttatg

SEQ ID NO: 144254 - DNA, 332 bp, Zea mays
  Clone ID: MRT4577_63040C.1
gggaaaaagaaaccctaaccctaatttaaggggggggggaaaatattttaatttatatttgggagttaggggggccaagcccattaaaaagggggaaaaagggaaaaacaaaaagggccaggcctaacccttaggaggggtttaaaacctcctaaaggttaaattttatcctggacaaagggtgaaaataaatcgaaactcagggaaaaccctcgacgggggccccttggggaaaaagggggaaaaataaaaaaggggcgggatgcttaaaaaggaaaaaaaaccgggggggaaacccttacggacaaaaggaagggggaaccccatgggct

SEQ ID NO: 144255 - DNA, 469 bp, Zea mays
  Clone ID: MRT4577_63041C.1
gttcaacggcagacgctgttttgcagccaaccagtgtacctggcttatatatcacacatcgccgcgtgaaaccaaaggccatcgcgtgtccatacttccgatataccatgccagtctcgaaacgacgtgcaacactagaccgccactggatatgtcgccaactcgagggccaagtacgaaaaaaacgcatagggctcccctcatttcacaatacacgggtggtaaggggccatattttgagagccatgggctccccaagccaaaaaactcaggcttgtaggtgattcaccacctcactttaccaagccgtgccctgaccggtacaaggccttcctgggggagatcagcaccctctgcgacagctcgacaaccttttggaaccctgcttgttgaggcctcatatatctcctgagtgccggacatgtctgtgacctgggaggcagtctacccacatcctgtatcaagaaac

SEQ ID NO: 144256 - DNA, 424 bp, Zea mays
  Clone ID: MRT4577_63042C.1
gaggcccttcgtcttcatttttctcatccgaattcccaggcaggcaggtaggcgaggagggcaggaagaccgaagacggagccgagcgggggctccggacgggaaccgtacacgacacataaatatcatatgcttacaggctgcccgacatttacaagaaccctgactcgtttgaccctgatcggctacctcctgctatgctggtggacagggatggaataccctacacattcatctactttggtggcggtatgcatggtatgcctccgtgatccctaaccctacctgcagatcaaagcaataaatactcacctactgaagaacttacaatcccagctggtatctccattgccagagaaccactggcacaccatggcattcggcatcaacgtcgacgctatagaccactacaagaggcatatgc

SEQ ID NO: 144257 - DNA, 787 bp, Zea mays
  unsure (1)..(787): unsure at all n locations
  Clone ID: MRT4577_63043C.1
ggccgcttttttttttttttttttaaagcataaaaccatacattaaggagtatcaaattattacatcagcatctgagtttttgcaaaagtggtcatcattgttcgaagtgcagcggaataaaactaacgatgaataaacagagagatggagaagcctgtcccatcactcctcatgctcctcctcggccgaggcggggtcccactcaacagtccaacccggtggcaaggtggacggccaagtcactccagcaaccatgtcctccagagaacctttagtttaacacttagatagtgtttgcttggggaggtactcgcttggcgagcatccactggttaagtccatcattgttcaggtcgtccaccaactgcttcttgtggttggcaccacttcacttgcacgatcatcatctctcggtccataaacaaacccaatcggtgtttgtaaggacgatgacgattccgatttgtgcatcgctccgaacatccgacgagtgttgagcggcttgccttctcctcgcaaaacacggggtgcccctcctccacaaaacaaaaataaaacagcacacatacacaattaatcatatgaaaataacgccgatgcggaatcgaacaagggatcgtcgcggtctcaccgggggtgaacgacgatgacattggggctgcgcaaaacagcaacccaccggtgaacgtcgacgacgtgctgtccactgggctttacgcaacagcgagccgacagcgcgcgaagacgtcngggctgctgcgtacacataatatttcccagagcatt

SEQ ID NO: 144258 - DNA, 236 bp, Zea mays
  unsure (1)..(236): unsure at all n locations
  Clone ID: MRT4577_63044C.1
cgtggggnatcaacccataatanttttgagcattcagnaaacacanccaagcgaagctacctagcaacgacttaacaacaatggctaccaagatattagccctccttgcgcttcttgccctttttgtgagcgcaacaaatgcgttcattagtccacaatgcttttttgttcctagngccattataccacagggcctgccaccagcgactgcaatgggcgttcgaacacctgagctg

SEQ ID NO: 144259 - DNA, 527 bp, Zea mays
  Clone ID: MRT4577_63045C.1
aatccaagatgttgataattactcgacatcagatcacaaaacacttgataaggtgcaataagttccctcactcattcaattgagtggcaaaacttccgacaaggtgaaaaggacaggtatgtaatcaacagcccccaatagtactcaaacttgcaaacaagtgctttgccttatcgccaggatatcgcagagcacgaataaaacctaacatccagtatggaaacgacactcacaagtccaaccatagtatggaagaaaaaaaaggagcaatactctcatgtgccagataacctttggaaacaccacactcaattgcaaactggagatagtttgttatggctttcaaagttaggagataatgccttcggtcagtgataatgcagcaagctgattggtcggggtgtttgggttttgctgatgggccacattgcgtagaacatccatcgcctcagcaaccttggacttgagagcatcaggggactcgagcaggtgcaggacctcagtctgatccatctccaaaagcattc

SEQ ID NO: 144260 - DNA, 176 bp, Zea mays
  Clone ID: MRT4577_63046C.1
acactataaatatgctgcacaactcataccaacttactcatattccctcattcaacttcacatacattcatatcaacataataaatcctataatagatcctaatttctcacacacataaaacacttcaatctacaactcttaatcaaactaacactctatctcacatcaatctaac

SEQ ID NO: 144261 - DNA, 219 bp, Zea mays
  Clone ID: MRT4577_63047C.1
aaccgaaaagaaaaattaccgttttacttaaggtttgccagtagccgcgataacatggaacccaccgatttttacggggttcaaaaaaaatatccaccacaaaagtgcccgcccaccataaataaagttttaggtggcacatctgactgaccgatatcaattattcttgggagggactgggcccaccctaaattgtagtacgcttaaaaatgataaaaa

SEQ ID NO: 144262 - DNA, 258 bp, Zea mays
  Clone ID: MRT4577_63048C.1
attcggctcgagggccccctgaatgcgtcttttttggctgccaacgtggcttgcgctgattccggtttttcccagggaccttaaggcgcacgtccctgcacgctaagacttatagatcatgcctggtaactgaatgtccggcggaacacaccgggcagtttttacacaggttcctattgaacgaggatgggggatgactccttcttctcttgaacataaaagggagcatgatctgttctcacatgagacaccgtttgg

SEQ ID NO: 144263 - DNA, 235 bp, Zea mays
  unsure (1)..(235): unsure at all n locations
  Clone ID: MRT4577_63049C.1
tttaactgccaaatgaagtggtgaacaactatgttttgtgtcgaagagnacacttcaatttggaatcaacactagtgggtgccatatgctgacatgctcctagctctacttcttgtctctttccctgagcgaatgagtcgcacggccatcatttcctgggcaatcgagatccacatccggatcggctataaatcacatttgcatcttctgacacagaatctggggcctgaacatc

SEQ ID NO: 144264 - DNA, 204 bp, Zea mays
  Clone ID: MRT4577_6304C.1
gacacaccctgaagcggcacattaaacacggcgaatgtggaggatacacacaacgagaccggtacacttgacagcgccctaacgcccactactttcagctacttcccttccttactcaacacgtacaacgactatccccgaaaaacactaaaacggaggctaccttaagggaagcaataaaatgctaaacgggtcgcttgcccc

SEQ ID NO: 144265 - DNA, 1088 bp, Zea mays
  Clone ID: MRT4577_63050C.1
ttcggccggggacgcgtgggtgaaattcatctttacagatcggaggaagagtaggttattcagcccgagactcgagatgatcgatcttgaaatgagaagagaaggacccacccaataaataaactattccaatgactttgttcgcttcccctgaggcaacggctgtactcggcacacagacctggcttatgagcaggatttttcagccaagccaagtgcgtatggttgctacctgtattctgataggccacttaatgacactggctcccagttattgacttatgaagaatggcttctcgatggaagagaaacaataataggaaaataggaagctgcaatcagaaccggctaactagacaaaaggagagagattggctcagttcagtaggaggaatttctaccgattattgagtggtttgtttcctttcccctgaaaggtaaaatggtttatttgcacctgtagtgggacacctctcccagctcccagccagggttcaagcaggaaactatgttaaggagctgatccgaatacagatacaaggctcccactcatcacaacgaacggtgagctttcccactagccttcacaggagcagcacaatcatggccaaaaacaaaaaaaaagatatcgtagtacgagaaaaccaatggcatttctctattctaagtctaagtctaagtagtttcttcttttctttttagaggacctggccaactctaattccaatgctgcaatcctattggtttactgaatgagggtgggtagaccgaaacgctgaagtgttgttatttacttccttcgataacatagattgttcactcttatgccccatgcataaaaatggcttgtgctttagaataaaagaatagaaaaaaagtaggtggatcgggatcgctattacgagtattcgagttcttgttttcctttccttggaaagggaattatttcatgagaagtgcaccggtagaaattggactaaatatgatcttgatccatagctcgtccactttcttgataaacgacttgatgcattgcattttctcttccttgccgctgagacatatcaaaaagatctattactaaaagg

SEQ ID NO: 144266 - DNA, 706 bp, Zea mays
  Clone ID: MRT4577_63051C.1
cggccgcgtgggccggcaccgccgctggctgctccagcaaaagcccgagctcagttcatcaatgtcggcactgccggccccaccgccggcgccaccggcacgctcctgcggcggtatcctcgactcccagaaccgtcttgctcctctttgtgctctcgaaagcgccgggtctatccttcgccacctctggggcctcctccgcctccgccgcctgccaggcggcctccgctcctttggctgctacgcgtcgccacaggcatcctcgatggtcgccaaccttgtggagggcgtgtcgtaccccttcttctactcgctcgccgacatgggtaccctccccgaccaccccacaagaacatcgctcgcctcctcaaggccaagcgcttccgcaagcccgatatctccgagaccatccaggagctgctcggcggcgaggtggggagggggcaactatccggtgggttggtggtggacgtgggtgccaatgttggcatggcatcatttgtggccgccgtgatggggtttcgggtgctggcattattcgagcccgtgttcgagaatctgcagcggatatgcgacggggtgtacctcaaccgggtgcaggaccgcattgtggtgtatcacgctgcgtcgctgcagcttctgatcgagttgggactattacgatgcacaaagtgattggtcgactggaaacagtgctatatctgca

SEQ ID NO: 144267 - DNA, 193 bp, Zea mays
  Clone ID: MRT4577_63052C.1
atgcaaccggtgtaaccagtgattattacatatatataggagttgcgacacaagacttactatgagatttttgctctgccaaacttgtaggagaccatgagcctggcgcgctgattcacgttttgcacattatagatccaattattgtcttgtacatggggaaccgacgacctgcaactaagactacatacac

SEQ ID NO: 144268 - DNA, 324 bp, Zea mays
  Clone ID: MRT4577_63053C.1
ctcctccgccaaagaacaacaccaaagtgcatgttacgcatttttagacttaccatgggatggcaaaccccattcggaaattgggtggggggggggggaacaaacctatactcgctttggctagctccaacaatcggggtgaaaatgggggcttaattccaccgccatttctaccccaaaatgaatcctgaatgtcaatgggcccacataagggccaaccgtttttcaacgcccattttccttagggcgcgccatattttgccgggcggcccctttttttttttgcgccaggttacccccgctttttgagcaaaactctcggtt

SEQ ID NO: 144269 - DNA, 517 bp, Zea mays
  unsure (1)..(517): unsure at all n locations
  Clone ID: MRT4577_63054C.1
ccgggcagaaggggtggggtggtggtcgaaccgaaggcgcgtcacggagttggcaaggtgatggtgccatgaagcctgctgctgtatgtgctccttgagtaagaaattcggaaggtggtgaacttcctgctggtgacagaggcagagtggggaccattccaggtggtcacactatactctgacgatcacctcgggttggcttgaggagccggcgaaaggcatgaatgcacatctgacagctgcacatgcctcaaacgacccggtaagcctgcaggatgttctcgggagatccgatcacgggacaacctacgccggaatgcgcgcgaggaccacggacgggccacagatccactggatcggcctggccggcgatcccttgcgaccagggatctgtactctagtggccagtaaactcgtttgactgctgcgtcattggacaaatccctgactggggaaaccttgccgngagccagcttattccccttgcgacacaggccgctatagccagatggcctat

SEQ ID NO: 144270 - DNA, 344 bp, Zea mays
  unsure (1)..(344): unsure at all n locations
  Clone ID: MRT4577_63055C.1
gagccgccggnacggaaagtcgacatcacccacagccgtcgccatgcctacccgttangtcgagacccgcaagcaccgcggccacgtttccgccggtaagggacgtgtcggaaagcaccgcaagcatcccggtggtcgtggtcttgctgntgctcttccgccgtccctcctccttcttcgtcgtctgctccnggctgctgctcgcgaccggctcgccctactcttttgggggtggtctgttcttcgtcgtccccgtccccggcttggttggcttggtggtggttcttgtcctcttcgtcgtctccctctgcttggccgtcgttgtttttttccccctctacggc

SEQ ID NO: 144271 - DNA, 337 bp, Zea mays
  Clone ID: MRT4577_63056C.1
tattttttttttctctttttttttttttttcctatgggttggtttttttaattttttactttaactttaatcctatatatctattttatcaattctcaacctactttacaacaaacaacccccaaaacagagtcaccaacaaaaccacaatctgactgaatttatttaataacacccaaccatatcagccccatgcctatcaaactgcacaagcatccttatgaaaatcttatactcaaaacactgcctctataaaaccttacccatctcagccacaaaaaaattatttattttaggaactaaacactccgagcagacagaaaaaaaaacctaaaaa

SEQ ID NO: 144272 - DNA, 277 bp, Zea mays
  unsure (1)..(277): unsure at all n locations
  Clone ID: MRT4577_63057C.1
ccggccgaanccgggcgaccacgcgccgcaccgaccgcaagaacggaaataaacgggnnccagaaggaggccaacggcaaggacgaggccagcacgacgcggaacagnncggcggaccncncancnccnnncacgnggaacacaaaacaggganccggcnncgcggcagcagagaacgagacncgacaaaacgcgggaaagcaaggcgccctgcgggaaggcaacacaccngcaaaggagcaggccaaggncnggaaccanacaacaaacaaggaca

SEQ ID NO: 144273 - DNA, 440 bp, Zea mays
  Clone ID: MRT4577_63058C.1
ggggggtgttggtttttttttttttttttttttttttttttttttttttttttttttgggcaacacttattcaatatcatcagattcatattattaatgacctcatcaaagtacacattaataagggggagcccccacccctgtaatatatagcgggggggccctagcctgaaccccaaaaccaattgggtactattaaaacatcaccggataccggcattgggtcttctcccaaaaaagaagtggacgacccgtaggccttccacctccacccgggattggtccctcaggctttcccccattggggaaaattccccactggggccccccctaggaggctgggccctgtctcaatcccaggggggctgatcatcctcttgggaccagctactgagcatcgccttgggaagctattgcctcaccaactagctaatcaaacc

SEQ ID NO: 144274 - DNA, 291 bp, Zea mays
  Clone ID: MRT4577_63059C.1
cccacgcgtgcggaaactgcggcggcggctacggcaacagcgacagcaactggaggaactgagcggtggcgtacgctgaggcctagttattttgatcgcttctgctaccgtgtacaccctagtctagagggggtgtatcttcgtctgtggccgattcgtgtccgcatgtttcgttttgtgttcgctgatgttgttgcccatctgcgatcttgaccgtatgctcgctcctgtgatgttgacagtgatgtatacaatagtccaattccgagcctgcattgtgctccaccgatt

SEQ ID NO: 144275 - DNA, 708 bp, Zea mays
  Clone ID: MRT4577_6305C.1
aaaaatgcttgttggaaacaaagttgacaaggatgatgaaagaatggtcacaaaagaggaaggtcttgcttttgctgaagaatatggatgtctgtttcttgagagcagtgcaaaaacacgagaaaacgttgagaaatgttttgaggaacttgcattgaagattcttgaggtgcctagtctcctagaggaagggtcttcttcggttgtcaagaggaacatcctgaaacagaagcaggaaagtgatgcaaagaacggtagtggatgctgtcaatagatgtatgtgctgatccacaccacacggttggctttcttcgtgtgagctgccctgattgtctgctgtacatgttcttgtgagtaagaagggcgagcataattgatttgtacaaaggacatgtcagtttggtgtcatagttttcctcatctccagtttagtatagcaattttgttgtcgccctagcaatggtaatatggaatcctctctctacagtattgctatctggccggctggcccttagaaaccgggaccgtggaacttgttcacattcctcgttccaaaaatgttcgttctgttccaaaaacgtgggaacaattttgtttccgtagtgttaaaatcttgtttaaggattagtttggcaacttcattttttcatgggatttctaattttccttgaaaaaatggacaaaaaaatggactaatttccttgagcc

SEQ ID NO: 144276 - DNA, 909 bp, Zea mays
  Clone ID: MRT4577_63060C.1
acaaacagtacgtctccagccaaaagcggtggtaccaccgatctttgctgggattcgatgtattggtcaaattcatcgcgctataacgtacacaaatacaaacaacaatcttctcgaactctcatcgttggttgggttcgccggccatctcagtagaaccaggcgccggtggcctccacctccctggcctcggccaacttaccgctactcctggacgacagagacaggcacgacgacgaggatgtcgacgccgaccgccgcagcccgcccggcgccgtgccgtccgacctgaagctcgtcgcggacgccgtccctgtcccggacgacgtccttcgggcacctttcctgccgtcccgcctccggaacacggggagcgggaagcacctgccggccggcgccaccgccacctcgtcgtcctcagcctcagcagcgccggcgcggtacgtgggggcgacccgggggttgacgtcgaggaaggcggtggggcggtgcggcgcgcggcgccgagacggcgacacggacgccgagcgcgccgggtagtaggagacgcgcggggagtggtacggcgacggcgacatggccgggggcggcgtcagcttcggcgacaccgctaccttggagacggaggcggtggcggaggaggacgagtagtacggcgacggcgacgacgacggagccgcgctggcgctgctgctcctggcgtgcttgggcgtccccgggcagatctcccacttgaacgggatcgagcctggtctcctgcacgagtcgtcgattgctgctgccattgctgcttgcctgcttctcctcctctctagcgcatccgaatatttttttttatcagtaatggatcaatgatcttgactgctctattcccggccgccctcgatgaacccaatcgcccataggagt

SEQ ID NO: 144277 - DNA, 486 bp, Zea mays
  Clone ID: MRT4577_63061C.1
ggccgggccggggatctaaaaaagaggcggggatgacgagctcccggtggccaccccggtccagttccacacaaccggccgcctcagcttctgctctttttcctttccccgcctctccgagctcggcgtccgccagtggcccaagtgggggtgcgagaagagcaagttcccgtggacctactccgccaaggagacgtgctacctgctgcaggggaaggtgaaggtgtaccccgaaggccacggggaggagttcgtggagatcggcgcgggagaccttgtcgtcttccccaagggcatgagctgcacctgggacgtcgccgaggccgtcgacaagcactacaacttcgagtagccgccgccgccgactagccctgcggcgatcgatgtagacttgctgtgctcttgtactctgaaccaccgtgtaataaagctccggattagggtactataaaacagagacaaatatcaaaaaaccaggcccctaag

SEQ ID NO: 144278 - DNA, 882 bp, Zea mays
  Clone ID: MRT4577_63062C.1
cgggcggggcgaaaggccacccagacccaggggcgtgtttgatccgagggggggatgacgaaccaatggtggccaccccggtccagttccacacaaccggccgcctcagcttctgctccttttcctttcccagcgcatcagggaggcggcgattcgcggcggtgagggcgtccgcggagacgatggcgacggagaagctgggcatcaaggtggagcgcaacccgcccgagtcccgcctctccgagctcggcgtccgccagtggcccaagtaagtgagcgagcgtgcgagccgccctccctccctcccagccggcgtctcgatctcgaatctccccgccgccctccgcccgctccgtgcccgtgctgactgcggcctgctgatgaatgaatggaccgatcaggtgggggtgcgagaagagcaagttcccgtggacctactccgccaaggagacgtgctacctgctgcaggggaaggtgaaggtgtaccccgaaggccacggggaggagttcgtggagatcggcgcgggagaccttgtcgacttccccaagggcatgagctgcacctgggacgtcgccgaggccgtcgacaagcactacaacttcgagtagccgccgccgccgactagccctgcggcgctcgatgtagacttgctgtgctcttgtactctgaacctatgatgctccactccagagttaacagaccgtgtaataaagctccggattaggggactacaatgctgtactatctgtttcagatcccgttcggttagctgtgattaagacctgaaactattccagctgatcagttttaatacaaataaaactatggaacagtttaaaaaaaaaaaaaaaaaaaaaaaaaaagcgaacaaagttgcggcc

SEQ ID NO: 144279 - DNA, 712 bp, Zea mays
  Clone ID: MRT4577_63063C.1
ccggccgggagacaagcaacgtgaatccacttcgaccacgctccccctggtgccgagatcgttccgactcatatttctgtctacctgaactctactctactctgcttgttattgtattccgttttcacctactcatcttcgatatttgaaactcgtcacccaaaaatcctctgtcgagatcttatctcgtcatctcccccctcctctccagctatcgaccctcttccccccactaacccctcgtcggtcgatctctctcctctcctctcatctctctcatccgcttgaacgctcgctcgctctcgtcttgtctcgtcccagcaacactaggttttctctcgatcgaaccggccatagcaaatttacaaccatgggtcagacactgtcagagcccgtcgtcgagaagacttcggagaagggtgaggatgagcgcctcatctacggtgtatcggctatgcagggctggcgtatcagcatggaggatgcccacactacagttctcgacctcgacacggccaaaactcatgacagcaagctgtctttctttggtgtctttgacggccacggtggtgacaaggtggcgttgtttactggacaaaacattcacaacatcatctttcagcaggacacttttaagtcgggtgactatgctcagggattgaagggacggttccttgcgacagaccgcgctattctcaacgacccccagtac

SEQ ID NO: 144280 - DNA, 932 bp, Zea mays
  Clone ID: MRT4577_63064C.1
ggaccctcgcgtccgggactcagctcaaaacccaaaatcgaccttgtcgacccggatccgagctaggcacccgcacgaccacccgcctcctgccggtcaccgggacctagcatcgccgggcggcggcgggggaggggaaggtaggcgatgaggaaacgtgagcgggagaacccgtgcgggatctgcgggcactaccacaagtacgaggagggggaggtatgcggggtgtgcggccaccgctggaaaccgtcggacggggagggcgccccgtcgaggcacgagtccgccttccccacagaggtgctcaaggactttctcttcctcgggagctacgacaacgcctcacgctccgaggtcctcagaacgctcagtatctcccacatccttaatactgtgcctgattgccacaatctgtacaagaattcattcacatatcacagtcttcaacgggacaggcctttggattttgatgaggcaaaccaatatctagagaaatgtgaaagagataaatcgcgtgttcttgttcattgcatgactggaaaaaacaggtctgctgctattgttgcagccttcttgatgaagtctagagggtggagacttgcacaatcttttcaatgggtgaaagatcgaagaccacaggttcaactgacagatggttagcttcataccctttgaagcttgttgactaattaagacaccgtctctattacattatgaatcattggttccttgcctatcaaatgttaacattttttctcacctgaattgacagcagtctactctatatacacagtgaataagcactgctaaactactttgtttagtttattgtgtagttcgtatctctgttagcaatttttcagagactagattaatacattatgaatgaatatagcagctttcacgtccccttaccccccacgccgcacacc

SEQ ID NO: 144281 - DNA, 313 bp, Zea mays
  Clone ID: MRT4577_63065C.1
gccggccgggtcgcgctttagtttggctgagcaacgcatagtgttaaccttaatggtgagaaaatacattatcgatattcctaagaattctattcattatgatcatgttgttttcgacagcacagaaacaaaggctccgaaatcacttgaattgacatttacaaagaggcattaatttattttcaataaatatatttaaataaactaggctatttacttctataaaaaaaaaaaaaaaaaaaaaaaaaaaaaaaaaaaaaaagagaaaaaagtgttgccctcctgctaaaaaaaaaaaaaaaaaaggccccta

SEQ ID NO: 144282 - DNA, 133 bp, Zea mays
  Clone ID: MRT4577_63066C.1
ggcgcgtccggatcaacaaagcggcagagcgcacagaggatcgttggacataacagcatgaagattgttattggctctagctgcgagcctggctctgacagctggcagcgcctgtgcaatggcagatgccctg

SEQ ID NO: 144283 - DNA, 531 bp, Zea mays
  Clone ID: MRT4577_63067C.1
ctcgagccggcgggacggtttgaccgggcgctgacggacgggtcctctctcggctcaccacacggcgcgttctcgcgttctccgaagaggatcaccctccttcactacagagcgctcccgtcccacgtcgcctcaagctcgacgacaaggcgcactttgcccctgaggacatgcaagaggctcctatgcagtcggcctcctacttggtggactgcacgagtcaggggactcatcatgtactacaacatgccccagcgcgaactactttgagcaccactgatttgcctatctgcctctctgtgtcccgagccgcctagatgttcctggagcgtgagcttcatcgctacaatgactacaccccggagcagttcatcgaggacgccctctccgacgtagaggagacgctgcatggagacaagctatccagctccaactgcacgttggacatcgtagggatgaaggaagacggcaccatccatgcgttcgagatgaatgtcggcgcagggatacatgaacttatcgactccgtgg

SEQ ID NO: 144284 - DNA, 392 bp, Zea mays
  unsure (1)..(392): unsure at all n locations
  Clone ID: MRT4577_63068C.1
gtattttaaagtcattcctctcttgaaggttagtaaccattgtgagtaccctagtaggattaggggatgtgattctacgggacatgtttggtgtcaacttaaggcgccacattctgcctaaccttaggcgctcgaattgaagaactaaggttaggcagaaaagtttggcacatttttttttcttaggcaccaaaccaaacagccgctacatctctttgctgtgtttggctggctctggctgttaggaaagctgccaaagactggttatatgatatctgcatgtggtaattactgaacttggtgcgaatggtaaaattattaatttattttttgggtggggcgggaggtggagtgggtgagggtatanatattattatgagggggaaggggga

SEQ ID NO: 144285 - DNA, 670 bp, Zea mays
  unsure (1)..(670): unsure at all n locations
  Clone ID: MRT4577_63069C.1
ccggccgggacacgctttttattgttgactgatatatcatcgtacctgacgatctatcttttgcgcgactccaagatccacctcctatccactgtcgcatagcgcttcactcaaccactacaatggccttcaagcaagacgcacctcctccggcttacggacctcctccaggtgctcctcaacctacatatggcggttaccagcaagatccttaccagcagggcggcgcgcctcctcctcaaggatactaccagcaagctcctcctcagatgggctaccctcaacaacaacaaggaccctttcccgccggccaaggccctcatcctcctcagcagggcccctacggtcagcctccccctcagggctactatccccacgatgatcaaagaggaaacggtgatgggcggcggcggtctcatgaccggtcttctcgctggcttgcatgctggttgttgtttggactgcctcttctaagcgtcaatctgacttattactcgatatcaccgccgccgatgaacggatctacaaaatacgaaatggttggaggattcgactcctctccagcaggcaagggaatggacctgcgacgagcgtgtggcgcatcagccaatgggaaaatggtttcctgttttcatggnnnngtggggggtttctttaatttcacacatct

SEQ ID NO: 144286 - DNA, 175 bp, Zea mays
  Clone ID: MRT4577_6306C.1
gatcaatcatcattttatttcttatagctaggtgggattaacataaggaatataagccaccttatatacgatggggtgagggggttcaaccaaacaccccctaaacaatgtgacctgctactgttactcaaccggacgtaccgggacagtgaaaggtcttgcttcgacccctggg

SEQ ID NO: 144287 - DNA, 261 bp, Zea mays
  Clone ID: MRT4577_63070C.1
cccacgcgtccgaaaggcttgatttgtgttaggattggtagtatggatccttttcagctggttctagtgcaggcaacatttgcaatcattgatttcagtgtcagttctatgtttgtattgaattataacaaaacaaaaggttgtgcatagtagtgcggtctttaagcctttgacactgtagttgacaggctgtgatatttgcagatttatgccacatttcaggctctactgttttgaggaagtttcttactaccaacatgt

SEQ ID NO: 144288 - DNA, 1400 bp, Zea mays
  Clone ID: MRT4577_63071C.1
tctttctccgcctcgaaggatctagagccgcacgtgctcccaaccaagcgccgcccgcctcgtgccctcgtccttgcgcgcgggctgcagttgttcttcaagtgccgcctccgcttcggcgcggatcgcctcccgttatcccgttcatggccggccgcagcgataagaaaccggcgagttccgccccgccgcggaagggcggttaccctcacggatcggtctatggaagttcttcggaacctcgaaaacaggatgcctgtacattctctccttcggttagcagcaaagattcactgcataaggtggtcacgcttacaccagttcaaccacagaaacctgtagactccagaggcagtcactgtaatgcaggatctgattctggagaggccccatttgatatatgcatgagtggtaacaaatgcgctgtaaagttaaaaccatccatattcgagaccaacagagaaagaaagcagcgagacagagaatgttccaaggatgtaggtccattgcagttgagacctgggatggttctgttgaaaagattcataaagcctaatgatcaggttaaaattgtcaaactttgttcgcaacttggtgttggtcctgggggattttatagacctggctaccgaaatggtgctttgctaaaactgtggatgatgtgcttagggaagaactgggatccagattcatcctcgtatggagatagacgtctgtttgatggtgctcaaccaccgaccataccagaagaatttcagaagttcgttcaagatggcatccaagcttcccatgaattcttgaaacaacaaaaaggagctaccaatgttgtgcaagaaatccctgcaatgtctccggatatctgcattgttaatttctacaatagtagtgggaggttgggtcttcatcaggacaaagatgaatcacagagcagccttgacaagggattgcctgtcgtttccttttcgataggcgagactgcagaattcatgtttggcgatgatagagacgaagagaagatttcaaaggttgatcttgaatccggcgacgtcctaatatttggtggcgagtcaaggcttatattccacggggttaacaacaccaaacctaaaacggcaccaaagtggcttacggacgagacaagtcttcgacctgggcgtctgaatctcacattcaggcagtactaggcaggtttcccccaccttgagcatttgcattggaacagcaaagaacttgctcatgatattctagtactaggcgcagttgggttagttaccagtagagatcacctgtcatttttcttatatatattccctcatggctactcacaaggagatctttctagtcactgaaaaccaccacttaatccattgctactcgtttaaatgtttgtttccatgatc

SEQ ID NO: 144289 - DNA, 353 bp, Zea mays
  Clone ID: MRT4577_63072C.1
cctgctgcttccttgtctctgtggttcgagagctgctgcgaggccgcttgtctctctctatctcctctccgagaccataccatggctagaggtgtaaggtatggagtcaaaggatcggaaccatcatcatgtgcttctgcattggctgtgcatcaagaaggtgtgtatgatacggatcacagaagttctgacaagagaagtggcgagaagcatacggaggagtcgattggggtgaggaaggaccattggcacgagttgtcgaccggaatgatgaggtgggacgtaggtgtcatattatggctctgaagcacactcgacctactgcggatgctgaagtatgtgcaattagagag

SEQ ID NO: 144290 - DNA, 582 bp, Zea mays
  Clone ID: MRT4577_63073C.1
gacaacccctctctctatcgacactcgctacctagacctgacccgaccctcgcgtccgcttctcgctgatgctctccgcctccctgcgtcccccgctgcccttacgaaacagctagtagaacacatgaacgcgacgttctcacgccactctaccacggctgctcctacgcctgctccaacgagcaaaaatgtgcgccttcatatgctacataacttcagagtaaaagcggctcaaagagctgtacttcagctaggatgcctcagatatcccacaaactccacagtgtaccctctaacttcgcctacctagccgccactacactcgaaccgaatgaaagggatggcaatgtggatagcaaggacgaatctccctggaatgacttctgtgacgatactcctgcaagaaaactggacctgaacgaccctgagatagacattgaatctaacctgatgaaccaaactgccgctaaaaccatcgatcttgctggagatgacacatacacctctgcgatccctggtcacagaataattgctgagggagccaaagacgaggcatctgccgctaatcctgttcatactact

SEQ ID NO: 144291 - DNA, 963 bp, Zea mays
  Clone ID: MRT4577_63074C.1
gcgacggcttcacgcagggcgccgggctcgtggggctcggccgcgggccgctctcgctcgtgtcccagctcggcatcgaccgcttctcctactgcctcacctccctcgacgacgcctccggccgcagcccgctcctcctgggctccgccgccgccgtctcggcgaccgccgccaccgcgcccgcgcagaccaccccgctggtgaagaaccccagccagccgtccttctactacgtgtccctcacggggctcaccgtcggctccaccagggtcgcgctcccgagctcggccttcgcgatccaggacgacggcacgggcggcgtcatcgtcgactccggcacctccatcacgtacctggagctgcgcgcctaccgcgcgctgcggaaggcgttcgtggcgcacatgtcgctgcccacggtggacgcctccgagatcgggctggacctctgcttccagggccccgccggggccgtcgaccaggacgtgcaggtgcaggtgcccaagctggtgctccacttcgacggcggcgccgacctcgacctccccgccgagaactacatggtgctcgactccgcctccggcgcgctctgcctcacggtcatggcgtcgcggggcctctccattatcggcaacttccagcagcagaacttccagttcgtgtacgacgtcgccggggacacgctctcgttcgcgcccgcggagtgcaacaagttgtgacgtgtgccgcgccgtgccgggtgtacgtgtatgcgtgtaggcgaaggcgattcgtattggattggatgggccggttgggtcttcatgtgacgacgcccgggtggttaccggtcagcgatcaatatgttgacgtgcggagtatatatcatgttcatcgtcacgcgctgttttttcatcttcttttactgctggaacaatggtgtcctcgctttaaaaaaagaaaaaaaaaaaaaaaaaacccgcggcc

SEQ ID NO: 144292 - DNA, 466 bp, Zea mays
  Clone ID: MRT4577_63075C.1
atcactatgcactccctactaatagaatacccagatcatttcatatgtgctaacaaacatagtaacgaagtggagtactagaggggcgctaactgcaaactgaggacagcggcagagtatctgagctcctcttcttcctcggcctcaacctggtgctgttcacagtgcgcaactccaggggtggatgacggacctcaaagggcaagggcgagccaacgtggtccaatgctggtggtaaccaacactgtctatagtacagtgggaactgctgcctcaactgcaactggttgccggcgggcagcgatgcgaacaacgacgagagaccatgctatggcaacataactagctgaccatgcatacacatcatcacaaggcgtcgctgatgatatgccttccttcgcctcggcaagccaattgacagctacgggtgcctcgcatgcttatatgatgcaaacaatgtgcaagg

SEQ ID NO: 144293 - DNA, 342 bp, Zea mays
  Clone ID: MRT4577_63076C.1
acccacgcgtccgggacatacaaagcacattcatataccaactttggcattttaaacaaatagactccttatgcggacggggctttctttaagtgctgctactgcgaccattaccacgaaatgctcacacagctcatataactatactttttccaccgtacctatcaccaacatcttattagatatgtgaatacacaatcctactaccctacaccaaccataacgcattcacaattcaaactttacccatatcaccctcgatcctccaacaataattaaccctattacatcaacaacacttgattcatttactgtcacaaaccattaacacaaaacaactac

SEQ ID NO: 144294 - DNA, 260 bp, Zea mays
  Clone ID: MRT4577_63077C.1
ggcccctaattattcaggatcttttcataccgaagagggcgttggggccacaataaatgctcccattccaattttttgaatttttgatcccccccaggcttgtgggacccagccttttaaaaagcccaaaagtgaaacccagctccggggggggtccatttggttttcccaatttgaacaaatgttccctttttaaaccttgggttagaatgagaattttttacccgtggaaacccaaaccttgaagcttttgccttttt

SEQ ID NO: 144295 - DNA, 272 bp, Zea mays
  Clone ID: MRT4577_63078C.1
atcgaatttctggtggtgcagaagttagaaggtaaagcttgagacgatgagggtgtttacgtagaccagaaacaatttagcagaatacttgaagctagaaggggaagttggttgtaaatcacatcaaaaagctaactaaaaggactggtgtaatgtaaaataaactagggcagaaggcttttggaagagtctaggcgctttggaaagccttagatatagtagcttagttagagaaatgtgatggactttcgtaacggaagtgattcaagatc

SEQ ID NO: 144296 - DNA, 146 bp, Zea mays
  unsure (1)..(146): unsure at all n locations
  Clone ID: MRT4577_63079C.1
ataancntangcaagcaaggcnctatatgaagttgactcaggcataacntgctcatatgattaatgagatgctatatgtgatntaggagtattattcaggctaggcaatctctaatcagcagttctatagcaagctcttgagggcc

SEQ ID NO: 144297 - DNA, 602 bp, Zea mays
  Clone ID: MRT4577_6307C.1
catatatccgcagcatcggagcgctcgcaaaacctcgacaccttcctgaaacagtagccgctagctttagctgctccccttggaccggtcgagcttgagctgatcactaaccagttctaccagctcgatcagcaccgtaataaactgatggagtttgacggcctgctgaattattacagcccggaagaagcgcagcttgagctgatgacgaacacgatgctccagctggagcagctcaccgcgctcgacggccatcgtcagtcggcgatggcacctgcctcgctgccgatatccccgatgcagacccaccatgcaggtccccacagcttctcgcctccgccgccacacacgtcgacgaccacgaccacgaccgccaccgccaccgggtacccaaacaagaagcagcacgcaccgccgcgggccgtgtacggcgccgccacttccggcggcctcgaacaccacctccagctccaggacgggggcgcgctgcaggccgggccgccgtcgtcggcggcggcggcggcggacgcgatgcgggaggcgatcttccgcatcgccgcgctgcagccggtggaggatcagacgactacgggcccggagcc

SEQ ID NO: 144298 - DNA, 213 bp, Zea mays
  Clone ID: MRT4577_63080C.1
cacatttcttctgcaatacgcggagaattgtgctgcgtaggctgcttgtatggtgggacctaaaagcatcatctcctacccacaggtctggaaagggcaagggtcgaggaagaggaagcttgaccagagcgactgtttcttcgtgcaattcgaggcaccggcgctgaggaagatatggtttttgccaagcactattgagaatggacagacatt

SEQ ID NO: 144299 - DNA, 421 bp, Zea mays
  Clone ID: MRT4577_63081C.1
cacgtcatgcctacggggtggcgcctcacgtgcaccaccatcttccagcggctgacgcgaaggtgccgccgctgctgttccatgaccttcttcactgtggacgcgatgcggaacgtcctgagtgctcgcaggcaccgtcggacggagcctaggacaggcgctgcgggcaggcatcgagcacgtttcacgtgatgctcgtgcttatgcaccgcagtcgcaggaggccatcgacaaaatctccgaggcgctcaagaaccagaagcaggtgggcctctacgccgactccgagaaggacagagactggcttcgcactcgcccagctaaggctaaaatgcctagccgactgtacataaaacaaaagggtccgctcgtcggctagcgtacagagggttgcaaggccgttaatgcctgcccaaacctt

SEQ ID NO: 144300 - DNA, 282 bp, Zea mays
  Clone ID: MRT4577_63082C.1
aaaaaaaaacaaataaaacacaaacattaaaaaaaaaaaaaaaaaaaaagataccgagggggaaatatccagaattaaggggctaaaaatacaacccaaataactcaattaaaagaatagaaaaaaatgggactcggtttcacaggacccgacgtattcttcgtctggcatctcacctatatgttcctctttggtgttacctatgtccatttcactttccttcattttccatatgcttatactgggaaaaccgttattgtccctcatataatctccttgagc

SEQ ID NO: 144301 - DNA, 369 bp, Zea mays
  Clone ID: MRT4577_63083C.1
cccaaggttgggtttaaaagaggggggtaaactttttttggatccaaattgtccttgatcccaatggggaacaagaaaaggggggccaaaaattgtttttggggatccgggactgcttaatggcctttaacaaagaagggggcccttaacttttgggggggaaggaaccttctttgggccccacttaaaaacaggggggcccccaaaaaacttggggtcctggaaaaaattttggggcaccaaaaaacccccttggcgccatattgttaatagggggccccttgcctatggtgccataagcagcatcttttttaaattttttacctttggcgcaataacctttctttacagcctaaaagggtttttccc

SEQ ID NO: 144302 - DNA, 263 bp, Zea mays
  Clone ID: MRT4577_63084C.1
gtaaacataaatgcaggtgtcggcatacgtgggtgggccatacaacagaggactgtccacccactatcttctggcactcactgatgtcgctgtcctgcttaacaattaaaccatacatcacatgtgtcggctgtctctagacatagatagactaacctacactaacctcaataggattttgtaccaggtgatctcatacctaactgatttcatgaggatctattggcctcattaacatacatgtgaactaaaaccagaccaac

SEQ ID NO: 144303 - DNA, 566 bp, Zea mays
  unsure (1)..(566): unsure at all n locations
  Clone ID: MRT4577_63085C.1
acnnggaccnctagacggccgcccggggggggggggggggnnnaaaaaaatttttttttttttttttttttttttttttttttttattatatagcccaccccccccatttttttatttttgacacaaacaccccagatgccgtttttttccttcacacacaaaacttattatggggggcccgcccggggggttcctgatccatcgagttgcccccccatgcacacccaaattcctgcccccactgcatgcagccgggctcttttcctttacttggcagccccgtcgagggtgaggaacgggcccttgccctttacctttcccggggggtcgttgcttccgaccattaaaaccccccggttgtcggcgcaaaccacccccccccatcccgttcgggtggaccttccccacaccacctgcgtgtagtggccccacacctttcccgggtcccaggtgttgcttctcagggggtagttcctcttttcgtccacccaccaccgcagcgcgtttggggggcttcacgcccgccccgccgagccccaaaaaatttttccccgaaccgtccccc

SEQ ID NO: 144304 - DNA, 357 bp, Zea mays
  unsure (1)..(357): unsure at all n locations
  Clone ID: MRT4577_63086C.1
cttgcatcaactcctttcgttgatgcaactagactgtacctaactccactanctacctacagcaccgacagcagtaactcagtccactatcactgcctaacccattgctgactgcctgcctacagtggcaacattccgccaccatgcatgcggggtgtctctgatgaaccctgactagagcggccacagtcccataatcggaggcgccaggctttacactacatatgaaacgtcctccaccatggcgccctgataccgtactaggtgttctccaaaaagaaccctgactgacagacactcatctgtggaggcgccatcttttagatcacatatgagacggactcaccagtggtgccc

SEQ ID NO: 144305 - DNA, 651 bp, Zea mays
  Clone ID: MRT4577_63087C.1
cgaaagcacgcgtgcagaccctatgtcgcacgagaccaatgtggcgcaaaccagcgatggtgctgatgaagagaagaagatcagggagcttgctgttgaccctacttccagcattggtaccatgggcaacataggcaacgctgaagacaagaagccgagtgaagaaactacaacagatcctagacctgttgagaacaccacaacacaaggcacagaggacgcgacagatcctaaacctgttgagaacaccacaccacaaggcacagaagacgcggatagcagcaagcagaatgaaaacactgcgagcgtaggtggcgttgaaggcaagaagcagggtgaagaaactacagcggatcctagatccgtcgaaaacaccacagcacagggcacagaggatgcagaaagcagcaagcagaatgagaacacaaatgtcatggaagaagaaagggtgacggtggaagatacaacctcaagggagatcagcgccatagaaagcacagatgacctgaagggcaaggctaccaacgagaacgaagagatagccgacaaggaaatggtcaccgactcagacaagaaccatgtctcgctgaaggtcctcctcgcggacaagaacgtggaagcgaaagagaaggagaagaaggcgactagcgc

SEQ ID NO: 144306 - DNA, 465 bp, Zea mays
  Clone ID: MRT4577_63088C.1
ggtgtgtggttggtgcgacggcacatagatcgtcctacggtgtggggcatgatcactgtgttcattgtgcaaaatggcaacggggcggacgctcagatgatgccacgtccccctaacatgcccaagtgctgagaatacaagggcacgagctacgactgctcgggttgcatgcaaggcgctcgatcaaaccagctaatcttagttgattggttgatttaattatttgtggtacatattttaagtagaacggttcttcaaataaaacggccagttgagatgtaattagtgtcatttgtgttcttttctctttttattcatttgattgtaagagaaaaacaaattcattatatttattatttgtgtcggtctactgctagttcaatctccaagtgtaattaaacaatgtatgtcaaatcatgtatctagtgaaaattcaatataaatgcgtgcttcatatgtgtattt

SEQ ID NO: 144307 - DNA, 1937 bp, Zea mays
  Clone ID: MRT4577_63089C.1
gtttgttcgtctgacataacaatagatgacggcatgcaggaaaatgtgacaagtggtactattgtaccatctcaagttcatatactagattcgaatccttccgctacagcacatgaagtcaacattgtcggtagcataaacgatgatgacgaaaagagtcaggatggaaaaagcagtgcagatcttgcttcatacgaggtaaaagagatggttgtcaaggataactttgaagaaaagcagcagaccaaagaggtcattgtagatcccactccacatgaagccaacaactttcccagtaccgataatcacgaggaaaatgagcagaacaaagaaattgttgcagacaccacttcacacaagataagtgctgtacaaagcatgggtagtactgaagaaaaggaacatattgaagatttcattgcgaaactggcttctgaagagatcattgttacaagtaacagagatattgtcgagcagcaggatgagactgatatgaaaacaaactatgaaatagacagggcacgcaacttagaagctactgaagaaattgctgctggtggtgagagtaacacgggaaccatcacagatgttgttgaagacaaattccctaatgaagaaattactttaggcactatctctcttaacatggcagacagcagcgttaaggaggaaaagatgcatgacgaagaagtgaacgaggatctagattctcgtgatgatattatggtacatggtcctgataatgtcaaagagaagatgtgtgaggagaccatgtcaggtcccaccttagacaagttcagtttgcctacatctactgacagtcctgaagagggtaataaggacgaaagcacgcgtgcagaccctatgtcacacgagaccaatgtggcgcaaaccagcgatggtgctgatgaagagaagaagatcagggagcttgctgttgaccctacttctagcattggtaccatgggcaacataggcaacgctgaagacaagccgagtgaagaaactacaacagatcctagacctgttgagaacaccacaacacaaggcacagaggacgcgacagatcctaaacctgttgagaacaccacaccacaaggcacagaggatgcggatagcagcaagcagaatgaaaacactgcgagcataggtggcgttgaaggcaagaagcagggtgaagaaactacagcggatcctagatccgtcgaaaacaccacagttgaaggcaagaagcagggtgaagaaactacagcggatcctagatccatcgaaaacaccacagcacagggcacagaggatgcagaaagcagcaagcagaatgagaacacaaatgtcatggaagaagaaagggtgacggtggaagatacaacctcaagggagatcagcgccatagaaagcacagatgacctgaagggcaaggctactgacgaaaacgaagagatagccgacaaggaaatggtcaccgactcggacaagaaccacgtctcgctgaaggtcctcctcgcggacaagaacgtggaagccaaagagaaggagaagaaggcgactagcgccaaggacctggtgctgtcgttcaggcgccgggtatccaaggacaacgtgtcgccgccggtgaagccaggctcgcccaccaaagacaaagatggctcagggcagcaggactggaactccccggccaggttgcccgtcgagaagaaacccaaggggaggaaacagcagtgggtaccgtttatttgctgctcgtcggtacagtaatccgtttgccagcatcagctttgggcatccattgttgtgtttgtacttgtacgctgatggtagtagattgagtaggaccttcgttccaggattggaccttggcagctttgctactctacttggattgtgaacccggctctgccgtttttgtatgttataaatatttgttggtggaaggctgt

SEQ ID NO: 144308 - DNA, 1293 bp, Zea mays
  Clone ID: MRT4577_6308C.1
cattgggtaccctcgaggccggccgggacgtctccctctccctccgctcgctctctccctccctcggtcaaagccagcacgacaacacagcagtctgggtagctgtccccctcgccctcatccctcctcggcgccgctgccggcccgcctcccccctcgtgccgctctgccgcggcgcattccgcgcccgcctcgccaccgaatcgggcggaatctcagcgggaccaaaatggggtcgccgggtgcggggagcagcggcggccacgagtgctccttcaagatcctgctcatcggggactcgggcgtcggcaagagcagcctcctcgtcagcttcgtcgccgcctcccacctcgacggcgacatcgcccccaccatcggtgtggattttaaaatcaagttccttacagttggtggaaagaaactaaagttgacaatatgggatactgctggccaggagaggtttaggacaataactagttcttactacagaggtgctcagggaattattttagtatatgatgtcacaaagagagagagtttctcaaatttggctgatgtttggactaaggaaatagaagcaaactcaacaaacaaagactgcataaaaatgcttgttggaaacaaagttgacaaggatgatgaaagaatggtcacagaagaagaaggtcttgcttttgctgaagaatctggttgtctgtttcttgagagcagtgcaaaaacacgagaaaatgttgagaaatgttttgaagaacttgcattgaagatccttgaggtccctagtctcctggaggaagggtcttcttcggttgtcaagaggaacatcctgaaacagaagcaggaaagtcatgcaaagaacggcagtggatgctgtcaatagatgtgctgatccacgcgacaaggttggctgttttcgtgtgagctgccctgacgttctgctgtacatgagttgtatctacatggtcttgtgagtaaaacagggttaaagaatcagcttgtttggcggggagggggagtgagcataattgatttgtacaaaggacatggcagtttggtgtcattgattttctctctctctcttatcatctccggtttagcgaagcaattttgttgtcgtcccaaaaaaaaaaaaaaaaactctctcgccacagtattgtactagctgacctgttggggcaactcgtgtgagcattgggcagaccaactccagcaacgctatacatacgggcgtgtataacactttacagtgtagatgtactatttgcagagtggagtttgaaatagagtgatactttg

SEQ ID NO: 144309 - DNA, 378 bp, Zea mays
  Clone ID: MRT4577_63090C.1
ccaaacacacaagacaaaagttgtactttagagattaaaaaaaagaacaataaataacaagtcactgtccatgtgcgcatgctgcacaaactgagcgcgagctgacataaacagcagatagcggacacgaggagctccgctaggtttaccggtcgtcgagctgccgctatataactatattttagcggatcatttgccggtccttactaggacggtagcggacagccaaaaaaaacactaaatatagcataccgaacactttagcgttcgttgctggagacagccttagtcacccatgtatgtaatcgggcatatagttggtagccgacaccgttacccccgtttgctccaagtatttgaacaggcctttctgaacat

SEQ ID NO: 144310 - DNA, 155 bp, Zea mays
  Clone ID: MRT4577_63091C.1
gacgtaagctcggaattcggctcgaggtttttaacaccacgagtaataacctggaagggggcgaccaacggaacgggtagtttttcaagcgggatgcacaaaggcatggcgcgtctcaacacaaatacggcgggagccccaagactcaggacgga

SEQ ID NO: 144311 - DNA, 506 bp, Zea mays
  Clone ID: MRT4577_63092C.1
caagtaatatgagcagcataccggtctcccaagaggacgaacgacgaggtagaatgcgagcgtgtgccttcgaaagcaagccataactggcggataccaagtgcaggcatgcatatagcacaacaggggcaagcaagcaagcagacgcagggaggaagaaggacaagtgggtggcatgatagcgcacggcacgcgacgaaactggcggtcgctgccacccaccatgtgctatgatcacgggctctctcatgccgggcgatcttggtgcagagcggctcaggcggcggcggcgacgccgtgaccaggcagatactcaagaacgtacaccggcacctggaggagaccacccacttcgtgacctgcccctaccactactactgacacaggtcctactcgggcgactactacggggtcgatctggtcctgcgtactgccttcgacaggatctgcttcctctgcatgctatcgataggcatcctagacactctgacagagagcaacagagc

SEQ ID NO: 144312 - DNA, 609 bp, Zea mays
  Clone ID: MRT4577_63093C.1
ctgtgcggcgctcaggcggcggtttcaaaagagcagtccacgcaccatcctcccctccttctgcctagctcccctccccgtgcgccccgcctgtcacaaccacagccgcgacgtaatcgtcgcccaagccctgtcctctcgacctcatctccctcgatgtctcgtgcaccactgagaagacttcgccctagtacgtatgacatacggaggatctggcatgcatctcacgagcaaagaccctaccctcgcggagccgatgaccgatcccagcaagctgtccaagtaggaactgacgaggatctccaacaccgtgcatggccccggagaggacagcgaggtcatcctgcacccgcacgccatctttctagacccattcaagacgcccaactgcatccttgccatgtgcgattgctacaccccagctggcgagacgattcccaccaacaaccaggtacagcgcacgccagagatcttcaacagccctgacgtcgctgccgaggagccctggtatggtatcgagcacgagtgacaccctccttcataaggacaccagctggaccctccgcttgcctattggcggcttccctgaacctcacggtccttactact

SEQ ID NO: 144313 - DNA, 398 bp, Zea mays
  Clone ID: MRT4577_63095C.1
ggaaaaataatcccagccgggtgccttttccgcctaaaaaaaatcaacccccaatggcactgggcaggatacaggtttccccaacccacattttcattatcttagctctaatcggggggaaaacaatctactcatttttcaacaggacatttaatttcaaggaacagcatgaaagggcagaaaccccctatcgtttccttgaccgccggggagcggcccccttttcgctctcggtggcatcggcccaaagggggcttttaccggacctgtctccaaactgggctttggctccatttgctccagggttcccagggttatcatggcccctgctgccctgggcaaaggctgaggctggttaaaacctggcccctgggtcaccccctggccttttctggtcc

SEQ ID NO: 144314 - DNA, 283 bp, Zea mays
  Clone ID: MRT4577_63096C.1
ccggccggaaagatacaccacctgaatttgtcacctgcaagagacgcatatgccggcggccaccttcatgtgtccggacgaatatgaccgcacgctggattacaccctctacgatgatgcaaactattgtacaatcagcagcgaataattgtgctcaaatctataaaaaaacctacgccgcctcgagctacaccattatgatccctctacagaggcgtaatatcggtcccttgtgatcaatcatcggccatagactgcttcactgcggggataatagctcatc

SEQ ID NO: 144315 - DNA, 835 bp, Zea mays
  unsure (1)..(835): unsure at all n locations
  Clone ID: MRT4577_63097C.1
aattgcttccctcgaggccggccgggccgcacctcgtggataaaccgaggttgcctgcctagctccgactactggaactgatcatcttcttcgtcgggtcggcgccgcgcgcgtggataacaatgatggagacggaggaggagcagcagcagcgctctacgcggcgttggcaacggctccagcgagcggcctccgtggaggagctggtggtgcctgcgggtgcagacgcagcagcaggcggcggtgacgacgacgaccttgaggtgacaagggatcctacggtggtcaggggctggcgacggttgaaggccgtgtccatggtggtcttcagcggcggcgcccgacccaacaccaccaccaccaccaccacgacgacggaaatggagccgctgtatccagcccatgagcctcgaagtgacacagatatcaggttgagaagcccccagcggaaggcacgtgaggtagaagaagccagcgtggtactcaagagtccacaccgaaagaccgctgttgcagctcaggtatcaacgcaggtacaacagccctcgctacctccgcaacagcctgacgaggtcggaaccaaaaattcagcagcggaggttgtaatggacgtcatatcaccgaaaaccactcaggtgggcgttgtccatggcaacccagtcgacgatgacaaggaacagcgggcgcggtacctcaaatactcgcagaaggcgcttcggcttcgccgtctgcacgtttgtcgggtacgcaagcaacgcatcgtccacccggagcgcggccttcaagatggccgccgcgcccttcttcgggncatcatcgccgacctcctgacgct

SEQ ID NO: 144316 - DNA, 342 bp, Zea mays
  Clone ID: MRT4577_63098C.1
aaaaaaagagactggggaaaaaaattacacaggggtcattatgcccatttaaaataatgccacccccggcccagcagccaaattacaatatactggaattaaaaaaaaaaaaagttttttaatttggatcccgggtggggcgggcggggtacgtaaagggggattagtcaaagggggccttgccgggaaacttgacctcaatggggttgacgtttttgccaatgctgggaaagttttggccaaccccctccctgccgggggtgaccttttccgggaaaaccccccccttggggggggggtactgcacctccccgttggggaaaacccggaaaaactgggagg

SEQ ID NO: 144317 - DNA, 495 bp, Zea mays
  Clone ID: MRT4577_63099C.1
acctcgaggccggccggggcgaatcccgcgtgagcttcagctagattataccaattaacccgtctcatttcggactcgcctcagtgattaaccaccgctcactccatcagatatagtgccgatcgccggctcctagcctcacgccagcacgcctcaggcctttcgcgtccacgagcggcctctagccaccttatacacgtgcaatcttctgcactcgtccgaccgactagtcctattgccagactggctatcttgccacgaagctatgatccaccactcaaaatatttttgccggaaggtatctccgagagcaggtcctcgcacgttctctttgcataatgaatcggtatgcgattattctgtccgaccttctgtgtatgtcatctgtgatcagacaaatccacggcacatttcaagatatatgggtctgtgtatctagatgttcaaggtaacatactcgccatcttccatgacagatatgtagtaccgatatat

SEQ ID NO: 144318 - DNA, 497 bp, Zea mays
  Clone ID: MRT4577_6309C.1
gggggtgtgtttttttttttttttttttttttttttttttttttttttttttttttttttttttttttttttaaaatcgggaaagggaacttcttatttggggggggccccataccccaaccaaaaaatttattattgaattacaactaaaaggggggggaaaagagggcccccccaatgatgtgtggggggggggaggccgcccggcctgtcaaagcaggcgggacaaagggcaacaattggtggaaatagaaaagggggggggggctagccccaaactggtggaaaaaaggcaacaaccggtgctgggacaaaaaagaaacacggtttgctgcacctaactggctaaaggggaataggatttgctggagaaaaaaaacagcggggttcagggcggccaattggttaaaaggaaaaagttgttgttgctgaaagtaggcaaaacccacctggcggaaagggaaaaggtggtgctgcaaaaaaacagcagggttcaa

SEQ ID NO: 144319 - DNA, 1012 bp, Zea mays
  Clone ID: MRT4577_630C.1
ggccgctttttttttttttttttgatttgaaaacgggaaaactaactgggttaaagagccatgacttccatatattaatggagaggattatccctgtcatgtttcgtggttatatgcccgacgccatgtggcaggcaatagctgagctaagttatttctacaggcagatctggattcttcaatccgatggagcatctacttattcacattccatatgaggcaaaggttggtggaccattaggcattctggtagatcatcatcctgcgtcctgatgtgagtctccgtcaccaaatggcatgaggactccttgtttgtggcaaggcaagcaagaactaccactgcagctgccacagtcgagggccagaaggagagctgctcatggttccgaagtgagatggaggccaggtagtttgccaggtccgctaccctgtcatcagcatttgcagccttcagatagaaccataggaaatgatgggttgttgtgacaaaacacttgaagttgaggacctcctgaaccagccactccatggcaacaacctcactctggctgtagatattgatcccaacttgaaaagtttttcgaagaacgcaattgtatgactggttctcttcgatgcgtgtagccaaggtgatgcaggcaatgcccaacaactgaaggtttctcaaacccttcatatacccttgtgtcaagaagcggtccatcaatccaattcccatgaacattgtaactggctggagcttcatcagacgtgaatgctggatgatccagttcaccatgatgacacgttgctccacgacgagacggcggtagctgtcgggtatgcagctgcacacctcagtgaagtcgcgcgcaactgcctcgcgtcgctcgcgccgccggaagcgctcgtagctctcctcgtcgtccaagtcctcaaaccgcctccccgtcaggagatcgagagtggaactggagacggtgcacggtttggggtgcaagcaggggacgaactgcttggcgaagtcgcccgg

SEQ ID NO: 144320 - DNA, 239 bp, Zea mays
  unsure (1)..(239): unsure at all n locations
  Clone ID: MRT4577_63100C.1
caccatgacgttgtgagggtttccgagatngaggatatcctagatgccagccatgcgcccactcatgtaatccatagcgcaaggattgttcttctgaatgagcggccccacctgcctgctgctagtgtccccatttgcaaggcacgcacatcatcgacacatagctgggagacatgcagccgggtgctacttggtgcatctggcctgggggctgttggatgccctctcagggcctcacc

SEQ ID NO: 144321 - DNA, 2001 bp, Zea mays
  Clone ID: MRT4577_63101C.1
ctgtgttgtgccataggggttgatggacagaattggatgtaccctgttgcttatggattctttgaggcagaaacaacagaaaactggacatggttctttcagcagttgcgcaaggctgtgggagatcttcctctactagcattgtgttcagatgctcgcaaaggtctaaaaaatgccatgaacactgttttccctcaagctgaaaaaagggagtgtttcagacacctaatgcagaactacgtgaagcaatttgttggatccgagtacatgtatcctgcagctagagcatataggagggaggtgttcgaccattacttttccgatgtccaagaaattcccaaggtgtctagttggttacatgagcatcatgatagtttgtggtatcgtagtgggtttaatccagccatcaagtgtgactatgttaccaacaacatagcagaagtgttcaacaattggattaaggattggaaagatctgcctgtttgtgacttggctgacaagataaggaaggaaatcatggagttgtttcaaaagaggagggagataggacagaggttgcaaggtcgaatactaccctccgtggtccatatcctccatgtaaggactagaggtttaggtcacttaacagttaagaaagctgacaattacattgcagaggtgagggataataatgatgagcactctaagcacattgtgaatgctcaattgagacaatgttcatgcaacgagtggcagcatacggggaagccatgtcaccatgcccttcgcttaataacaacacagcaatttagagatgttcggatggaagattttgtggatgactactactcagttgataagttcatgaaggcttactccagggtagtggagccaattggtgacaaatctttctggcctacagtgccatttgcaaaagaggtgtgtgcttctattgggaagcgtggagttggccgtcaaaggaaaaacatgattaaagggtgcctagagggaggaagtggtaagaagccaaacgaaaatgaaaatgtcaaaactaagaagatgattcgtgggaagttcaagtgtccaaactgtggtgaattgggacacaggaaagccagctacaaatgtcctttgaatggaacaaaaaaacggaaaaggagagcaaggaaaaatgttactaaaggttggttcccaaaagatgttgaggcatgatgatggtgcatgcactagccacacaaccacccccatgtgatgattgtgatgccagtattgcaaaaatctctccactttcacctcccagacctatctagaggctagtgctggaccagtgtaccctaggagctgggtgccaggtgcggtggcgggcggggcctagcaaagcatgacgctgtaggagggatccagtcatccgatacgtcagcactccggcacagcagtaggcatctcggaagccggcagggccacagggcaccacgcccaaggcttagccacgcaggcactgagcagccaagtagtcaggcagtcagtgagcagcagcagacggcagcaaggctggaagcgcgaagtacctatataggcatataagtttagttcgaccgggagtttacttctctgttatctgtgacttgcccgaccccgacttgatgtgcattgtagattctcagaaattgattaatgatttaatcacagattttaatcaactcaacacgtcgagaagaatatttttgtgctcatagttttttagttcaagcaatgttaatactagtggtacttccctgagttcatatcaatgcttagtcttgggctcctcagaaatgcaaattctttctttggcttgcaattagaaacaagtgttggactgctgataatctggagaagaggggttgcagcacccaagcagctgccctttgtgtgaccaagaaagggaaacgatacaacacatcatcactacctgtgtttttgcccggcaattctggtttcttatttttgactctcgggatgagtcacctcgctcttagggct

SEQ ID NO: 144322 - DNA, 290 bp, Zea mays
  Clone ID: MRT4577_63102C.1
tcctactgaagatgcgaagcaagctggcttaaagatcaagactgcatgtgctggtggaggacgtggcgaactgtgaactagagcaagattgccggcacactgctgcttgcgctcctcctagcatatgctgatgccgacattgaagtacttggctttaatattactcacaatctcatgagaacactctagcaggaccttatcatgcactgacataaccgactctacacttactccacagactataaatggacgcactttggactctataccatatgtcagagacatcacat

SEQ ID NO: 144323 - DNA, 719 bp, Zea mays
  Clone ID: MRT4577_63103C.1
cattgggaccctcgaggccggccggtcgagtgtgcccatcctccatcgccatccaatggccgccaccgccctgagcatgagcatcctccgcgcgccgccgccctgcttctcgtccccactcaggctcatggtcgcggctgccaagccgctggcggcccccatgcggcgccagctgctgcgcgcgcaggccacctacgacgtgaagcctgatcacgccgcatgcgtaggcggagctgcaggcgcccgacgacggctacatcctgcacttcgccgaggacgaatgtatcgacctgcccttctcctgccgtggggagtactgctcctcctgcggctgccagggcgtctctggatccgtcgaccaacccgaccagagcttccgctgcgaccaccatggctgcgatcgggtgggagctcacctgctctgcgacacccacctgcgacgtcgtcatcgagacgcacaaggaggatgagctcctatgattctagctagctatacaccgacagaggaccgtcggtcttgagacaccacatgctacaccgcccgcgcaggagatgatacgtgtcgtctcaataattctagctatatatatagatatgcatgcatgcatgcactgttccctgctccaaactgactatattctaaattacaagattctatcacaaggcttacagcaactccaagcatgagtctcaaaaaaaaaaaaaaaaagcggccctct

SEQ ID NO: 144324 - DNA, 178 bp, Zea mays
  Clone ID: MRT4577_63104C.1
ctctgctgagcacaacattaacattctggtgcttatagtttttgctctttttcccccaagatcgatctcatatgcccctttcttttgaaaaagacacccctcttgtaaaaaaaggaaagactgattgatatttctctttatacaaaaaggtgctctaccagaaaggtagtcatgctct

SEQ ID NO: 144325 - DNA, 345 bp, Zea mays
  Clone ID: MRT4577_63105C.1
gaggttgatatgtaggtcgaagaccacaaaaacatggaggtggactttttggggtcgcgggatctcggacacacgacatggccggaggttgcctgcccctactgctacgaggaccaccacctcacatacctatgaatacaccacaaggaggaccacctttacaagccccacgccgcgccctgcctcatttgctcctaaatgattacatgggatatactaaaccatatgacgatgcaacatggttacttgtgcaagatagggcacagatgccgtagattaactgatacagatagccatgctgatttcattattgagaacagatctacgaggtacttattaacaggc

SEQ ID NO: 144326 - DNA, 198 bp, Zea mays
  Clone ID: MRT4577_63106C.1
agactggctgaggctctgagctgccacatgccattagcttaaggtcacacctggtgatgatagcatttgaatctaggcagtctgacaacatcaccccactgcaacactgatgccaatctctgaaacttgtctccaaatattgacatttaattgcctcttattatacttgctttttgagtgcgacatagatggaataga

SEQ ID NO: 144327 - DNA, 125 bp, Zea mays
  Clone ID: MRT4577_63107C.1
cgcctcgcccgtagtatcggagaggtatctccgtgacagcgcaatctgctgacactgacatccgcacatcttagggattgacagtattccgcagcctgcagtttacacactgttcgcacgatatg

SEQ ID NO: 144328 - DNA, 503 bp, Zea mays
  Clone ID: MRT4577_63108C.1
catacattgcttttttttttactgttgaaattaatttatttgattgcaatgtacgtgggtctagtgtagcaaattattgcacacacgagtatacacgttcgtacaacgagaaccacactacagcccacaacatcccactatccacccgagcgggtaatcccaagctccatggatctccaacacaagtatacaaaaggctgggataatatgtgtagcagagccacaagcaccaaacaaaagaacatagattgacctgcgctaccactcgaggccctacctgggggcggccggagaagaccatttcccagctccaacagctgcacgcttgactgacaggcgcatcgcccgcgccttggatagaatcgcggccacgccctgaggagggaaacaaccatccagcgaccgaaatatcgtatccgcaagcccataagcaagagccccttgtgctcggaagtaccccgggcccctaaggaattcagcaagctcctccctaggcttaccaa

SEQ ID NO: 144329 - DNA, 405 bp, Zea mays
  Clone ID: MRT4577_63109C.1
ttctcgtcgatgccctccgccgccgtctcgccgttcttcctcctctcatcgtcataggctccttgggtaggttctgtgagtttccaaaggtacagagcgtcgcgtaggctcgtagctaattgtcatttggtttcgtggttcttgctccgaatcgacaatcgtgttgtttctttgcaatttgtttgtcatctggtttcgtagttcttgctccgaattggcactcgtgttgtttctttgcaactgtggagcagaaatggcggtgcccgctgctgactcatgaggcctcacctcgacgactaagaatgccttgagttcttatccataattcttatctgaattctgaaatgatgcccgttgtatttgttgcagaccgtatcaatctgaatcttgattactgttttcatc

SEQ ID NO: 144330 - DNA, 305 bp, Zea mays
  Clone ID: MRT4577_6310C.1
ttgaaattgagaaaacttagacacttaatgactactggccattgattattagtaatggattgatagtgtaacgtgtaacactgttaaggcgacatgatgcgtgagcttgcccatgcggatgaaactgtacctacaatcgaatgaatggctgatttgatgatcccatagcagctggtgaaaacgatggtactgatatgcctagcccttattaactacatcaaagtgacttctgatggcaccttatagggttgggactttaacctatcaagggatgggttttgaaaaaaaaaacgctactccttgtc

SEQ ID NO: 144331 - DNA, 360 bp, Zea mays
  Clone ID: MRT4577_63110C.1
gggttggggggtggggcacatgttcttttaactagctttacaaataggccttttcttaccggcttccgtaatttgtttttgggggggaaaacttgcccgccttaattttaatactaaccgggggggggattttaaagtagcatacccctccccatttattagggggaaaatgccctgccccttattttcattggcgggggtttaatataatactaccccgcgcccggggcccagggggattattgggcccccccaaattcccagggcacccaaccgacgtaggggggaggccaaccaccgttgcccgttcgcccggggcaaatgcgacccacgcattaaagccggcagggagaaaagcct

SEQ ID NO: 144332 - DNA, 421 bp, Zea mays
  Clone ID: MRT4577_63111C.1
ggggccaaaaaaacgggattcatcgccgcccccccccacactataggaggacaacacaatggcaaagaaaaaaccgaaaagcaccatgacattggaagcggccccaatcctttgggactcaaaagggaaacaaataccaagcccaggaggggagaaaacaaatttatacatcaaaggaaaccaaatttggttaaacaaaacaaacccacaaagggggggaacaactttaaaaggggggccacaacccgggacaaaaaaaaagagggggggtgaaccaaccccaaaaacccaacaaaacaattcaacggcccaacaaccacagggaagggggggaaaaaacgtaaacctaaccccaactcctttttcgggcctattccggaaaaggggaaagggaactcccggaactgggttttggccccac

SEQ ID NO: 144333 - DNA, 1090 bp, Zea mays
  Clone ID: MRT4577_63112C.1
gccggccggtcacgggaagagccagaaacccccccgctgcgcaaccggaggcgtctcccagccccgcgccgccgctgacggtcgtggccggccccgtctcctcagcgccccggaccgtcgaggacatctacaaggactacgccgcccgccgcgccggcctcgtccgcgctctcacatctgatgtcgacgggttctacagcatgtgcgacccagagaaggagaacctgtgcctgtacggtctcccgaacggcggctgggaggtatcgctgccggtggaggaggtgccgccggagatgcccgaaccagcgctcgggatcaacttcgccagggacggcatgaggcgtcgcgactggctctcgctcgtcgccgtacactctgacgcttggctcgtctccgtcgcattcttcttcgccgccaaactcaacggcaacgacaggaagcgattattcaacatgattaatgatcatccatctgtgtatgaaataatggctgaccggaagggaagggagaataatcctggtgttgataacagcagcaaatccaggcactcaacgaagcgatcaaatgatggaaagataaagaactcaagagtggcagttggtgaatgtaggtatgagaatgatgaagaccacagcgaaaccctttgtggttcttgcagtggtctctacaactcaagtgagttctggattggatgcgacatttgtgagcggtggttccacggcaaatgtgtgaggataaccccagcaaaagcagaacagataaagcactacaagtgccctgattgcagctacaaaaagagcaggcaataaaatcttggagctgctggcctcctattactgactcagctgatcaaccaaacaatacttttcaatttggccgtagatgttaactaccctaggcatttctttgttgtggtacatgctggaaaaagacatacaggatagttgatcttacagtctggtcaattgcttttgtgcttgttttaatgacatctgtttacgggttatgtcttcaaggtggatggtaaaaaaaaaaaaaaaaaaaaataaaaacgtgatgagttatggccattatcgaaatttgagattaa

SEQ ID NO: 144334 - DNA, 335 bp, Zea mays
  Clone ID: MRT4577_63113C.1
gggacaccaacacctgaactggttgttgcattagatccaattataataataatttcaacgggtcattggccaaaagaccagccgccaaaaatgtttgttaccggcccactccggaagggattccctgggtttttaacccaaacaattatacctgccctggggtaatatagagaaaaaaaaaggggggggggggaaaacaaaaaaccacggtttattaagtgtttacaaaaaaaggcaaatggggcaattccaacacttacatacaggtttttcaaccaaataattggacattaacaattccatggcctgccgcgttgaaagttttgcccccagaa

SEQ ID NO: 144335 - DNA, 647 bp, Zea mays
  Clone ID: MRT4577_63114C.1
atatacatgaccctgcgcgcaggctcgcggtgatcaccaatggtattgagagcatctataaacacaccaagcgaagctacctagcaccgacttaacaacaatggctaccgagataatagccctgcttgcgcttcttgccctttgtgggagcgcaacaaatgcgctcattataccacaacgctaaattgctcctagagccatacataccacagagtcctcccaccaggaacgttaatgggcttcgaacacctagctgggcaagcctacaggctacaacaagcgctcgcggaaagcgacctacatcatccaattaaccatttgcaacaacactccttggcacatctaaccatacaaaccatcgtaacgcagcagcaacaacagatcctaccagcactgagccaactaaatgtggagaaccatgtcgcctacttgcaacagcagcatgcttgctatccaacccacttgctctggcaaacgtagctgcataccaacaacaccaacaattgcagcagtctctgccagcgctcagtcaactagccatggtgaaccctgccggctacctacaacagcaacaactgcttgcatatagccctcgcgctgtgagtagtgcacctacatacctgctacaacaatagctgtgacagatt

SEQ ID NO: 144336 - DNA, 515 bp, Zea mays
  Clone ID: MRT4577_63115C.1
ccttcgtttccgatttagacgtgaatttcatgaacttgtgatgaggacaggtaacaatatgactattgaagggtttgttggtgttgtgcggcttgcatggtctgttcatttgatgctaactcaagatcgaagtaattcaagagaaacgtcagatatttggtcatgcctggaaattatctgtcgtcaaaattcttttgagtttttgcgggagcaagttttgaaaacagctgcataccagaatgatgatgaggacattgtctacatgtacactggctacactcacaagctaatgatgtgctttatttcccacccaacttccagagataagataaaggaaatcaaggagaaagcaatgactgccctcagtccatatgagccaccacgaggtcaacgagaagatcttggtagaaatggggaacaagctgatcagcctactaaggagccttttgtatccctgctggaactggttagagaaatctatcagaaagtgcctgagctagggaatggaaatgagg

SEQ ID NO: 144337 - DNA, 253 bp, Zea mays
  Clone ID: MRT4577_63116C.1
cggacgcgtgggaacaccctgaatttgagggtattacaccgtcgatcatagtactggacccgggcgccggcgagttcattcccgtggaccccgtctcgggctccttcctcgtaaacatcggcgacgtcagcacggcgttgagcaacgggaggctgcacaacgtgaagcaccgggtgcggtgcgtcgcacccgtgccgtgcatcttcatctgcatgttcctgctcttacccaatgactacagcgtgagcgcacc

SEQ ID NO: 144338 - DNA, 266 bp, Zea mays
  Clone ID: MRT4577_63117C.1
cggactatcttattcacgccctgaccctctcctacctttgggtgcgttgagagcaagaagagggcccgcgccttcctcttatcgaccttcacctccacctccacctacagccatgtctgtctacaccttcagctgctactagacgaggcccttcttcggcttcctcggcgccgacgccgggctcgtcttttcctgcatgggcgccgcctacgggacggccaagagcggagttggcgtcgcctccatgggcgtcatgcgcccccagc

SEQ ID NO: 144339 - DNA, 712 bp, Zea mays
  unsure (1)..(712): unsure at all n locations
  Clone ID: MRT4577_63118C.1
gggaccctcgaggccggccgggctagttctacgcggcgaaaccctagcccgccccccatggacgatccctcctccgcctccaacaagcacaagcgcaagcgggggcgcaagcccaaggcgtcgccgccctcccccgaccgctcctccccctctccctcggccgcgcccgctccggctgggcgccgtggccgcaagccgcgacgtcatgagtcccccgccgacgcggacgccacgcgtccgccgtccccgccccgccgcggggagccgaagccggtggcaaacggaggcgatgtggtggcagtggcggagtcaggccccgcgagctgggatgaggtggtgagggtagtgccgtgcatggacgctgtggtcaaggtgttctgcgtgcacacggagcccaacttctcgctgccgtggcagcggaagcgccagtacagctccagcagcagcggatttatcatcagcggtcgccgtgtcctcaccaatgctcactccgtggagcactatacccaggttaagcttaagaagcgcggctccgacaccaagtaccttgccaccgtcctggccatcggcacagagtgcgacattgcgctcttaactgtcaatgacgatgaattctgggaaggagtttcacctgttgagtttggaacattaccagcccttcaggatgcagttactgggtgntggntatccaattggaggagataccatatcc

SEQ ID NO: 144340 - DNA, 259 bp, Zea mays
  Clone ID: MRT4577_63119C.1
ggataaacaaagagctctgagattaatcacaggaactgtcgtctagcccaggctatgaataatgctcgtatgttgttatgattactagcgtacgaggaagggaaaacaacatctctttctgtgtctcatgttcatccgggcctttgtctctcgcctgtgtatactatcacagccacattccattgtcttctgtctttgcctttaaggatactggagttttatagggcatccaaccgttatgcaacgataccgcatattg

SEQ ID NO: 144341 - DNA, 299 bp, Zea mays
  Clone ID: MRT4577_6311C.1
tctttttgcaaaaaccccaaaaccacggcggggaggggagaaacaaacacaggggcgcaaccagagagatcggagaaggggaagaagaaggagccggaggccaccaaacacgcgaagaccaacagggcgaacctcaaccggcagcccaaggacagggaccacgcacggaacgccctacaccaggacgagaagaaagaaaggacggaaagggagccggagaaaaagagaaagcacgcagagatacaggcccaagccaaagagaacgaaacaagaaaggcacccgcccaatggaaccaggc

SEQ ID NO: 144342 - DNA, 954 bp, Zea mays
  Clone ID: MRT4577_63120C.1
gggtacctcgaggccggccggggcccgatcgccgatgcctccccgccccgtcccactattctctcgcctgctcttccgcctcccgagttgcgccgccgtctccatctccacccctccatcctccgcggcgcccctgcactacggccatcgcactcccctcgctagcccttttcctctgtccccaccttgcccgcgcatcctccgtgcggccgtcgcggtttcttcgctggatctgcgcccgatcaccggcgggttcgcgctattcagcatggctgctgcctcctccgccacctccgtccacgacttcaccgtcaaggatgctagcgggaaagatgtgggccttagcacctataaggggaaggttctgctcatagtcaatgttacatctcagtgtggcttaaccaattccaactacacagagctgagccagttgtatgagaagtacaaggaccagggttttgagatccttgcattcccatgcaaccagttcggtgggcaggagcctggcactaatgaggagattgtccagtttgcttgtactcgcttcaaggctgagtatccaattttcgacaaggttgatgtcaatggtgacaatactgcacccatttacaagttcctgaagtccagcaaaggtagtctctttggcgataacataaaatggaacttctccaaattcttggttgacaacgaggggcgtgttgtggagcggtatgcaccaacaacttccccactgagcatcgaaaaggacatcaagaaactactagggagttcttaaacttgtaatcggatccagtagccctaccaaactgctgctttgcatcgagcacctgatgccttataatcgagatgttttgcatttcttctgtattccctgctttgtggtaaatgtcatgtaataaaaacgatgcaatccacgaattctcttgaaaggttatgtatccaggttggttgtcg

SEQ ID NO: 144343 - DNA, 1044 bp, Zea mays
  Clone ID: MRT4577_63121C.1
gttgctacaaggaggatcgtgaggccatccaagaagggttcaactgttcagcgccctcgcaccaggactttgactccttttcatgatggcatcttggaggatgttgtcttcccagttgagattgtggggaagcgtgtcaggtatcgcctggatggtgccaaggtcatcgagatcttcttggacctaaaggagaggaacaacaccgaatacaagctagagacctacactacggtctaccgcaggctgtgtgggaaagatgtggtctttgagtaccatatgatcgatattgcataaatatgatgcccttgatatctccatttcatttcatcgaatctggatgttttgttggggtctcaaccttaactggaatgttgccaagtccagaaaaatgttggaagacagtgtcaaaatggaggtaagcttacaagttaaatccccccattaatttttactaaccttgtgttgctttcctcaagtatcatggtatatgaaccccggtaaagtaactaaacatcattgttgttgcatttaacctgaagtttctattgaaggggaaacgagtaaaatgtacatggcaagttttcaagacagcggggagaactgttgttgtcatgagaccagcaaagcattcaagaagtccctctttttaaagtgttatctttagtgtcttctctttctgaaaattgttgctctttgtaaactcatctgtatgccattctcaaatttcagaacacatcatttcatggaagacatatatggttccttgtatactctttggagtatgcaatccttagcctgctggtcaagagaaaatggtctgactaatcgacttaggacgaacaatggcaaatgctatgcccataaagactgcccgagaaactgtaagcatcctacaaaaccattaccatcagcaggttggccactgctttttggaatagcagtcatgccagttttttttggagatcttcttgtaactttcaaacttgagcaatccgaaaagtattacaaaaccagtgctgcatagtattacatttcgacttcccc

SEQ ID NO: 144344 - DNA, 427 bp, Zea mays
  Clone ID: MRT4577_63122C.1
tcgggcggcctgagagcaagtactatgtagccggatgattttatgtaatgatgaatggttcagtaccactgaaccgatcccaatttactcctgtgggggcgggatgggagctgcaagacacagactcatagaacacttattgatgaaaaagcatgcgtagaacgaatggtgatgaaaaatcaccttcctatgacagacacatcttatcaacatatgatgatcgggatatatgcacatgggatgatctcggttacatttactgacgacaaatcaattggtgtggagcacctgtcacttcagtgttcgtggacgcagacgcattgaatgaaactgttgtactcttgcgagccattagctgtagacgccaccacaacgatctgactgagactcgaaagctggtggagcattcatccttggacgcaggcta

SEQ ID NO: 144345 - DNA, 1351 bp, Zea mays
  Clone ID: MRT4577_63123C.1
atgggtccctcgaggccggccggggtgatccattgtcggttgtcgcctctgaccgtaccacctctgttacctgcaccgccgctccgttaaatcgcggcccgatcgccgatgcctccccgccccgtcccactattctctcgcctgcgcttccgcctcccgagttgcgccgccgtctccatctccacccctccatcctccgcggcgcccctgcactacggccatcgcactcccctcgctagcccttttcctctgtccccaccttgcccgcgcatcctccgtgcggccgtcgcggtttcttcgctggatctgcgcccgatcaccggcgggttcgcgctattcagcatggctgctgcctcctccgccacctccgtccacgacttcaccgtcaaggatgctagcgggaaagatgtggaccttagcacctataaggggaaggttctgctcatagtcaatgttgcatctcagtgtggcttaaccaattccaactacacagagctgagccagttgtatgagaagtacaaggaccagggttttgagatccttgcattcccatgcaaccagttcggtgggcaggagcctggcactaatgaggagattgtccagtttgcttgtactcgcttcaaggctgagtatccaattttcgacaaggttgatgtcaatggtgacaatactgcacccatttacaagttcctgaagtccagcaaaggtagtctctttggcgataacataaaatggaacttctccaaattcttggttgacaaagaggggcatgttgtggagcggtatgcaccaacaacttccccactgagcatcgagaaggacatcaagaaactactagggagttcttaaaccttgtaattggattcagtagccctaccaaactgctgctttgcatcgagcacctgatgcctcagtagcgttttaataaagttgtttttataaccgagatgttttgtatttcttctgtattccctgctttgtggtaaatgtcatgtaataaaaatgatgcaatccacgatttatcttgaaaggttatgtatccaggttggttgttatgagataaaaaaaaaaaaaaaaaaaaaaaaaaaaaaatgagatatacaaaaaaaaaaaaaaaaaaagcggccaaaaagcctaaacaacaaaagaaaaaagcgaaaaacataaacacaaaaaaaaacggggcgcccgttttgaaggggtcaacgtttgattccccgtcagggagagcacagactgttttatggaggggccccaaatttacataccacggggcctgagttttccaaccgggcgtactggaaaaaccccgggcgctccacaattaatgacgttggggcaataacccttt

SEQ ID NO: 144346 - DNA, 644 bp, Zea mays
  Clone ID: MRT4577_63124C.1
gcctctcattcccaaacacaccatacatgcaacgttcaacccaaaccacaggttttgttcagctagctagtgttctttgacgtttttacatatatgaatcattgctacagtaccttggttggttcatatttgctcatgagcacgatgtatatatatcgctttattgcctttggcacatgaagtttttatcagggccacttgcgatgctgagttattgaagggagatttattttactacctaccaatgatacgagtttgtcattagttgctgatgtcatagccacacacatctgatgggaaagaccgaaagaggatccacatgggcaaacctgttcgtgtggactctggaatatagctggggccgtatgaaccctgtagctgatgggtttagtgttttttccagcaggtcgttatgtgccaaagaggccaaatcaaatttgaataggagggataatcctctccctattcaaatttgaataggcaggggattcctcccacatggattccctccaattccttatccaccaaatcagttgttaggcttgtttgggagcaacaggatttggaagaattgaagggactaaaatcactcactatttaattttgaatagtaagagattttagctcacttaatcccgtccgat

SEQ ID NO: 144347 - DNA, 267 bp, Zea mays
  Clone ID: MRT4577_63125C.1
gctcgaggagagctttgacgcgcacgcgcataagaagaagggctctgagctgccgaggcacacgatgtccaacgctgacctgcgcaggattatcaactctgacgaggtgcagcctgtgggtaagccactctacaaggaggtgaagcgcagggagaagaggaagaacccgctcacgaacatggctgctgtgctcaagctcaacccctagctcggcactgcacggaagatggcacccttgctgaggctgccgagtcaaggccggaagag

SEQ ID NO: 144348 - DNA, 119 bp, Zea mays
  Clone ID: MRT4577_63126C.1
gaggtcagacccctaacctaaatggggggcctagcaaaggtgaggacaccatgactcggagcaaacccacctggggctgaccgcgctggtggcactaatgcagccggaactgctgcaca

SEQ ID NO: 144349 - DNA, 2512 bp, Zea mays
  Clone ID: MRT4577_63127C.1
gggtacctcgaggccggttgggtcaaaagagtaagggcttgcggtggatacctaggcacccagagacgaggaagggcgtagcaagcgacgaaatgcttcggggagttgaaaataagcatagatccggagattcccaaataggtcaaccttttgaactggctgctgtctccgtgggccgggggagcttgctccctcctcccttcctctcgagagggactccctcggcgtcaccatcgaccccgcggaagcgggggcgtgcgcgtatccactcctcaaccaagtggagcatcccctcacgctagaccggagctggggggcgacgacgagccagccgccgccggtttgaccagacctgtggtgatggactgataaggtatgcctgtaggagggagagagctttcggtttagaaaataagagggtgccgcgggctggactgagagagcggaaggaaggaaggagccggcgatgggcgggtggaactggctcttctgcggccgatccaaagccggaggcggcgagctccggcctcccgagcccttccagctgccggcgcccttgcccgagtggccgcaaggaggggattttgctaagggcacaatatgcataggagaggttgatgttacaagtattaccaaattccggagtatatggacctgctcagatgctacattttatgagccagaaggaattcctgatggtttccactgccttgggcactacgcccaacagaatgaccgccccttacagggatttcttctggtggcaagggaagtggctagccaccaagttattgataccaagcccgcccttgagaaaccatcagattactcccttgtttggaccagtgctgacgcaaatgaagatgacaatagcgaatgtggttgcatctggctgccatgtccacccaatgggtataaagcccttggctatgtggttactaaaggaccaaagaagccctcactggaagcagttcggtgtgtgcgagatgacctaacggacacgcgcgaaaatttccattcaattgcaaatatggacaacgcatgccagatttggaagacaaggccttgccaccgaggagtgggagggcgtggtataccggtcggtacattctcctgcgaaaccgattcaacagacagcgatgaatcgagcactccctgcctgaaaaatgtcgactcaaatctgggtgccatgcctaatctggagcagatcaatgctctgatcaagcactacggcccaactgttttcttccacccgcaagagacgtacttaccgtcatcagtttcttggttctttgagaacggagctacattgcacgagaaagacgcaaaaatgggagatgcaatactccctggtggcttgaatctgcctgttggtgggacaaacgatggcgagtactggattgatctccctgatgatgacaggaaggagctcgtcagagctggcaatctgaagagcgctgagctatacgctcatgtgaagccagctcatggagggaccttcactgacattgcaatgtgggtgttctgcccgttcaacgggcctgccaccatcaaggttgggtttgcgagtttcgctctgcagaaggtcggtaggcacattggagactgggagcacttcaccctccgagtgagcaacttctcaggtcagctgtcgtctatctacttctcgcagcacagcgggggcgagtgggttgaagcttgcgatctggagttcatctctgggaacaaggcgatcatctactcgtccaggaacgggcacgcgagctacccccacccaggctgctacctgatgggttccgagacgctcggtgtcggagttagaaacgatgtggcgcgaagtgatctgtcagtggattcgagcacgcggtatgagatcatctcggcagggcatctcggggaggacgctgttgcggaaccgtgctggctgcagtacatgagggagtggggaccgaccatcacgtacagctcacgttcagagatagacacggcgctgagcttcctgccgttctttctccggttcacagcagaggcaatattcaacagccttccggcggaactgtacgaggaggaaggtcctacggggcccaaggagaagaacaactgggaaggcgacgagagatgctaggctttgtcgccatcattgtttacccctgtcaccttaatctgtaccctagagctgtattgtacttgatgaaaaagattgatactgtatgtgataagaatatacagtttcgtacatatggtgggctggtggctgagccctgagggttcagtgcacttgtcaggttaggcatctcgctgcttatttagcccgatgcggtggtgcaagtgcatgactacttgccctgtgcatctgccaaccagattgcgcttgtattgtgcctgtcatacttccttttctagtggagtattttggtaagagacagatatatagttcaaaatcaaaaaaaaaaaaaaaaaaaaaaaaaaaaaaaaaaaaaaaaaaaaaaaaagccggtacctcgagattcca

SEQ ID NO: 144350 - DNA, 344 bp, Zea mays
  Clone ID: MRT4577_63128C.1
attcggctcgagggcctatctgaccctgcttttcttctggctatcacagggtacccataatggggtgttaatccttggcggatccgctcatctatgacggtggtcaactggcgatgacgaatcaatcctgactcaacattctgtgttgtcacgcgttatggtcggttggctgtgcgtgcaccattggtgggatgctgatatgtatgcttgacacgatgctcagtttatacccgttgactgtggcacctctgcaccgccgagatcactggatatctctagggcgcatatcagttctgctgtggaaacacgctcgcaatgcagcgcatacatgctgctaggctgac

SEQ ID NO: 144351 - DNA, 3621 bp, Zea mays
  Clone ID: MRT4577_63129C.1
cttgggcaagcctcagaccagttcttctttctccagtttccgcagtgcagccatattaacatgaccaaacctctcatgccaccgccaggctacttcatcttcgcgcccacgcactgctaggcacacagactgttgtatcttcaaatgaaggaggtacaacctgttttcagctcgcactattcttgccagtaatcttccatcaggttccctaatatgcatcaccccatcatcaacatgaatcttgtactttgcttcatcaagttgcccaatactgatgatatttgttgtcaggcgaggaataaaataaggcccaacaaacgaccgggtctcgccattcttgcacataaacttgatggttcctcgtccctcaatctgagccaccgagttgtcaccgaacctgacagtacccaacactctggtatccagatcggtgaaaacagccctggatccggacatatgatttgtggctccagtgtccaggatccaggttccctcctctaatttctcctcctcttcatgctgtaagaacaccttctcctccctgatctctagatgagaactagacatcttgcagcatggtttaagtgttgaggtttttaccgggaacgtctttgccacaagaagtgtagcctcctcttcttcttggacagcatgtgcttgctccttcttgtgccttgacggacactctcgcgcccaatgtcccatcttgccacaccttctgcactcatcaccagtgacctttccagccggtggtccacctgatgagcgccctcctctgccacgactgcgaccacggccccgaccacgcccacggtatcctccatcatggcgccctgatcttccacccgagctgctgccaggatggtgctcgacttccttcttgcgccgggcattccactcttcttccgtgaggtagagtcgaccactgtgctgcagtgatcctggggcctcctcaaaggcgtcctccgctgctctcaacctccccaccatgtcagacacagtgagggttgacaggtcgaggagagtcatgatggagaggacgatttgcttgaagcgtggtggaacgctgcgagcaattttctccacgatcttctcttcttccacgccagctccaagagtggagagttccgctgccatgccatttaggcgcagcgcgaaatcttcaacggactcaccgtcattaaacgttgccaagtcgaacttcctccgaagcagcacagcagcagtcttcatgcgatcatcgccaacccgtaggtctgcaatggtcttccacgcctcctttgccgtggacttgtctgcgatcgaagacaccatctctggtggcagtgcgctgcagagagcgtcgagtgccatcatttcttcatggatgtctgctcctccgtgctcgatgatgtcccacaacatcctcgccctcagcttcaccttcatcaggagcgcccagtccgagtaattggtcttggtgagtgtgggatatccactccctgcactcacctcacgaattactcgctggaccactgctccatctttggaggtgtcgtcgctggacttcctgaatgtcgcactgctatcaacagttttcgacatcttgctcctccttggctctgataccacttgttggaaactgcgccggagagacaaccctgcaggttgccggcgagttcctacctcccaggtaagttcttcaggtatgagaaaacctcccagggactcacacgcacacgatttggagaggaacacagcagatttggtggcgtcctattgactgccttttcttagcctctaaggccatatatttatagactttcataaggaaacaaactagctattacaaggtaataatccggactgctatcagtcctgatcttgctgattggatccgtccatataagactgatccactaccatactagctatttcctaaaacagaataagtaaactagcaccaatcaaggattactttcctaacagcctctacatgttgatagtttaattttcattcagcaagaagcagaaacttggaagtgcttgggcggcgcaatgttcctgtagaccttgtgtataaatttgctccagatttgatcatgttagatgcttatgagactgttgaatcatggatgatggcgagaaacaggttgaatccagggaaactcataccagcaatgatgcgttatgtgagcgaaccacatgcaaagaatgaaacacatgaagttatcaaatacttggaattttgtgtgaaagatttgaacaatgtggaccctggagtgcataatctgttgctatctctatatgccaagaaggaggatgaatcccagcttttgcaatttctcgacacaaaatttggtaaaggacaaacaaatggccctgacttcttttacgatccaaagtatgctctccgcctatgtcttcaagagaagagaatgcgtgcttgtgttcgtatttatagcatgatgtccatgcatgcggaagctgtggcacttgctttgaaggtggatttggaacttgcaaaggcagaagctgacaaagtagaagacgatgaagagcttaggaagaagctgtggcttaaggttgctaaacatgtcatcgagcaagagaaaggtgtcaagagagagaatataaagaaagcaatagaattcctttcggagaccaataacttgttaaagattgaggatatcttaccattcttcccagacttcgtattgattgacgatttcaaagaggaaatatgcaaatctctgaaggactacaacagccagattgagcagctcaagcaggagatggatgatgccacacgtggggcagataatatcagaagtgatattggtgccctcgctcagagatatacagtaattgaccgtgagcaggattgtggggtttgccggcgcaaaatattgactgttggagggttgcaccaggtagggagaagctatacatctgttggacacatggcccccttttatgtgtttccctgtggacatgccttccatgcaaattgcttgattggacatgtgactcgttgcagtaaccaggtgcaagctgagagaatattggaccttcagaaacggcttagcttgatggacaggaaagcagcaaaagacaatggggcaagtgttaatggcgaacctattacgagcacaaccccagttgataagctgagatcacagttggatgatgctgtagcaagcgagtgccccttctgcggtgatttgatgatcaaggagatttcacagccgttcattctcccccaagagtcggatgaaaaggcatcatgggaaatcaaacctcaaccaacgcctcaaaagattctcccgatgaccatgtctatttgatgctacggacagtacagcctaagatggatttggttttaaatttttatattgtttttgacttttgacactccttttgaccatgttttaatcctttttatgttgtggtatatggtattcaatatcctactgctgttgggttatcttgttttatatttacctaacttgtaaccctagaacaatgtagtcatcaatcgcttaccttgtggttgtggttcttgtattggatgcatcgtgttggaacatctcggtacacttgttatttgggattgtttttttttctgaagtcttgctccgg

SEQ ID NO: 144352 - DNA, 354 bp, Zea mays
  Clone ID: MRT4577_6312C.1
gctaggacaaagaaggaggcagtctttttatctgtccgaactgctcttcgagcaggttcaaaggcaatcagtggggggtacaaatggtgccaaaaagtacattgttgctcctgggcaaaggccagataccgagaccaataaaaaaacaactgaaacccccataccacttatagtcaagaagcgttgctccaggaagaaatggaacaagacgaaattcacgaggacggctgacccaattgctgatgctggaaaggatacagaggggcttggaacgcttctacatgatgactatcaggaagctagaacaatatgttatgtgttacctacagatactgctatggttcaatttaacaa

SEQ ID NO: 144353 - DNA, 263 bp, Zea mays
  Clone ID: MRT4577_63130C.1
cagggaccagaaccccattagtggcaaggaagacagtgttccgagcatccgtggctctaacgccaacagctccttctagaacaggctctgtgcagacacctccagatttggaaagttctgaggaagttgatgcagctgaaggagccccagaagttgtcggacctaaatctgaagtggacgaagggcatggaaaactcccatcaatgccagctgctgaggaaatgcataaacctgtggagcaagatgcagttgcagcaagtcat

SEQ ID NO: 144354 - DNA, 726 bp, Zea mays
  Clone ID: MRT4577_63131C.1
aaaaaaaagaagattaatgaccacatgatgatctgtcatgtaatgacatcattaaaacctatctactgtagctatgtagcatctacctacagaacaaacccacggcccattcgaattcaaggtccttgccaattaatcttagctttggaccacaccatctgcacgaccgtgaccactgacgccagcaagccaaggatgatcagtcggtgctctgccgtccatggggcagcagcttgagcgcctggagcaaggtgttcctgagcctgcccaggtgcggccggacgtcctgcttgtccaggtacacggccttgagcgcgtcccaccctttcctgtggacggcggcggggtccctgatgaccgggtcgtcctcgccgtactcctcgctcagcgtcgtctcgcccgcccgcaccacgtactcgaggtagtgcacctgcatcccggccgcggggtcccggaacatgccgcgcgccagccactccagaccgccgtacggcaccacctgcaccagcacggcccccgcggggaggaacaccatgttggtgagcccgtcgccgtgcacgcccaccatcacgtccgccgagttcaccagccgcgcgaaccgcgccacgtccgtgctcgcctccgggtcgcccacgcgcacgtcgaaccccaggctcgtcgccatgtccgccatggcgcgctcgttcagcagccgccgcgactgccgccgcgagatgatcagcagcc

SEQ ID NO: 144355 - DNA, 353 bp, Zea mays
  Clone ID: MRT4577_63132C.1
cgtcagcctagcaagtagctcatagactccagattggagaactcgacaccatgaaggtgctgagcgttgccctcgctctgctggcgctcgctgcgagcgccgactccagtacaagcggcagctgtggctggcagacaccaccgttttaatctaccgtcttcgcactatatgccgccttcggtctatctgacgccgcatgagcagccgtagccatggcactaccccactcaaccacgcgagttaagcccgcgccagcagatcggatcctgcagcgtctgcagcatctgacgaccgatactgggccagcgcgtcaagttcctgaggcaccagtgcagctcggcggcgacgcccta

SEQ ID NO: 144356 - DNA, 117 bp, Zea mays
  Clone ID: MRT4577_63133C.1
gtcgtcattctagaccaacagctgtgattttaaggacatatgctccaaatatatcgggctggtaagctaccctgctctgatgactagtatattattatgggctatacacaagaccga

SEQ ID NO: 144357 - DNA, 414 bp, Zea mays
  Clone ID: MRT4577_63134C.1
gccggaccggaacggccgggccgacccaccccacccgtacgagatccccaccagaagagactttttagagataacgagctgctcttaaaccacctggctcagctagcatcgatgatcgctatcatagggacagagctgagtcaagctgcgctcgccttctagcacaaaggaggtgctgctgcgaacacgttatcaacctgaagtgatgctgtcggaaagccgtggagaaggcggccaagcgcattatgggcaaggaggtgaacacaaaatctgcctccgcggagaagacacccagagtgccgttacccggtcaccggctactaccgaccggcgggtggtgccaaagaggttgacacagacggacctttgcgtccggctgtataccaagatgattgtcaactaaataaatctaac

SEQ ID NO: 144358 - DNA, 149 bp, Zea mays
  Clone ID: MRT4577_63135C.1
ctgggaagaacaaaggtgtgctacttgccttcggatctcacacatgattggcctgcctcccgctcccggtcgatccaaaaccaattctccgatttgtcaggacctgctatatatacatacccctgtatggatggtgccctatcttacaa

SEQ ID NO: 144359 - DNA, 211 bp, Zea mays
  Clone ID: MRT4577_63136C.1
ctttcctttacatattaaagatttgtttttaccccatatactctatctggcgcaccggaacactttcaaacctccatctttatttttcctttactcattaacacactcattttcatatccttttactatttttccattacctttttctctttatccgctcttttctcctttaacttaatctccttcaatttccttaaatttctactacatt

SEQ ID NO: 144360 - DNA, 796 bp, Zea mays
  unsure (1)..(796): unsure at all n locations
  Clone ID: MRT4577_63137C.1
attgggtacctcgaggccggccgggatcgctaccactgcacccctcaaacccagtgatccaacccacacacatcggagtctcgcgcgcgggctcaagtacttgttcttagcttagctgctttcttcgttgtaggaactgcaacaataatggctaccccctaccgtcttccttggcgctgctatgccctcgtcactgcgctcgtgctcttcttctccgtcgacgctacggagggcgccatcagggagtaccagttcgatgtgcaaatgacgaatgtgacgcggctgtgcagcagcaagagcatcgtgacggtgaacggtcagttcccggggccgacggtgttcgcgagggagggcgacttcatcgtcatccgcgtcgtcaaccacgtcccctacaacatgagcatccactggcacggcatccggcagctgcggagcgggtgggcggacgggccggcgtacatcacgcagtgcccgatccagagcggccagagctacgtgtacaagttcaccatcacggggcagcgcggcacgctgtggtggcacgcgcacatctcctggctgcgcgccaccgtctacgggcccatcgtcatcctgcccaagcccggcgtcccttacccgttcccggcgccctacgacgaagtccccgtcttgttcggggagtggtggacggcggacacggaggcggtgatcagccaggcgctccagaccggcggaggcccaacgtctccgacgccttcacccatcacgggctgnctgggccgctctaaactgctctgcaaaagaacgttcagctgaa

SEQ ID NO: 144361 - DNA, 354 bp, Zea mays
  unsure (1)..(354): unsure at all n locations
  Clone ID: MRT4577_63138C.1
ggggaaccaagggccggcaggcggggggacgacagccccngcaccgggggcggagaccgaacggaaaccaaccaagggcagncgccacggcaggccgnggccgaggcaaaggcgcggcgccgcagnccgaaggngcacgccaaagcgagcggggggggcagnncaaaggaaccgcgcacaaagcagcgaagaccggncaacncgagaaggccgacccacggggcgagcncaagaacacgggcggcaggacgaccncgcgcagcagagaggacgagccgngncgaggacaganagcggcacacgaccccagaagccagccgaacaccagcacagcccagagcgagaaggagcggg

SEQ ID NO: 144362 - DNA, 241 bp, Zea mays
  unsure (1)..(241): unsure at all n locations
  Clone ID: MRT4577_63139C.1
gtggtgccgtaccacgccccaccaccatgccacaacccattccccgcctccaccgtgtcgtaccaccgncccaccaccatgcccaaccacattccccccttcccgttgtcgtaccaccgtcaccacacactgcccattgcccactccaccatccccagtccccggccgtctaccacccgccaccacaccaagtgcccaccatgcccgttctgccggcaccttaccctgacacaacgcatca

SEQ ID NO: 144363 - DNA, 300 bp, Zea mays
  Clone ID: MRT4577_6313C.1
gcgtacgcacatgcctgtcgctttctcaaccacaacttattctctttcattggcacccataacctcgagcagggttgtccttgacacccacaaacaaatcacccctgttctaacttcccattggcccccccgcccatttacattcaaattgatttgaccccgcacaagcataaacaacaccgcccgcgctcttttttttcgcaatgctatttagcaaactgcaccgtgcacttcactttaattcacaccaaccccacacaatgcgatgaaatatctaatggcgaattttttttttttttc

SEQ ID NO: 144364 - DNA, 186 bp, Zea mays
  Clone ID: MRT4577_63140C.1
attataaataggctattttttttcaatgcccttaattttaaatgtaagctgagacaaaagagaaaacatgcattaacattgctgcgaagttcattaaaccaacccaatggtttgtggaaaccctatatgtagcagaagccctttgcaaaacaaggaaacaagcttcctaaaaggttgaggggcttc

SEQ ID NO: 144365 - DNA, 730 bp, Zea mays
  Clone ID: MRT4577_63142C.1
gcggagagcaggcatgatattaagggcatcgatggagaacccacaagaacttcctcagctctaaagttatctatagaggaagtgcggtacccagagtggagttgcatcatggtgtaattgtggaacttcagcttcctgaatctagaggccatgcatgtctccgtgatacaatacaaccttcctcagaagcttaacctgcaacccggggtctcccccatccacctagcattttcctagaatcaccaggggctgacaagttttgcggcgccgtagctgaagtaccagcatctcaccgctctgagcttggttctggtggtgtttcaccttgtgagttggttggttcaaacggagctgatttgtgaagccgcggttctggtctccagagtccagacctggcgtccaaaagaatgatgctccctggtagaattggagatgtttgtacaaaagctaacctctagttgttagacagaattgatgtatctggtggattactatacgatggactcgtttatgacgattgattgattgattctgactggtgacttcatgttatttgtgagtagttgtggtgctttgtagttggagactgggatcgtaataaaagtgtaccatatgatttttccctttcccggcatttaacttgagtaattattcgagactgaacttgtaaagattttattttgagtgaactgtgatgtgggtctttagacctttttttcccccttgaatt

SEQ ID NO: 144366 - DNA, 394 bp, Zea mays
  unsure (1)..(394): unsure at all n locations
  Clone ID: MRT4577_63143C.1
gatagacgcgcttactagtcagacgactcccttgactttcttttttttttcttgaatcaccaccagcaaaagcggggttttttatttttttagacatcnacacccatcattcctttcaccacaaagtaaaacataccctcacaaacgaatctgcaacactggggtcaaaaatcaatcaccacaactccttttaccactacctcatcaaatcatctattagccaactaaacaggatcaaaacacaacacccctgattaactacaaaaaaaaaacccactttgctccacacccaattgtgaaattaaaaaaaatacttatccaaataccaagtgccaagggatataaattgcatagacaggactgcctctcccggccaagagtcatattcaaacaa

SEQ ID NO: 144367 - DNA, 385 bp, Zea mays
  Clone ID: MRT4577_63144C.1
cttctcactccggggcgaaggggaacagggggaaggagaagaagagtccgaccgacgggacgggggcggccgggacgggacgagacacagacacacagggggggaacacacagcgcggcatgacattgcaccgccacactcccgggctccccacaaaccgaaaacaaaaagattattctcagcatagcgagcccgccccgaccgggcctgggcgagagtgtggccggtgcgaccctgaccccaccgccaccccggcccgggcttgggtggcgcggaaccctacgccgcccaatccgaggccccttgggggcgaccacgcgaaggcccaccgcccgcccccgggccccccggccgggcccccccgggggcgaccccgcccacccgg

SEQ ID NO: 144368 - DNA, 728 bp, Zea mays
  Clone ID: MRT4577_63145C.1
tccccagtcaggcgttaattgcccccccatatcattttcaacccctgacaagtcatactgcattataagtggtggaaatgatcaatttgttcagtgcttcaacttcagagtaatatcttcggaggattgcttaacaaccccagcaaggctaaattcgcatgacaatgacacccttaaaattttatatcaacataaggtagcatcagctcatagtgcagcagttaaaggaatctggacagacggcccttggtcgttctctactggccttgatcaaaaagtaaaatgctggaaaatgggattagccggccaattcacggaatactcccatgctatcattagcgtgcccgagcctgaaactctagatgttttccatgaccgggcaaagaggaagtaccacattgctgttgctggaaggggtatgcaaatggtcgagttctcaccccctgaagatgattgactacaatgattgcaacccctgctatggatgtcacatggatgttgattttgctcggtttgcgtggatcatgtagttctatactgagacgggttatggttttttttaaaaaaattggttaaggatgtaacaaacagagaatttgatgtgttatcaggctatgacaaacagatcctacatatacacatacaaaacactgttttgcaaaaaaaaaaaaaaaaaaaaaaaaaaaaaaaaaaaaaaaaaaaaaaaaactcgagaaggggccggtacc

SEQ ID NO: 144369 - DNA, 381 bp, Zea mays
  Clone ID: MRT4577_63146C.1
cacgacccttccacatcctctttgatgccattacactagattacatggtacacgccgggcgacaaagtatggacggtttggaccatacagaaggagggcagacgagatctagcactcgcccggggcaggcacacctaccagagccacgacgctttcgacgccaaccgaggagcgcctgagagcgccagctggggacagacccgcgctgaccatccgagcaacccatcatagcgacttcgcaaggattgcactgatggccggcgctcggccggctgcgagccctgtcaaagcggcagcggccaagggctccacgccagctatctgtggcaccatacaccagctcgccgcggcagcgccacgtggaagaccgtggagggaggc

SEQ ID NO: 144370 - DNA, 556 bp, Zea mays
  Clone ID: MRT4577_63147C.1
gacaaatctcctcttatcgtggaccaaggtcgaaggactccgaattctgacagtaacatcaagctggagccattccatttgaatgtggcacttactccatcacagactcatgggtaatgagacatctggtcaatacatatcactctatggtacaacttcgatatctcgagaagacaaattgtatggctgctatatctaatatgcactacgaataataatataatgctagatacagaactttatctatatgtgtatataacggcacatcgctttgtctctaattagcagctaattccttattcgttcacatataggagcaattgttactgaacattaaggcaaaatcctttatttaggagaaatgttaatcactttcatgtatgagacatccagatccagtggttctacgcatggtctaacgaaagtgctcaactcttcgaagcgcgttcaattgattcactatcgccgaatatagacaggagaattgaggattggaatgatcgaataccaagagttcttgaagctccctgtcgattcttgaacggagccgagctaa

SEQ ID NO: 144371 - DNA, 444 bp, Zea mays
  Clone ID: MRT4577_63148C.1
cttcgcttgattggctactggaaggaccaagaccatttcgcccttggctaccaatacctgcctgaagggaaccctgcggaacatctgaaaatgaaaaaaccttgcccttacaaaacaattaattggcaacaacccctttaaaatcgccttgaaggccgttaagggctggaagtccttgctgggggatggcaaccaacgcttattccacaaaaactgaaaaagcaggaccttcttcctaacaacggccctgggggttaaaaccgccaactttggcctaaccaaggttttaagcaactcgaaaacccacttaaccactgacccagttgaaccatgggcctactggaatccaaagaataaccgaagttaccgggccagcaagaaaagcaacgggtccagcttcggcgtctggctcctgaacctgggaacaggccattccccggccgt

SEQ ID NO: 144372 - DNA, 200 bp, Zea mays
  unsure (1)..(200): unsure at all n locations
  Clone ID: MRT4577_63149C.1
naaaaaaaaaaaaaaaaaagaaagaagaaaaaaagagaagaaaaaaaagaaagataagaaagagaaagaaatgcgacggcagaagagacaatacggcgtaaatgtcacgtgggcagtgggttaacggggacgtgaatgagaaagccgaggcgagtgggaactgagtcgttctggagtacatcgttgtgacggtagatggc

SEQ ID NO: 144373 - DNA, 818 bp, Zea mays
  Clone ID: MRT4577_6314C.1
atctcctctctctccctctgctcaatcgatcccgtcggtcgcggcgccacccttgtccacagagtcgtcggcgctgtcgatcaagaagcgtcggtgtgcccgtcagccaccagtgagtgcctcagtcgtgtgcctcagtcccgcggcggccgacgtggaggcgggtggcagcagcccgggcggcgacgacatcaactacgtagcgcgtgcgggagctgctccggcaaaagcactgtggtctccctcatcgagcggttctatgagccgctctcgggctcggtcctcctcgacatgcacgacatcaagggcctagactccaagtggctacgcgagcagatcgggctcgtcaaccaggaaatggcgctgttcgcaacgagcatccgggagaacattctctacggcaagagcgacgctaccacggacgagatcaaccacgcggcgaagctatcggaggccatcaccttcatcaacaacctcccccaagcggtatgagacgcaggtcgatgagcacgccctggtgttcgcggcaggcgccgcgctgtcgcttctgagcgacgggttcgtgcggacgtaggcgggcagggtggcgtccgtgtgcccgtcgaccgccggtgagtgcctcagccgcgtgcctcggcaccgcccgacggcgaacactggcttcccggtagtcttctcgtagtgcttgatgtacctctgctcgatgtcggcgaacgagttgacgaccagccgaccgtggcacgcccgatgtcgaacatgcggttcaagaactcccgcgagtccgtgccggggagcgtcgcctcggcgagcctcaacct

SEQ ID NO: 144374 - DNA, 320 bp, Zea mays
  Clone ID: MRT4577_63150C.1
gggaaaaacccaggggacaaaatttgggggtcaatttaaaaacccagggggttttgtttccccatgaagttcggcgatcaatttaaaaataccgggggttttttcccaaggggcaaaattttccctgcccgagaaaagacaatttttttttcttgggctggcccccccccccgggggcccttgatccttgacccggagcattttttctggggggaacaaattggtggcccccacccccagcagggcccggttgttgggccccttgaaacctggtttgcctgttttggctggccctttcacttaagttgattgttttggga

SEQ ID NO: 144375 - DNA, 344 bp, Zea mays
  Clone ID: MRT4577_63151C.1
ggcaagggctaaaaaatttttttcgttaaaacaaaaaaattcgtcagaggggggaacaccttcctttggtcggcccgccccactaaaaaaacatcccggggttaaaacaaagcataacctaaaccccaaaaaaatagcaaagcatacctttggggtttccaaacccaacacaaaacactaacaaaacctggggccaagctttagcatactattggaaaatcctatgctgaatccgggggaaaccctacatgtttgacggaaaaaaacttttttggaaaaacctggcgtcgttttttgcttgccgaaaagttttaactcggcacaattccatttgcagtcaaccg

SEQ ID NO: 144376 - DNA, 758 bp, Zea mays
  Clone ID: MRT4577_63152C.1
cgggaataggatgatgaaacaaataacatatgttgataacttgtacattgatagattaaagattaaaagtattgtacataatagggatgacgcggatattttttttataatcatcaaaggatggcattgacagtttgcatgaaagggtagcaagttagtaggacatttagtggggaagatgtggacaccttgcatgaagagagatatatagaacatctagtggggattagctttatagagtatatagataaattcataagcttccactattgctcgatgtcccggtgccccccacctccgttcattatccttggtcttcacctccacatgtacctacatcttcatctaccgaacatcagacccctccagctaccttgctgacgcatgaacgagaagacgggttagactttgtcgaaaccctcttcgctagtggaggtatcgaccatcactcgtcactgtaacacgatagtgatcgacgatcgtgagcttccatgttatgtgttctgatacttgagacttttattatgactatgtatgagatattgtctcttattagtactggatgagatgtgtcttattatgactatggatgagacttttgtgatgtaattgatgagactatggatttaaatattgttatgtgattgtgtgtgagatgttttatgtgaaaatatgttgtgctatataactgttgatatatttgttatgttgtggaattttgtgtaaaataaaaataaacagcatttgtaatgttggtc

SEQ ID NO: 144377 - DNA, 270 bp, Zea mays
  Clone ID: MRT4577_63153C.1
ctcgagccggccgggccgggtatacataaggtttaggaggtgggaccaataccctaaaaacaggctcggtgcagtggtgagctgtctcactcaccaggtccgagtcatggtcatgggctcgaagtagcctctcgcacggggtatgcccggtctgccattataatattattcttataataaaaataatatatgtcttggttacttaagaaaagagtgctaaattgactgacgacaatattcttggctcgaaacatgcagaccagcagaata

SEQ ID NO: 144378 - DNA, 325 bp, Zea mays
  Clone ID: MRT4577_63154C.1
cccactcgtacggaaagattcagcggcttctcaaatgcaggatcaaaagatgcaggatggcaattgtacaaaactccccaaaaaactgctgcatcggcgagatgtatacctatctgacccggataggaaaagaatatgtatcggcggtcgcaaccgtctcctgctgctttgggatgcaaccacaagcatctaggactgataaatgcttatgtgataaggcaattgacaagacgtagcatgccacttttcttttcctaggaatttatgtgccattcagaggatgcgaatggagccggacttagttcataccgtctctttatcatct

SEQ ID NO: 144379 - DNA, 940 bp, Zea mays
  Clone ID: MRT4577_63155C.1
gaatttatgagcatgctgttgttttgagtatgaaatttgaggaccaagatgcgtttgaacgcaatttctgccagctgaagccttattacgtggatacatgatctggtaaaaaaggcaagctaatggaagaaaagccaatagaatattagagatcacattatagaaagataggatgatgaaacaaataacatatgttgataacttgtacattgatagattaaagattaaaagtattgtgcataatagggatgacgcggatatttttttataatcatcaaaggatggcattgacagtttgcatgaaagggtagcaagttagtagggcatttagtggggaagatgtggacaccttgcatgaagagagatatatagaacatctagtggggattagctttatagagtatatagataaattcataagcttccactattgctcgacgtcccggtgccccccccaccagctccgttcattatccttggtcttcacctccacctgtacctacatctccatttaccgaacatcaggtatgcatattcatcatcatttacttattgttagttatattatgatgtaactcaacaaatgttatttgtacatgtatattagacccctccaactaccttaccgacgcatgaacaagacagcgagttagacttagtagaaaccctcttcactagtggaggtatcgaccatcactcttcactgtaacccgatggtgatcagcgaccgtgagcttccatgttattgcgttctgataattgagacttttattatgactatgtatgagatattgtctcttattagtactggatgatgagatgtgtcttatttatgactatggatgagacttttgtgatgtaattgatgagactatggatgagacttttgtgatataattgatgagactatggatttaaaaaaaaaaaaaaaaaagcggcc

SEQ ID NO: 144380 - DNA, 497 bp, Zea mays
  Clone ID: MRT4577_63156C.1
ggccaaacaaaccttacctataggggttaaacaaatttaacggggaactaggggtaaaataaccccttaaggaaaataacatttttgaacaactgttatacaagggggggggtttctaaccttatttaactcacccgcaagttgtttttcctccctcaaaagaaaaaccacctttggggggggtttcctcaccgggggtttttccaagttggatagcttaaaaccccaaaaatccaactttccaaacatgggggcaaaactttttttttgcgggaaaacccccaacatttttttgcttcccccgggttaaggaatctgggggatccagctcaaggtcctggggggaggaaaccatcaggggggggccccaaatttttgctccaggaaactggtgcttggggcacccttggttaaaagttttgggtttggccctgatagggttgggagttcccctgtagcaccccccattaagggccaccccatttttgccccttttt

SEQ ID NO: 144381 - DNA, 260 bp, Zea mays
  Clone ID: MRT4577_63157C.1
gctagccctggcgcggcgcggtccttcggccgccattgctggagctcctgggtccctgctgagcgggcgccgcgacggcgggattagaggtcatacatccggaagccttgcacggggttgccgtgagaagcggggattccgttgacgaaccgccgctgggtgcctgtgctgcccgatggctgtccctggaggtgctcggtgctgctcggggtgcggggttgggggttgtcttttcggggtccttggtggatgtgtccggc

SEQ ID NO: 144382 - DNA, 249 bp, Zea mays
  Clone ID: MRT4577_63158C.1
gattcccggctcgactccactcgtctcgaactcatcgatctactcacatacttagtttctcacactacacgacttctaacatgggggagcctgctaagatctgagagtctagtgcattctcatacaagcgtcactacatcaggaccacttagtatcttataatagatggactattgtctgaatacatgctaatccatatacattactgccactgctcagcttgcacagcatatacctaaagtaatgctc

SEQ ID NO: 144383 - DNA, 446 bp, Zea mays
  Clone ID: MRT4577_63159C.1
ccgacccacgcgtacggacgtcatttaacaatatttcaccggtttatgtcatctcccgcctcacctaactccgccgcccctattttgcagaggcggcgggctatataaaacataacaatttctatcaccatccattcatgatcaacaaggactgtgccaactcttgcgttcaacataaccttcttttcttcagatattgcatgcacaagatcccatttaacaaataatgcatgtttacatttgaatgcccatgagtcaaaagccactatatcttacggacgcaacttgttatatatctatcgattgtatgtcatttggcatgtactccattttaaaagttatcaatttagactttatacatatattcattcgaaatatgctattaattcttaacaaataacaccttttattattattaccaactaatttactaaattatatatatt

SEQ ID NO: 144384 - DNA, 264 bp, Zea mays
  Clone ID: MRT4577_6315C.1
attcggctcgaggtgcaagacagatttcttgtttggcactctccagcagcagcgattgctgtctcacccatccacgccagacttgtctttcgctaggtgcctactgacctctaccgttctcatagccctctgcaccatgttgaagcataacacccgagataacaagagcgcactatacctcaacaggtaccggatcggtcgctagcccaagaaggtgctgttcatgcatcgcctgcgcccttgcgaccaccatcaccttgccgc

SEQ ID NO: 144385 - DNA, 366 bp, Zea mays
  Clone ID: MRT4577_63160C.1
ctaactctatacatctttttttttaatctctcatttttttcagaaaccataaaaggggcagggaaggaaggcccatttcttggaaagtattacatccgccgagttcccagtaaaaaggggaagggattcattcggttgaggaacccaaaccccgccaaaaggggggggggggtccccattgacagcgacaagctccggggcaaaaatcaaggtggccccacccaaaatagtaggcggcgacccctgaggcccataaccaatctttgaggggaccctcaacatcccgtttgcaccaacccacatacccaggaaaccctgatcccaacctttgggccctggaccagggagcaaaggacccggcccccg

SEQ ID NO: 144386 - DNA, 423 bp, Zea mays
  unsure (1)..(423): unsure at all n locations
  Clone ID: MRT4577_63161C.1
ctctgtcgtgcttctgggaagggagacgagttctctacagcttcttgcgcctctactgctgacgggagggaagggagtagatctggtgatctgcggcaacgtagttctcaacagtttaaatccgcgagagtagagatgacaatgacccgcgtgtagatggttttcaaacccgtacaagcggatttaatactaaatccatccgtacacattatccattgtgataaagatgcacaacattttcatagtgtaaaaattttatattagtcgtgttcatagtcaaaagtgacttangacactcacacgattaatttatggaactaaacttaatctgtcatatgcatcgtattttgggtgttattattaattgtgatctcttacttaatngtgttggtatctacttatacttagtaactggtnataaaa

SEQ ID NO: 144387 - DNA, 1132 bp, Zea mays
  Clone ID: MRT4577_63162C.1
tcggccgggagctggagaggctcgctgacctgtgggtcctagcgggccggctattgtcctccctgcgttcccccaccaccacggcggcagccactggttggcagcggttgtccttctccggtgtccatggcgccgccgctcgcgacacgcggcctccccctcgcctcccgcggcccgccttcttgcgcggcctcctgctcctcgtgcctgccctcgtatctccagctcggtcgccggccaagccgccggttccgctgctcctcgccacaggtcgatgcagcggcggtgccgccggggaagggcggggagtaccggccctctttcgcggacgacctcctcctcgccttcttccggagcaagatggtgaaggaggttggatgggattctgaaaagcctgggtatgctggactaatggaggtagcaaaccgtctcatggtcaagggaaagagtgctttggagactgagcaggctgctgtccgagtactacagtcactgtttccacctctcttgcttgttctttacaaagctcttttagcgccaattgctaatggccaactagccgctatgatgcttgctagggcgacagcaatttcatgtcaatggttgatgggctcatgctcagttaattcagtcactctgcctgatggaaaaacatggtcaagtggggtgttcgttgagaaatgcaagtacctggaagagagcaagtgccttggcatttgcatcaacacatgcaaactgccaactcagactttcttcaaagatcacatgggtgttgatttgtacatggagccaaattttgaagactatagctgccagttcaacttcggggtgccgcctccacctcttgatactgacaaagccctcaaggaaccgtgcttggacatctgcacaaacgcaaggcggcgtagagagctcggaagaaatagcagcccagatgagctcagttgcccccaagtttgatatgctccctgtaaaagactgcacatcatagattattgcgcgttgggcttgggcatggtgtgccttgcttgcatttgtcagtcttcgtgcaacgatgtcaagtaatttcggtaataccatttctatgttgcagacacacacgtttcgattggatcaacatgactacatgagt

SEQ ID NO: 144388 - DNA, 496 bp, Zea mays
  unsure (1)..(496): unsure at all n locations
  Clone ID: MRT4577_63163C.1
gtcgnccctattcgtccggtttggtacctctgttgntttacctttntaaaaaaaaaaaaaaaaaaaaaaaaaaaaaaaaaaaaaaaaaaaaaaaaaaaaaaaaaaaaaaaaaaaaaaaaaataaaaaaaaaaaaaaaaaaaaattaaaaaaattttaattaaaaaaaaacttaaaatcaaataaatatgacaattttttaaaaaaaaaaaaaaattgggaaaaacctaaatttaatccaatattaaatactttaggaaaaaaaacccacttttcgtcaaattgaaataatatctaaaaaggtcaggtatattaaaacattttcccaaaatttgaattaagcttgaaaactaaaatgtgaagcccgcattttaaggtacaattaaagtgtgaaggtttggggtaaataaaactaaagattaaggttaaaatttacaagaccataagtgccatttatttcgttttttttcatttattttttgctatttttcaagtttt

SEQ ID NO: 144389 - DNA, 279 bp, Zea mays
  Clone ID: MRT4577_63164C.1
gatttatattatggggttttttttcttttttttttttttttttttttttcggaaagcaacattcccataaaagggagtggggggcacaaacaggaacaggggctggtaagttgaccaaccctaacttggattaatacattcacccacagagacatagtttgcaatgggtctcatgaccacacatccctgtatgtaaaggtagattgcaaataggaagaagggcaacgcttattttaagttaagggttcctggccagaagaaggtccaatcgaagaaatt

SEQ ID NO: 144390 - DNA, 406 bp, Zea mays
  Clone ID: MRT4577_63165C.1
agcttataataatttttttattttcacaaaatttaaggaaccggccggatataacgaggtccaaaaaattgccccccacacagggcccatccacccaaaaaaaaattttaaggggacaaccggtaccacctgacgaaaactcttgatagagacggggccaggatgcaattgtcgctcactcaagagtgacaaccacccttttaatccacctccttaaacttggggccagggcccccgttgccgggaggggcctactaatccttgccccctggcccgccctatgatttacccccaccctgcaaccatgtgacaaacagggggatacaaaggctctcaagccacttaattttgccctaaaactaccccgcctaggggagctggttgaggcccaacctgctgaagcccc

SEQ ID NO: 144391 - DNA, 516 bp, Zea mays
  Clone ID: MRT4577_63166C.1
atcatacacatggccattcagagtggaaatttttttacaatgacagatgttctaagaaaaggcagcatattctagagcatctataaaatttgcgccacatgttcaggcttatatacctgtgcccatcaacaaaacagccaatacaggcactaatgcttaatatgccaaagaaaaaaaggaacggtagggggtattatctcatggtacactggatgtgtggacagaccaagcataccagtataccatgggaaatccatgctataactacacagggcctaggccagatccccaagagtagccttacggaacaccccttcaaactaatcgagcatcacattttactacaggagggtgtccctgatgagtggcctgatcctaatctagctaaccactatgagaggtgaaacaagcaggatgatacctgtaatccatgccaagctctttcgaacaagaccacagatgctatgtgaggctatttgcttgcatcttgtaactcacttgacatgtgcaatgaag

SEQ ID NO: 144392 - DNA, 478 bp, Zea mays
  Clone ID: MRT4577_63167C.1
cgttgttacttcaaaaaaaaaataaaaaaatataataaaaactaacaaacaaaaaaataaaaaggacggggtgatcatagtcaaaagagctctatgattctactaatgttcatgtacaatgcctggttttatagggtaacgtgccgtgtttatcaggccgtcattcaatatgttcatcatgttcctgacggtcatgcatctccatggcttcattggtgagttcgagtacgtttattaccacatacctgggaatatcgtgctttagctgaatggaagacttactaaatgtggtgttattagaccacgttttgatgtcttgccctcaatgtgattgagtatatggtctgctacgcgtttttttttctcgccactctccctacattgtaacaacaacttctggtggttttatgtaccattacgaggtcctttttaagaatgttaggggcaattttccaagctttttttattatatattttt

SEQ ID NO: 144393 - DNA, 445 bp, Zea mays
  Clone ID: MRT4577_63168C.1
cgggccgacccacaagtccgctcggcccgaaggaacaggcagtacccctgcggctctaacatcgacacgcgctttctgtagggctatcttgaaaatcatgcacggcagcaactggcttatatcaagcattctcgcctcgccatgatacttacttgcctctagtcttttgttgcatcgagtagacatggtaaacggatttattctaaggtatctgaaccacgtaagcgtcttcactacactatcatctccaacactcacgcaagtacccctcacgatgctgattgctatgctacattcaatgaccttaatgcggccgtgtttgatgcaacaaggctcacgttcatcctattgatcactgatgttttcgtgtgtggttcagaatcatgataagttggattaatcagatgtgcagatcgatctgttgttaattcagatctcgttaatt

SEQ ID NO: 144394 - DNA, 383 bp, Zea mays
  Clone ID: MRT4577_63169C.1
acctcgcgtacgcgacaactagggtgaccgccgacgacctacactcaactgcccacctgccctggtcttcgactcttcgtcgtgcgctttgccggcggcgagcacccatcacaccaggtatgtgcgccaggtatgtccgcccctgctccttccttcatggtctgcaaaattgagcacctgaaccctaacttaatatatctgtattaggatctgatatagtgtacttataaagatgtgattttgtttggcttatgctcgctaaaacacaaaagacataccaaaggtgaaccaggattcgtattttgcgaacagccggctctcccacattgcagaaattagaatcatattagacaactgcggaagctggtggtaaactactgcga

SEQ ID NO: 144395 - DNA, 492 bp, Zea mays
  Clone ID: MRT4577_6316C.1
atttcccaccctcgtcagacctcttcgttgtcgctcctcgtcggttctgtcattctctccctgtccgcgaagacatgagctgcgccttaaccgcgcctcccacctccggcgcgtctgggggacccagaacaggattgtgaaacccaagagccagcggcagacctcagctggggaaggggacccaagatcctgacgaacctgagtgatcctacgacggaccacaaaaacagggccgagcgtgaacctggagatcctgacggtgagaatgggtcccggtcctctgatctgaatcagctccaccctgaagacccggagaacacggtcacgatgtttctatttggcgcccccccgagggtcagacgtttgctggcaaggttgtttgaattcagatactataaattacgatcactcgtgtgcccatgaccggaaagtccaagcactatggccctattgacctcgagaaccctgttgtgttacctgtcgtgagggatg

SEQ ID NO: 144396 - DNA, 263 bp, Zea mays
  Clone ID: MRT4577_63170C.1
aaaacaaacagccgcatacttttatttgccattttatgcatgggccccttttcaggattcatagcgaacacagttgtaacagtcccaacgtcgggacggtttttaaggctcaaaacggtttaagcaagtacaaaattttccaccagcatttgccgattataagggaaaccttatcgaggctccaaaaaaaacaagcatgaaaaattgatccaccccgtttggaaacaccattttttcctttccatggaaaactaacacctgga

SEQ ID NO: 144397 - DNA, 747 bp, Zea mays
  Clone ID: MRT4577_63171C.1
cattgggtacctcgaggccggccgggcctgaaaacggtgccctcaagagctccgtccacatgaggcacccatccatgccctgttcagaagcagtaccagtcggggtcgagcgagcctagagagccaccgaacatggacagatacagagcacccaaggccaggccagaccaagcagatgctgacgactccgacgagctcggtgtgtttgccgccgagcgctacttctacggagacgacgacgagctgtggccgtgcgagcgctcctcctcctcgctgtcgtccgcgttcaggacggggacgcacgagcccgaccggtccgtcccgacgccgacggccgtcactagctcgtcggaagcaagctggaacagccgctccactctgctgcccaatcccaatgggcaggccgagaagttgcacgctgctgctgccgccgccatcgccactccgatcatcgaatccaggccttccggggcagaaggccagcggcccggccgccggcccgcttcgtcgtctaacctgcggcggtggctgcgcggagtggcggcgtgcgcttgcgccggcggagcttctgaagatacagcgagcgccgacgaaataggaacgagcgagcggttcccggaaacagaggtccccgaggtcaccgcagcgagatcgagtctgacgcccgcgagtggcagatggctcctcggaggcgacaacacaacccttgccggaatggaggcgttttcttctcccaatcccattcag

SEQ ID NO: 144398 - DNA, 183 bp, Zea mays
  unsure (1)..(183): unsure at all n locations
  Clone ID: MRT4577_63172C.1
gtccactccgctgctgccgcggngccctccctctgcctctggtctctgcgtgtgacgtgcacgtccatggcgctagacttcacctatattccacagtcctcattgattcgtcgatgatcgtcgcattcagtaaaaagccacctaccctaccctattgtgctgttactactaactaacttacca

SEQ ID NO: 144399 - DNA, 242 bp, Zea mays
  Clone ID: MRT4577_63174C.1
cccgaagacgggctcgtcatcagccacggcgcgttccgatgtctacggcgtctcgagttctgtaacgtagatggacctggtttgatgtttgcaggaggcgttccaatgttggaatggctgaggctcgggttcgacgcggatagagcgcaatcgacatacggcggtctggaggttggcatccagcgcctcgcgtctctcacacatgtcgtgctcattgtatggctggtttctgaaggcggtga

SEQ ID NO: 144400 - DNA, 334 bp, Zea mays
  Clone ID: MRT4577_63175C.1
cccaaaaacaaatacccttgctttttgatcaggaagggtaattccttttccccccgtggggggatctgccaaaaacgtgtaaacgggagcacccaacaccttttgggtccccaggttaaaaaatccccgacccccacaaattttttcaatcccccaaaaatacgggcttggggggtaaacgccccttagaaggcccaaccccttgtaaaacggccccaaaaaaaaggaggaaattcaaacccccctttttggggcgggggcagctcccggtgggttacttgttgtttttttttttaaggaagctcccaaattttttaagaaggggtttgttttt

SEQ ID NO: 144401 - DNA, 339 bp, Zea mays
  unsure (1)..(339): unsure at all n locations
  Clone ID: MRT4577_63176C.1
agagacccgtggggtgaggctggtgctgattgtcgtggatccaccgtgtcttcactgacaaggacaaggctgtgcacattgaaggtggtgccaaaagttgttatcttgccccaacaaaatccccattttgtgtgggtaatgagacaatcacctccgatgtacattgnttcaatgctactgcaccacaaacgccttgctcccttgctaagtattcatgacacttgcattattgaggctgatacactgtcatgcctcactgccccaaaactgtgtggccctcaccaagactggagaggggaggctgcacttaacatcttccacacaccgtctccagctgcg

SEQ ID NO: 144402 - DNA, 564 bp, Zea mays
  Clone ID: MRT4577_63177C.1
ataatggacaaagaattttgtatttaaataaaataatagtcacgattcagactagcacaacttaaaataatcactgcttgatgcgtgtccaagtatttttgggacaaagatataaacaacatatgactcatatcctaaacaaatctgaaattcatcatagtgaaataagcaaaactatttttcgtagtagtcttcggattctgtacaaatcttgcagcttcgaaacttatggatagtagaagtatttctggatgttggttgcaaatccttgtactcctttgcctcttgctctctctgagagtaagttttttcattaaccatcttgaattcttgattttgtggctcaacatatacacgctgatggaaaaataaggcaaaagattcttcttccatctcgctatctgattcatgtgcaagagttttctgtgaatttttttgcactacatggtcctctgatagatactcctcattgctttcaacggtctgcttcctccttccccttggcatctccaccgaaaaatcgccggtggagtggtggcggcgaccagcgaaggaggggtggcg

SEQ ID NO: 144403 - DNA, 365 bp, Zea mays
  Clone ID: MRT4577_63178C.1
caaaaaagatctttgttatgtgaacttgtgaagacacattagcatttcccttttaaagcttccttctggggtttagcagtaaaatgtgtcattttttctttctaaaaggatcttgcttttctaggttttttgtacatgtcatactcaatggttcagaaactgttgtatctatactgtcatgtttttttaggaacaatactatatgtgtcatatacatgctcttcatcaacataatctgaataatatcccacaatcatataaatgtgattatgcgaacatgttcttaaccctatgttgggctagcttagtgaatcatgttgatgttgggcttcccctacatcgtaaggtggaaaaaaactcgtact

SEQ ID NO: 144404 - DNA, 712 bp, Zea mays
  Clone ID: MRT4577_63179C.1
cctcgaggccggccggggacgcaatgcctccaaacagatctcatcagcctcgcgtaccttgcttgctcccttcccttcctttcccttcctgcgcaattattgattgcaaattcgaagcctctcggacaggctccttgatttcagcaacattcgcgtcactcgtctcagaatctcagtcatcaatcgtcagagctaaaaaaaattgttcttgatcgagcagcgccatggcgacggcggcggtgccggcctctcggacaggctccggcggcgtcgtgcggcggcggcggcggcgcgtgctgatgttcccgctgccgttccagggccacctgaacccgatgctacagctggccggggcgctgcacgcgcgtggtggcctggacatcaccgtcttccacgccaccttcaacgcacccgaccccgcgcgccaccctccggggtaccgcttcgtccccgtcggcgatggcgtgccgtcggccgacctcgtcccgtccggcgtcgacgccgacatccctggcgcgctgctgcggatcaaccgccgcctgcgggagccgttccgggactgcctgcgtcaggctctcgccctccccgaggacgacggccgcgcgccgccggcatgcctggtggtggactccaacctgcgtggaatgcagctggtggtcgaggagctcggcgtgaccacgctcgtggtgcgcaccggggccgccgcatgcct

SEQ ID NO: 144405 - DNA, 549 bp, Zea mays
  Clone ID: MRT4577_6317C.1
ggccgcttttttttttttttttttctttttttttttttttttttttttttttttttttttttttttttttttttttttttttttttttttaaaaggtgggtcctcccaattttaggaaaaggaattatcgaacccccttggggaccaatatcacattaaaatcgggaaagggaactttttatttggggggggccacaaacataatccaaaaagttttttttttgaattacaactaataagcaatttaaaagggggcccccccaatgttgtgttgttggaaggaggctggtgggtttgtaaaaaaaaggtggacaaagggcaacaattgttgtatttgaaaaagggttggggggttagcccaaaactggtgggaaaaaggcaaaaactgttgttgggtaaaaaaggaaacacggtttggtgcaactagctggctaaaggggagaagtttttggtggtggaaaaaagcaggggggttcagggcggccaattggttaaatggaaaaagttgttgttgttgaaagtaggcaaaaactaccgggctgaagggga

SEQ ID NO: 144406 - DNA, 755 bp, Zea mays
  Clone ID: MRT4577_63180C.1
cccttcctcgagttttttttttttttttttgattatagctgccttttaattttaatggcttcgctagccttgccacgaatgagtggttgtttgcggaatttattcattagtaatacaaggacctcagtatctatagagtgtatgaacccggattcctggtcctggacatttcgtatttgcgtgcccaattcttttaggcattgccggtccaaatgtccaaattgttctgaataggttttcagagggacaagcccaaattcattgcatccttgaaatgccatgcatcacagtgcccaatacttcaaggcactaagaagtccaattattgatcaacatttgctgagggaatgcaagcacactgtcaccattactatggatggctcaataggaaaacaaagggtggacacaataagcatgattgaaatagatcatgtgaatcaacggtaaacatcagttgtatagtagcttagcagagatgaggatatagatccattcatcacaggagagggcagcatccaccgagcaaaatatcatgtgactgataagtcatgctttgacagtctggaccaaaatatctgaccctgcccttaaataagcactgaacctaagtgggcattttttctatgcagtttattcatgaacattcctgcctcactgaaacgacccattttagtaagtgcaccaacaactggccaatacgtgtgttggttagtaccaatgcaggaaatggactccattgcaagtataatttcttt

SEQ ID NO: 144407 - DNA, 363 bp, Zea mays
  Clone ID: MRT4577_63181C.1
ggggggttcgccagaatggtatttaatgacccacgattgcgccaaagagagtagcagcagctagcgatggggctaggctaatcgactggtcggccatgtcgggaccaacaaccaggggtaacaactttggtcgcttgccacttttatttatttttgggggcctactacggactaacaaggagctgggctgagctaattggttttaccgaaccaaaaggggtgcacctggggccaggatagccgtggaagacctctaggcattggtaggcaggaggggccgacttcacaaacttggacactttgcagttgctggggcacgacttccccacgttgccgcaccggcaggtggggatgtatttcctt

SEQ ID NO: 144408 - DNA, 368 bp, Zea mays
  Clone ID: MRT4577_63182C.1
actaccatccggcgtcttcacaacgccggctctcccccgctccgtctccctcccttcttatctctccttggcgaagtcagatgtcgtgatcttgagaccatctccgaccaccagggctcatccaactgcgtcatcatcacgcgagaggacaaggaggatgctgctgccgttgaggagatccttccgcattatgacaccccggaaaacaccatgaaagaggaggtgctccggcttgcgccgcacctgctcttctatgacctacaggggttcctctggaggaccgctaaacatggggctcatcaagcacatgtccggcgcctccgtggagaacgtggacatggataatatcatccggaatatcgatactg

SEQ ID NO: 144409 - DNA, 291 bp, Zea mays
  Clone ID: MRT4577_63183C.1
aattcggcacgaggagcctcgccagcatctgtatggctatgagccgataggatgagactgcaaagcagtcactgccataggagccctaaaaaaggatttgattgtcagaacctaataggcaagtgaagtcttccagtcccggctggtgggacaccaggggatggcaccatttagatactcagacagcggatccttgtgcctttgcatgatcagcacaccaggacttgagcacgctttatgaagacctaacaacaagggactccatccaatgggaccatgagatgaccaaga

SEQ ID NO: 144410 - DNA, 364 bp, Zea mays
  Clone ID: MRT4577_63184C.1
caatggcgtgggtagtatagcgggctgaggagctgtagcgcattgggcgtgcccaggctgctggcgccatcgacgtggtggtggtgccggttcttgtctgtgtcgttgtgtgcccatgctatcacctgtcgcggtgtgaccatgtccgtggagtggatgcccgggcagtgcggtgccgcccacctggacggctgctcgccaggtgactttggtttggaccccctgggcctggtcacggtgcctgagaacttggagcggttcaaggagtctgaggtgtgccactggcggtgggccatgctgggcgtgccgggggtgctggtgccggaggcgctggggctgggcatctgggtgaaggtgcaggagt

SEQ ID NO: 144411 - DNA, 292 bp, Zea mays
  Clone ID: MRT4577_63186C.1
ttgtctaactaccgatgcaagctgcgaccgatgagttaccgaaattccgggggggcgcacacatggacgacaagtcctattacgtggcaaccggccactccctggcggccatcctcctcggactccaccgcctcgtggaccgtcctggcggcaacgggaacacaacctgccggaagactgcctcctagaccaacctccgatccgattctctggcacctccacctgctaacacttgagtgccctttccactcgtcgctgacccaactcatcctacgccacaggccacttctat

SEQ ID NO: 144412 - DNA, 607 bp, Zea mays
  unsure (1)..(607): unsure at all n locations
  Clone ID: MRT4577_63187C.1
catcagcccggatgctctgttgcacatagttgagctcgtatttacccagccgccccatatccatggagaatcttcgataactatagccatggacagtatgatggtgacgtgatgttcgcttatcaccattacggcttctaccatcagcctgcttgctcttgcttacattgttaccatcgtgaattattacctgttcatggggctccactgggtttcaaccatcgcagggcaccatatcttatgaacaaccctgtggaaggcccggtggtgtttggtgcacagaactacaatccaagaggtattaatggtctgatgcgacacaatcatctgagggacaccctgagtaaaaaacctgcacagacttgtgaaccaattgccaatggtgccccttttaccatatgctacaattgctatgaagcaccgcatcttcccaagaattctctcatgttgggaaaagatgagtacaagctgcgctgtgggtcatgttcacatgcaattgtggtcagacttgatggaaacaggcttgatgtttcaagcacctacaccagtttcacacttatcacctgccagtaacaatctactnccaacaatggccaaggaagcaaaa

SEQ ID NO: 144413 - DNA, 341 bp, Zea mays
  Clone ID: MRT4577_63189C.1
acaacaaccacgcgaacgcgatacgtaggcctgaatataattacagcaaaaacacataaagagagagagagagagacacacacacacaccacaacattttgtttgggaagaacatgacaagcaacaggtatatatcagtgcatataggaatcttcggtcacgaacacgccgccctgagaaccttctcgacgccgacaagaatctttacagcctttagcttaaaccaatctcttaaaatagttgccacacacgtactaacgcttattattattggttaggatatcatacgtatctatcatcgaagcatgcatgagcattcaatcagagccaaaacaaatgct

SEQ ID NO: 144414 - DNA, 287 bp, Zea mays
  Clone ID: MRT4577_6318C.1
ggaaaaacacgagtccgacttccaatgctactacccctttatttccaacttacgtccgccggagccagccgcaaccgaacaatccaagcaacggggctaggcgccgatcatggccacatcggagcctccgacgcgccggtgcctgcctagctgggtgctgcacactcgccactgtattctacgcctgatcgaaatcagtcaacgaacctcacatcgtgggcgtaggggcggaaacgactagaaggagcgcatgcaggggccactaccacccctgcaagaagtgcatg

SEQ ID NO: 144415 - DNA, 363 bp, Zea mays
  Clone ID: MRT4577_63190C.1
acccacccctccccccaaccctccggggaccccgggggggaacccggaaattttttaccgggaccgggaggggaaccaatttttctttaaggggggagaaaaaaaacttggggaaaaaaagggaaaaattgtttcctggggaaaaaatggaatccctcaaaaattccaaaaaaataaaagccgggaaaaaaaaagggaaaaccgcgggggggctaaagggggggccaccccaaattaattggggggggcccactggcgccttttcaagagggaaaaacgggtggggccactggattaaaaaaaaccccaccccccgcggaaaggaggttttgcaatttgggccccaggtggttttttttttta

SEQ ID NO: 144416 - DNA, 354 bp, Zea mays
  Clone ID: MRT4577_63191C.1
tgttgtcttccgctaacgatgggctgtggctgtgcgtgagatctcagggcgattggctgaaatgactgctgataacgaggacccaatttacttggctgcacgtatgcgatgctctaaagaacatactggtaaggtgaaatgccaaggaagtgcatacaggactgtcaatgtcacaactgacggtgccgtctcacatccaggtggagacttaacagaccatgtgacctctggacccatcagactagctcaggtcatctgcggcttagataaaaagctacctcaaaggaaggatttcccatacagtgaataggctcagtagctatttgaaatacttcaaggcccttgagatcgttt

SEQ ID NO: 144417 - DNA, 532 bp, Zea mays
  Clone ID: MRT4577_63192C.1
atgtataatttacagaatattacattgataatggccacaaggaccaaagcatgcatgcaaatacgtacactactggtacaatgtatgagcccatgctacctgcttcacaaatactggaacatgtcctgccgtacatatgcgggggcgtatgtctacggaccacgcatacaagtatgcatatgccctagctcacttgccggggacgaagttggcagcgtatgcccaggcgtggttgatgacagggacagcgaggcggtatgcaagggtctcaacgggacccttggcggtgaccatggcctgcacgaaaaagccgaacatggagaacatggcgaggcggcacgttcttgatctgcttgaccttgagctccgagaacgcctacgggtcgtcggtgagcccgagcggattgaatctgccgccagggtacagcgggtcgaccacctccccgagcgggccaccggcgatgcggtaccccttgacggcgcccatgagcaccaactggcacgcccagatggacaggatgctctgcacgtg

SEQ ID NO: 144418 - DNA, 428 bp, Zea mays
  Clone ID: MRT4577_63193C.1
gcttttcaaacgcgcgcatcggcggcgcctagttccgcggtgacggaggcacgtcgccgtcgaggaacctagagattcctggcagcagcatggcaaggtaccagcgatcatggtctgacataccaccagagcttgctgccctggtcctcctccgcctccatgcccactctgaccgtgtccgtttcgcagctgtatgccgcgattggcgcgcctgcgcaaggcagcatccgctgcccccgcctttgccctggctcatactccctggtggaaccttcttcaccttaccccacagtgaatccttcctgatccccaacggtgtcgaattccacagttcctgcggcgagtggcttgcctttgcacgtgacgacatctgctacctcgtacacaccttctctaaggtcaccttgcacctccctgacctacacatg

SEQ ID NO: 144419 - DNA, 864 bp, Zea mays
  unsure (1)..(864): unsure at all n locations
  Clone ID: MRT4577_63194C.1
aacctgaactcagtaagactgatcatgttacaggggggcccttagttatctcccataatggcgctagtggagactacccggactgtacagacctggcctaccacagtgccgttgacgatggcgcagatgtcatcgactgtcctgttcaagtgacaagcgatggagtcctcatgtgcatgagttccattaacctgcttgacaccaccaatgttcagagaacacctttcgccactccttccctcgttccagaacttcagtccacaccagggatcttcacgttcaacctcacttgggccgacatcagcagcagcgctctaaaacccaagatatcttccccagtgagtcaatatttttatgtaaggaacccaaggtacacgaatcgagggaagtttctgaagctgtctgacttccttgcaatcgtgatggatagggatttgtctggtgccatgatcatcatcgagaatgctgcgttcatagcaaagtcactagggatcgacatcgttgactccgtaaccgccgccctaagtgccgccggcttcagtaaccagaccaccaaggaagctctgttccggtcaacagacagcgccgtcctcgtcaaactgaagcagcaggaaacggaatgcaagctcgtctacaccctccccctaggcatcggggacgcctccaagccctcgctgaaggacatcaaggcgttcgccgaagccgtagtcgtcgacaggaccgcgcgtcttcgctctgagctacgctttcatcatgggacagaacaggatcgtgcgagacctgcagcggcggggctcttgggacagaacaaggatcgtgcgagacctgcaggcggncgggcttggctgtgtacgcgccagtgtt

SEQ ID NO: 144420 - DNA, 1914 bp, Zea mays
  Clone ID: MRT4577_63195C.1
ccggccgggaacacgcgatctggaatgagcagctcatacactcgatccggaagctggtgcgcatggactacatctcgtcgccccgggtcggcattcctcagaaacatatccgcaagagtccgccgcagaaccaagctcgtgttcagctttctcgacaaaaaactcctggatcactccgtgaaccagacatacggttcgctggcgaggaacctgacgttcgtcaggtccgtcgcgtctggcatactggtcccgaaggactacatctggccggtgacggccgataactacctgctgccgtccacgtcgatcgtcaccgaagcgcacgaagcggggctggagatatacgcctctggttttgtgaacgataaggctgtcccctttaactacagctacgatcctctggcggagtacctgaacttcgtcggcgatggtggcttctcggttgatggcgtactgtcggactaccctattactgcatcagaggcaattggttgttttgctaacctgaattcaagtaagactgatcatgttacagggaaacccttagttatctcccacaatggcgctagtggagactacccggactgtacagacctggcctaccacagtgccgttgacgatggcgcagatgtcatcgactgtcctgttcaagtgacaagcgatggagtcctcatgtgcatgagttccattaacctgcttgacaccaccaatgttcagagaacacctttcgccactccttccctggttccatctatcttaataaatgtaattctttcatcactgatcaatctatcttctctaccgcagaatgctgcgttcatagcaaagtcactagggatcgacatggttgactccgtaaccgccgccttaagtgccgccggcttcagtaaccagaccaccaaggaagttctgatccggtcaacagacagcgccgtcctcgtcaaactgaagcagcagaaaacgagatgcaagctcgtgtacaccctccccctaggcatcggggacgcttccaaaccctcgctgaaggacatcaaggcgttcgcggaagccgtagtcgtcgacaggacctccgtcttcgctctgagctacgatttcatcatgggacagaacaggatcgtgcgagacctgcaggcggcggggctggctgtgtacgcgcaggtgttccggaacgagtacgtagcgcacccgtttgatttcttgggggatccgaccgtggagatcaactactatgttcagacgtttaatctgtccggcatgatcactgatttccccaagacagtcagaagatacaaagagaacacctgtacagctctggggaaggatatgcccaagtacatgcggccagttgaggctggctcccttgcagatttcctccggtccttccaaacccagccgccgtctgtggcaccgatgccggcgctgaactcttcaagcgtggaggagccgcctcttccaactgctgcgccgagaaacgtgccgcctggtggtggcgccccagcggacgccgccgggactgctggcggcgctgctccttctgatgcgagttccggcggcgctcctccttctgacgcgcgtcacacggctaccggaagtagcggtatgctgcttgtggtgctggtttccgcggctctgctgatctgattctgagcagacacatgagactgtatagtagacagagccgaagcaaatgcaaatctccgttggattcgatcaagctttgaccagcgatataccatacacttgtttttctcgggtatatatgtttgtatttggccgcatttttcacgtccacatgtgtaaaaaattgtcagtggaaaggttatatgtatcagccggaaattttatccggcgatgatcaaagttctgacaaggattaagcgatcaccacaaactccaaataatatggtgttattt

SEQ ID NO: 144421 - DNA, 156 bp, Zea mays
  Clone ID: MRT4577_63196C.1
gtgtatggactcgctggccgattctgagtcgccgaggcgggccgccgcacctcgacggttccgcgggggtcatgatgaccgcgagggagagcctggtccgcctcatcggacggcgccgacgctcccctctcaccgcctcgctgcgccgacgaccta

SEQ ID NO: 144422 - DNA, 453 bp, Zea mays
  Clone ID: MRT4577_63197C.1
cgctcatgacacaagatggtcagtgtgcctgagtcaccatttccccccttaattcttttggagaggacaatgatttgtttctgcggtctgattgataacataacttatgacagcattaacaagttttagaggagttcaagagtaacataggcaccatagttcatatattacatcccctttctctgcactagtttgcatcagatttattttgcattatttttgcatatgaattcctgctaggtgtaaatgagcagaatacattgcttcactgttgtgaacctaacctgtctacttcttgttttgtaaggttgccatctttggaaacacatggttcagctaagaatgaatattttagcagagttaagggtgatgggaaatgtccagtttcaaaattataagttaattttcataacgtcagtcaagtaacatgggcctcaaattgtataggcacac

SEQ ID NO: 144423 - DNA, 338 bp, Zea mays
  Clone ID: MRT4577_63198C.1
aaaaaccctgggaaaaaaaaacagcctccgattatagggctgcatcaagcgcaattcacaggttcggggtaaaggcccacatctacagagaaattaatagagggggcctaggggggaccggatttgcattttccgagggcgatcggtggcgggcaaacaaattaacaaggggccaaaccccaaaaaaaaatcccaaatccggtcccttggtacacggggggccatggggttcacggggacgggttagcttggtgatttggggccctttcaacgcgcaggcgggtttcacgacggggcataaattttgcgccttgtgaaatcggtccgggctttttcaa

SEQ ID NO: 144424 - DNA, 465 bp, Zea mays
  Clone ID: MRT4577_63199C.1
atggcgccgagttgctctccggtagggccagatagcgttggcggcgaatgcaggggagccagctacagaggtccctcgactgccgtcatcgtcggcggcgccagcgaggatgtcagtgaagggctgctgggcctggagcagcacggggtggtctgggtggtactgctcgaagaagtcgttcgtctcctcttccatgagcatgcgcgagatgaaggggagcacgaggtcgtcatcgttgtcgtgcagctgctgagctgcagggcggggctctcgaggcgaggcgttgggggaccaaggttgaggaagtccgacggggagaaggaatcggagtcaccgacatccgccggctcggcggccatggtcgggtccctggacgggaggcggttaaagaagaagctggatctttatgccggcgactgcgtgtgcacagcgtaccacattagtcctagtcgctcactgcactag

SEQ ID NO: 144425 - DNA, 351 bp, Zea mays
  Clone ID: MRT4577_6319C.1
ggggggggtgtttattaccacattagtggccagggcattaaacttggaacacaaacttgggacgcaagggtttattttaaaacacattgaccgggttacaaccacgggccattaaaaaacagggcccgaagggggaaactcaaacaaatgccccataagttcagggggacttaactttgggggaacacacaaagggctaaattttgactttttagcccgggccaacagataatactcaaacaaaactttggttttcatgggagcggggaagttattcaagctcaactgttcaagccttgtaaatccaggggtgaagggggctttttcactgggccaaacctttggggaacc

SEQ ID NO: 144426 - DNA, 352 bp, Zea mays
  Clone ID: MRT4577_631C.1
cctcaatcatcattcatcttagtagggtttgctccaaatgggatctgcatcatctattacctaactccaaaaaccatgaagctggttcttgtcgtgtccgctgacaccgctatggcttcaactgctactgggacacagaccaacggctgctactcttgactgcaccacctccttgtgcggttacatcggatcacaacgacgtgatcagaacggacatctacatttacctccaccacggcatttcgagcgtgagcaactccaactgcgacttgtcgacatgcacccacacaaacatcagcaacaccaagtagttcatcgttccacaacgacaacaacaaccgcagcaccaaca

SEQ ID NO: 144427 - DNA, 225 bp, Zea mays
  Clone ID: MRT4577_63200C.1
gggtcaacacactagtctaaagtcacttatactacgcaatatactgctcacaatgcactgcatttgggtcagtctctcaatacggcactgcgtgttcgtggagacacatctagcggcctaaccttattcccggcgtatgtgctgctgttactatcttaccatcttaattcttatcatacatctccatattcgacatactcttgctgaagttctgtttttcctatc

SEQ ID NO: 144428 - DNA, 366 bp, Zea mays
  Clone ID: MRT4577_63201C.1
aattctcctctttcggtggagaaaaaaattagcattttttaaaaaatcattcttttattgaaagataattgttggaataaaaataataaaccttgttaaggaggagggagaaaaaaatttttctgaatagaaacaactaaatacacatttttttcaacaaatatacgaatggcaaacccagtttttacatgggtttttcgaaactttcagaatcgcttctaaatgaatttttttttttgatgataggaaggtgatttttaatagccgcttttttttttttgattcggatacgcttggcactgacataaataaaattaagcgtgatttggtggtaacgttatttttattgagttgattttttttggg

SEQ ID NO: 144429 - DNA, 1855 bp, Zea mays
  Clone ID: MRT4577_63202C.1
gacttagctgctgaggctggccaagtgcggggtcgtcggacggagggaggttctggagtccggcgacatggcagtgctgttgcggaatagcgaaggccggagacaaggtgtcggctcgagcgctgctgcacctcatcctcgacggcgacgaaggggacgcctccaaggcacgaggcgacctgcagagagagacctgagccctagccaccaaaaaaaaaaaaaaaaaacgtttagctaagttcatcaatacgccactgtatgttgttcatgtgatgagcatcgacgcaatggatgagattgccaaggctaaaagagaagggcagagagtcatcggtgaacctgtggtttctggactagtgcttgatgattcttggctttgggatcctgacttcacgattgcttcaaagtacgtgatgagtcctccaatccgggaagcagggcatggtaaagcactccaagctgctctttcatcgggaattctacagcttgtaggtactgatcactgcacattcaactccacacagaaagcttttggttctgatgattttcggaagattcccaatggtgtaaatggtcttgaggaacggatgcatatactttgggacagcatggtggagactggcaagatttctgtaaccgactatgtcagagtgacaagcacagaatgcgccaagatcttcaacatattccctcggaaaggagcaatcctggaaggatctgacgcagatatcataatcctgaaccctgaaaggagctttgtgatgggtgctctcacacaccattcgaggtccaacaccaatgtgtacgagggcaggaaaggaaagggaatggtggaaataacaatctcaaggggccgagtggtatgggaggatggcgttctgaacattgcacctggttcaggacgatacgtcatgatgccacctttcggctacgtctttgatgggatcgagaagtccgatgcgacctacagagcttccctccgagcccctgtacagcgtggtaaagctgctgcatagctatgacagctgctgatgccattgacagggcagtagccccccatctgattcaagaacgagttgctccaaggtgaacaccgcatcgttccatgcgtattgtctatacagaacagtttatttaagatcagattcaggataggtaaaggcctcagcttgcctatgtacatcaaacacatttgttactagttctggtcaatttgtgcaactagcaattcgctgttccaataaatcatattatcacattcaaaaaaaaaaaaaaggccagagagtcatcggtgcatctgtcatttccggactagaactagatgactcggagctttgtgatcctgatttcacaattgtgtcccatgaagtgatgtttcctatgatcccgcaaacacaccattctaaagcactcaccaatgtgctttcgtgcaggattctaaagggaatggtggaaataacattctcaaggggccgagtggtatgggcttttggctctgataacattgcacctggttcaggacgatacgtcatgatgccacctttcggctacgtctttgatgggatcgagaagtccgatgcgacctatagagcttccctccgagcccctgtacagcgtggtaaagctgctgcatagctatgacagctgctgatgccattgacagggcattagccccccatctgattcaagaacgagttgctccaaggtgaacaccgcatcgttccatgtgtattgtctatacagaacagtttatttaagatcagattcaggatagataaaggcctcagcttgcctatgtacatcaaacacatttgtgactcggaaaactcacaagttctggtcaatttgttcaact

SEQ ID NO: 144430 - DNA, 630 bp, Zea mays
  Clone ID: MRT4577_63203C.1
atggcgtttgtctcgttcgtctctgcgatggccaccgccgtcgccgctccagtgtctgtggcgccgtcccctgcgcccaaggccaacgacagcaggaaggcggtggtgcccgtggacacatcggagctggagaagcacatgctagcggtggacgacagctccgtggaccgtgccgtgatcgccaggatcctgtgcggctccaggagaagcatcgatccagagattagggttcccagtaagtctctactccgcctccccccaatcccctccatctcgccttccgcccccgagacactcggctataccatgccccccggcccaagagatcggtttttggtgggggagctagcacgggcgaatggctggcagggcggaggtagcggtcgtggaggaaatggaggtggggcgctgattgcgacaatcacgccgcctgatgtggcgacacatgccacgtactcgcgcaagcgctatttcatgctcgaggatgtcgcgctccactgcttcaagtctgtgccatcctccaagcgcgagaacagaattgcactgcagaggcaccgtagccagtttggactgtttgtacgccaagtattctctaagactcttttatcgaaatgggacaatggtggctga

SEQ ID NO: 144431 - DNA, 323 bp, Zea mays
  Clone ID: MRT4577_63204C.1
ggcggactactacgcgaatattgcatcaccgaagggacacagtgccaaggcgaagcaactcgcaccgcaccttattcacaggttctttctgagctcccctgcactcaggacgcgcgccatgtgagccatgttagatctcgtgaatatggaggacctcgcgatcagaatacacgctattcgcggctttacactccttggcacagagactgaatctgtgtcaaaaatttcatatgtactgtgtcaactccttacaagctacgaaaatgttcaacgtgatgctgttcataaagcgctcatgtcccttatacggaaagatgctcaaa

SEQ ID NO: 144432 - DNA, 853 bp, Zea mays
  Clone ID: MRT4577_63205C.1
gtgcggcgctcgaggcggcccggccggggaacgaaaaccccacgcggccgctgtgacgctgtccctggagatggcggcgtacttgagcatgggtgaagcgcaacgccgcatcggcgactacctctctcgggtgaccaacgccatctcctgctccgacgccgccgcgctcgcctcccttctttccgtctcctccgcgccggcctccaccccgctctccgacgcgctcgccgccatcccggacttcccgcgcctcgctggagatcgctaccccgaccttgccgacctcctcgttccgttgctccgagccatccacttccactccatccagcgcttcgccgacgcctactcctcgttcgagaaggcctccaacgcgttcctgcaggagtttaggaactgggagacgccgtgggcgatggaggcgatgcacactgtggcgctcgagatcaggctaatcgccgagaaggcagatagggagcttgcgacgaatggaaagaaccctgacaagcttcaggcggctgggtcttttctgatgaaggtttttggtacactagcggtgaaagggcctaagcgtattggggcactctatgttacctgccagctattcaaaatttacttcaggcttggaacagtaaacctttgccgtagtgtcataagaagtatcgaaactgcaaggaattttgattttgaagactttccagtgaaagacaaggtcacttatatgtactacactgggcggttggaggtgtttaacgagaactttcttgttgcagatcagaagctaacttatgctttgatgcattgcaatcctcaaagcgagtcaaatttgaggagaattttgaagttcccttatccc

SEQ ID NO: 144433 - DNA, 1138 bp, Zea mays
  Clone ID: MRT4577_63206C.1
tcaaaagggtcccaactctcaactcgcgctcaatgcatccgctatcgtctctcctcctgttccgttccgccgcgccgcccagcgcgctccccttgcggcggcggcggcggagtcacacgccagtgcgagcatcatggcaggagctggcgggcgtgctggtgttttccgccatccccttcactgcagtcaaggccctcgccaacagtcccctgggtgcccgcctccgccgccgcctcgaggacaggaaggccgccgcagctgccgaggctgacgctctccgcgctgcctcgcgcggcgcccgtaacaacagcttttggtacggtggagatcggccacggtggcttggtcccgtgccttacgactaccctgagtatttgacaggagagtaccctggagattatgggttcgatattgcaggtctgggaagggatcctgttgctttcgcaaactacttcaacttcgaaatcttacattgtcggtgggccatgcttgctgccctcggtgttgttgttcctgagctattagatctatttgggttagtgcattttgtggagcctgtctggtggaaagttggttatgcaaaacttcagggtgataaccttgattaccttgggattcctggattccgaattgctggtggtcaaggcgtcgttgtaattgcaatctgccaagccctcttgatggttggaccagaatatgcaaggtattgtgggatcgaggcactagaaccattgggaatatatcttcctggtgacataaactacccaggaggacccctttttgatcccttgggcctgtccaaggatcccgtggcatttgaagatctcaaggtgaaagaaatcaagaacggtcgccttgcgatggtagcatggtttggattttacatccaggcggctgtcacaggcaagggccctgtacagaacctggttgaacacttgtccgacccactaaataacaatatattgtcctccttccactaaatgaaaatatgcaagagtggcacgaaccatagcaacgggtgtatattgtattagcgtttacagttttacactaatgggttctgaaaattggcaattatatttatttagatagacatttaacggtgattagtgatctatttgcagtttggtagtgcgtc

SEQ ID NO: 144434 - DNA, 237 bp, Zea mays
  Clone ID: MRT4577_63207C.1
aaattattcgtaagaacacagagctcggagcagaaggttgctcatcttctgccaagggagctggtaagagacaaaatgttaggtcattaggcttccaagtgcgccactgggtaatgtcttccgaaaagcacagactgaggagaatggttaccccagtgcattgtgcaaagatgagattgaagattcatgcgatcagagtgattctgtgattccagtcaaggaccagattccacgtgg

SEQ ID NO: 144435 - DNA, 2956 bp, Zea mays
  Clone ID: MRT4577_63208C.1
gtgcatcagcactgcaggggtctactgaggcactccaagtggggaaatggcggaggcgacgaattcgagcttgggcacgtaggcgtcgctcctgccatcgccgcagcggtcactggactctcacgccgccgccgccgccgccggagaccattagttctcctgcgcggcggctccgcggctcccgccctctcccttaccttcttcccgctagggttttctccgatccccaatcactgctggttcacaaatggcttcatctcagcatgttgagatggaggctgcgaaacttctacataaacttatccaggagtcgaaggatgagcctgctaaactagcaacaaaactttacgtgatatgtcagcatatgaaactaagtggaaaggagcaatcactgccatatcaagtcatatcaagggctatggagacagttgtgaaccaacatggaattgatatggatgcattgcgatcatcacgaattccatttgctggtggtcctcaggcaggggattctagtggtgtcatgtcaaaggacaaggaggtcattggtaaccagtctcccatggtcggaagtgatgcttcccaaagtagtggacaagctggattatggcagcttccatcaggttcaaccgatatgataagacatggggcatctatttcaggtagggtacccacagggccaaataggggagatttctcagcagctgatattcatcaaggctccatgtcacaaaaaagcggtagatcctctggcattgaaagccctgcaagtctgcagatggaggacaccagatctatgaattcacatgattctttgaaatccgatgagaaaacaagtaagaaaacctcttccaagagaaaaaggatggattcaaaaggagctggtgatttgcgttcagaagacaactcaaagtcagatgttatctccactggacagaataccaggaaggggaaacaggttggtaaggctggtagacaaggtcagccttccatgggaattgagcatgagcagcaacctcataaactgcaaggtggtactggtcaggtaccacctatacatggtggtgcaccttttctcaggactcgctcagaaggtccttctgggaggacaatggacaagactaaaccatcaaatccattctcaatgggtcaaattccaaattttcctgaagggctggcttctactggtgctccaatcgagttgcagaaaagtatacagggtggagcaagtttatttaatcctggttttggctggaaccaaaatccacaagttcaaaccttgaagaattctcaaggttctattcataatttagtgaggtctggagttactgttgaagggaaagttaatgtaggggcacaaggagcttttaactctgcctctgcaccacagatggaatttcccacagttcctccatacaacccctcttccttcggagctagctcacagtttctggacaaaggcaaggagttggtttccagcattataagcactgaacctcattcatctaaagttgcatctcagcctgggatttctcatggaagtcccatgcaagaaaggcaaggtatgatcagggtgccacagagaggcgaggcatcatttcaggaacgcaggccatcttcacttccgagtagaagtactgggccaagtccaatgtctcacatttcttccaacacaccatttaaagaacagcagctgaagcagctcagagcacagtgcttagtatttcttgcatttaggaataatttgcagcccaggaaggtacatcttgaaattgctttgggcagagggcctcctgcagaaagtgacagtgcaggtcaaaggggcagcgagggcagagtgtctgatgctctgggaaaggaaaatggtagcagtcgggagaactctggtgtcttttgtaggcaaactgatatctctagacttccagccacatctgcaggaagtattgcagaggatgattccttatcgaaggatccagaaaatgctacaaaaaaaatcaagttagctgaacaggagaagtcattgatggaagtagaaaatgtccagcaagcttctgttatgcaaggaactagttctgaaatgcgttcccaagaaactgcatctcaaaatccatatcgaccacaacagtcatattatcaaggagatacaagaagaatcgcctcggatatccataggactgatgctgaaattttgaaccagaatttaagttggggaggccagggatctactgctttgggtggtactagacagcttctgaatcaggaaactaaagaatcacttgcaccttcaaagtcacaccatatgcctgttgatggttacaactccaatatacaaggaatagatcggactccagagatagctggagctggtaatgatgttgaaaattgtagccacgtagcagatattgtgcctgagcaggctgctgatgaaggagatgaggacctctcagagcatgaggatttattgtcatctccaaagcacacaatgacggaaaaatggatcttagattaccagaagagaatttacaatgagaaacaaaagagaacattggagcagcataaggtacacagcagaatgtcagcaacatatgaggagctaaaggagagcgttaattcatccgaagatctttctgcaaagaccaagagcgtcattgaattgaaaaagcttcagcttctgccacttcaacgtcgtgtacgcagtgaatttttgctggattttttcaagcctaatacatccgacttagagcgcataaaatcactgaagaaacataggcatgggcggcgggtgaaacagcttgaaaaaattgaacagaaaatgaaggaagaaaggcaaaagagaattcgtgagagacagaaggaattctttgctgatattgaagcttacagagagaaactcgaggataacttcaaggttaagagagagcgcttgaaggggttcaatcgatacataaaagaatttcac

SEQ ID NO: 144436 - DNA, 313 bp, Zea mays
  Clone ID: MRT4577_63209C.1
gtggagggaaaacaaccaatcgacaaccgttaaattgaccgtttaccaatcttttaaaaaaccccctaggtggggtttacacaaaaatactatactaccctcggacattcttttgccccgcaaaggtcccccgggagaaaaaccctctttactgtcaacaatggtgggggcaacagttgctgacataacaaaagcacacatgggacggcactaaactttgattccgggggaccatgcccccccaaaaacttggatctttagtaaaactcgttcccaaaatccacattgactggaggttcacccggacccgtgg

SEQ ID NO: 144437 - DNA, 626 bp, Zea mays
  Clone ID: MRT4577_6320C.1
ccggccgggtttacccataaaagaacttgggattattttataccttttatctctactactacttaagtgtctattgtaggcgtccacaaaggcggatggtgcacggttctgccggttccgcatcccgccagattgggacgaattcggcatcggctccaccaaaggctccacggatttggcatcagctccacagattttcgatactgggtaacagaaatgcatgtttatggtgttcgttttgaccttgcattacatctacaatgaccagaggatgcagaacgccactgcagcaccgatggaattgtacggtgtcatcaggctcgactaaatctagatgggatggactctacttgtgttgaaggaaaggaagtatgtgcttggcttgcgaggagggggcatatttctgttcaacttttcttacgggtcatgttacttgtcatctcagattacacaactttaggtatttctgtctttgtgagaaaagtaccaaaatagtttcacatgtgtttaatttgaatattttgtgtgccgttgcaacgcacgggcacatacctagttatatttataattttagatacataattagacaaataatttcaaaaaaaaaaaaaaaaaaacccgcggcc

SEQ ID NO: 144438 - DNA, 690 bp, Zea mays
  Clone ID: MRT4577_63210C.1
cggacgcgtgggcggacgcgtgggcggacgcgtggggcaggcgctcgtgtcctggcgcgacccgcgtgccaccgggctgttcgtcgcgctgtgcgtcctcgtggccatggtgctgtacatggtgcccatgaagatggtggccgtggtcgccgggttctactacctgcgccacccgatgttccggaatcggatgccagcaccggtgatcaacttcttccggcggctgccttccatgtctgaacgaatcatgtaggagcaggcaatcggtggcgatggagcatcattttggcacacacgatggaagacggttgcgatggagtggtggtttaacatgcaatagcagcgatatccgatatgttaacgtttttcttctaatttctactccagcattcaagaattgcaataaagcaatgttcctttcagtgtatataattattggaggtcttaactccttttagtaacttaggctatctctagcaatcttacttatcatacctattttaaacttcactctgtaaccattgcagtgtgaaataatattttgcacagctgcaaaatagcatttcgcacagccaaatgcacagtttgttggcgatagcctaagtacatccaattcgatgtaataacttacatgatttagcaaaaaaaaaaaaaaaaaaaaagggaaaaaaaaaactcgaggaggggggc

SEQ ID NO: 144439 - DNA, 609 bp, Zea mays
  Clone ID: MRT4577_63211C.1
gcacagcaccagcaccacaactccaccaaccagcaagtaaaatcgttaatcttgtaccgagcgatctatcaagagggatgaacgcgcacgccgtcgcccaggccttcccgcgcacctacggccagcggctcgtcacttttctctcgccggacgacaccgccggggctgtcaaggctgtcaacgagcgccagcccatcagggtgggcgtggtcttctccgggaggcagtcacctggagggcacaatgtggtctggggcctccatgatgctctcaaggtttacaatccccagagtattctctacggatttattggtgggactgaggggctgtttgcaaacaagacattggagatcacaaatgatgttcttgcttcatacaagaaccagggtggtttcgatttgctgggcagaagtattgaccagatccgctcgagtaagcaagtgagtgctgctatgacgacgtgccaagatcttaacttggatggcctggtcattgttggaggagtcacttccaattcagatgctgcacagctcgcagagacccttgtccaaaagaactgtaagaccaaggtcgttggtgtgcctgtttcactgaatggcgatctcaaaa

SEQ ID NO: 144440 - DNA, 104 bp, Zea mays
  Clone ID: MRT4577_63212C.1
aacaaacagacagacccttcggtaatgttgaaacgggagaagtgtcctgaagaggatcgagaagaatacactgcggtatccagtgccctgtaaatgacgacacg

SEQ ID NO: 144441 - DNA, 116 bp, Zea mays
  Clone ID: MRT4577_63213C.1
tgttgatcgcgcatcactgaaggggagcagtggaatacgccggtttcagatctgccgtcgtcatccatggcatgggaacgccgtggtctcattggggggcataaccgtgttggcgt

SEQ ID NO: 144442 - DNA, 107 bp, Zea mays
  Clone ID: MRT4577_63214C.1
accacgcgtcccgcctcagcgcgtgcctttgccctacggcatctccagcgccggactggtccagtgcctatagcacccggacaccgcttagtccattctcaacacca

SEQ ID NO: 144443 - DNA, 1037 bp, Zea mays
  unsure (1)..(1037): unsure at all n locations
  Clone ID: MRT4577_63215C.1
ctaaactaaacttcanagnatcacgattcacgcctgggttcagatttagacggtcatcggaaactgtgaattggagcatgcagatgtgacaggaaaatgaatcaattctaacatcattgccatagttctggtttactgcatggctaataacaacattattcgtttccatcccacaagaaggaatatcaatggtcttctatgaagaaatctcatctttgcatggatcatatgtgtatataatttggctcgtcacttagaaattttaggcatctctgtgttcgtctgagtttcttaatctattatgttcattgtgccatgcacttggagttcttatggtggacttgtgaaagccgcagattcaatttcgatccatttgctgaggctaatgctgaggagtctggtgttggtcttggaacgaaggattatgtgcatatgcgcatctaagagcgcaacgatagaaagaatctgactacagtccagggtctgaacaaagaatatgcgaggtaggttctccaatttcaagggagaagtctgactatagtccagggcatatcagtaagttctccaatttcaagggagaagtctcaaggtttggaccccaatatgcgagacaaagttatctattcatctccaaattttgatcccaaagttttcctttcatgggtccacaaagacacgagtgctgctgacttagatgctggtgctctcaccttgaaaactgatctcaaagggagaacacaacagaaaaaactgttagtcaaggagaacttcgattgttttgtctcgtgcaaaactacaatagatggtatttgtgtagttgttatatacatccatattgcaaataaatgttcatgatcctgagtttatggacaatgttttgcatccccttgtaacacagtttttttgcagacattgagtcgaaattgagacagatagaggaagatcctgaaggtgtaggtactgctcacttgtattcagtgacactaaaaattagtggtgtggcaaatcgtgcatttgaacctcgattatataatttt

SEQ ID NO: 144444 - DNA, 407 bp, Zea mays
  Clone ID: MRT4577_63216C.1
ggccgcttttttttttttttttttcttgtttttttttttttttttttttttttttttttttttttatcagcaaaaaaaactttattattgaaccatacactcataagcaatctaaaagagggcaccaccaatgatgggttgggggcaaaaccctgctgggtttgccaaagcaagttggccaaatgggagcaactgtggcagttgtaggagggcgccaccgtttggcgcagggggcaggtagaacggcaacaaatgttgttgcgtcaataagggagcggggctcacaccaggttgctggctgaacggtactagatggcgttgttgatcataaccctgagaggtcaatgctggcctttggccgaatggaagaaattgccggaggccggcaccacctagctggctgaatg

SEQ ID NO: 144445 - DNA, 154 bp, Zea mays
  unsure (1)..(154): unsure at all n locations
  Clone ID: MRT4577_63217C.1
cccaagccttcgccgcgcctcttcttctgcgcccctctcctcccaaactagcggatagagcagcagagccactcgacacgatcagcgagcgcaagtttcgtacagttagtcgagaagctcatagttagaagaagcaccagnagcctagatcaga

SEQ ID NO: 144446 - DNA, 374 bp, Zea mays
  Clone ID: MRT4577_63218C.1
tgccatgattgctcgtccttgcctatttctgtgatgcgcaacacacgcgcccattctggcatactaatacgatatactgctctaactgtcacgacgaatagtgtcagcgatgttgcctaatacacatattacttgatgaagatcataggatgctatcagcgggacttaaggagaggaccggctcatgatcctaagtgatcctcatagtatgccagttggacaatgcatcggtgcgatctgtgtcagttcaacattcaataagatattgttcatccagctccgtggatacgcagccaagggcaggatagtgaaggtccagggtcttacaagcagttggacagcagtcaagaatgaatgcgagaacaccaaggata

SEQ ID NO: 144447 - DNA, 1021 bp, Zea mays
  Clone ID: MRT4577_63219C.1
ctggagcacgccgacctgtcccgcgtgttcctggcgggctgcagcgccggggccaacatcgggcacaacacggccgtgcgggcctccgccgccggcgcgctccccgacggggtgaccatccgcgggctcgccgtggtgcacccctacttcccgggcagcgaggccgtgggcggcgagatagccttcggccccgagatccggccgttcatggaccgcacctggcggttcgtggtctccgacacggtggggctggacgacccgcgcgtgaacccgttcgtggacgacgcggcgcgcagggcctccgcggggatcccgtgccagcgcgtgctggtgtgcgtggccgagaacgacttcctgctcaaggagcgcgcgctgtggtaccaccgggagatcaaggccagcgggtacgccggcgaggtcgagctgttcgagtctaaaggcgtcggccacgcgttccatttcgacatgctggactcagagcagggcgtccagctccaggagcggatcgtggctttcatcaacaaatgagcaccaccgagatgatgaataagagttttttatgctattttaaatatatcatttggatacttcaaattgtaatacaccgaaagttgtttgaaaaaaaaaaaaaaaaaaaaaaaaaaaaaaaaaaaaaaaaaaaaaaaaaaaaaaaaaaaaaaaaaaaaaaaaaaaaaaaaaaaaaaaaaaaaaaaaaaaaaaaaaaaaaaaaaaaaaagggggggggggtttttaaggaaccaaattttccttccccggccttggaaggtaaaattttttttttggggcccccaaaataaaataaatgggccgggttttaaaacctcggggccgggaaaaacccggcctttcccaaattaaatggcttggaagaaaacccctttttccccgggggggttaaaaaaaaaagggcccgccccgatcccctttccaacacattccccatcctaaagggaatagggaacccccccttaaccggcacataaacccggggggggggggg

SEQ ID NO: 144448 - DNA, 389 bp, Zea mays
  Clone ID: MRT4577_6321C.1
aaaaaaaaaaaaatataaaaaactaaataaaaacaaaaggaaaaaaaaaaaaaggggggggggggaaaagggggggggggggggggctctatataacccactctctcgatctctagcttgtgccgtcatattcttttctatggggccccctaaattcaatgcgctggccgtctttttacaactgggcggctgggaattccctggggtgtcccaacttaatggcttggcacacattccccttgtgccaagggggggataaggggagagggccaggccgatcgcccttttcaagtgtggggcatcctgggggggttatggttcccccccttaggcgggcccaaggggggggggggggggggggggccccagggggagttggggggggccct

SEQ ID NO: 144449 - DNA, 632 bp, Zea mays
  Clone ID: MRT4577_63220C.1
attgggtacctcgaggccggccgggactgttcacccgtacttacaaacccaataacagtgtgtgcactgagataggacaacacaccacgctctcgcaataagcagactctcaactcatccacgcacgccaaagtgaggcacagagctgaactcgtcatacgagtgattgtactgccctgatgcccaggagatatggtactgcacgatcacactaaaagggatgacaggggacatcctgaaagaccgagccgattgcggcgcactgctcgaatcaaacacgatgctctaacatgcatcagaacatgaagaaagcgctgccgacaatctcatacatatacatgctgggcatactcaacctcatcggcggccttaatgtactttagcagaatattgatgatctacccatgacaggagacatatttgaaatgaatgacccagtgcggaaccactgcgtagagctgctgaggatactccttcaaccaggttcacatggcgtatagacatcactgtgtacatactctttctacattgcttgccatccagcaactacggactgtcattcagcaacatcgaccacatagacaacaagtgctggtgggcactattgaatctctcctgtgcattgccctgat

SEQ ID NO: 144450 - DNA, 1095 bp, Zea mays
  Clone ID: MRT4577_63221C.1
ctcgggccgggccgatgacggatgacaccgtagcttccttcctcgccgtcgccaaatgctgcaggccgcctccatgaggtgctagggttccctggccgacgccacgaccgtcgcacccggccgcctccgtccctgcgggccttcgccaccgccctcgccaaacgtcccgagccagggttcctcacagcttctcccaagcgccctccagtctcaccaacccttctgcggttctgcccttggcgccgcgcccatgagcctcaccgaggcgccgtccccgtccccgtcgtcgtcgagcgggagcgatgacttcgcggccttcctcgcctccgagctcgagctcacctccggtgctgactccgccttccctggtgacccctcctccgttttccccgccaccgacgacgagggcgaggatccggaggagctagaggttgaagccatagaacaaaacggtaccaaaaggcgtagagtagaggaacaatgccaagatcaaggaacatcagttaggcctgacaaaatccccactggcgcatctaaaattgttcaggttgaggcatgtccacatcctggacattttggtggactttgcattatctgtggcaagccacaagacgaggaagatgtttcaggagttgcttttggttacatccacaagggcttgaggctaggtacctcagaaattgacaggctacgtggtgctgatttgaagaatctgttgcgtgaaagaaaattagtactcattttggacctggatcacacattgatcaactccaccaaactccaagacatttcttctgccgaaaaagatttgggtattcagtctgctgcttcaaaagatgatccaaatagaagcatcttcgcactagatttaatgccgatgctcacaaagttgagaccatttgtccgagaatttctgaaagaagcaagcaatatgtttgagatgtatatatacacgatgggtgacaaagcctatgcaattgaaattgcaaagcttcttgaccctagtaacatatattttccttcaaaagtgatttcaaactcagattgtactcagcgacatcagagtttgaacaccacggtccgcggacgcgtggt

SEQ ID NO: 144451 - DNA, 831 bp, Zea mays
  unsure (1)..(831): unsure at all n locations
  Clone ID: MRT4577_63222C.1
ggccggatttatgccccgctgtctaaacctctaaagatgtcttaagggggaggggcctgaacctgaagcacgggaaggcaaccaggtacaattcaactaagtctgtcagcatgcaaacgattatttcgtgcataggtgtgtggaattctgatgacgtattttagaacatcactgcatgtcatcattgttctattatataaaatatacgagtcatactttacctcttatatttgtctttatacatgcatgtcagttttgaattattactttgagtaggctaacttcttcacttgagtaaccggaatctgctttacctgtttgtcttctttgtgattatctcattgtaaaagccctctgggtccaatcagaaattggcagggaattccaacacagatttgtaagtattcaaacaggtttgctcgctctttctcttcccttcctgcttgataattcctgaattctgttaggccttgtgctattttatttttgttcaaatatgcatggctttcatttaatagaatgtcttttgaattactgcctcaggacaagtccagttgagtttgttgtcccctgtggttgctatatggaatcactaatatgacattaccattcccttttgtttcgtaatcacatcttgtgagttggatattgattactatcttcatgtgatgacagctggggatgatcttatgtctgatagataccacttgaggcaagttntagtggttctttggttcacttaagatggtaactcatagttntagtggttatgataccatgatttcaggcccttaaaacagatgatactcacagttctgcacctggaaatat

SEQ ID NO: 144452 - DNA, 300 bp, Zea mays
  Clone ID: MRT4577_63223C.1
cccgaaaccggatatgtttattcctttggggggcccacgagcaatttattacttgacacagggcactggatacacgtacgggacgcacacgttacacatgaatgaatccgtatatacccatggaatttacctgttcctggatgcaaaaatactggacgacgggggggtcccctacccagtacatacactggaatgggagtacggccgaaacactggcacacgtacgtacgtacgggcttgttaatcgaagccggaacgtcacgcggggccatagacgcgcgccttggagactccggcgca

SEQ ID NO: 144453 - DNA, 471 bp, Zea mays
  Clone ID: MRT4577_63224C.1
gaacctattgggctgatttatgtgcttgtgtgctgatattattgcttttactgaggacctgaccggcgagtctaagaagccggcggaggaggggaaggctaagcatactggtccgctagaggttagtttagatataacttgttgcgtgtatgttgcgtactttactattgttgcgtagacggagcggctgtctcggctttgagatactgagtttgagactgcgttatctcgtagagaaccggggaccggaaccgcggtccatagcttaaccggttgcggaccccccggcggaagaggagcgatatagtaagccctcctcgaactcagctcgtaaaggtacttaagacccataatagaaagtccggagaagaataagtagacccattcgaaaacagaagacccggttaagaagcattagcgtagtttagtctagtcagtctcagttcgggcctcgtactaaggggacgacgc

SEQ ID NO: 144454 - DNA, 311 bp, Zea mays
  Clone ID: MRT4577_63225C.1
aaaaaaaacctccatggggggggggggggggataccacccttgctcttcaaaagctgaaacgtcccatgacttactgaccaccacggagacggcgcacaagggggagggtgctcttctttaggatgtagtaggctgctagggtgcggccatcctccagctgtttgccggtgaagatcagacgctgctggtccggggggataccctccttgtcctggatcttcgccttcactttgtcgatggtgtccgagctctgaacctccagggttgtggtttttcccgtcagggtcttttctaagatctgcgtaccacc

SEQ ID NO: 144455 - DNA, 755 bp, Zea mays
  Clone ID: MRT4577_63226C.1
ccaggagttatgcagctgaaagctactaacagtggaatgcccatgaaggttgcacaaagaatcgatgtttcaaagtttatgtcatacatcaaagttagtagaacacagctcaaccatataaagagactgaagcaatctggggatggtattcagaccaagcatgtttcacgtgtaattggcggccttgataaatctcatgtgaaaccttatggagctttattagaggatgaacagaggagactgcgcgagcattggctggaaatgtcttgcaatgatttacctgctgcctttgaggttcttagggaaaggaaggtgctgatggagaaatcaataaagttattaggccttgagcttcagcagaagaatgtatctgtcttgagaaaggttcgctgtgacttgtccttcaattctttttcttaagtctctaatttttgtcttgagggaagtgatttacttgaatgtgtaaaaaatacagtggatgagaataccgttgtatgcttacttctgttatgtatcttccccatttacaatgtatcatagcattcgccactatagatgagaataccatgactataaagatactgaattgtaatagaggcatctagtatgaaagccataggcagtatttcattatgaatggtgaattgccctgcagtgttatcttatttgtataagctaatatattgtcacatttttgtaagtatactttgttgtaatcttcataatgaaaataaattcttataaaaaacaatctt

SEQ ID NO: 144456 - DNA, 530 bp, Zea mays
  unsure (1)..(530): unsure at all n locations
  Clone ID: MRT4577_63227C.1
atccattagctccatctccttgcagtncaacccccatgggctgcgggtgctgctgtggccaaccccagaaatcctagagcctgattaggccggcatccatgcctctcggctataaattaaccctgccacgtccaactcaagtcatcaccgtgattccgctaggttgcaccgagagcgatggcaccaaacaaagagatgaggagggagaacagagaggttaccgccaccgtcgattcaatacttcacctggtgaaggttgtccccactgttctcaatgctcaggaggtgagctggcaacatggaggactttgaggagttccaggactacgacgagttctagtttactttagtggcaaccccccagtcagctgcatgtgtaggcttacattctacgtttcgttactccgcactttgatgttattgttaaacactatgtttatgtaatagactctatggatgtctcagacatcttgatgtaactaagtacctttccaatatttaattcaagcattatgtgatgatgtccaatt

SEQ ID NO: 144457 - DNA, 679 bp, Zea mays
  Clone ID: MRT4577_63228C.1
ctggccgggtgctgcttcctggttggggaagggaaggagaaggagacggctcgtgtgctgttctgcgccgataacgcgatggtgtcccttgccaccgacgtatgggccctcgctggatagcggcccggcgtctaaggtggcggcgccagcgaaagcgccgcaggagatgccggcccagcatccttctcatgccgcaatggcaggagggaaggccaagaagagagccgtgccaccgtctgctcagaggtcgtagcaccggcggtggccaacaccaccatcgtgaggccgtcgtcgttgtccaccgggcggcgtgggcggcctcctacgggcgccctcttcgtccctgccggctccgggaacccccccggggtgacctacgccaaggacaagctgggctacgacatcacgacggcagcgtgcctcaacacgcacggacccaacgatcgcacactcgcgcaggggctcaagggtgaccccacttacctggtggtggaacaggacaagacgctgtccacctacaggatcaacgccgtgtgcactcacctcttgatgcgtagtgccgtgcaacggcgccgagaacaagttgatctgcccatgccacggatgccagtgcaacaaccagaggaaggtggtccgtgccccggcgcctctgtcgatggacatggttcacgccgacgta

SEQ ID NO: 144458 - DNA, 496 bp, Zea mays
  Clone ID: MRT4577_63229C.1
gggaaaaaaaaaggagacacaaccttttttttgggcgcaaattagttaacaactggaaaaaccaggggacacaacttccttttttctgaagcagagttttcatgggatgggaaagcaaaacttggccagtttgttccagcaactggtcgagagggaccactaattggagggggtgaaaatgggtttgcccctgatgtcgatgattcccttatgttaagcttttttttcttgggcagatattttgaacgcgagggtttcattaccatccggtctatttccctctttgttaactccaaaacaaagtaaaatcgcccttttgccatcagggcattatcaatttggtgggcttggtgagcttttattggaggctttaactgatccctgtcaacattagtccctctaaaagagctaaatccaagggctgccccaatagtctgtgggcgggggtcaaccactgaattgtgatgattaccatgatgggaacttaacctaattg

SEQ ID NO: 144459 - DNA, 1153 bp, Zea mays
  Clone ID: MRT4577_6322C.1
tcgacccacgcgtacgcatctatcagcttaatgtcatcatcatgattaatgtggacttatctagactgtttttggaggttctagtagttcggcatttctgaaccgactatcatcactgcaatctttcatgttctttttatttagtctcactttgctcctttttcattaatggtttattcgtggacattttcaacttctaccatcaaaccttctgaagttggaactttatgttctattcaattattttacccataaaaagaacttgggattattttataccttttatctctactactacttaagtgtctattgtaggcgtccacaaaggcggatggtgcacggttctgccggttccgcatcccgccagattgggacgaattcggcatcggctccaccaaaggctccacggatttggcatcagctccacagattttcgatactgggtaacagaaatgcatgtttatggtgttcgttttgaccttgcattacatctacaatgaccagaggatgcaggtggttcgaagttctatgatcataagacgcattcaggtcgatctcactcttcatgttcgtgctcgctgcgcagaacgccactgcagcaccgatggaattgtacggtgtcatcaggctcgactaaatctagatgggatggactctacttgtgttgaaggaaaggaagtatgtgcttggcttgcgaggagggggcatatttctgttcaacttttcttacgggtcatgttacttgtcatctcagattacacaactttaggtatttctgtctttgtgagaaaagtaccaaaatagtttcacatgtgtttaatttgaatattttgtgtgccgttgcaacgcacgggcacatacctagttatatttataattttagatacataattagacaaataatttcatatatatatatatatatatatatatgggatggactctacttgtgttgaaggaaaggaagcacgtccttggcttgcggggaacgggggcatatttttgttcaccttttcttatgggtcatgttccctgtcatgtcagattacccacctttaggtatttctgtctttgtgagaaaagtaccaaaatagttttactgcatggctattcaggtgtgtttaatttgaatattttgtgggccgttgcccac

SEQ ID NO: 144460 - DNA, 434 bp, Zea mays
  Clone ID: MRT4577_63230C.1
ggctgcaaaatatgttaaggttgtcaatgactctctgcatgagctgtataaggagtatgtggcacagacactccccttggcccacgcgtctgttgacgcgtgggagctaataatgtggctgctaacgcaagtgtgaaccagggaaatccttcttccactggtgatggtcttcttgactttgatatgtacctttctgagattcaaagtacccagcctgcaaaatgtgatctggagcagtacctggaggaatccctcactccacgtatccaagagtttgatatccttaattggtggaagcttaacacactcaagtttccaaccctgtcgaagatggcccgggatatcttggccatcccaatgtctatggttagcagtggcagctccatattctctgctggaactgggaaccgcatgctcgatgattacagaagctc

SEQ ID NO: 144461 - DNA, 158 bp, Zea mays
  Clone ID: MRT4577_63231C.1
tagccacatccaagacatggatactaaaagcaacaaccttctaaacagaaacaggagggttataaccacacaggagaagggggggactcataagaaggggggacggtctgggggggccaagcgaacctccgagcccaggcaagggaatacctatttta

SEQ ID NO: 144462 - DNA, 503 bp, Zea mays
  Clone ID: MRT4577_63232C.1
cccgggctttattttttttttttttttttttttttttttttttttttgggggggggtggggggtttttttttttttttttgtggggggggttagaaattaaaagagggaaccaaacaccccttggtacccgggaacaaacattagggaaaagggggaccccccggacaaaaaagggggggtttaaaaaaaaatataaatgggggggtggggggacaacaaggcacatggctagcctgctaacgggcggcacccaaacaaaaaaaaaaaaaaaaatgtttgccaaaagccccccagggggcccgggggggacaccaccccccccttaggcattattattattttaaactcggagcatgccctgggccccaactgactgactggggggctcgaaaacacacaggggccccgttttacttttttaagctttataattagctagcttcctccggccggcctgggggggggggctcttagctcccttgcctttgttgtggggggcgcc

SEQ ID NO: 144463 - DNA, 683 bp, Zea mays
  Clone ID: MRT4577_63233C.1
caagcctcgaaggcccgcagccgcagccccggcccctaccttctccttctccttccctcccacccaccccacaccgcaagcccaaacaaaacgcaacgcgaaccagccacacgaatccaccagcgcacgcgcaccgtcacgcgagggcccctcccttctcgccccgtccggacccccgcccgtcgccgtctctcccgtcgcgcgcgccacgcgaacagcacctaggaggcggcgcacgatgaggccgggcgggccgccgaactcgcgggcgctgcagccgccgggcacgccggggcggtcgcgccggcgcccggacctcaccctgccgctgccgcagcgggatctgacctccctcgccgtgcctctgcccctcccgcccccgccgtcctccgcgccgtcgtcggggtcgctgtcgctgccggcgccgacgatgctcggtgcgccacctcgcgtacctactccgcggcagtgacccggagtcccgccgtgcgacatcactccgtaagcagaagaaggccgccgcgtggtgcttccggcggtcaccaccacgacgacgactccctggcctccgagccgatctcgaccggaacgtcagtgcgcgcgcgaaactacaatacccagctcttacacagaacggaccacctcctactccatgctagaaagcaccgggctctgccaatact

SEQ ID NO: 144464 - DNA, 1796 bp, Zea mays
  Clone ID: MRT4577_63234C.1
acttgactactaccctgagaccggcgggccggcaacgccgttgcttcaactcgactccagcatccctcgtccccgcatcaccgcgccgccgacactccgctcgctttcgctcccgagacccgggcctgccgagccgccgccatggacgaggagtacgacgtgatcgttctgggcacggggctcaaggagtgcatcctcagcggtctcctctctgtcgacggcctcaaggttctacacatggatagaaatgattactacggaggagattccacctccctaaacctgaaccagctctggaagaggtttaggggggaagacaagccaccggcacatctaggtgcaagcagagattacaatgtagacatggttccaaagtttatgatggcaaacgggactttggttcgcactctcattcacactgatgtgacaaaatatttgtcattcaaagctgttgatggaagctatgtcttcagcaaacggaagattcacaaggttcctgccaccgatatggaggctctaaaatctcctttgatgggtctatttgagaaacgtagagcaaggaacttttttgtttacgtccaaaattacaatgaagctgatccagtgacacatcaggggttggacctcacaaggattacaactagagaattgattttgaaacatggattgagtgatgacactgtggattttattggccatgcactcgctctgcacagggatgatcgttacctaaatgaacctgcccttgatactgtaaaaaggatgaagctttacgctgagtctcttgcacgttttcaaggaggctcgccttatatttatccattatatgggttgggtgagctgccacaggcttttgcacgtctaagtgctgtttatggtggtacatatatgttaaataaaccagagtgcaaggttgaatttgatatcgaagggaaagtgtgtggtgttacttcagaaggtgaaacggcgaaatgcaaaaaggttgtctgtgatccttcttacttgcctagcaaggtaaggaagattggaaaagttgcacgtgcaatcgctattatgagccacccaattccaaacacaaatgagtcccactcgattcagattattttgccgcagaagcaacttgggcgcaagtcagacatgtatgttttctgttgctcatatacacataatgttgcgccaaaagggaagttcattgcatttgtgtctgcggaagctgagaccgataatccacagtccgaactaaagcctggaattgatctacttggtcaagtagatgaactgttttttgatatgtatgacagatacaaacctgtcaatgaaccatctcttgataattgctttgtttcaatgagttatgatgctactacacactttgagacaactgtgacagatgttctcagtatgtacacagcaattactggaaagaccgttgatctcagtgtggacctgagcgctgccagcgcagctgaagaatactagagattttcctattagagataccatactctaaagaagaacggtgttaacacaggccctgcctggtggcttgccaggtttagatctatgctgcagctgcagccaattaaacggacagaacatatcaccctatagcatttacatggcgtttaaacacaagaccgtttaggatgatggtggtggttcctttgttccttgcattattgatcggatggttaacttttaactgtgctcacgtttgctacaacctgctcgttcttgtcagtgatgcattgtgatcgcttttcagaaaaaaaaaaaaaaaaaagcggcctcttgct

SEQ ID NO: 144465 - DNA, 1646 bp, Zea mays
  Clone ID: MRT4577_63235C.1
atagctcgatcgctctctgtgtccgctcctcctgcctcctgcacacacatacactcagagagcatagtagcagtagccagtaggatgatgatgaacaccaacgcgatgtcgccgacagcaagtaccgacgccgacttctcgttcggccccttgcagccctacgtcggcttcgacgtcgccggcatgggcatgcccagcgtcgtcgtcgagaggtcgtcgtcgctactgcagcacaacaccagcagcagcagccacaacaacaacctagggctatacgacagtttcgacttcgccgccgccgcagggttaccgttccaagaatctggtctcctgcccccggcgagcctgccgctggcgccgtcgccgccaagcatggcggccatggcaatgccaccgtcgtcgctgctgctgacgctcccaggcgtgcctgcggcggcggatgtcgtctataacccctttggtggcggcggcgcgggagggttcctgaagcgggaggacggcggccccctcgtggacgctgctggaggcggcgggaggatcgggctgaacctcgggcgccgcacctacttctcccccgcggacgtactcgccgtggaccggctgctgacgcggtcgcggctggcgggtggcggcgtgggcgtgggcctgggtatgggcctcggcatgggcgtgctggggctcggcgccgcccaccaccagcagccgccgccgcggtgccaggccgagggctgcaaggccgacctctccgccgccaagcactaccaccgccgccacaaggtctgcgagtaccacgccaaggccagcgccgtcgccgccgccggcaagcagcagcgtttctgccagcagtgcagcaggtttcatgtgcttgctgagtttgatgaggccaagaggagctgccggaagcggctcaccgagcacaaccgccgccgccggaagccgagcagcgcacaggacgaggactcgtcaccgccaccacccaagaaactggatacttgcataactaatactgcctcttacaatgatgatctcaagagcgcgagcaacacggcagctgcggccatctcgccgaacggcagcggcgtcagctgcctagacgtcatggacaacggccagacgagcagcgcagcggcgccgacggctctgtctttggccgccccgccgccgccgccgctgcacgagaaggacggcagtctcgactcgatgctgatgcagcgggtcctgcagggccgacgggaggacgacgacgacgaacagcgtcgccacttcatcacctcgcttgtgatgcagacgacccagcagcagcacagcggcggcggcggcgccggcaacatcttgtcgtgctcgtcggtatcagatcagcacaacggcggcggctgcaacggtttctttgaggtggacttcatctagtgtataatcagatgcatgacgtgaggaaagcaagcaaaaacaaagctgggttggtttcactgtagagcggctagtagccttttcttttttactgttgttcttagtacgacttgagctagctagctagtggttggacttcttttaccagatggaaatgcttgtgtacgtagtatgtgtattcctttttcctattgcgaaaaatgtaaattattattacgtgtaaaaaaaaaaaaaaaaaa

SEQ ID NO: 144466 - DNA, 286 bp, Zea mays
  Clone ID: MRT4577_63236C.1
ctggggccccccccacaaaaaattggttttatcccacaatgttccaaaaaacaaaaaaccaaaggttttttttagggttgcctttaaaaaaacttaaaaaaaaacctttggcttggcaggattttctttaaacggacccaaaaatttttgggggccaacctttcctaaagaaaacccggggtttacaaatttttttttttgggcccccgggaaaaggtgtaagcctgtgttaaaaaaaaggtttaccttaaattttgccacaaagaccagataaacacaccctttt

SEQ ID NO: 144467 - DNA, 241 bp, Zea mays
  Clone ID: MRT4577_63237C.1
gaatgacatatatttggggaacacaatcttcattcaggggcttttgtgatttgaacaccttttgcggataacttaatactcacggtcacactaaatatcctatatacacgggcaggttgaaaccctgaaccaaaggctgaactgagctgttgagcccagacctcaccagcttgttattcacagttcactaaaagaacctttagggtaactgttacaaattgcacaatgggggtgttgtatg

SEQ ID NO: 144468 - DNA, 1680 bp, Zea mays
  Clone ID: MRT4577_63238C.1
agtacacgtagtactgtcccctcccggggatcagagacagacacagtagagacgaggcagaggcttctagatctactgccagctcggcagcaacaaagccgaagcgtctcgcgtgcgcggccgccaccggggattagggatggcggcgaagaaggtgctcatgctctgcggcgactacatggaggactacgaggtcatggtcccgttccaagcgctgcaagcgtatggggtgtccgtggacgccgtctgccctagcaagaaggccggcgacatctgccgcaccgccgtccatcagctgaccggtcaccagacatactctgagacaaaaggccataatttcacactgaatgcttcatttgatgagattactgctagtgaatatgatggattggtaattcctggagggcgtgcaccagaataccttgcgatggatgaaaaggtgcttgacctagtcagaatgttctctggtgctaagaagcctattgcatcagtttgtcatggacagttgattttagcggcagcaagagtagtcgagaaccgtacctgcacagcatttccggctgttaaaccagttttggttgctgctggtgccaagtgggaagagcctgacacaatggcaaaatgcactgttgatggcaatctcatcacagcagcgacttataattctcatcccgaattcatcagcctatttgtcaaagcactcggaggttcagtggcaggctcagataagagaatactgttcctatgtggggactacatggaggattatgaggtcatggtcccattccaggctctccaagctcttggctgccatgtcgatgccgtttgccccgacaagggagctggggagacgtgcccgacagccattcatgatttcgaaggtgaccagacctacagcgagaagcctggccacgattttactctgacagcgtcgtttggaagtgtggatgcttcgagctacgacgcgcttgtggttcctggcggacgggctccagagtacctggctctgaacgataaggtcatcagcttggtgaaggccttcgcggagagcggaaagccaatcgcgtcgatctgccacggccagcagatattatccgctgccggagtcctcaaggggaagaagtgcaccgcatacccagccgtgaagctgaacgtgttgctcggtggcgggacctggctggagcctgacccgatccaccgctgcttcaccgatggcaaccttgtgaccggcgcagcctggccaggccacccagagttcgtgtcccagctcatggcgttgctcggcgtcaaggtttccttctgaagtccaaactgaaagggcaaggcagaaagagctctggctcaacctggggaggggcgtgatagcatagctttggatttccagatagaagagaacagactcaaaacgacaccttatagcgatcgctgcacttaatccttgttccatgcgcagcaagcctcaggcttattacccttgtttgtcagcgttgtgtaaaaactgtaacccggatgctgtttcttcttcttcttcttggttccttcttttttctgagtcgtcctttgtggattcaaataataaataaagtcttgtatactgctgtttgttgatctggtactgtgcttcgagcagctagatggccaacaaagaaaaaaaaaaaaaaaaacccctgagggaactag

SEQ ID NO: 144469 - DNA, 419 bp, Zea mays
  unsure (1)..(419): unsure at all n locations
  Clone ID: MRT4577_63239C.1
gcgacgtggtgatgatgtacgggacacggcgctgctggagccatccaagcagcccaagcgagcgactctctccgtcaaggtgagcctagcccagatgcttcgtggcatgatcatcatggacgtggtcaccctggaggaggcacacatcgcagattcgtagtacacagctctaaggtatcataattcctggattccaaatctgagacggatgttgatgttgactataacagcttgtactcaaagcagggctttctacagggtgaggtgctcgtttcgttgtggctagagtaacttgcgtactctatctcatcgtttttaatttatttagttttcacaacaactgttttgtgatatgtgctatcacttgatacttagattcatgctattagagattcatacctcangtttgcaagatgtat

SEQ ID NO: 144470 - DNA, 384 bp, Zea mays
  Clone ID: MRT4577_6323C.1
tctgggtgatatttgtattgcacactgctggtggccttacagacattgcctggaagatgcgcggcagttccctgttccatccaactctggcaaaaatgcttattatggcggcccacctagcgtgccttgctgaggcgctgaccattgcacccatgctatcactgccgtcagccttcttccgtccaaaagaccgagcagaggagaggccgcttttggcagaaatcactttcccccacagtctgaccacctgacactcctgaacgtgtctcttcagtgcaagcccaatcctattgaggcgaccggtgcatccccacttcctccatgtcaaggatctgcgcatggctcttcaggtcagctctcatctgctgcacatactgacaaccc

SEQ ID NO: 144471 - DNA, 351 bp, Zea mays
  Clone ID: MRT4577_63240C.1
cctttttatttttatctacggacatattccttatatatgggaaggtttaatacaagagatggggttttgccaaataatttatgaaaaatacctcttgtgaaaccgccggagccggagtcattttaaaaggagccggagcggtgccaaacacacatttgcgttagctcacgtctaaccatatagacaggtcattctattcaccgtgcatgcgtgcacaggagctttcagttatatttatatgcgcacaaaaatgctagaaagctccagataaacccaaacgcatgctgcatgcctgaagacacgcgcgcatattatgatttgacgcatactggaataccccgaaccttgccc

SEQ ID NO: 144472 - DNA, 203 bp, Zea mays
  Clone ID: MRT4577_63241C.1
cagacgcgtgcggttccttcctcaaccttattttcggctctcaccagagaaaaattgaggagcattaaccaaaggatcagagggccaaagctaacatggacaagcctgtgatgaaccaatgagtatctccagaagctttcgttaaagtgcaaccaaatccgatatcactttgatctggttagcttaaaaccaacgcttttaat

SEQ ID NO: 144473 - DNA, 659 bp, Zea mays
  Clone ID: MRT4577_63242C.1
ttttttttttttggcccttttttggtatatgaagattgcagagtcgcagctgatcaccattcaccaccaaaatcctctgaagtaaagcatttagttctctagtcaactccaaatcttaaaccaatcacaagcattacactacggaatgtcgctagtatcgatattatccaggtctaaatgctgagatggatcgagtactggtacatgagactgtcagagtatgtccgcaattccgcatcatcttcattctcagagtcagaggctcagagctgaattacaccacagtccacagagctgcagcaagccctgcccagcgccgagggcagggggtggatcggtcacttcatgccatggagtataccgctgcgcccgccgccgcgcgcgtagctgggctggggagccatcgcgctcgcagccttgcggcaagaacgccagccgcccggctgcaccgcaaatgctcccggacccggaggcggtgcagcgctgccgctcgctctccctgtggacacggcagcggcgcaggccgacgacgagctcccggcttgacagaacctgtgcagagacacgttgcctgtgaccaggtcggggtagcggaagggcggcgccgtgtcgacgtccatctccaggaacgcccgctcgtcgtcggtcaggcgcgccga

SEQ ID NO: 144474 - DNA, 335 bp, Zea mays
  Clone ID: MRT4577_63243C.1
caaaaaaacaaaaatatatatcccaatcctattccttgcttgtctgaagcgatcccggcccccccggatctcccataactttctttctggccggcgcaatatagaagcaagacaaaattgctgcggcgcctgcccgcgcaaaggaaataattagcacttgtttgccaaatgcagcttctgacgcatggctagttcttaaggatactttattgtcattgcataccatgaagattgattactaaaggtcttaccaaactcatatttttcatgatcttgcatttaactgcattcctaaattagactgttatgcttaaatacaatttaatcataaattt

SEQ ID NO: 144475 - DNA, 499 bp, Zea mays
  Clone ID: MRT4577_63244C.1
gggaaaaaatcaacaaggctaattttccgaaaaataggaacatcgaatcttacccccatgggtatcatgagcccgctcaaatattcttgaaacaacaactttttgcggaggcacatcaacttcgacccaacatagctgggcaaatcccggctttttttaacccagagggctaaaagaacctgggatccaacaaaagctgaatggggctgcagttggggcttgggggaatcaaatgacccgattggggttgggcccccaagagcattggggctattaaaacgggaaaggggaccggctgtagcagcggggcggctaatattttcctgcaatgcatcaacaaagctcttgccccgggatccatggccactgacatttgacaagccgatgagcccatcagcgcctgtcccgagccactccgacaactggtgttgtgcgagcccattcctttcacccctccccactttatgattaaaaagggccttttctccacgcgcccctg

SEQ ID NO: 144476 - DNA, 584 bp, Zea mays
  Clone ID: MRT4577_63245C.1
gtcgacccagcgtgaaaaaatcatatattttcggttttattctgttggttatgtagcgcatctctaatctgatggtttgaaacgaacttatctgccgaatgcttgtggtctgccatcctataattgtggtggaaaaaaatcagcgaacagtactttactttcagccggaattaggaacatctgaaccaaggtttacaacattagatccatggtctgccatcctataattgtggtgatgccgttacgagtgaaaaatgttgccttatccatgaggtagagatagcaatagaattagggttggagatctcattttggtgttcgattgaggttgaagacgtactagatttatgagatgatggaagaaattgaacttaacctgtgcagcgtttttgtgtgtgtcaaacttatgtttgaaggaccaaactaaattttgaaggtgatctctcgaaccaccatgtaatttataagaaccattgcttaaacctcctcgcgaaataccttttgtacagctcttttgtaatctggggataaaagcccaagttcagttaattcaggtggggtaaatccccccccctttggaattc

SEQ ID NO: 144477 - DNA, 1199 bp, Zea mays
  Clone ID: MRT4577_63246C.1
attatgccctggccacacttaagtggtgatttataatataaaacaaataggcttctccaaggatcagggggtgaagttttgacgcaaaaaaggttcccgaattgagctctatctgcacattgattgacctgaagcttgggaaactcttcttagaatcgccaaaatgcaaggataaattgcaaatctctcttctaaagaatctgactcatctgagtgcagaagtagatgtatatggtcaaaggtatgaggtccaaagttatggtgagaatgtaaactcttggttcagtgaagctattggacgtccttgtacctttatgagatgctcaagttccaagtatcgttcctgcgtaactaacggcaatagagatcacctctgtagagatactcgaagcaaacttagttttgtgaatgaaggacagctgcttcttgtttctgaagaaagtacatctgatctcaacagccggttaagtttaagtaatggaaatggtaaacaacaggtgtttgctgatgcaatgagatttcgtccaaatattgttgtctctgggtctacaccatacaacgaggacaactggaaaaggcttcgcattggggatgcctattttacttccatgggaggatgcaaccgttgtcagatgatcaacctatatcagagctcagggcaggtgatcaagtcaaaggaaccgctggcaactttagcatcgtatagacgaaaacatggaaagattttgtttggcgtcctgttgaactatgaagatgacatggagggagaagatgatgccattgtagagagatggctcaaagtggggcaagaggtgtacccttcaacataataatgacttccatacatgtgtaccaaacgaaatggtctctagccgagttggttaggtgatctaagtaacacttctcaggtcccgagttcgactatccgtgggaacgaatttcaggctcatgcgtacccagaagtttcgctaggctgacgggtaacaattgctacaatacgtgaaaagtagactttctcaatacaccatgtatgtaataattttcttttcacatatgtacgtaatagggcaggcctcatgtagtggtgagaattgtctcactgagtcatgttgttacataagaggttgatgcatgtattcagacacaaatatagaaaacaaagataccacatacgggaaaggaaaacaaattctaagctc

SEQ ID NO: 144478 - DNA, 261 bp, Zea mays
  Clone ID: MRT4577_63247C.1
gttttgtagagatgcttttgaataacttgtgctttgatctggaagacaacaccagctgccaatgccagaagggagttctttacaccagctcagaagaacaataaaaagccctggccgcacgcgctgaccaccacaggacggaagacagtcaaaccattagccgcccttcttgaaggagacagcgactgtgctgacgcgacgggcggaagttaagtgcgagctagctcacggccacttgagaccccagtacagaagcacacc

SEQ ID NO: 144479 - DNA, 289 bp, Zea mays
  unsure (1)..(289): unsure at all n locations
  Clone ID: MRT4577_63248C.1
cggctaactgnctaagngnctagaggcgacgactgccactgccactgccactggggccgccgcccgcgagggaccatgcccctcatctccacctttgagcgcttcgcccagagtgctaggtggaggcaacacatgaagttgacatggagaagaaaaatgcaatgacagtccacatgaaggttgtgaaaaaggagttaaactcataattggggggggggccaaagttcctaacaaagagactctttgtactccatatatttgtacatgtgaatgaagatgagcttatgag

SEQ ID NO: 144480 - DNA, 308 bp, Zea mays
  Clone ID: MRT4577_63249C.1
ggagcaagcttgcaatgaagctctaatcctcctgctgtgcgacatgcctgccctgcaggaggagcaagcttgcagtgaagcatataagacttcaaacacacgataccaggcatgcatgccatacagtacatgggaatgaaaaccacacaacgctcgactactgataattgcatgacacagtcacttacgattgctataatcaatactgacagcatgacctacatggttccaatgcaggcattcgccttattaatcatccactacacactcaccctacctaatagaaacaacctggacagcctaatcaa

SEQ ID NO: 144481 - DNA, 385 bp, Zea mays
  Clone ID: MRT4577_6324C.1
gtgctgcctgcggtggccggaccaacttaactcgtacctacgaaagatgacggggaaccggagaccatacccgcgggtgcactctttcatggtgggggtcacgccgataacgtatggcgcatcgcaagaataccgaacgctgacggtgacggagctgacgcagcagatgtgagatgcctagaacatgatgtgagcggcagacccgcggaacgggcggtacctgaatatgtccgacatgtaccggcgcatgatgagcaccaagggggtggacgagctgatgatcaaacgtgcagaacaagaactactcctacttcgtggagtggatccctaacaacttcaagtacagcgtgtgctacatcccacccgttgggctggccatgttcta

SEQ ID NO: 144482 - DNA, 864 bp, Zea mays
  Clone ID: MRT4577_63250C.1
agtacaagaagaccaaaaccctcgcccccgcggcgcctcctccctccccccagaaacataccgccgcctcattccctcccaccacagcacccctcctcgtcctcgtccgatccgcccttccggaagcacctgggaggggcagcgccagcgctccggccgccatggcgctcgccttcgacgagtacggccggcccttcatcatcctccgggagcaggagaagaagtcgcgcctgcaggggctcgacgcgcagaaggccaacatcgccgccggcaagtccgtcgcgcgcatcctccgcacgtccctcgggcccaagggcatggacaagatgctccaatcccccgacggcgacgtcaccatcaccaacgatggggcgacgatcctggagctgatggatgttgacaaccagattgcgaagctcatggtggagttgtcccgcagtcaagactatgacattggagatggtaccaccggggttgtggtcctggctgggtcgctcctggagcaggctgagaagctgctggaacgtggtattcacccaataaggattgccgaaggttatgagatggcgtcgaggatagctgttgatcaccttgaaagcatctccacgaaatatgagttcagtgctacagacatagagcctttggtgcaaacctgcatgacaactttgtcctcaaagattgttagccgttggaagcggtctctagctgagattgctgtcaaagcagtccttgcggttgctgatttggaaaggaaggatgtaaatttggacttgattaaggttgaagggtaggttggtgggaagctcgaggatactgagctagtacaaggaatcattgttgacaaagatatgagccacccccaat

SEQ ID NO: 144483 - DNA, 449 bp, Zea mays
  Clone ID: MRT4577_63252C.1
cgttgctgtcgccgttgctgtcgggggcaatgaattttccttggcgcgcccaaatggagttatggaggacttccattgctgtctcggtcacggcgacggtgcaccgaacatctgctagcgtttcagtttcaggtcctcgctttcgtggttgctatgtcgtcggacgggagcacgacggacggagatgatcatgactctgcagcgacaccgactccgccctcgcgctcccacgccaggtagtgccagctactctactcgtgttaggtggacctaaaaacctaaccaactgccgttggaagtctaccggggaagcaagctctctggctggtcctggcacaggcgaggcgatggacgtgaacgttcataacccgccgccatggccacgagcgtccatctttcttcttcaccaaaacttttgacttccctgctagctagcagtaccactcaat

SEQ ID NO: 144484 - DNA, 340 bp, Zea mays
  Clone ID: MRT4577_63253C.1
gccggagagcatatcgcgcatcaaggacgacttcaaggacgcgacggggcagacctgctacacctttgacgctgtcacggcggtggtgttgaagtgccgcgcgctggcgatggcgctacccgacgacgccgaggaccttgttaggcttcggcgacagcacgcggcaccttctccacggagtgctgccgttagtggaccgctactacggcatttgcacgtaccctgagggcatcacccgcaccagcagagcgatccgtcgaggcgttgctacccgaggtggacggcgggatgccgtaggccaatgaagcgctcaccactcggttcacgggctggatagcgc

SEQ ID NO: 144485 - DNA, 946 bp, Zea mays
  Clone ID: MRT4577_63254C.1
agtttttttttttttttttttttgaaacgaaccagacatgagagctgccgattatattaattaagaagtggtccggaccggactaaacaacaaacaacatgcggttggattgagacatcaacacgccaacaccatacaactcaactcgtcggttggattaggacatcaacacgacaccacactcaccgtcgacatagagtgcccaaacaacacaggcagcggcaaccccacacgagagcacaaaactgctaaaggtcatcgttatcaagcaaagatgcagagcatccaacaactccgactttccaaagcagccaacaggcgaaccaaacaaaaagcagatagacaacccgaagcgaaaggtctcaacaagtcatcgttgccgggctcaggcacaaagcagcttcgacttccaatcttgaccctctgccctgcctccggtttttgcccgaccttcgaaacattctggaccacgaagaagggaggttcgcctcgtgttatcgttgccgagccacatccactgatgtagcagctccgacttcacgttgcaaaacccccacctccactcgcataccaggcaccgagaagcgaagcaacagccgaaggcaaagtcctggccgagacgaacttcagaagcgacgccttcaggaagggagtgacgtcactgtgacgccaccgtcacctgtccgcgatggaccgagctttcacccaaggaagatagcactggggatgcgacgcccttaggaggggaagcggcgccatggacgtcaccgtcgccgagactttcgcccaagagcccccggcaaagtgtctggctaaaacctcgagacaccgcaagctgcctccgccgtcgccgttaccccgacgtaccgcacaaatgatgaagattttgggcctgccgccaccaccacacccagcgctagcccgagccactagccgatgctgcccc

SEQ ID NO: 144486 - DNA, 240 bp, Zea mays
  Clone ID: MRT4577_63255C.1
ctctacctgacctggtctgcatccttccgctcaacaagcttcatgccagacttccatcctttacgaaggctctggtgctgtggattcgctccaataccgctccgttgagctttaaatcgtgcacggcacaatgcatcacgaaccgtcacgtacaggtgattccccagcccggggtgggcaggtgagcatcacccgagcagcaccgccgccggaggggtcaagctggaaccaagccagtag

SEQ ID NO: 144487 - DNA, 853 bp, Zea mays
  Clone ID: MRT4577_63256C.1
tgcacttcgtgaactttggtgagaggtcatcccctgcataatgtgcactaagaaacatctgcaaccatatgaagaggccacattcagaagaatatataaatgtcatatcattgaatcatctctgagcgctggttcagattccagattctgcattccagaacatgataacgattgaacttacagccagcatagtagggccaacatgagaagtcaagttttgcttcaggggtcctcctgtcctgaactcatcacttggagtgatctgccagaagccaattggaggatcaaatgacatccaaccatggacattgttgtactggtcttcgcaagagtactggtacttgtcgtcaaccttgacaaacagttcagattcagaatgcactcagacacttacaatggataacaaacatgtattatatttatctctgtcagggaagcttacctcccctctaagttcagggttgattgggtccacaaggagcacagcctcagggtacgctaatggctgtcctcgaggaggcaaccggtcatcgggcattggcataattctctgtctgtcgtcagccaatgccatgtaatgaaacctgcgattacagcagcatttagagagtttcagacattcaatgaacaagaagaaaaacagtaactatggcttacatgtctttccgcagcttgaaagccaccctcgtctctcccaagccgaaatcaggccatccttccttatgctcatagatacccataggtgtagaacccggatgagccacggagaacgatgaacctgaacagaatcgcttgctctggtgaacacgcttgaaatgaactgacgaaatagctgaattgagaaacttgggcg

SEQ ID NO: 144488 - DNA, 500 bp, Zea mays
  unsure (1)..(500): unsure at all n locations
  Clone ID: MRT4577_63257C.1
tatctcgtccgaccgtatattaaccagaaccagaacaagaccggaggaaccagacgacgcaagggaaaggagagccaccggagcggaccgccaccttcccttctgccggcgacctccagccacggcgcccatggcgtcggcgaagctgctgtacattgtggtggttgacgagaacgcctcctccttccgatacacgcgctccctcctccatagcaccctccagctcatgggatgcaagccacgccacgccttcgagccgcagggtgtttgatgtcatccggggtgaccaccagggccacggcgacacggccacctccgcccgggtacaaaggtacgaggtcgccgaaaccaccccgaccgcaagcccccgccagttccagttcgagctatacaagcgccggaccaccgttctnctccagggacctcttcctcgacctcgtnctcgacgccctcgccctctacaagtacgttgcccccaaccagcgcgccgatctcatgct

SEQ ID NO: 144489 - DNA, 163 bp, Zea mays
  Clone ID: MRT4577_63258C.1
acaacacaagcggacggccgacttgcacattgtgatctgaacaacaactccacacatgacattctcgagttacagacaacacacgcctggtgcatacgaggggacttattacacatgcaccgatgcacaccacaagctgggccccgctcacacaaacatggcc

SEQ ID NO: 144490 - DNA, 1274 bp, Zea mays
  Clone ID: MRT4577_63259C.1
gccaagaatgaccgatcttatatcccagtttttgctaaccaagcacaagattccagatggaaacgaatactggccaactaatccagaagtaagaagctactaaaaaacttgagcaccaacctttgtggcctgcaaagaatctgctatcctttctccaagagcatagcatgttgggattcttttttttgtattcacaacaccaacacatcgcctaagatgtcttcgtgttaagtctccttagaaaaagaatcactcagtaagccacgaaaaaaagatctccctagcaaaattaaaaataaaaccctatcgaaaacgactcctataccaaaattttgttcctgtgaactacagttaaaaatcacgtgtaatcaggtttcagcacccacacagaaccttccgcgcctctttgcaaagttgctatctccttcagcaggttcttgaagagaagcatatccttggactgaatgcgactcttgaagtgttccgttatgctcgtggaggtggcagacccaccgttatgttgaatgaaggtgcacaactggcggatcaggacttcaggttgcacgatcatgcttctgttagaagggttagatgcacggccaccattcccagatggacttgatacaagattggaagatgatcctacgttgagttgatgctccaatgcatctgaagctgatgcctctcgggttccacgaatcttagccagaagttcagcagatgacagtgccttgccactcagagcacccactggaagacttcgattcctgctgctggacgtttctgatggctgtgaggaagggatcaactggctgttaactgtagacccaaacttcctgcgaacagaggagggtgccccagcagcaccagatcttccggtccatgtgggaacagcaaaactgtcatggcttctgagcattcgcgattgacgtaaagcttcagctgccctttgtgccacttgtgaagcttctgcttctaagcgcactttctggtcatcgttagcatccattatggcatcatgattgatcgcactatgaatgccttgagcaccaaaaagactcttcaaaatgctcgattcttcgtctgcttggtcagagttatcatccactttactgttcccaccattagatggttcagcttcactggtgcttgacaaagccgaagcaatatgtacctgatgctgttgaccatcatttggaactccaacgttcacaacttggacaattggccgaaaatattcaccgttaccagttgaaccattcccttcatctctt

SEQ ID NO: 144491 - DNA, 839 bp, Zea mays
  Clone ID: MRT4577_6325C.1
tcgctgccgttcaagaaacggtgcaaggggtccagcaaggtcacggtgcggccgtcgtcgttgcagctcctgctgctgccaccgacagcgcgactgtcgtgcaggccaccgccgaggatggtgatgacgacacctgtccgagcagggatctgcttgtcgacgacattggtgggctcatcagctggagcaggagtccggcggcacccgcctcagcggctgcggccacgtgcagcttccgggcgtcgccggcgttgtccgtgcagcaggacgagatcacggacgctgccatgctgctgatgacgctgtcctgcgggcttgtccggagctgatcgcctgatccacgatctgctacctctacgaaggacgacccagcgcaccgtaggcttttcccagctagcagctagcttgtgcctttgactgttagctagcgttactgttactgctgttaccatcgtcgtctaccgtaatacctgtagtgcttttgtttagcttcttgttgctagtgtgaccacccgtgtcactgttcaagtcatgtgattcgttcgatgagtgagagagagagaagaggtctagttgagatgataggagcgacaagagcaccgtctctagctacaatagctagtaaatataatcgcatgtagtgtgaggagtttcagttttgagtgtgtacaagttctttaaatccgatcctgtggctataatctggtcgctggctgctgctacatgtttttttattcttccttttgcttgagtttcttttaaggaacctaaaagtgtaatgggaatgttttgggacaaaccgtcataccgatgatgcaaggtgttgtgcttgtcttccc

SEQ ID NO: 144492 - DNA, 681 bp, Zea mays
  unsure (1)..(681): unsure at all n locations
  Clone ID: MRT4577_63261C.1
tccctttgaccgctaataatttcatgcgaattatgaaggtgctaacaatcaccagcttattaacaatgtctcaagtgccggtcagcacttgaatcatgataaatgatgggctctcccaacgcataatcatgttaggttatggagacctgatcattggttttctcttaatcaatagtctacnnnnnnnnctccctaagaaattaaagagagctgaaatccccacatggaattggatgatgcaaagatcctgggaataaagcaaannnnnnnnnncgcgcctgggagcaatcactgaagttcatctgagggtgacctcatacaggaccggcactatgtaagacaaggtgagaaaattgcagcagctcccatggacagaaaggatccacagtcaatcnnnnntttcttcagttggtggtcttggccgatcacccacaaggtagcccacatggcagcatgtgtagaactaacacgaccagatggcaggggacgtcgcattgtccttttcattttagcatcattatttatctcaaatactttcaaatacctccagttgctcgtgtagccgcttctgaacttccatttgcatctttagtgcctcattgatttgcaatcctggtacataatcctcgaactttcttgccgtccttgaaaccttcagcatgagagtctggacataccttt

SEQ ID NO: 144493 - DNA, 704 bp, Zea mays
  Clone ID: MRT4577_63262C.1
gccggccgggtcccaaagtcccacactcttgcgcgctttgcaagctaggcttcacgctaccgttgcgacggccgacggcgccgctccccagagacgatggagcgaggacggggtggtagtggcggtcgcggtggcggccgcacgtttcagaggaacaatgcgggggaggagtggcccaacctcgtcggcgtggtgctgtcgtggagcctagcggatgtcatgaacgagaacctcttcaaggacaaggtgaagcagataccgtccacgttccccaaccacaagagctacctggagtgctacacctctccattgctggaggagctgagagctgagatgtcgtccagcctggaatccctgtcaaccgtgccttctgtcaggatctcacggatagaagaaaagagagacaaatacgaaatttatctggcttctgattgccaggttgctaagccacacaatcgccctgaatgctacactccaagtgtcggtgatgtaattctcttgtccgatgtgaagccgggccacatttctgatactactcgcaacggaaggccgtaccgagttgcctttgtcacagatgcggatggagatgaatacgacgactcaccaccggctaagtatggcatcgtaccgtcaggcaaaatcgatgccgccgatgacaaaccccaagatggtaaaagtacctcactttttgctgcttgtctgct

SEQ ID NO: 144494 - DNA, 595 bp, Zea mays
  unsure (1)..(595): unsure at all n locations
  Clone ID: MRT4577_63264C.1
aattcggcacgaggaaaaagaagaaagaaagcaaggagcaccgcaccactccactccacttccctcctcgatccagccatggcggcctaggccccctagggttccctgtcagcccccacccaggcgcctcctgccgcttcctccgctcccacccggtggtcgcgctgcccgattcggccgccggcgtcgaatgggaggcgacccgatgctcgaagccggccgttgccgcgcgctgccgacggagattccctgagctcggcggcgggttcccgtgctcgccgagcgatgactctcggcgccggcgctgcccaaggcactgggtctagggcgcgtggctggttgggagcgcgccgtgcgtgcaatgggggatttaaggcggttctgtagagtcgccgcggcggtcttggttctgcgagcgcgtggcctgcgctcgtgaaggtagggctgtctagctgctccttcgtctgatgagctcagcttctgcgtcccgcctcgttttgtgcccgcgtttgctccggcggctgcccanagcccagcggatcgggccctgctcatttcggcgctcctcttcggttctttgtggaaaggaggagct

SEQ ID NO: 144495 - DNA, 260 bp, Zea mays
  unsure (1)..(260): unsure at all n locations
  Clone ID: MRT4577_63265C.1
acagactcatgttctgactcgtgggcggacacataatatgccaatggttttattttantacaaaattataaaatgatagtagataataaggtatgctttttttacttaattcatgctttgctcacagtacaatactatgacgaaaacttttgataactcaattcttcttatgaaaccaacattctactagaaataatagatctagaacctaatccactctatatacttttatacgtcaaatataaattagattttttttt

SEQ ID NO: 144496 - DNA, 721 bp, Zea mays
  Clone ID: MRT4577_63266C.1
aattcggcacgaggtcttggaaaatcccatcgagccgaatcaccagtgcacgcgtcgtccacatctcctctccctctacagccgttccctgggagttccctcaccagcggctcatcctctctatccctccccacgcagaagccgccccctgcccctcccatggagcaccagtcgcccagccgagctctcggcgccggaccccctccccacaccagccatcttccacagccgcccccatccatctccctggtggccgacctcgccactctcgccctagctgcactcgtcggcgtcacttgccacgacaccctccatggccaagctcctcccctacggctcgtcttccccacgacgccctccctccattccttttcctccatggccgacgcccccatctccactagccaacgcccctccctcatcctcttcctcaagctgagctcgccctagctccaacttcaaccatggacgatgacctccccttcctgctgcacgccggcatcctccccatgccagctgcacacgcaccgtgaccactcctctccctacagtgctgctttccatggctctaacctctcccatggacaccacaacccatactcccaaggacatggagcagcaataaccaagaaacccctttcgtgtcgcgccctcaacgtgttcgacggaatattgcagcggactacacccgatctgtgtacccctgtcgtgacctcgtcaa

SEQ ID NO: 144497 - DNA, 484 bp, Zea mays
  Clone ID: MRT4577_63268C.1
taggggccttttttttttttttttttgatacaaaatcacacaaagtacaagtggaatttgaggagacaccggatgcatatacaggcatgcaacgagaatagcaaaacaaatgaaggaatgcacttgctgaacagcccggcggcgcgcgggcggctaccacccaaatccgtcgacgagccttttcaaactttgcatcgggagggtaaaaggagacgttttgctgtgcacgtgtgctgtgtggaaatggaaatggaatgggatggaatcgttcaagtgcatttgtagcctggcgggacggcgcagccgcagttgacgagcacctcgagcgcgatgggcacttgtccgaggacggcgtgggcgtgggtgtccgcgtcgggggagacggaggcggtgggcacgccttccggtgtcccttcttcgtcgggctcgggcttcccccaacgatcggaatgggagggagggtcaacggcggcaggggcactga

SEQ ID NO: 144498 - DNA, 556 bp, Zea mays
  Clone ID: MRT4577_63269C.1
tttttttttttttttttttttttttttttttttttaacctttctttgataactccaacaagagcccatgaagcctcctctattctaaatatagaggatcaaacaatcatctacactctccagcaacgttctctaaacgatcctctaaatttagaggacgttgctggattctctctatatatattttctctaaacggttatccatccatttaaatactttaaatacctggtttaacaaaactaaaatatgtacaatacatttaagagtatgataaatatgtatgtacaaaaaataaaaataaaaaatatatctaatataggtatttgcgtacagaagacgtgatttaaaggacattgttgaagaggaatgagatatagatgatgtaatcttttagaaaagactgcaaaagaccgatatcgaggatgtatatagaggacgttgctggagacaacctaaatttgttcagcgtgcaaattttggtactatctggccatctacaaaggagtcagaaatatcaggcacaaaaacaaaaaaccattagcagcttgaacaaatt

SEQ ID NO: 144499 - DNA, 419 bp, Zea mays
  Clone ID: MRT4577_6326C.1
aggggaaaaacgccaagctctagctaggcaaaatggtcttgatttccaaagatgagcaccacacccttacaaaaacaactaaacccggttgatcatcacattatacacgcgtgagctgtttttacaaactaaagaaaacaccaggcctgggcaggcccacaggaggactaacgaacgcgcccgcatgcaaatgcaaatcgctatcctagggaagctgcagctgagtgggaggaactatggggccacacctccacaggttcaccttcttcctggggttcgagggtaccaccccgcccccgagcaccatcggcgccgaatgcgctaccaacccgtcagggttctcattgctgttacggcccgtggtcctttactgctcccaacaggtgaagtccttaaacgcggcacgcccggtggtgaac

SEQ ID NO: 144500 - DNA, 1034 bp, Zea mays
  Clone ID: MRT4577_63270C.1
gccggccggtttccggagacagaagagagtgagcacgcgccacacacacagtacgtacaagcctctcatcagcaatggagtccaccaagctctccgcgctgctggtgctcgccatgctcgcgctctcctcgtccccgctcgctctcgcgtgggagaaggcggaaccggagtgccactcgtgcgagtccggctcgccaccctcgaccggcggcgtccccctgcctcccgtcagcataccgtcagtcccgctgccccctgtcagcataccgtcggtccccctgccccctgtcagcataccgtcagtgcccctgccgccggtgaccctccctcccattccgatcgttgggggaagccccggaaggcgtgcccaccgcctccgtctcccccgacgccgacacccacgcccacgccgtcctcggacaagtgccccatcgacgcgctcaagctcggcgcctgcgtggacgttctcgggaacgaggtgcacgtcggccgacgccaacgatccagtgctgcccgctcgtgaagggcatcgccgggctctccgcggcggcgtgcctttgcaccgccatcaaggccaaggtgctcgacatctccgtctacgtgcccatcgcgctcgaggtgctcgtcaactgcggctgcgccgtcccgccaggctacaaatgcacttgaacgattccatcccattccatttccatttccacacagcacacgtgcacagcaaaacgtctccttttaccctcccgatgcaaagtttgaaaaggctcgtcgacggatttgggtggtagccgcccgcgcgccgccgggctgttcagcaagtgcattccttcatttgttttgctattctcgttgcatgcctgtatatgcatccggtgtctcctcaaattccacttgtactttgtgtgattttgtatcaaactattctctttttttgggattcgattattgtttcaggtgttaagttagctacctccagttacttacttattcacatcccatattcaaactcagtgcaaaacaatatttgatgagtgact

SEQ ID NO: 144501 - DNA, 850 bp, Zea mays
  Clone ID: MRT4577_63271C.1
actccagtacgtacaagcctctcatcagcaatggagtccaccaagctctccgcgctgctggtgctcgccatgctcgcgctctcctcgtccccgctcgctctcgcgtgggagaaggcggaaccggggtgccactcgtgcgagtccggctcgccaccctcgaccggcggcgtccccctgcctcccgtcagcataccgtcagtcccgctgccccctgtcagcataccgtcggtccccctgccccctgtcagcataccgtcagtgcccctgccgccggtgaccctccctcccattccgatcgttgggggaagcccgagcccgacgaagaagggacaccggaaggcgtgcccaccgcctccgtctcccccgacgccgacacccacgtccagtgctgcccgctcgtgaagggcatcgccgggctctccgcggcggcgtgcctttgcaccgccatcaaggccaaggtgctcgacatctccgtctacgtgcccatcgcgctcgaggtgctcgtcaactgcggctgcgccgtcccgccaggctacaaatgcacttgaacgattccatcccattccatttccatttccacccagcacacgtgcacagcaaaacgtctccttttgccctcccgatgcaaagtttgaaaaggctcgtcgacggatttgggtggtagccgcccgcgcgccgccgggctgttcagcaagtgcattccttcatttgttttgctattctcgttgcatgcctgtatatgcatcgttccgatccggtgtctcctcaaattcacttgtactttgttgtgaatttgtatcaaactaattctctttttttgggatttaaaaaaaaaaaaaaaaaggcccta

SEQ ID NO: 144502 - DNA, 220 bp, Zea mays
  Clone ID: MRT4577_63272C.1
cgacggcacgcgtccggccgacgcgtacgatcgtatgccaaatcttactgctacaacgctcaccaatacacaaagggtgcatggccacgcgccgccactgtcaaccactgctactgctaccatccgtcgccattgccgacaaccctgcttacgcggcgctgttccgccatacctgtcatcagctgagcgtttagaacctgaaaaccgacttgatcaactc

SEQ ID NO: 144503 - DNA, 1502 bp, Zea mays
  Clone ID: MRT4577_63273C.1
cacgcgtccactcacctccattccaagcacatattcccggcccggcagctcaccaactaccttgcacttcaattcatcttatcgcggcacgcacagatatatatagattagtacctagctagatgctcatttagctgcagaggcgccatgattggggtgcgcattgtcagttataagtctctgatcatggtgctactgctggtgctcctcgtctgcgttgtctcgccggcgacggccgcggccggccgggcggaggaggcgcacctggtgcccgcgttgtacgtgttcggcgactccaccgtggacgtgggcaacaaccagtacctgccggggaactccgcgccgcagctcccctacggcatcgatttcccgcactctcggcccaccgggcgcttcagcaacggctacaacgtcgccgacttcgtcgcgaaactgttgggtttcaagaggagcccgccggcttacctgtccctgacgccaagaacgagccgtcagatcttgagaggcctccgcggcgtcaactacgcgtccggagggtccggcatcctcgacaccacggggaacacgatcacgttgacgaagcaaatcgagtacttcgcggccaccaagtccaagatggtggcgaacagcggcacgtcggccgtggacgagctgctgtccaggtccctcttcctcatcagcgacggcggcaacgacgtgttcgcgttcctgcggcggaacgggacggcgaccgaggcgccgtccctgtacgcggacatgctgtccagctacacgcggcacgtgcgggcgctccacggcctcggggcgcggcggttcgggatcgtggacgtgccgcccctcggctgcgtgccgtcggtgcgggccgcctcccccgacggcgcgtccaggtgcgtcgacggcgccaacgcgctggcgaggggcttcaacgacgcgctcagggcggcgctcgccaacctcacggcctcgggcgcgctcccgggggcgcgctactccgtcggcagctcctacagcgtggtgtcctacttcacggcgcacccgggagcggccgggttcagggatgtggccagcgcgtgctgcggcggggggcggctcaacgcgcaggccccgtgcgcgcccaacgccacctactgctccaaccgcggcgagtacctgttctgggacggggtgcacggcacgcaggccacgtccaagaagggcgccctggccatcttctccgcgccgccgcagatgggcttcgccgcgcccatcaacttcaagcagctggtgtcttcttgatgcttggaatccggagctttccaccggtgtgacacaaatcactacacctagcagcctagcactaccaaaacagcttttgattattacacaaatcagtagagaatacaaactaataaaccatgtaatgtagagccatagagggagggagcagcatgtacacagattgagtccagcgagacaaatttctcgccatgtacgctcgcgaataaactagcaggttgcactgt

SEQ ID NO: 144504 - DNA, 1166 bp, Zea mays
  Clone ID: MRT4577_63274C.1
aacataatgccccaaccccatgccgcctataaaaccggcgagctccgaacaagcctcaccagctcgccagccctctcgcatagcagcaaccggctccgcccgccggcaaggggcgccacacacacagtacgtacaagcctctcatcagcaatggagtccaccaagctctccgcgctgctggtgctcgccatgctcgcgctctcctcgtccccgctcgctctcgcgtgggagaaggcggaaccggagtgccactcgtgcgagtccggctcgccaccctcgaccggcggcgtccccctgcctcccgtcagcataccgtcagtcccgctgccccctgtcagcataccgtcggtccccctgccccctgtcagcataccgtcagtgcccctgccgccggtgaccctccctcccattccgatcgttgggggaagcccgagcccgacgaagaagggacaccggaaggcgtgcccaccgcctccgtctcccccgacgccgacacccacgcccacgccgtcctcggacaagtgccccatcgacgcgctcaagctcggcgcctgcgtggacgttctcgggaacgaggtgcacgtcggcgacgccaacgtccagtgctgcccgctcgtgaagggcatcgccgggctctccgcggcggcgtgccggctgcaccgccatcaaggccaaggtgctcgacatctccgtctacgtgcccatcgcgctcgaggtgctcgtcaactgcggctgcgccgtcccgccaggctacaaatgcacttgaacgattccatcccattccatttccatttccacccagcacacgtgcacagcaaaacgtctccttttgccctcccgatgcaaagtttgaaaaggctcgtcgacggatttgggtggtagccgcccgcgcgccgccgggctgttcagcaagtgcattccttcatttgttttgctattctcgttgcatgcctgtatatgcatcgtccgatccggtgtctcctcaaattccacttgtactttgtgtgattttgtatcaaactattctctttttttgggattcgattattgtttcaggtgttaagtaaaaaaaaaaaaaaaaaaaaaaaaacctccagtaacttacttattcacatcccatattcaaactcagtgcaaaacaatatttgatgagtgactacataggt

SEQ ID NO: 144505 - DNA, 231 bp, Zea mays
  Clone ID: MRT4577_63275C.1
tataatacatatgaatgattataccaagctaaaatgacaaataagtagaaataactatagagatggttattaatatgagtatgacaatctaaaactgaactgttgttatacctatcctttcagaattcagggccggcacaatgtgctaccggctggtcactgtggctccgcagggagggatgatggagggaatcccttgtggggtttgccccaagattcatgaagtctctc

SEQ ID NO: 144506 - DNA, 146 bp, Zea mays
  Clone ID: MRT4577_63276C.1
agtaccaggagcgtcgcctcactctcctcgtcgcatctccgctcctcatcgtcgcagcgcgggcagcggcaatggcgatggcctccacctatgcgccgtgtcgaggcgcgcgggcgcttcgcctatgtagatgcagggtccgcggt

SEQ ID NO: 144507 - DNA, 246 bp, Zea mays
  Clone ID: MRT4577_63277C.1
ttcctttttttttttttttttttttttttttttgtttttttttttttttttggaagacaggggaacgagcaggcatttttattcgaagcaaagggggcagccaattctaaccatactaggaaccaggccagcgctgcccaaaaacgctgaaagaagaaagaaaaagcagcgggcggccgtggggcctggaaaaccaggacccatagggggggagaccacgctcttccttgtggaccgggggggcaa

SEQ ID NO: 144508 - DNA, 370 bp, Zea mays
  unsure (1)..(370): unsure at all n locations
  Clone ID: MRT4577_63278C.1
acgcgtncgctntcccacacactgcgtccttttcttatgtcttgtcaaagccaangtaagccgggggtgttaatttttaaaacggcgaccccctctccataaggcatgaacaatgttctcatgatggacgtctatgtgcttagccacagcatggcatgcgaacttcgtcaatcttggagggtttcgtataccaaacttttgcaacagcttccatcaaaatgggtcgtacgatcaacctgttttatgtttgcttgacttcaattaatgcagttcttgtcgtcatacttgttgtggtcgcttttgttattcaattgatgatcatgttaaatttcatgtactctcgtnagcatnccaaatctnngggcacacc

SEQ ID NO: 144509 - DNA, 504 bp, Zea mays
  Clone ID: MRT4577_63279C.1
atgtgaataatatgatcacatacttgtttcatttgggttacataataacatcctaagacagtctataacttcacatccaaccaacttgtgaagacgggaataactggaactcactcaaaaaaaaaccacagcacagggtgagggggcatattaaaaacaatagctaaagcttatctgaagcaaccttactacataccatcctttatttacaactacatccacttcggatacaaactactggccacaggctaacacggctttagctacccaaaaacaaaaggtggttaattgctcattaaaaatggtgcccttggcacttaaataaataccgcccaagaacttcctttaatccttcttcttgacatggcatttctggtttatgagagcaatctgagcgagagacatgctcattattattgccttcaagaacaagctcattcttgaccttctttgaacacaagatggtcacaccttcaagcatattaaccttcctgaccttcttct

SEQ ID NO: 144510 - DNA, 232 bp, Zea mays
  Clone ID: MRT4577_6327C.1
gtgcgaaagtctttccacacggtttatgaaagcgaaataaagttgaagagggtatcaagcaggcagcttgtatggaggagaaagggtgcgaacctaatgttcttatttagaatacgttatagatgataatttctaaggatgatggaataattatagcacggcattttgccccttagatgttatgttttagtgatagaatacgaaaacagaaaaaaaaaaaagaaaaagaaac

SEQ ID NO: 144511 - DNA, 696 bp, Zea mays
  unsure (1)..(696): unsure at all n locations
  Clone ID: MRT4577_63280C.1
ttctcctttctctatttcttgcacgccgacaccagcccctccattttctattggccgccccttgctccctcccatggggctccccctggatccctctccatggcatggatcagccccagcttcccatggatgtcgccctcctctccctgatggctggcatctccactccctgcagcaaggacgctttcctctgctccctgctcttcctcccatggccaacccatgttgtggtgctcgccctggctccagccccttccacagtcggcaccctccccatctgctgcagattggagaagaggaaccccaggttttgcgtagagaggaaatccatgtggcgtgtgctaggtgtttgatagaatggatgaatcagagatccttgttgctcttgcgaattccgagtctatttagtgttggacgccaatcactcaacacgaaccagcggcggtgctctctgcacgggggcagatggtccgcggctaggggtcggacggtctgcgacctggcgcgaggctagggtttcctgcctgacggccagatggtccacgccctcgggccggatggtccgcgcgtggcgcaggggcggcggaagatcaccggcggcgcctggatctcactcccaggagggaccccatcggngaggagagatcctaggtgacgtctaggctcggacagaccgacctagactcctctaatcga

SEQ ID NO: 144512 - DNA, 608 bp, Zea mays
  Clone ID: MRT4577_63281C.1
ctctttattgttttgatataacattcttctcctacctgtactagagctcaaaccattgccattgaattaagtgcaaactacctgattaattgcagcagcagcgaaaacatttctctcggcggcagagcgagagcggatgtagtccgtgcaacggcgcctgtcatcggacccgtgggcatccgcgtccacgacgtgatcatcaagggaaacactaggacgtaggacgatctcatcgaggtggaggttgctgagctgctccgcgccgccagtgtctctacagtgcgactgcacaatctcgacatcttcgacgccgtcaagaccacgctcaacgcgtggtcgctcgagctgcctggcaccaccaacatcgtcatcgaggtcgttgaggcggccaaccccctcactgccgttggagataggatccttactcctgcaatctgatgtattcagaataatagtttatgagtaaacctaatgtaactgcaatctaagatgtagttttatatgttgtatgcagttcttctgtagcaagtggaataaggttcagaatcagaacacgagatacatgtattttttcccttctctgtatagttatattgttttcattgttg

SEQ ID NO: 144513 - DNA, 924 bp, Zea mays
  Clone ID: MRT4577_63282C.1
tcatatcacctaatgcaacatataagtgataaaagtttttaaaacagaagcaggtggcaaatgcaccgaggcttgcctgtgataacactaagttagtgttgttagatgatactcgcttgtcgagcatgtcccatcctggcacttgatcagatcatccaatcttcaagttcattcatcagcttcacttgagattaatccatctcgtgccctccgtatttcgtgatcaattaacgtatctgtgataacactaagttagtgttgttagatgatactcgcttgtcgagcatgtcccatcctggcacttgatcagatcatccaatcttcaagttcattcatcagcttcacttgagattaactcagctcttgttctccacactccgtgatcaattaacgtaccaacactaaatagactcggattttgcaagagcaacaaggatcttcgattcatccattctatcaaccacctagcacacgccacacggatgtcctctctacgtaaaacctggggttcctcttctccaatctacagcagatggggagggtgacgactgtggaaggggctggagctagggcgagcaccacaactggaaggtgagggagagggcgacgtccacaccatgggaagtgagcaggagagatgtagcgatggggagagaccatggacgagtagaaaggcatggcgagcttaccatggatcggccatgggaggaagagcagggagcagaggaaagtgtccttgctgcagggagtggagacgccagccatcagggagaggagggcgatatccatgggaagctggggctgatccacatcatggagagggatccagggggagccccatgggagggagcaagggtcggccagcagaaaatggaggggctggtgtcggcgtgcaagaaatgagaatcccggccggcctcgagg

SEQ ID NO: 144514 - DNA, 366 bp, Zea mays
  Clone ID: MRT4577_63283C.1
ggcagaacaaagtcagagacagggtactcttgcgtccttaataagtagtagagggatcaaagcagactaatttgcctcaattacaaacaagggaagcgccccgggttgaactccttgaagcaaaaaaattttaaaagcaataagggcaatgacaagagaaccaggtagagattattaaatggggaaactaaggggattaaaactggagtcattagtagtcctgggcaacatgatgtaccgaaattcagcataaaagcaacttctgggggcagactggatcaaaggctgctccacttttattgacttggtttcgagggaatttctggactagggcatgggtagggaagaactcattttgggggccat

SEQ ID NO: 144515 - DNA, 273 bp, Zea mays
  unsure (1)..(273): unsure at all n locations
  Clone ID: MRT4577_63284C.1
cggacgcgggggtnccccggcggcgatgtcgagcgcaagtgtgcttatgcgagggcccgcgccgcctgcgtagcacccggcagaaggcgccggcggccgtggtggaagcatccactctatctcttcttgattcttcggattgaggctgctattttttcttcaacgtcttagcctggtggtccaagtgcttgacggtgaatcgtagcaaaattttcactaacagttggtattgtaaaaaaatcaaaagtgaatgaactcgtgatttggaagaat

SEQ ID NO: 144516 - DNA, 409 bp, Zea mays
  Clone ID: MRT4577_63285C.1
ttcactcgcctgctcacccacccgtcccctcctgctcgtcgcatggctcccatcgctgtcggcgccgccctctccgacaaacaagaagggcgtatcagacgagaacgaccatgtgcaccagccctcgcgatcacctgcgtacgatgctcttaagaaggtcatcttgttcggggttgccggggcctcaccgccgacatgcaaaaaccagcatgtgacagggttcatcacacaggctagatcactccaagccaaggttggagatgatatcctgcttatcaatgtttacgacccctttatcatgaaggcctgcccgaagacctacccctagaacaaggacgtgaagatcctcgccgacgtatctgcagcttacacacaagcgctcgacctcgagctcgatctcacggacaaa

SEQ ID NO: 144517 - DNA, 272 bp, Zea mays
  Clone ID: MRT4577_63286C.1
ttcttgcaaccggctgtctatgctcatgtcttggaccgcgaactatatggacagacataactccatcacagaggcgcgggctgctaatgtgatttactagagtgttaattcgctcggcacgctcatgtgctgcttggttatgacgagggtgtgacggatacactacgacaactatatgagtgtagcctgtattgtgttaccggaaggcacaacctgacgggtgacggccatggataatgttggctacttcggggagaaaggcagtcacacta

SEQ ID NO: 144518 - DNA, 305 bp, Zea mays
  Clone ID: MRT4577_63287C.1
tcaattcgagtgcaaacaagactcatttacgatacctgtccaagggggggtgcctctgtatgctgtgcgaaaccatcctgtcgaatgctcaaatacagctgcctagtgcgcaaagacagatcacggaactgatattgatgatcatacgccatttagtcaatttgacgccgcacaatatttgtaggatcactcactatgctaagacttgaacccgaaaaggcacacaggattgagtagaaggctatccaaagtgaatgggatcttgttcaaaatatcctacctcaaactatatacgttagaatcta

SEQ ID NO: 144519 - DNA, 889 bp, Zea mays
  Clone ID: MRT4577_63288C.1
ggccgagagcggcaggcgggcagggttaggtgaggagaggccatcagggccgagagaccatggcgcagcaatatatacgccaccggctgcggccgcggccggggcgcccgccccatgatccggacactactgcccgcgctgacccaccatctcgcctcctcgtctctgttgcggcgccggaaggctcccatgggcgccagcgatcacctgggcctggcggcggtggccgccgccaagccgcggaatggcaggacgtgcatggccgtgctgggcgagccactgccggctcttgacgaccccggcatcctcgtccaccccagcgccgacttcgccgcccaggcgctcgtctcgtccacgaaacagtaccgagatatgtaccaaaagtcgatcgacgacccagctggtttctggtcagaaatcgcagatgagttctactggaagcagaagtggagccctgataatgtttgcgctgagaaccttgacgtgaccaaggggccgatcatgattgaatggtttaaggggggaaagaccaacatatgctacaatgcagtggaccgcaatgtggaggcagggaatggggacaagatcgccatgtactgggaggggaatgagcccagtcaggatgggaagctcacctactctgaactgctggaaaaggtttgccagctgtcaaattacttgaaaagcgtcggcgtacgaaaaggtgatgccgtggtgatctacctaccaatgttgatggagctgccgattgccatgcttgcttgtgcccgcattggtgctgttcactcggttgtgtttgctggcttctccacagatgcactggcccaacgagtcattgattgcaagcctaaggttgctattacctgcaaggctgtgaaaaaggggatga

SEQ ID NO: 144520 - DNA, 775 bp, Zea mays
  unsure (1)..(775): unsure at all n locations
  Clone ID: MRT4577_63289C.1
ccatcacatccatgcactgcgtccctctcaatctcaatacaaccaagctttcaggaaacccacgcaaatggcgagcacaaggatgaccatgcacatgtgctacctcaccatcttgttactgcttgcattcctggcaccaccgtgcacgcccgtcagcgacactgacgacggaagtcgccgtgcgcgcgccgaggccaccgtcgacgacattttgtcggcgcacaatgaggcgcggaggaaggtcggcgtgcagcccctgacgtggagcccggggatcgcgggatacgccaaggactacgcccgctcccgccgcgccgactgcgcgccgcggcgctcgtcgctcttctacttcggcgagaacgtcgccgtgggcaaaggccgtcgcttggacgccggggcgctcgtcgcgcagtgggtggacgaggggcgatcgtacgactacggcagcagctcctgcacggcgccggcgggctcgtccggatgcgcgcggtacacgcaggtcgtgtggcggaacacgacgcagctcgggtgcggcaagatcgtgtgcgactccggcgacacgctgctcgtctgcgactacttcccgcccggcaactacggcaccggccggccatactgaactactgatcgcgcgccgttgattgatcacgccgtgcatgcaagttaactgcatccctccacgtggtgcatcanagctatttaccatcgattatgcatttgtttacttgtaattcccaaattgtatggttcaaaagtaaataaatcacattttcat

SEQ ID NO: 144521 - DNA, 370 bp, Zea mays
  Clone ID: MRT4577_6328C.1
tcgaggccggccgggatacccgtcctccgcatagacaggcggcttacctctacgcctatcgccaagcactaaaagctttcactcattccccccgtctgtcccatgttctacccgcacgcacggaggtaccgcaccggtgaacaagcaccatgagggacggcatgtcgatccacatcggccaggctggtatccaggtcggaaacgcgtgctgggagctgtactgcctcgagcatggcattcaggctgatggccagatgcccggtgacaagaccattgggggaggtgatgatgctttcaacaccttcttcagtgagactggcgctgcgaagcacctcccccgcgctgtttctgctgtccttgcgtccactgt

SEQ ID NO: 144522 - DNA, 367 bp, Zea mays
  Clone ID: MRT4577_63290C.1
ttttggttttttttttttttttttttttttttagacctcaataatctattaacacctcgcataatatttgtaagggccaaaactacctaataatcatgacaggcctagaagttgcctgaactcaaattcaatgccagtccctaacgccgtcataaaaaccatccctcaacgttcgttggaatcgcctactggccaccgcaaagtccgagaacgagggggagagttgactccttctggatgtttcagtccctcaaggggcgaccattttccaactggttaccaacgaagataaaacgctgctgatcaggggggataccctccttatcctgaatcttgctcttcacgttgcccatagtgtttctggatt

SEQ ID NO: 144523 - DNA, 237 bp, Zea mays
  Clone ID: MRT4577_63291C.1
gtacaccttgcgtactagaggataagctgtcagaaatcacgaacggtacagtcctggtaaactacgggacatcagccgacacgcatcaagtcgggagatcggagccgtcttactggacctagagggcgggttctttgggggcagcagctgcacacttgagctcatgacagtcgttcacgctggtgccggaagtgcataaggtcaagatgtcacacaggagctgcatgatcagagtgc

SEQ ID NO: 144524 - DNA, 341 bp, Zea mays
  unsure (1)..(341): unsure at all n locations
  Clone ID: MRT4577_63292C.1
ccacacacacaactagcctatgttagacttttaggagtcccccttcgaaaagaaggccgcagacgcagcgagcaaaacacaaatatagcctattgacccagacctaacacacgaattcaaggtcttccaaaatcgtccttgcaaggtctcggctgtccctagccctgagcttggcaacctgctagtgnaggaacgtcactatgacgacgacgaagtaataaagacgacacagggttgcagactgagacattccctcccttcgaccgcctcttccacatgtgaaccccagtgtgcagcggcctccccgtatatagcattcctgatatgatggttccccttat

SEQ ID NO: 144525 - DNA, 538 bp, Zea mays
  unsure (1)..(538): unsure at all n locations
  Clone ID: MRT4577_63293C.1
cattccatatttgaacatgacagcatatcgatgataagtagcgggcggaagtatcctggaacacaggatgaataggcgatgcttgctacgtcaccttttaggtcgttttatttggtcgtttgttctagtgggtgaccagggttttcttattgaccgatctcgtagaacggccttcttgctagcatatttggagaacaatttatcaaaagtagggccgactttgactagacgactatgtgcgttatatgtgctttgttctagcgtctccttttctactttgtgtggaggctgttgcctctggccatgggtggactgtcctgctgagtcacccgaaccgtatgcatgagcaccggaccatccatgcgtagatgccggattgttcgcaatgttcgagtcagagagtcgtgctcggttgctcaattgggcctgcccctggcgcctccggaattgttagtcttcttgtctagaagccttccgagcaatccctccttgcgatatgcttgnacgtgtngaggatcaccaatgacaatgcttttgc

SEQ ID NO: 144526 - DNA, 107 bp, Zea mays
  Clone ID: MRT4577_63294C.1
gtattatatgcttttatgatcttcggaatcctgattgatatgacaacataacaaactcttttatttggtcggttttcctgatacctgtatgcggatgacttcattct

SEQ ID NO: 144527 - DNA, 408 bp, Zea mays
  Clone ID: MRT4577_63295C.1
gcgggaggagaagaggcggaccatcgaagagaaagggaggcacatcgtggagaagatgcgagagaatgctaggaccaacagcatggagaggaccagtagctagcgaggatgcaaggatcggcatcttgtttcgttgatttgggaagtggtgtataggctgaacttgtatgttttctttgtagagttgtgcaacatttagggttccacgagagctgatctattatgtgggtgtggcggcggcaaatatgcatggatgggatgagcggtgtacttgtgacctcatgttagtatcagcttgtggaatactatgaaaaatgcaggtgccaatgcctttcaccatgctactagttagtttgtctgctacttgttcccaagtttaagaatgtgatcaactgtgacaccttgttt

SEQ ID NO: 144528 - DNA, 316 bp, Zea mays
  Clone ID: MRT4577_63296C.1
attcctatatttcacatctttaacaaaatacataaccaatacacatacaaacttatcacttaacgactttttaaatatcataaataaaatacctccttaaataacccaaattaatcaaaccttactccaaacacttttaaaaagatatcttaaaactaaaaattctctggaattaaaccccttctcaataattatccaataataaatatcctatttcttcttaaaccaaatattctaattactcaattcttatccattatccaccaccatatatttaacactcataaaatactaccttaaaattctttaaaatcat

SEQ ID NO: 144529 - DNA, 2166 bp, Zea mays
  Clone ID: MRT4577_63297C.1
gacagacaccacgtactcgccggtggatccaggcacacggattcgacgccttagtgtggctctcaaatctcctcacgcaagcttgcctctccacatccaggatagagactacattgtctgaagccgttgcaaggagtcctccattaacgtggttggaatctcagctgggtcgaacctccccttaaaattcggacagcatttccatgcttgatgctccagaaccgtatctcgctgtccccatcgcaagaacaaatgaggtcatccttgttcgggtggaaatcaagtgacataacagatgctgagtgcccagtgaacgtacgaattgaataaccattgttatcagcatcccaaaccctcacagttttgtcaaatgaagatgtggcaaggcgaggagtgcttgggctgaagcgcacatcagttatgagcagagaatgctcctctagcattgatttttgtttcagagtgtcagcattccacaggaaaaccttcttatcgtgacctccagtagcaattaattttccatctgacgagaaatgacaacacagaacactgcttgtgcttgcttgggctgaagatacctctctaaggatatatccttttccagaactgatacaatggctaccagcagctcttggatttgtgccattatgcggcaagaatggttctaaattatcttccatggagtcatcctcggtatacccgatccatatcaacaagttgattggtcggcgatcctattggtactggaccctcagaaccataaacaactacagtcgtacatgagctcgcattttggtgctgcaatggcgttgatattgtttctccgggagaatgtgcggaaagagttgaaggtgttgaactgggggaagcaccagcagtatttgtagtaccagagctattggctgggccagacgaggagataggatgtttgcgctttcgcccatttcgattcttagaaacctgttcatttccagcaaaagcaactgttacaattccagcacccattttttcctgctcaccttcaagataagttgagctttgttgttgctgactcagtaatggatgttggaggagctgttgcagattgttactcggctgttgttgctgtagagcagctatcttcttcatcagcatatctgtctcagtgcgctgcataggtaagcacatgttttgcaatgactggccaacactgggaacaatttcagtgaaaccagttgattgaccatctctcccaggaaccaagtttcggctgctaaaaagcatccgaagtcgtctgttatccatgtctccaggtgaagtagcattttgttgtgcttgaacatgaattagagcatgctgctgctgaggagtgagaaactggagctggtgttgtaatggctgggccgggtacatataagatttgtgctggagaaacccagatcgaagctgttctaatcctgtgagaggccatcctttcaaggtcaaattgttccccgcctgattagagcctggtactccaaatagtgatccatctgcacctgcagctctctggttcaaagctacatttgtttccgccttaatatcctgtgttgatcccagaagtggctggctcctgaactgagcttgctgtaatgaaccggacatgcccccagctgatctttggaagattggccctgaagctagaaatgatcttgcaggtgactttagcattgaagttgggtttgattccagtaatgggctcgagccgaattaccgatgtcgtgttcgtttctgaagttaccgttttcgatctcatttttgaggaaaaatatgaaaacgaaaatggttttaatgtttaccgatcgttttcatccttactaatgagacattgtagacaaggatgaccgatacgtcaacgcttgagaaaagcacccctgtccaagcatttgtggccgaggtaaccaaagaagtaagctacctactacctcccccagctatgacgaagagaaccaagcgactccctcttgattttgtgccacgccgcagtagccgtctcagactcctccgacgcatcgaccaacatgtccggcgttggtcacgatcctgcgaagacctcctccgactcagccaagttggatccagtttgtagctctatttgttcatcgaatctgcccagactcctttggtaccaaaaaacccacgcgtccg

SEQ ID NO: 144530 - DNA, 158 bp, Zea mays
  Clone ID: MRT4577_63298C.1
gcgcccacccttccgccacagctggcttagcatacgctatatcagaacgcatccactatagcctccccgtctatagaactcacatatagtcttctgcataaggaatagggatcatatgacatttaaccacaaacggccaggctcaatgtcctagggcg

SEQ ID NO: 144531 - DNA, 595 bp, Zea mays
  Clone ID: MRT4577_63299C.1
ggcgaccagcgtccggtaaatttgttaatagaaaaaagatgattgtttgcttgttttttggtctttactctagtactctaaatgcttgaaattattatggttactctaggtatgatgattggtgactggtaaaaaattcgtgatttatggtgcatgtatcatggagttagtgatttaacttgtttgatgcatattaagtagttttaaatggtttataaatagtatacggatgtaaaaatggaaaatgttgttctagtgtctttatacgatgttgtagtggcctaataaaagttaacatggctatgcattcacaaaaaatatttagttttagatttaacttgtcgtcatatgccttattgcattaacaatttatcatttttgtaataattaatatataaaacctgataatgtaaaatttgtacatttgtcatgacttgttattacctatactttatgaaaatcacagccccaaattagatagcctcatatggtgctaaactaatactcattctaaaataatacctactctattaagaacataatgtgggcatctcgtgctactatgacttcaccctttacgctgccactctgggcc

SEQ ID NO: 144532 - DNA, 308 bp, Zea mays
  Clone ID: MRT4577_6329C.1
caccctgcacaactttacgtaagggatagttgggtattctcttgtggttgactagtgaaagagtcgacaagacaatcctttgttgctgaccttcttcttagacgtacactaaaatataacctggtaccgcttccagagccatggttgctactggatgccatcattctttagagagcatatgtgcttcttccacttcgtacactggactgactcaaaccgatccttccaggtttcgaacccttacctaatcagtgccacatgaggatcatcagatgagagtgtaagatcatccttagtgtggccatctg

SEQ ID NO: 144533 - DNA, 743 bp, Zea mays
  Clone ID: MRT4577_632C.1
cctcgaggccggccgggctcggagtgagaaacagcggcatcgccgcgcgcatccgaagcgcacacgacaatgcagggcggatccagcggcatcgtctatggtggcctcaagtaccaggcacggtgtatcgccgacgtgcgcgcggacgccagctcgaccaccttcctcgccgggaccctcagcctcaaggaggagaacgaggtgcacctgatccggctttcgccggcggagagtgagctggtgtgcgatggagtcttctaccaccccaacgagatctgggatctcaaatcatgtcccttcgatcacagggtcttctccacagtctacacatctggtgagggctttggtgcgtcagtttggaagatcccagagcttaatgggcaatcaaactcaccgcagcttgagcagctctttgagcttagtgggcatacgggcaagattagacgtgtgatctggtggccacttggaaagcatgtcaatatctgattcatcacttcatttgtgggatctacgttctatggaaaaatcatctgcaattgaacatgcacatatacgggatgtggattataaccccaagaagcaacacattattgcaacaacagaagatgactttggaatttgcttgtgggatctcagaatgcttaagcttcctctgaaagacctccctgggcactcacattggacatgggctattcagcacaatcctgagtatgatgagctgcttctgagtgctgggacagatt

SEQ ID NO: 144534 - DNA, 1575 bp, Zea mays
  Clone ID: MRT4577_63300C.1
attcaggatatatccttagagaggtatcttcagcccaagcaagcacaagcagtgttctgtgttgtcatttctcgtcagatggaaaattaattgctactggaggtcacgataagaaggttttcctgtggaatgctgacactctgaaacaaaaatcaatgctagaggagcattctctgctcataactgatgtgcgcttcagcccaagcactcctcgcctcgccacatcttcatttgacaaaactgtgagggtttgggatgctgataacggggtcagactcaccatcgtagtggggaaaggagacattgggtcttcgatagccaccatcgtcgatgcagtcacgatgagcagatcctgtgctatgcatgaccccaacaggcgctacggtcgaggcgtgagttgatggtggagagctgcgctaatatctgatccaacttggctgagtcggaggaggtcttcgcaggatcgtgatcaacgccggacatgttggtcgatgcgtcggaggaatctgataccaaattgatatgtcttgggcgcctaggactgcacagtggtgatcgcagcaaggcttggaactggggaagggatctcagtgggtatggggatcgaccagaggaggagctgattctgtcagctggcgcaaggtgcgccaggatgaccaaggaagctccaccggccagcatggttattcaattcgtacgttcactgggcactcagcatctgttatgtcactcgatttccacccgaacaaggatgacctcatttgttcttgcgatggggacaacgagatacggttctggagcatcaagcatggaaatgctgtccgaattttcaagggaggttcgacccagctgagattccaaccacgttatggaggactccttgcaacggcttcagacaatgtagtctctatcctggatgtggagaggcaagcttgcgtgaggagatttgagagccacactaagggcgtcgattccgtgtgctgggatcccaccggcgagtacgtggtgtctgtcagtgaagacacggtgaaggtgtggtctttgaacgacgagagcttcgtgaacgagcttagctgcggcgggagaaagttcagttcgtgcactttccatcctacgtacccatccttgcttatcattggctgttaccagtctctggagctgtgggacatgtccgagaaccggagcatgactgttgcagcgcacgacagcctcgtctcggccctggcatcgtcgagctccggcctggttgcttcgagtggccatgacaagtatgtcaagctgtggagatgagcttcgactttcctgccctggcatgttaagtacggttgtggacgcgccccaacccttttggcaccattagctatctgcttgcattgcagtagcgctcaggagttaggatggtgactcgaccgcctgactgaacatgtgtccgctgaagtagcgtgcagtaaaaccctgaagaagtgggtttagcgcctagcttttgtataggaaattagaacacgggttatgttaagtatccaatgtctgtcactaccttgacatctgacatggcttgaaagcttttgctgctgc

SEQ ID NO: 144535 - DNA, 232 bp, Zea mays
  Clone ID: MRT4577_63301C.1
ggaagcagcaaacccaacccaacgaaatgggctgcttacatgtttagtgaattcagttaaaaacaatagttcatccagttgccagtttaaatgtcttatttatcatttggctggacacatgttaactgaaataatgcacgtttgttagcatctaacaacattgttccacaactgtcaagggagcttatttacattaacaactggtgtattcttcaatttcttccatcaatta

SEQ ID NO: 144536 - DNA, 425 bp, Zea mays
  Clone ID: MRT4577_63302C.1
ggccaaaccaggaaaaaaccaaaggaaaaaggcttaaacccaaaaccaaagggatatccccaacattagccccaaagcaattagcccaaactgaattggaaaaaaggaaaacaattatcaaacattaagccggaaagcaattaaccgaaactgaattttacaaaaatataatataaaatataaaaggaaaaaaaaaagcggggcccttttaaaaaaaggaaattcacggggagcggccacctaaatttaatataaaatataaaatataaaaccgcgggaaaatttgggaagctgcaaccaaaattttggcccccttaaaactcagggggcgataaaaaacccccagttcatgggagttcccaattattattacaaaactgaaaatcggcctggggaaagcggaccccaacggtataaacgggcgt

SEQ ID NO: 144537 - DNA, 743 bp, Zea mays
  Clone ID: MRT4577_63303C.1
ggccgggtggcctcatcggctacgacaacatgctgtggaacggctccatcgtgctcctggacgacgcgcccatgcgcaagtacatccgcttctaccgcgacttcgtgctcgccctcaacatggcgctcgccgccgacgagcgcgccgagatctgccagctccctcgttcatgtggtgctgtgtatcggaagaaaatgcgacgagaggcgcgcgcgcggcgagctcggccgtggcactgggcttcagcggggaggcggagaagccccgcgaggagggcaagctgatgttgagttcggcggacgaggggcccggcgacgacgacgcagttgaagagccgactccacggacggtgcaattgcgggtacgtggtgcagcccctgtcaccgtccctattcttggaagtggaacggctagcagcccctatcgccgcctttgcctagctccacggctccgcccctgttcttcccatcctttcgaatgctagctgaaggtctattgaatctgggcatggttgattatcttattagtgctattgaactaattatagaaaaggccaaattcagagaatctaatgtttctgctataagaggatatctcaagatccgcaagtattatgatgcattagcagcttttggttgtctcctagagataaacaaccctcagtggatgtatcgttgatacagcatgcttgagaatgtatcgtgtaaaatgacggagtcgatgaaaagtttcgtggttgctag

SEQ ID NO: 144538 - DNA, 272 bp, Zea mays
  Clone ID: MRT4577_63304C.1
ctcgtttctcgccttcgcctgcctccctccctctactcctccactcgagcgaaaccggtagcgctcaggagctgacggcttgaccttggctgcgcacgctctcgccttgtgctgctgctcgattcgtgctcgctgggctgacagactcggtgcttcggccggttcagaaatctcgagatggctcgtattcagccgaggaccgatcaaaggcctgctgtggacgtggaccacgtcggccatggaaacttcacgggtcatctgaagagcactct

SEQ ID NO: 144539 - DNA, 900 bp, Zea mays
  Clone ID: MRT4577_63305C.1
ccgggctagatccgacactggctgtgcgggattagtcggcgtgcgtgcttagcagcgtctgccgatggatggagaatggtggaatcgagaaggccggtgtcacccacaagatcgacatcagcgatggccccgtgctcccagtcccgtccgcctcgaatccattcgtttgcctgcacaggagaagaaccacgcgtcgttcgacttcatcttcatggacgccgacaaggacaactaccccgagcgactgctcaagctggtgaggccgggtggcctcatcggctacgacaacatgctgtggaacggctccatcgtgctcctggacgacgcgcccatgcgcaagtacatccgcttctaccgcgacttcgtgctcgccctcaacatggcgctcgccgccgacgagcgcgccgagatctgccagctccctcgttcatgtggtgctgtgtatcggaagaaaatgcgacatcaaacttcgccgccatcgacgcaagcttgggagatgcgacgggggaaggtgtggcggcgcgggggcttgcgacgagaggcgcgcgcgcggcgagctcggccgtggcactgggcttcagcggggaggcggagaagccccgcgaggagggcaagctgatgttgagttcggcggacgaggggcccggcgacgacgacgcagttgaagagccgactccacggacggtgcaattgcgggtacgtggtgcagcccctgtcaccgtccctattcttggaagtggaacggctagcagcccctatcgccgcctttgcctagctccacggctccgcccctgttcttcccatcctttcgaatgctagctgaaggtctattgaatctgggcatggttgattatcttattagtgctattgaactaattatagaaaaggccaaattcagag

SEQ ID NO: 144540 - DNA, 460 bp, Zea mays
  Clone ID: MRT4577_63306C.1
cgaattcgcggccgcgtcgactttttttttttttttagacgacaaaaaacaatgactgctggttcctgtcttccacagtactaatttacaaaaactacaggtaaaaatacaaaaacaatgaaaatgaaaaataaggacatctctatcgtctccatccacaagcaaaaagcaagaacaaccgatcgagcggccaaggagacgaaagcgacagcctcctcctccttctgccttatcacctccaccgccccattaattacaacaccctagccgacggtttacgctggcgccgcgccgacgtcagcccccggtaggcgcgcgtggggactgcgggtggtggaggaacagcggcggcgcgtcgcggccgccgaggtccatggacgacgacttggccgacccaggcagcggcgctacgaagcgcgtagagatgtcgcggtcgtagccctggtagtcgccgtcctcg

SEQ ID NO: 144541 - DNA, 272 bp, Zea mays
  Clone ID: MRT4577_63307C.1
ttccggcgtatgcgcgaagcgcccgcggcggacgcgcgctctccacatgctgtgccgcctgtagcccattattgccaatgaactgctcagtgggtaaaatgaggtcgttgcccgctgccaggagaactgtatggggggggggcttgaacgccacaagatgtagtacctctgctgtctccgcacgcagtggatcacccagccttcccttggtcccatctcacttacgccccccgggcacaatcctgtgacgcaccatacgtgggctgattccg

SEQ ID NO: 144542 - DNA, 603 bp, Zea mays
  Clone ID: MRT4577_63308C.1
gactagttctagatcgccgccatgctgtcgttcgtggcgtcgttcgcgtcagggctgggccccgtcgcctgggtctactgctccgagatctacccgctgcggctgcgcgcgcaggccgccgccatcggcacggggctcaaccggatcatgagcggcgccaccaccatgtccttcctatcgctctccaacaccatcaccatcgccggcagcttctacctctacgcctgcatcgccaccgcagggtgggtgttcatgtacttcttcctgccggagacgatgggcaagagcctggaggacaccgtgaagctcttcggaaaagacgcggacgacgaggacgtcggcgacgacagccgtcgtcacgtgcccagtaagaagccgtccactgagctgagtgctcagcagtgagtgatgtgccatgtaacgcgtgtccgtacacacgtgtcgtccctagtgtggccgaagcttaggctccgtaaagcttcgatgatatgatgatacagcatatatactactagtactagtattttgcgtgttcgtgcgtggtgaatctttgtagatcccgtgcctttcatttctttaaaagattttgtagattttttgttg

SEQ ID NO: 144543 - DNA, 424 bp, Zea mays
  Clone ID: MRT4577_63309C.1
cagatgagttcaagtcaatggacaataaggacatgcgccctgaagattacttgaacttggtttgtcttggaaaccgggaagaaccaccatctaatggcagcccagaatcagagaaatctacatataaaagtgcagagatagtctgtttttgcattttccttattcttaagggtatggcttagctcaacccttctgattacaccaaaactgaatatggttttggcgcacggaccttatgggaagctagagaagcatttgaagacgcagaaattactcatgttgacgatacagtagatcctgttagagacatggaaactattagtgaagagctcagactaaagttttcggtggattttgttgatttacaagatcagctgtacaacacttaaaccttttttcgacactattctgtgtctatattctg

SEQ ID NO: 144544 - DNA, 147 bp, Zea mays
  Clone ID: MRT4577_6330C.1
ccagggctcaggtgctgctgtttgctcttcttctgcaaccagaatactccaagacaatactgatgatcacacaggagctcaaagtaacttggcttccagtgcatcagctcaagtgtcccacttttacaaccaatatgaactcaaatc

SEQ ID NO: 144545 - DNA, 1320 bp, Zea mays
  unsure (1)..(1320): unsure at all n locations
  Clone ID: MRT4577_63310C.1
ctcggtcccatgtagctagcagctagcactcactagcagcgaagagttaggagtgagaggagacggtaaccccagcggcattcgctgctgggaggtacaccaataatcgagcagcgtgcgtgtgagagagagagacgaaccgagccacagagaagagagaacgcgaagctagtggcaaactgacataacacgcctgctcgacatcaagaaggtggtcggcatccccgagggcgtcaccgacgccgacgacgtggccgccatcgtccgcgccagcagcaaggcatcgtcgtcgtcgtcgcgccacgacggggtgtggaaggagctgctcatcaacccttcccgccccgtgcgccgcatgctcgtggcggggctcggcctcatgttcatccagcaggccacgggcgtggactgcgtggtgatgtacagcccgcgggtgttcgagcgggcgggcatcaagtccaagaccaactcgctgggcgcgtccatggcggtgggcgcgtgcaagaccttcttcatacccatctccactctgctcctggaccgcatcggccgccgcccgctgctgctggccagcggcggcgggatgaccatcttcctcttcacgctggccacgtccctgcacatgatggaccgccgccccgagggggaggccgcggctctgggcgcggtgagcatcgcggccatgctgtcgttcgtggcgtcgttcgcgtccggcctgggccccgtcgcctgggtctactgctccgagatctacccgctgcggctgcgcgcgcaggctgctgccatcggcacggggctcaaccggatcatgagcggcgccaccaccatgtccttcctctcgctctccaacgccatcaccatcgccggcagcttctacctgtacgcgtgcatcgccgccgcaggctgggtgttcatgtacttcttcctgccggagacgatgggcaggagcctagaggacaccgtgaagctcttcggcaaggacgcggacgacgaggacgtcggcgacagccgtcgtgacgcgcccagtaagaagccctccacttccactgagctgagtgctcagcactgagtgatgtgtgccatgcaacacgtgtcctcccgagtgtgaccgaagcttatgtctaaagcttcgatgatacagtctactcctagtatcttgtgtgctcgaactgtggtgaatcttttgtagatcccgggcctctcttttttttctgttagatttgtagaatttttttttcgttgatctcgtggcgtantgcgtgtgcgtgtgcgtagcgagggattggggcacgcaacactttagaaaaaaaggaatttgct

SEQ ID NO: 144546 - DNA, 908 bp, Zea mays
  Clone ID: MRT4577_63311C.1
gttttaaccttattttggaagggagtatcacgaaatgccatagaaatttggatgtagtaactatgttcatgatttccttcatgttacaggcccagacaatggagatgatgtatacgataattgcagatgagttcaagtcaatggacaataaggacatgcgccctgaagattacttgaacttcttttgtcttggaaaccgggaagaaccaccatctaatgggagcccagaatcagagaaatctacaattcggcacgaggagatagtctgtttttgcattttccttattcttaagggtatggcttagctcaacccttctgattacaccaaaactgaatatggttttggcgcacggaccttatgggaagctagaggtctgagctattgggaagctagaatttatgtttttatcaatgtttagtcattaactaattaattgcatatcgttttgttgtatatttattaactaatcgagtgttgcatacggttttcagaagcatttgaagacgcagaaattactcatgttgacgatacagtagatcctgttagagacatggaaactattagtgaagagctcagactaaagttttcgttggattttgttgatttacaagatcagctgtacaacacttaaaccttttttcgacactattctgtttctattttctgcaggatatagagttcatgaaaaagaaacttgaggaccttgataagccaatgaagaggaggaatgataagctgctcaaaattgagcatgaattatattgatccagcacaatgccgaggagactggagactaaacttggaggtgctactgaaggatgtgactttgagtcaaagggtaaaagtgataatgagatgtagcacatggagagcttgaattgaattcaagcttggatatgattggaaa

SEQ ID NO: 144547 - DNA, 3257 bp, Zea mays
  unsure (1)..(3257): unsure at all n locations
  Clone ID: MRT4577_63312C.1
tacgagctcacttgttggcggccgccatcttcttcacgggcgcgctcctcatgggcttcgccccgggctacgggttcctcatggtgggccgcttcgtggccggcatcggcgtcggcttcgcgctcatgatcgcccccgtctacaccgccgaggtggcgcccacctcggcgcgcggcttcctcacctccttcccggaggtgttcaacaacttcggcatcctcctcgggtacgtctccaacttcgccttcgcgcgcctccccgtccacctcagctggcgcgccatgttcctggtcggcgccgtgccgcccgtcttcctgggcgtcgccgtcctcgccatgccggagtcgccccgctggctcgtcatgcggggccgaatcgacgacgcgcgccgcgtgctgcagaagacctccgactcccccgccgaggccgaggagcgcctgctcgacatcaagaaggtggttggcatccccgagggcgtgtccgacgccgacgacgtggccgccatagtccgcgccagcggcaagggctcgtcgtcgtcgcgccacgacggggtgtggaaggagcttctcatcaacccttcccgccccgtgcgccgcatgctcatggcggggctcgggctcatgttcatccagcaggccacgggcgtggactgcgtggtcatagaaggtggtcggcatccccgagggcgtgaccgacgccgacgacgtggccgccatcgtccgcgccagcagcaaggcatcgtcgtcgtcgtcgtcgtcgcgccacgacggggtgtggaaggagctgctcatcaacccttcccgccccgtgcgccgcatgctcgtggcggggctcggcctcatgttcatccagcaggccacgggcgtggactgcgtggtgatgtacagcccgcgggtgttcgagcgggcgggcatcaagtccaagaccaactcgctgggcgcgtccatggcggtgggcgcgtgcaagaccttcttcatacccatctccacgctgctcctggaccgcatcggccgccgcccgctgctgctggccagcggcggcgggatgaccatcttcctcttcacgctggccacgtccctgcacatgatggaccgccgccccgagggggaggccgcggcactgggcgcggtgagcatcgcggccatgctgtcgttcgtggcgtcgttcgcgtccggcctgggccccgtcgcctgggtctactgctccgagatctacccgctgcggctgcgcgcgcaggctgctgccatcggcacggggctcaaccggatcatgagcggcgccaccaccatgtccttcctctcgctctccaacgccatcaccatcgccggcagcttctacctctacgcgtgcatcgccgccgcaggctgggtgttcatgtacttcttcctgccggagaccatgggcaggagcctggaggacaccgtgaagctcttcggcaaggacgcggacgacgaggacgtcggcgacagccgtcgtcacgcgcccagtaagaagccctccacttccactgagcttgagctcagtgctcagcactgagtgatgtgccatgcaacacgtgtcctcccgagtgtgaccgaagcttatgtctaaagcttcgatgatacagtctactcctagtatcttgtgtgctcgaactgtggtgaatcttttgtagatcccgggcctctccttttttttctgttagatttgtagattttttttgttgatctcgtggcatagtgcgtgtgagtagcgagggattggggcacgcaacactttagtctaatttggatactctagtaatgagtgtgattggagtggattgagatgtattgagagaatatttgatctattggtgatttacaccctcttcaatccctccaaaacactttaatctttttttatacaaactaataagatggaaaaaaagtacaatatgcttgacttggattgacaaccttgccaaatatgacctgttattgaatnnnnnnnnnnnncaagatggaccttgttggctgccgttctgaatatctcacatgattcattatcggtatatagatagaagtggcttcagtgggcccttcaactgcacgataagatcaatgttaggaaggtctattacaaattcctgtacggaaatcatgccacgaccaaaaccgaaccatgaaaagcagcatatannnnngtttgactatcagtaaagcaactgcagccaggttaggggatcctgcagtgtgcttgagtgtccaaacnnnnnggcttcgaatgtatagcttcacctggcgttttgttgaaggtagaaggggacacgttcctgcaccctacactagcttgctgtactaaacatttactgnggtttgnnnnnnaaaggtccccaaagttatggactttaagatgctggtatatactggctgggagcacagataagagaagtagcagcactgacatgacggcctcagtaagtaataatgttagttttcattcgctgaggatgggtattattgctagctgtgttctgtttgtgcatactgtattgactgttcatttctcgaggattcgagccatctgttgttcatgtgtgcagtgtgcttgtgcatactgtattgagtgttcatttctggaggaatcaagccatctgtttatgtgtgctagctggataaagtgctgcttgatgtacctacagggatatggccacatggctatgtccggtataggtcaacctgcattacagggttgttaatgtatctcatcctgggttgcgccttgataatgtgacaggcacgaaatggtagtgtaatttgatttaagtagttgagttttgtggaaacacagttcctggcacgatttaagtagttgagttttgtggagacactaaggcttagtttgggtattctagtaatgagtgggattggagtggattgagatgtattgagagagtatttgatgtattggggatttacaccctctccaatcccttcaaaacactccaatcctaaagtatccaaactaggcctaaaggcatctacacatctctagaactgtacnnnnnntctgtgcgaagtctagtttaagcttccgaagaagtctagttctgcactcccaatcatgataagctgcttgcaggatgcaggctgactattctgaatcaattctaaacctttgtagcccaacgtgctcacttgagctgcctgttgacagnnnnntctctttgtccagtccagctctccctactctcagaggacctgaactcgagtatcttcggaaagaaccactcgtgc

SEQ ID NO: 144548 - DNA, 1346 bp, Zea mays
  Clone ID: MRT4577_63313C.1
gccggccgtttccgaacagcgattctcgactcccctccacccatacgtaacacgttctcctcccacgcccccactaaaacagatgccttcgcccttcgtgcgccacaacggaaaacccaccactcgcgagcaagtgcaggcaccgttgcccatccatcgttcatgatcccagcctgcctccgcggcctctgcacctgctttgacgtggacgacgacaaggctaacaaccacgagcaagagccgacgatggccgccgccgccgccgctacagtcggcagcgccgacgacgaccagacggcaagcaccatcatcgcccaccgcaccgtggagctgagcaccggcgtgcgcctgcacgtggcggaggccggcgcggcggcggcaacagcagcaggaggcgcgcccgcggtgctgctgctgcacggcttcccggagctgtggtacacctggcgccaccagatgcgggcgctggccgcggccgggtaccgcgccgtggcgccggacctgcgcggcctctgcctgttccggcccgaccgggtgcgcgcgctcgtcgcgctcagcgtcgcctacacgccccgcagcgccgcgcggaagcccgtcgacggcctccgggcgctcttcggcgacgactactacatctgccggatccaggagcccggggaaatagaagcagaatttgcacgccttggcactgagttggtgctcaagaaattctttagttatcgctcccctggagctttgttcttcccaaagagtggttggggctcaccagatgatgaagtacctttaccgagctgggtaacagaggaggaccttaaatactacaccagcatgtttgagaagaccggcttcactgggggactcaactactaccgtgccctaaataagacatgggagctcacatcaccatggactttagctaagataaatgtacctgttaagttcatcattggagatttggatttgacataccataatcctggcatacaagatttcattcacaagggtggcttcaagaagttcgttccacttctcgacgatgatattattgtcatgaaagatgttgggcattttatcaatgaagaaaaaccaaatgaagttagtgagcacataatcaacttcataaagaaatttggttgactatttccttaaaaatgccatgtggtgttataaatcacataattgcccccaataatacaaaatttggaattattttttagattgttggcttgtgcaaagtaatttatgttcaaatcttgttcaattgatattgtctttcttgttgtcattgtatttgtgtaaagcattaaattttttaagaactgtggaatgaagtttaatgttatgat

SEQ ID NO: 144549 - DNA, 1129 bp, Zea mays
  Clone ID: MRT4577_63314C.1
agaaaggtgataagcagcaaagactgcaagttgtacagcacgcttaatcctcttgagctcctcccgacatgaccctctcagtagaaccgtgcaacccaaacgccaagggcagccttcaaagaacatcagtgtcttgcttgatctcctatttgtctgtttagctgatgggaattctgtaactttttgcaccttgaacgcttcacattgacctagccgtactgaagcaatactgtcagctgatgaagcaatttgtgcccctgtgcaccttgataccctgtccaaaagtgtcctcttaacattcagaactaacgaaatgtctttggagaagagctcctgagcagaagatgagacagttttctcaactagcacaacattaggtcgccgggactcaatctttccaacaatcattttcatgtgctccttctcctgttcaagtatcctgccaatagatgccaatttattaggaaccctgtggtactcaagtgcgccccctaaaatgagcaattttgcattcctatgctcagagaccatgcgcttgtgttttacattcttggagcaaacaactcctcgaacaaaattactatctcttggatcccctgatgctatacatttgaccttcacataatcagtaggatccatgctgcctcctttcttggtatctggcctcacatagcttgcagcttgccaagttaaggatgacacaatatcaagccaacctttggacccatcatcctttcccatatcaatgccttctgccttcagtaattgagccacaagagctcggaaatggccgagcaccgcagtcttcagacactcttcctgagcagtgtttgtgacctcgtcaatagcagctattttgttagcactaaagctaccagaaacaagaagcccgcttgagtccccagcctcatcatcctcgtcctggaatccaaataacctcgattcgatatcatcgccctcatcttctggtggtggtgggcaccatatattggcaccaaattcaacaggatactgagttttgcttccgtcaccactgtcagtgacgctaccatttatctgttgcggcgaaccatcagatcctaaacttgcctttgtaccatatccaggagaatccgggctgaaacggcca

SEQ ID NO: 144550 - DNA, 646 bp, Zea mays
  Clone ID: MRT4577_63315C.1
ccaccactcgcgagcaagtgcaggcaccgttgcccatccatcgttcatgatcccagcctgcctccgcggcctctgcacctgcttcgacgtggacgacgacaaggctaacaaccacgagcaagagccgacgatggccgccgccgccgccgctacaggcagcgccgacgacgaccagacgggaagcaccatcacccaccgcaccgtggagctgagcaccggcgtgcgcctgcacgtggcggaggccggcggcgcggcggcaacagcagcaggaggcgcgcccgcggtgctgctgctgcacggcttcccggagctgtggtacacctggcgccaccagatgcgggcgctggccgcggccgggtaccgcgccgtggcgccggacctgcgcgggtacggcggctccgacgcgccggcggtgggcggcggcgacgacgacgacgacccggccgcgcagtacaccgcgctgcacgtggtgggggacctggtggcgctcctcgacgcgctcggcgagagccaggtgttcgtggcggcgcacgactggggcgcgctcgtggcctggagcctctgcctgttccggcccgaccgggtgcgcgcgctcgtcgcgctcatcgtcgcctacacgccccgcagcgccgcgcggaagccagtc

SEQ ID NO: 144551 - DNA, 507 bp, Zea mays
  Clone ID: MRT4577_63316C.1
ggtcgtcgggacgacgacgcggccgacagcaacggacggcatgcagcggcggcggagaactcccacgacagctcgtcgtcggggtcgcggggcggcgtggacggagcagaagacgccgccatggccatcgactgggactcgctcatccctcctgtggatgatctcgccttcagaggcgtcgatgacttgacccgtgtcatttggccccataattgacagacaccagtcgcatctcctgccgtgtgcttcatcattagaattattcctgtcctgagaatgtaagatggtcagtgcttagagattagtggcgtagttgacaacgtacgtgataagctgcagggaaaataaggtataagttcactagctagctagcaggcctgttttcggcatgagttaaattcagcaggggatacatgcacatatatatattagaaactctgacattacaactgatcaaaattacttgctaaaaaaaaaaaaaaaaaaaaaaaaagtcgacgcggccgc

SEQ ID NO: 144552 - DNA, 124 bp, Zea mays
  Clone ID: MRT4577_63317C.1
tttcgaaccgctcgtcttgtttaaaaaatcaactgtgtcatatacttccttggttatttaaatatatgacacagttgattttcgaaccgctcgtcttgtttaaaaaatcggcagttttcattta

SEQ ID NO: 144553 - DNA, 391 bp, Zea mays
  Clone ID: MRT4577_63318C.1
tttcaaggttagatataagaatatatcataggccgtactatggagagtgtggagcctactgaacctccaagcagaaagcgatgaaaggagggacgcaagcagttaccctggcggtgcaccttgctgtgccatgggtctggctaggtttttgggcagctctgctaccagctctagtatctggaattgcgggtgcagcagctgcgatactgagagcagatcacatagaattgaacttaaacaccgatttgacgacccctgacaagaacaagagcttgatcgctactgttattgctggcttggtgagcaaatcggtgagcaacagcagggggatccccaggctggtcgacgaagacgaccacgtagagctcgaattggtgctaaacatgactct

SEQ ID NO: 144554 - DNA, 473 bp, Zea mays
  Clone ID: MRT4577_63319C.1
tcctccccacgtcgatactgctcgtagtgtctcatatacgcgagccaacgcgttcatccttctcctattctactctcctttctcaccatcgcagtcgctaccccctttctacaacaccatgatgggagtgcatgttagatccacatcggccagtccgagatccccgtcggatacgcgtggtgaaagctgcactgcctcgagcatgtcacccaggctgatgcttacatgcccgatggaaataccattgggagaggggatgatgctttcagcaccttcttcagcgagactgactatgccaagcactccccccgcgctgcctctgctgaccctgaccgcactgccaccgatgcagtgatgactgtcacctatcctcacctcttccatcctaaaacaacatcatcagtgcttccgaggacgcatacaataacttcgctcctgtacaatacaacattggaaatgacatagttgacctg

SEQ ID NO: 144555 - DNA, 150 bp, Zea mays
  Clone ID: MRT4577_6331C.1
cagtgcttggtatcggcagctacatgcctgccagctgccgtgtaccaagacgaatcacccggactagaagttcctgatcaacaagagcgagcactctcactgacctcagggagagattcagaggatgtgctacaagtccgatgatccggt

SEQ ID NO: 144556 - DNA, 304 bp, Zea mays
  Clone ID: MRT4577_63320C.1
aaaagcaacccaaacgatagaattgattttttattttatttatgggagaaaaagaaatttttgggggccgaaaaaattagcagaaacaaggggggtaagaaatgttttgaaccttcccaaccgaaaacaaacgaattgaactggacaccggggggatttatttttgataaaataaagggaatgcaaacgtggtgggatttttacttgggcgcaaaattggccttgatgggggccaacttgcccctttttattcggaaagcctttggaaggatttttgaggggacgggcggaacgggcccaaaaa

SEQ ID NO: 144557 - DNA, 575 bp, Zea mays
  Clone ID: MRT4577_63321C.1
ccccgcgtccgccccgcgtccgcccagcgtgcgggggactggtctagcgggatcatcactagactgctggaaactgaggatcttggcgtgtgctggtggccctagcacctttggcccagcttcggtgcctaattcagctaaacatcccatctatgcttatgtggataagacagatatgaacaggatggagagtcttgtttcatgaagcatcaaaaacacactgctgagggttgatatcttttgatgcttgacagagtcctgtgaggggccctgttttgcatccataggcctagtgttatggacgtgtgctcttagctcatgatgactttggtgaggcctttggggtcaatgggtaaagggcattaactagagcagatggctcccatggctcatatgagatcaggcgttcagataacatgtatgctactcatgatattgcccctggtgaagaggcttcttctggttttcatgaaactttcaagcatggaaacatacttctgttttcagattcttagtgctgaggaaacacagagaagttatgtggctatggagacaaaggctgatctcaaaagcga

SEQ ID NO: 144558 - DNA, 825 bp, Zea mays
  unsure (1)..(825): unsure at all n locations
  Clone ID: MRT4577_63322C.1
ccggccgggatcgtctcgcctgcgaacgtaaacaacctaccttcttccacttccatcttcatctccatctctctccgctgtgctgtcgtccttggttgttcgcctttcaatcccgtttactcgcgattcttgaacaagacaacccgtccccagcaaaggataatataggaagcgcaactcgatcgctaattcacaatggctgcgaacacaaagttcctacgagagtataagctcgtcgttgtcggtggtggtggtgtcggtaaatcatgtttgaccatccagttgatccagagccacttcgtagacgagtatgatcctacaattgaagactcgtaccgaaagcagtgcgttatcgacgaagaggtcgccctgctcgatgttctcgacacagctggccaggaggagtatagcgccatgcgcgagcagtacatgcngcactggagagggatttctactagtctactccattacttcgcgacaaagcttcgaggaaatcaccacattccaacaacagattctgcgagtcaaggataaggactacttccccatnggtcgttgttggcaacaagtgcgatctggaaggcgagcgagatgtgtcacgacaggagggagaggccctagccagatcattcggctgcaagtttattgagacctcagccaagtctcgaatcaatgtcgacaaggccttctacgatatcgtacgagagatccgaagatataaccgcgagatgcagggttactcgacccggcagcggtggcacctctggcgccaacggacccccaaggctatggatatggataacggcgagcaagaagctggatgct

SEQ ID NO: 144559 - DNA, 259 bp, Zea mays
  Clone ID: MRT4577_63323C.1
attcggctcgaggcggtggtaaataaggagttttttcagaacgcgcagcacttaccaaccgcgcgggaggataacacacccagcggggccgacaaaaacgaatggacatgagggacgaccgtgcgacgaaaccgggaccttaaggcgggcctttaccatctcaggcacaaacatgtgctgtgggacactcgacagacacgtggagcgagggcgcaatcgcacgacgactacattaagatgatcatccatttcagcacag

SEQ ID NO: 144560 - DNA, 1216 bp, Zea mays
  Clone ID: MRT4577_63324C.1
cccacgcgtccgccgtcaaataccaactcaggcgaaatacgacaggatcatctcttgcgagatgatcgaaggtgttgggcacgaatacatggacgatttcttcggctgctgcgagtcccttttggctcaagacggcatatttgtcctgcagttcatctcaatcccagaagaacggtatgaggaatacaggcgcagctcagacttcatcaaggaatacatcttccctgggggttgcctgccttcgttagcccggatcacgtctgccatgtctgcagcatcaaggctctgcatcgagcaccttgagaatattgggtaccattactacccaacgctgatacagtggagggacaacttcatggccaataaggatgcaattttggccctgggcttcgatgagaaattcatccgtatatgggaatactacttcatatactgcgccgctggtttcaagtcacggacacttgggaactaccagattgtgttttctcgccctggcaacgacaaattaggtgacagcggtatacactccttaagcaagctttctggcagctaataatgcgaggatctatatatatgtggtggtagctggatcagtcggagcctacacacctgaacttgagcctttttatttgtgatcgaattggacacgcagtgctgtgtacacgtcgctaactaactgtacttgcagcggcggatcattccattgcttcgatccaatttgacgtttcatcactttctgtttctgttggcgcaacgtaactccaatgattaaccttggcacatggccggctgggacgcaggagagactcgagcattcactttcgctggatatacatttgtgtattgtgtccagtctccagactccagcgctgtatgatgagctcaagaacgtagatatattgtcgtcagagtaagacaccacggtaccaaagtgctaggaaaaatcagagatatagaaagatagaggagcgcagacctaaaaccgctggatcagagtatcgatatagctgtatgcacacgtacaatataaagaggtttggactcttaagccccaaaaaaaaaatcattaaaaaaaaaactggttaggggcaaatgtggaaacagcttagactcaaatgaaatttgagctacccagtgagaacggccccaacccccccttagaatttgaaggtctacccctaaaaagaaagaaattgaaccctttttacgttgcttt

SEQ ID NO: 144561 - DNA, 287 bp, Zea mays
  Clone ID: MRT4577_63325C.1
gtccaccttgccatctttgtccttccaatcgccctgtttcaagatccaaccagctactcagcagagcctctggcctcctcggcgacagagcacgaggaaaccaggactgcctctaaagcttatacgtgcagcattaggaccagacgccaatggcggactcctcaatgctgaccgcagaggtgccaccttaccatcttcgcccctgtcagatgtagttcaggagttttactcctccctcaatgagaagaacagcaaacggctcgacaagttgatggcccctgattgca

SEQ ID NO: 144562 - DNA, 342 bp, Zea mays
  Clone ID: MRT4577_63326C.1
actaccgcgttttttttgccctaccctttgtggtgggtggttaaaggtatcaatccgtatgatctgtgaaagtggattcctttttggggggatactactttacaaggacaggctcctgtgggctcattggcgagaacaactcacttgcactttcttgaaggctaagaaaagggcgttccttatgctgcactgatgtgcattgtgacagtgcctgagctacagcaatgtccacttgcattctgatggtggatggcctgatattgcccaatttgtccttattaacgcaccctgatacaccaaacgcattgaacgccctggcgtttcaattacaagtgcgtagac

SEQ ID NO: 144563 - DNA, 295 bp, Zea mays
  Clone ID: MRT4577_63327C.1
gagcttactagtcggcggccgcccttcttttttttttttttttttttttttttttttttttttttttttttttttttttttttttttttctttgaagaagtgaggggctcaaagaagcgaaaaaacctccaatacatggatacttccagggtctttggtgaagcccccagcccccttttaaaataggatgtcaggaagcccgaaaacactttggaaaatccctaagaaatcgaaccaagcaaatctttaacgaaccgacaaataatttatgactctctggttttctccctttccc

SEQ ID NO: 144564 - DNA, 363 bp, Zea mays
  Clone ID: MRT4577_63328C.1
ctctttttttttaattctcttgtttggttttttttttttttggttgcatcatcttccatttcaaaaaaaaaggggtgtccaagggcctgcgtactgtccgccatcaaacacacacggtttattttctaatttctgccaccactccatttgctgaccaccctgtcttacttttaccccgttgacaacactttcaacgaacccaatgtcggggcaagggctttccccaaccttaacaacctcctctactgcctcaccccaaccttttcatgcccgggcacaccccacttgaaggaggaccagggtacttacacctcttgagacacctcgtctcgcccacatctaactcaatccctcctcccgtgg

SEQ ID NO: 144565 - DNA, 339 bp, Zea mays
  Clone ID: MRT4577_63329C.1
cgactggttcgacatcaagcaggtagctagacgagaggtttccgttcatcaattctgtgctagaccaccgagtatttatcatcagatttaagacagaaacaatggcatctgcaccagacgcgaccgccaacgcccctgctcttgacaaggaggctaccaacatggacactgctggcagtgccaccaatggcggcaccacccaccctcagatgtcgcacgaggagcatgaggtcgctcgcgctgctgcgcgctttggatacggtcctcttgctcacgtcaacacccacgaggctcgtcttcctgcctttggtggtgaattccagcctggtctgtaccggc

SEQ ID NO: 144566 - DNA, 481 bp, Zea mays
  Clone ID: MRT4577_6332C.1
ccggctgaggcaagatggtgaaggcacgaatgactccgccgcctcatcggcatgcgcctagccaacgtctacgacatcacccccaaggttaatcgggtccccgtcccctgccccgcctgccgcgaaccctagtcactgccccgcttgggcgcaggttggatgggaaggggctcactccttgacacccccgcgccgccgcccgcgatcggtagaggcgtggcgcacgaagcgaatctgtaattctgtactggatttcggtctgctcgaccagtggtgctgccacctagcagactttatcgtgagcccagggcatagagagcttcgtagtttaatggcccgtatgctatgggattttgcttgtgttgtttttcagtagctgatgtagcctgtgcttacatgtaaaattcgacataatcaatagataacgctatgaactggctcgctgaggcaaaaaaaaaaaaaaaaaaaaaaaaaaaaaaaa

SEQ ID NO: 144567 - DNA, 291 bp, Zea mays
  Clone ID: MRT4577_63330C.1
aaaaacaaacaaaagggaactttggtagctatatcatacactaggaaaaaccacaacacatatataataaaaattatcccaatccataacataaaattaaataaaacttatcgattttttctcttataaaaaatatattaaatgataaacctaactaataaaaacagtgatctaaatcctcaagtaatattttttttttatactataataggtaactatataacaaacactcttatttgtgtttcatttaatattaagtttgacacactattgtcaaataatttaaataaa

SEQ ID NO: 144568 - DNA, 376 bp, Zea mays
  Clone ID: MRT4577_63331C.1
gccaaaaaacatgtcaaaatatgggcctggtgaaccaataacagaacacacaattgaaaaaacaaatcattaaaacacttgggttttggtatatcgaccattggtttggaactaaacttttttttaactaggaaattgggccccctctgggggctaaaacctaaaatccatgggagctgggtggaaattccctataagggaacctccttttttaggaatccagtcaacaagccaggaagggatttgctcatgggagtattcttctatcttggatctggatatctcatttattttcttcatggcaacccaataatatttttttatgtgaaaggacaatgcactgagcctgttgttaaagggaccgatgaattttttg

SEQ ID NO: 144569 - DNA, 287 bp, Zea mays
  Clone ID: MRT4577_63332C.1
actcgtctgcacttggtctttgccagtagccgagctgctcactatgctcgagttcctagcgccctacatgcagtcgccggcagccaagcactctggcacaagcgcctctaagccctgctccttcagccgtgccaatgctcgccagccctcagcccgcgtctctggtacaagtcgtcctgtcagctaccgctcgttcctgactagctcctaccagcgccattgacgaaggttccaatcattagtttcaacctcggctccctatccttgcccagcctcatatcgtcttc

SEQ ID NO: 144570 - DNA, 147 bp, Zea mays
  unsure (1)..(147): unsure at all n locations
  Clone ID: MRT4577_63333C.1
gcgtcgccggcgaggcgatcgccgcccgctcccaccaggcggtgggggtgccaccggcgcccgcgtcgaccgtgaggcctctgcanttcgaggacaccggccgcctgttcgcggggagccgacatgtgcactgcttgcgcacgctcg

SEQ ID NO: 144571 - DNA, 701 bp, Zea mays
  Clone ID: MRT4577_63334C.1
atttttcaaaaattgatctcctctcttgaactctctgccgactcccaactcctctcccccagccccaggtctcacgccgccggtcgccgccctcccgcctccgccgcccgcgagatccacagagcgacggactttcagcctcccccatccggccgtctgcctgccggaggactggagccagattgctggtcccgtcccgtccccccctgcctagcgccgttctctgctccagtcaaccggcgacccctcccgcggacgcggcaggccgaggcgtgatgtgcggatcggagcatggacgtgatcgcctcgcccagtagaagctgcagcagccgtcgtgggagcagggtgtgcgccgtctactgccatgacgatctacctagctcgggaggcttccaaggtatggaggaaggtgtgcgcggagacgacgaccgagctgccgctacttcgcgagaagtggccgctactcctcgctgggattgtgtttcagtatattcatgggctggctgctcgaggagtgcattacttgcatcggcctggaccactgctccaggacctgggatttatggcccttccagagcttggacaagacaaaaattatctttagtgaatgcccatttgccttccatcttcctccccctttttttcttgtgaaccttctccttcttttatttacacataagcaagcgcttcctacccaatcc

SEQ ID NO: 144572 - DNA, 731 bp, Zea mays
  unsure (1)..(731): unsure at all n locations
  Clone ID: MRT4577_63335C.1
ccggcccaggtacgtcctgaccggcgcggacccggactcgccgctgctgctggcgaggagctgctcgtcggcgacgatctggctccggtggatgacgaagcccgtggtctgttggtggtctcgccgcgcctgcgcggtcaccacggccggctgcccccgccgcggctgccgcaccacaagcaggcagcgctggaacacggccgccgcgtcgcccattatgaagtccacggtgccggagatgacgcagctgcggtagaactgccggtaggcctgagcgaacagcgtgtcctggttgccctcgatccggcagttgaagaagatggccttgtcgcccttcacccgcagcgccagcgcttgctgcttctccacccccgcggtgttccggatgcccagcttcatggccatgaaactgtcgccgtccacagcgaaagtggcggttctccacatcctgatgccatccacgacgttcttgctgcccgtcacgatggacgccttggacccgtcgccgtacatgggtgacgttggccatcctaccggtgatgttcaccgtctcgtcgtggacgccttccttgacgtagatgaagtacctgccgctgtacttctccggcatggcgtccagcgctgccgagatgtttgtgaagtcgccgctgccgtccttggncaccgtcacgttcggcgtgagcgcggccctgcgccgccccgccttgacgccaagcagcttccgctcctcg

SEQ ID NO: 144573 - DNA, 655 bp, Zea mays
  Clone ID: MRT4577_63336C.1
aacttacatctgcatgtagcttgaatatacgtgcatgccaagaaacactactgcaaagactacagaagaagacatcaatacttaaaattcattctgcaaacgatggtgatgtgttctcgtccgcccggaagaactcaccggggccgcctccttctactactacttgctgccatcttcatacttgcttccgggagcggaccacgcgtgagtccattattcttatttcatcatgctttcattaggaaatagtaattgcatatatagcatatatacacgcctgaagagtagttgacaccgtccggacacactatggtttatggctttatgcaccacagtaacactgcacagccattggcggacgcacatagcccctgtttgtttcagcttttcgcagcttctggccactaaaagctgctgcggactaccaaacactcaactttttagtcagctttctataaaatttgtttgggtagaaactattcaaaatcaacataaacatataatcggtgagtcgttgcaatagtagtaatccgtcactttataaatcctgagccctatagataactttattttcctccgcacgtaattttaatgatactcagattctctacacagccagattctccccacagctagattcttggaaaacctggtt

SEQ ID NO: 144574 - DNA, 1368 bp, Zea mays
  Clone ID: MRT4577_63337C.1
gccggccgggccgggatacacagctttgcatccaatagcccacccaccagctgcgaaatctcctccaaacaacaactgaaccggacaaagaaagaaggccaaaaagggagtctcctttccaagttcaaaattcgaaacgtcccaagagaaaccgaaaccaccataaaaaccagcaaccaaccgtcatcgccgcacaagcgcacgcactcctcgccgtgtcccaactcccagctcgcaagccccatcccgtcccaactcccaagagccgaacgcgagcggcggtcgccatggcgcggtgcagcaacggcctcctgggcctcctcaacgcgggcgtgctggtcctcgccatcgtcgcgctggggggcggcgcctggctcagccaccgcgcgtccaccaccgactgcgagcggttcctcgagcggcccgtcatcgcgctgggcgtgctcctcctcgcgctctccctcgcgggcctggccggcgcgctctgccgcgcctcctgcctcctctggctctacctcctcgcgctcttcctcctcatcctgctcctcttcgcattcaccgtcttcgcgttcgtcgtcaccaaccgcggcgccgggtgggtcgtctccggcagggggtacaaggagtaccgcctcggggactactccacctggctgcagaggagggtggagaactcgcagaactgggccaagatccgcagctgcctccaggacggcaaggtctgccagaagcttgcgtccagaaaggagacggccgcccagttcgtcaacagcaacctctccccgatccagtctggatgctgcaagccaccaacgggttgcaacttcacgtaccagagcgagactgtctggaccaagcccgctggcttcaacaccacaactgacgaccctgactgcaccacatggtcgaacgaccagaccgtgctctgctacgactgcatggcctgcaaggcaggcgtgctggccaacctgaagaacgactggaagaagatcgccaccgtcaacatcgtcttcctgatcttcctcgtcgtcgtctactccgtcgggtgctgcgcgttcaggaacaaccggcaggacaactcgtacccggcctggaaatgaggtgcgcgtggcaatgtataggttgtttatgctatcatgctatgtgagtgactgcgtttcggtgaggaaggggttcgctccttggtgtctagcaacctaccgtatgtattaactattaatgtgtccggttcatgtcactggtcgatgctgttttgccctcgaacgcatgatgatagtgtcccaaggctattatccagatatatgccgaaaaaaaatatgcgttttcagccaaaaaaaaaaaaaaaaggcccctaaaaaacaaaccaaa

SEQ ID NO: 144575 - DNA, 324 bp, Zea mays
  Clone ID: MRT4577_63338C.1
acgcgtcctcatgcgaccgtgggaccaagaaatccatcgagaggccgtcgacaggggattcaatggcgttgtcgtttagcagcagtcaccgtcgcctcatgctcgcagtcgccgacctgctctacgtgcttgcggatgccagcgccagcgccgtaaccttctgcgtgccggggtgggccatcccccacaatctggtcccgagctgccgctgggtcgtgaccagccggacctgctggatcgggccaggcctcccctggccggggctttagaggagatgctttcgggagctggcgtacattccggggtactgtccgggcacggggc

SEQ ID NO: 144576 - DNA, 587 bp, Zea mays
  Clone ID: MRT4577_63339C.1
aaaaactccgggttaccggctaacaattagcattatattcagaggagatacacgatgttcagccgttgttggtgcataagttaggaacaaaagggaagcccaaacaaacaagcagggtctccactattcttatagttcctaaatatcttctctacccctgctagcactgtatgtacaccttaaaaaaaaagttgcaagtcgtcacacatccgaagaagaatcctttcttcggtgtgcatcatcaccagcagatcaaactaattaagcgatcgacattacactgcttcccgataaactagatgagttaactcgatcttgcttaaattcttcttcttcattttatctctactgcggcagccccgggccgacgtcgtcctgctgcctgggccttgcaacccacagcgtgctgagcgcccggaggcggtggaagtagtcggcgatggcaagcagaccacgagcggcctgtccggtggtcaggatgaggtggagcttgtggagggtctgctgccttagcccatttgcctgcatgacgaagctctccatagaggccaccgtgttcatggcgagggatatgtggcccatgaagg

SEQ ID NO: 144577 - DNA, 477 bp, Zea mays
  Clone ID: MRT4577_6333C.1
cgggactatacagaaccctactggaatctcatttattcactacaaaattccaaaccatagcttaacaatgctctatgggaaccaagactaccacaacattacattactactgccttgtaacagccacaatctgcatgaagacaagctcacagcatcagggggggggtcaacaatgttgacactctcactctcatcaataccttcactatatatatcaccaggctacatggagggcattaccagtggagccgaacttttcctcacacattctacaagatgcttcatcaatcatatctttcatgacaattcagcactcaacactactcccgaggttgcaaaccggacacgaaaagacagaagccagcttggccatccgattcttatgacggagattatcagctgacttctctcttccccatggttcagcttctattcttccttgacgaggtgaataagagaaactagcatcgcgagggg

SEQ ID NO: 144578 - DNA, 189 bp, Zea mays
  Clone ID: MRT4577_63340C.1
tgagtcgtattattcgtacacagggatttcatactcatgttgttgtccgtcacgaaacaacggctttttgttgttttcgttcaatagtcgtacataacgcggagcgaaatcagttatcttgtgtgcgggacgatatctgcctcccattttgcacacacgaaacttttgatcacaacggtgttttacctc

SEQ ID NO: 144579 - DNA, 105 bp, Zea mays
  Clone ID: MRT4577_63341C.1
cgacccacgcttccgcccaatagctgcttcacgcaaatgatttatctgggttcttgaggactatgatacagcaagcactggagtcctacgtctcatatgtgagcg

SEQ ID NO: 144580 - DNA, 362 bp, Zea mays
  unsure (1)..(362): unsure at all n locations
  Clone ID: MRT4577_63342C.1
gcggggaagatgaatgcatttctcggatcgttcatccggaacaataattaaaaaaaacancttnnnnnacatntccnttttttcttctctanccatatctnttattcccntacctttccnccttnccaacantttccccccttttctggggggggggggcgctcttgttcgccctctttcgcctggcttttggggtgggttctcgcggcttgaccggttcgtttgtcttcgttctagagcccgctcctttcggtttctttcttttctttttcgcccttttctccttcttttcccggctcgctcctttttgcgctctccctttttgtttcttttggggtgcttttctgtgccttttgccctct

SEQ ID NO: 144581 - DNA, 523 bp, Zea mays
  Clone ID: MRT4577_63343C.1
ctcgaggccggccgggccgggtctcaagctgaagagatagtcctccatattttttcagatgcagctttgctaggagatgctggctcttaataggaatctccccgccaaggacaactgacttaatcaacaccattttgaggattagaagacgctggcaggtcccatggagactagaagctatcatccttctaacctggtgcatttggaaaagtagaaataattgggtgtttaataagatcccgccatggtggatgattgtcgggaaatgttcaaaacagaattacgtctactgtgtcaccgagtcaatccagagataggagataaaattaggacctggattcagtgctatgtattgtaatttttcgttttctttcctgtaattgttttttctattttctattttttattttgactaagcaataaaaatactataggccctccctacagtaatttaagcttcaaaaaaaaaaaaaaaaaaaaaaaaaaaaaaagaaaaaaaaaaaaaaaaaaggcccctagggcc

SEQ ID NO: 144582 - DNA, 184 bp, Zea mays
  Clone ID: MRT4577_63344C.1
cccacgcgtccgcccacgcgtccgcccacgcgtccgctaaattttagaagaagaaaaattattgtaccaccaattagtataaataattaagggcgcgcttgccttagacaccctccaaccaggtcgctcgctctaggggatccgccccttcgtccgcttgcctgtcgcgtcttacgctcttcta

SEQ ID NO: 144583 - DNA, 1155 bp, Zea mays
  unsure (1)..(1155): unsure at all n locations
  Clone ID: MRT4577_63345C.1
cctcgaggctggcgcggaggttgaatagatagatagattcgtcttggtctgtatctctggaaggacgcaggcccagcccacagctttccgttccagcctgcaacggcccacagctgagaaggaggaggcggcgcccacggcccatcagaggcgtccacgtccccggttcggtccagcccagtccagtccgcctgctgcaccggcggcggcgtgtccgcctcctccaccacgtcgtccccatcctccagttcctcctctcctcctcccgtgcgcgtgcggccgtgccgccgtcgggacccacatcccgtggcgtggcgtggggagccacccgcaagcagaataaaacgtgtggctgtccctcgtctcccccaactccagcacaattcgggcacaatggacgccgccgtctccctctccctgcccctgcaccacgcccacgcccacggcccgctcccgctcccgcacccggcgccccaccacctacactgcgcggtcccgctcaggcaccacgccacctccgcgtccgccgtaaccgcgccgccgcccaagcctgacgttcaggctcctccatcggcgcgcctgagccccgccctcgccgcgccagcgccaccccgctcgtccccggccgccgcgcgctcctccagccgcgccgccacgggatacgcggcagcgctggccgacgcgtgcgtccgcgcgggcacgctgcgccgcgccgcgcgccacgcgcgcgcgctcctccgcctccggctagagcggcccctggaagagggcgccgccgcggtcgaggctgccgtgacggtcgcggggcagcagctggacgcgcgggtggccgcgctcgtcaggatgctcgtcgccaagggcagggccgggatgctcgccgaggccctggccgagttcgccgccatctgcgaccacctgctgccgacgcgcccgcgcgcgcgccacgcctactagctaatacccaacaaacagcacgaaacacttcatccaccagcgtttgtactcgtgcatggccttcgttcgccatggatgcatgctctgtactcttctacaagcaaattctgctacatggcgcctagccaacgttgtgtacttgtgttgccattggttatcagtacaacgctacggagcccataaatcttcacttannaaaaa

SEQ ID NO: 144584 - DNA, 938 bp, Zea mays
  Clone ID: MRT4577_63346C.1
attgggaccctcgaggcccggccgggaacccagcacagcacaatggacgccgccgtctccctctccctgcccctgcaccaccacgcccacggcccgctcccgctcccgcacccggcgccccaccacctccactgcgcggtcccgctcaggcaccacgccacctccgcgtccgccgtaaccgcgccgccgcccaagcctgacgttcaggctcctccagcggcgcgcctgagccccgccctcgccgcgccagcgccaccccgctcgtcctcgtccccggccgccgcgcgctcctccagccgcgccgccacgggatacgcggcagcgctggctgacgcgtgcgtccgcgcgggcacgctgcgccgcgccgcgcgccacgcgcgcgcgctcctccaccttctcctccggctagagcggcccctggaagagggcgccgccgcggtcgaggctgccgtgacggtcgcggggcagcagctggacgcgcgggtggccgcgctcgtcaggatgctcgtcgccaagggcagggccggggtgctcgccgaggccctggccgagttcgccgccatctgcgaccacctgctgccgacgcgcccgcgcgcgcgccacgcctactagctaggcatgctgcttaattaatccagtacagtgcccaacaaacagcacgccttttcgacacgaaacacttcatccaccagcgtagcgtttgtactcgtgcatggccttcgttcgccatggatgcatgctctgtactcttctacaagcaacttctgctacatggcgcctagccaacgttgtgtacttgtgttaccattggttatcagtacaacgctacggagcccataaagcttcaataaaaaaaaaaaaaaaaggcccctagtacacaatataatgtagaaaagacttctctacagtagtttagaaaaaaaaaaacaagagggcgg

SEQ ID NO: 144585 - DNA, 384 bp, Zea mays
  Clone ID: MRT4577_63347C.1
aatacaaaaaactatcgttggatctaatattaaatagtatagtctgcttgtacgttaggtcaaacaagtgattgtacaaaattgagctccattttagaagataagctctggtcctctttccttgaatccaaacccaagctcttggttaccttcggaaggagttggtgagctcgacggagctgaaggaccccaggttcttgtacggccccggcgagagcccatcatcagcggcacccatctgccgcctcgcgtccacggcgctccgccgtctcctgtcccacaccctgtacgccccgaatgcagcagcagcgaccaccgccgcgacaccgacaacaaggagggccgccttgaccccgctcgcgcgcccaccgccgcgccctcgca

SEQ ID NO: 144586 - DNA, 405 bp, Zea mays
  Clone ID: MRT4577_63348C.1
acaaaaaaaaaactatcgttggatctatattaagtactagtatagtctgcttgtacgttagatcagacaactgattgtacaaaattgagctccattttagaagataagctccggtcctctttccttcaatcgaaacccaaactcattgggtccggccgatccttgtcgccttcgcctcatgccttggttaccttcggaaggagttggtgagctcgacggagctgaaggacccaaggttcttgtacggccccggcgagagcccatcatcagcggcacccatctgccgcctcgcgtccacggcgctccgccgtctcctgtcccacaccctatacgccccgaatgcagcagcagcgaccaccgtcgcgacaccgacaacaaggagggccgccttgaccccgctcgcgc

SEQ ID NO: 144587 - DNA, 626 bp, Zea mays
  Clone ID: MRT4577_63349C.1
ccggtgccgtcagcccgtcatacataacttcggctactatcccttagtaaacccttctgtcttcttcccgcggactgctcgatctatctgtccagcagacttgaggttacgagcggccggaaaccggcggcaaccgtcagaatggcgctcgtattgcatatactggggacgggaaacaaaaatgcctttaaggcactcattgatgcaaaatacagaggggtgagaggctgagatgaccaacgattttgagatgggagtctcgaacaagacccctgagtttctaaagatgaacccccttgggaagggtcctgttctggagactactgatggccctgcctttgagagtaatgcatattgcgcgctatgtgagcatcgcttgaaggacgacaaccctattttagggtcttgccgtattgaacaagcccacgttgagcagtcggatggactgttgctgcaacagcacgcacgatccttggtgttgagatggtactatgtacccaacgcgtcgtgtacgaacgtatatgctcacactactagaggaaacagctattgctgaattgcagagatccattgtggccctgaacacacatgttgacttgatcacatacattagcggacatactgat

SEQ ID NO: 144588 - DNA, 330 bp, Zea mays
  Clone ID: MRT4577_6334C.1
ttcttttctcatcaacctctgatgaccgcagcgaccctcgaggccatccgttcggtgcctacactgcacagcatcacctactgctggagctggtcggtcgctcatcaatggacaaagacgtgccctgtcaactcgcgctcgcgctcgcttgcatacgccgtacaccgcgctgatcctcctgtgccgcaggtcccacgccagcgtgcttataacgctcgacgacttcgactccatgggtgacgacatcgccaacgacacccaggctatgatggacacgtgtgccaacaggtgcaacttcaaacaagaagccgtactcgccgtgacggacag

SEQ ID NO: 144589 - DNA, 1009 bp, Zea mays
  Clone ID: MRT4577_63350C.1
tttaattcggcacgaggtcctctcgccggcgccgccgccgccgcgtgttccgtcgtctcctctcaccgatggcttttgccaaggtcggtgctgccccgcaattggagaaccgaggcgcgctgtcgaaaaggtcacgtaacgacgagaatgatgccaggacctcctgcttctggatatgaccggtcacctctattttacggaggaggtggtggcgccccacctccaattccgcttggaactggtagctatggtgctccatatccacaccttgggatgcgatatggctatggtccaccagtaggacctcctggttcatacggtcttttctcttcatatggtcacctgggccaatgagtggtatgggatatggcccaggacctgagctaggccgatatagctatgggtttagaggttctccaatgccggtttctagcccatggtctggtggagcattagctgaaaacactgacaacattgcttcacgaaagcgccgtggaggccctgatggactttctgagggtgactggacctgtcccaaatgcgacaacattaacttttccttcagaagcacttgcaacatgaagaaatgtggagccccaaggccaactccgggaggtaacacgagctcatctcgcaaggacaacagcaataaggaagcccctgaaggaagctggacctgcccagagtgcaacaacctgaactacccattccgcacggtgtgtaacaggaaaggatgctcgtacagcaagccagccccggcgaacaactgaacccaaccttcgcgcatcgtccagctattgttgtacccgtagattgtatcctagctagtcgtgtgtaatctttgaactgcacaaagatgtgtgcctggagacgagcgattcgattcattacgcttaatttgttcgttatgtttaaatgacttgctatactttctatgttcgaaaaaaaaaaagaaaaaaaaaaaaaaaaaaaaaaaaaaaagcttgtacctgcccgggcggccgctcga

SEQ ID NO: 144590 - DNA, 475 bp, Zea mays
  Clone ID: MRT4577_63351C.1
atacaatgatagacacctgcctatctatctatcgagagatagatacgaaagttgattcgctaccatgctagtgctacagcaagaaggcagcaagcggcgtgactgagatgatgcttatccagatgatgattattccgacgacgctaactgtccgcctcctgcaggtctatacctccaccgtgaatggactggacatcatcaagagggagtgtggccatccagagagaggcatcctctgtggtgaaagctgcggcttcctaccatgtctatacgggagccatgagctgccaaagctttgtccacatctgcatgatgtgatatctgacactagcagctatttgtaatttgtgctgccagaaacacgaggatggtacatgcgctgttacacttattgcatgtgcatggtgatctactaagtacagtataataaatatgcgatatgctgctatcgtgcaaaacgactaaattgatacga

SEQ ID NO: 144591 - DNA, 440 bp, Zea mays
  Clone ID: MRT4577_63352C.1
aacacaaatcacacaccaatatttttgcagcggaaatcttgttaccaaattttacaagttacaaaaattttatattattttatcagagtgattgcaaaagtataagtttgaaatacatgctagctcaagggaccatcctcattaagaagtatagaagggttacttagacttataagaaggccgagcccaccggcacttatcaccatcatcagcaacacaaaactatgacctggagtaacactaggttagtgttgttaggtggcgaccacttggtgaccatctcttgttctgatcttgtttcgtctatccatcttcagggtagttcattagcttcatcctgtggattaacccgcgtttggggtcgacttgggtcgtcttccgcatcacacgattatttatcgtccataattaactcgagctgaagttgcggggtcaacgat

SEQ ID NO: 144592 - DNA, 756 bp, Zea mays
  Clone ID: MRT4577_63353C.1
ccgggctctctcgatttctcgcggagcggccctccacctttatcgccgccgcctccgccgccgttgctgtgttccgtctcttcgccgatggcttcggccaagagaatgatgccaggacctcctgcttctggatatgaccggtcacctctattttacggaggaggtggtggcgccccacctccaattccgcttggaactggtagctatggtgctccatatccacaccttgggatgcgatatggctatggtccaccagtaggacctcctggttcatacggtcttttctcttcatatggtccacctgggccaatgagtggtatgggatatggcccaggacctgagctaggccgatatagctatgggtttagaggttctccaatgccggtttctagcccatggtctggtggagcattagctgaaaacactgacaacattgcttcacgaaagcgccgtggaggccctgatggactttctgagggtgactggacctgtcccaaatgcgacaacattaacttttccttcagaagcacttgcaacatgaagaaatgtggagccccaaggccaactccgggaggtaacacgagctcatctcgcaaggacaacagcaataaggaagcccctgaaggaagctggacctgcccagagtgcaacaacctgaactacccattccgcacgggtgtgtaacaggaaaggaatgctcgtacagcaagccagccccggcgaacaactgaacccaaccttcgcgcatcgtccagc

SEQ ID NO: 144593 - DNA, 1652 bp, Zea mays
  Clone ID: MRT4577_63354C.1
attgggacctcgaggccggccggggaccattgtcgtggatgttcatgggcacacggccaccacaccgcggcgcgtggccagcgcagcgaatccatccccatcctcatgattataaataaataataattttacacgccctcctctctctcgatttctcgcggagcggccctccacctttatcgccgccgcctccgccgccgttgctgtgttccgtcgtctcctctcaccgatggcttttgctaaggtcggtgctgcgacgcaattggagaacagaggcgcgctgtcgaaaaggttacgcaacgacgtgtctgtaagggagggggactggaattgtcctcagtgtggtaatgtcaacttcagttttagaaatgtttgcaaccgtggagcctgtggtgcaccccgtccatcaccgagtccaagtccaagaatgatgccagcacctcctgctcctggatatgaccgactacctctgttttacggaggaggtggtggcgctccatctccaattccacttggatctggtagctatggtggtccatatccacaccttgggatgcgatatggttatggtccaccagtaggagctcctggttcatatggccttttctcgtcatatggtcaacctgggccaatgagtggtatgggatatggcccaggacctgagctaggccgatatagctatgggtttagaggttctccaatgccggtttctagcccatggtctggtggagcaatagctgaaaacaatgacaacattgcttcacgaaagcgccgtggaggccctgatggactttctgagggtgactggacctgtcccaaatgcgacaacattaacttttccttcagaaacacttgcaacatgaagaaatgtggagctccgaggccaactcctggagctaacacgagctcatctcgcaaggacaacagcaataaggaagcccctgaaggaagctggacctgcccagagtgcaacaacctgaactacccattccgcacggtgtgtaacaggaaaggatgctcgtacagcaagccagccccggcgaacaactgaacctaacctccgcacagcgcaccatattgttgagacgtgtcgtcgaactattcttgtatccttagattgtatcctagctagtcgtgtgtaatctttgaactgcacaaaaatgtgtgcctggagacgagcgaatatattcattacgtttaatttgttcgttatgtttaatttacttgctatactttctatgttcgaaattataagtcccgtcattgttcccaacacagtttaaaaatagaagattcatttttttcttgcgcgaattggaaaatatccttggcggcctgcgatgataagaatatgttatcagaaactaaaatttctcgtactttttgctatgaaagagaaagatatatgtatatttgcgctgttttgtgcaaaaaaaaaaaaaaaaaaaaaaaaaaaatgtaaaataaaaaaaatgaaaaaaaaaaaataaaaagtagggtggtgagagattaaagagttaatagattgagattgtgaaggtggatgatattgtggataaattgggggtaaaggtataatgtgggtggtgaaagaaatggttggtgtgttgaatgattaattttaaggaatgtgaatgttgtgtaggagggag

SEQ ID NO: 144594 - DNA, 1438 bp, Zea mays
  Clone ID: MRT4577_63355C.1
cgtgggtcggctccctcgcggggggggtgcggggggccagcaccttgggatgctgcttcgtcgtgaggcgaaggcaggcgcgagatgccgctgccgccctggctgcggacggcgaaggcaagcgctctcaggccatggagtccatcagcgccagcaccacgctcgtcaagttcacctacgacgatatcaaggctgccaccgacggattcgccaggaagagtattattggccagggtggctttgggaatgtctacaagggggtgctgcgcgacggtgctgaggtggcggtgaagcggttcaagaactgctccgcggctggggacgccgcctttgcccatgaggtggaagtggtggccagcgtgcgccatgtcaacttggttgcgctgcgtgggtactgcattgccaccacacagagagaaggccaccagcggatgatcgtttgcgacctgatgcataatggcagcttgtatgaccatctgtttgctgccggagaatgccagttagcgtggccggtgcggcagaggattgccattggcatggcaagagggctggcctacctgcatcgcggtgcacagccagccattattcacagggatatcaaagcgagcaacatcttgcttgatgatgaatttgaggccaaggtggctgattttggactggccaagtttgcacctgaagggatgacgcatgtgagcacaagggttgccggaacactaggttatgttgccccagagtatgcactctacggccaattgactgagaagagcgatgtgtatagctttggtgttgtgcttcttgagcttctgagtggaaagaaggcattcatttctctcagcgagggacagagttttgtgctcactgattgggcttggtctttggtgcgaagggggaggacagtggaggtgatccaagagggaatggttgatcctggtccaactaaggtgatggagaagtacgtgcttgttggtgcactctgcacacatccccagctgcatgcaaggccgacaatggagcaggcgctgaagatacttgaggctgattcagtaccaagtcctttgattattcccgagaggccaatccctgttgttgcaaacctggccgagattgagaggtcagccagcagcagtggatcaggtcagctgtttagcccctctggtttccgatctttcattcatgcaaatgaggatgctgctctggtgtctccaaatgacacatgacgatttacttagacaattagtgagatgatatcactataattcactgtgtaccatatttgtttttgtttgctcgattttgttccatcggcttacaaactcatggcaaatattgtatatatcaatttgtagttttgccccaacacaaaaactgaagttcttgggtgacttcattgagcttttttggtgacatttccattgctacaaaaaaaactttcccatac

SEQ ID NO: 144595 - DNA, 239 bp, Zea mays
  Clone ID: MRT4577_63356C.1
aggcaccagttccggaatgtccgcccgacccacgcgtgcgtaataaagagcatcattgtactcatggtagcaacacatggtggaaatagggcggtggtgatcccacactccatgggcatcctctattttttgcattttatcaaatgggtcgcaacacctccttccatgatgggtcacggcgcaccacactggtgtgagaagcatattaaagctgctatgaatattgtaggacctttctt

SEQ ID NO: 144596 - DNA, 349 bp, Zea mays
  unsure (1)..(349): unsure at all n locations
  Clone ID: MRT4577_63357C.1
acgattaagcatttaagcgtcgtttaaacgctaaaatacgattagtagataaaatgtccgcatgttttaccaaaactgcgtagaacgtctgttctggacgtttaaacggaacgcacgttctagacgttctatgctcgtagcgtttgcgggccttaatggcctaatgggcctttacccaactgttgatccaacgcgcgcagccgntgatccatcgccgccagacgccatcgcgcccaaccgccgtcgcgcgcgcccaggagccgncatcgcgcgcacccaggagccgccagagccaaaccgctgcggtcgtcctccaccgccctccaggtacgccgctggccccctcctc

SEQ ID NO: 144597 - DNA, 353 bp, Zea mays
  unsure (1)..(353): unsure at all n locations
  Clone ID: MRT4577_63358C.1
ggacaggaccgcctcgctttnctcgggcagtcatggtatgattcgtcgacgtagagccctgcccttgcctcgttggattctctgtggtggtcgccgctgccggtcggtgcaaggtggaatgatgccgtgccagaatccccggagattgcagtcttcttcacacagcgctttacgctagttcccacgtcgagagcccacgacaatattggatggcgagggcgctgcgacacataagttgatacctcgccatatgcacaacggtgagtccctcttgtatggccatatctcagcagctgcaccacctgnggacttctctgccctccttccaccccccgagcaccctctgcatcacc

SEQ ID NO: 144598 - DNA, 381 bp, Zea mays
  Clone ID: MRT4577_63359C.1
gggggggggcctcatttaattgggaagcaatttgcaggggggggcttttaaaaagcattttttacaagctcaaaaacattcaaacgggaacaaaaaaacttaccctttgaaccggggggacaaaaaatatttaaggggggacccaagttacaacgacgaagcaacttgctggacacaaaggaagggaatattttttttttttaaaaagccacttagcccttaaaacccttaaccggtctttggtttttacccccctaaaggtttacaggggggggccccaaactccacaaagggagaaggacatttttttaaaggagcccttggcctttgaaggtggtttaaagcaggcacaacctggtccatgggaggcctgcatcgggc

SEQ ID NO: 144599 - DNA, 214 bp, Zea mays
  Clone ID: MRT4577_6335C.1
cctaccaccaaatgtcaatgcccgccgacgaaaccccctggcaagcgccgccgtttagctccatctccgagctagccctcacccgatccacccgtggcgctatagccgacggacttagtacacaaccgaacccaagccgccgcacaacgaggagctcctcctgacgcaccagtccctgctccagtaaccccctataggaacccccttccccacc

SEQ ID NO: 144600 - DNA, 520 bp, Zea mays
  unsure (1)..(520): unsure at all n locations
  Clone ID: MRT4577_63360C.1
attcggctcgagggagtgtgcagaaatgcccacactttttagaacacgcagatcctttgtctacagagagaaaaattgccttcatcccccaagaggatgcggtgaagtttaaactctgctcaggataaggacgggaccatttttacatccatgaaaatgaaccattcacagtgcaagaaggataccaaataccatgtacataattcttgctatgaaaagtttccccattattttggtttatcttcttttgaacaaatgacatcaaacttgtgaggtgtttgcatgtggccattaccgtcattggcctgtgaagcattggacatttatagataattgatataaaagaatcgccatgcccatggactaagaacgatgctggctttcaagcaaaaaagaaaaataatcattggttattgtatactgcctttttgtaatcctgtacaattgcatcacgggtggtgataaaaagaggaatattctgngttattttctagactggttattaaaaaaaaaaaaaaca

SEQ ID NO: 144601 - DNA, 305 bp, Zea mays
  Clone ID: MRT4577_63361C.1
acatgtgttcggaaaaacactcgttgacaatcaaaaaatcgagcggtagtgccgttcatccaaaaaaaaaaaaaaaaaaaaaaaaaaaaaaaaaaaaaaaaaaaaaaaaaaaaaaaaaacctaaaaacaaaacaaatccttaaggcgaggtgtgcaaatatgcataaaactggaaggtccctattaccatgcatatcagagtgcaccaatcaattcctatggctcagattttaataacaattggactgagccgataaaattacaacgggggcgcaatgttaaaaaccttggcaattacataaaat

SEQ ID NO: 144602 - DNA, 725 bp, Zea mays
  Clone ID: MRT4577_63362C.1
tgggtacctcgaggccggccgggccagcggtggggccgtccattggctcaatggccccgccgcccctagcccctcgctattgagtgcgacgaaggcaggctactcgagcaaggtagcatcggtgatggtggtggtcgtcccgactggctcatccagtggcgctgcagtaatggagacagccaaggttctacctcctccacctcctaccacgcaaatggtggtgctccccacgctgcttgccccaagggaaggatctagggatccccctcttttactattgagggctcaaaggcagaggagcagaggttggtcaagggggcctccgtccgggctaccaaaagcttggagataatcgagggctccctcgtcgctattggggaggcggtggcgattgcccgtgcgtcaattacatgggagatgctccccttcggcacgtgactccagtgctgacgtcatctgtagcgatgcctgacaagacccattggacagagccaagtgatactgagaccgtatgtggcgatgtctcatcccattgcgagacactcattgccagacactctatcaccccccctccggcgtgtcgtggcgtcatccgagacaatgtgtggtggtgacgtgtctaactgtggctgacgtggggtaatcgtgcctgccctacctctacgtcagggggtacatgtgtgctcctatcgtgcgcgtgacagggaggcatgtcatgggccaca

SEQ ID NO: 144603 - DNA, 443 bp, Zea mays
  unsure (1)..(443): unsure at all n locations
  Clone ID: MRT4577_63363C.1
ggtgtgttttttttttttttttttttttttttttttttttttttttttttttttttttttttttttttttttttttttttttttaaaacccggggggggttttggcccaaaaataacaacgtttacctgccggtcccaaacaacagggggggggggggggggacccacatgacccccatgggggaaacgggaatcgaacccccccccgaaaatccatagggctctagggcaaggccggggggttcatttttcatgggggggggggccccgggggcaattcctttggtcacccccccccggggcccccgccggggggggcttctcgggggccttctcaagcggggggaagttccccttctcctttgtccgcggggggggggggggcttgcggtcccncttcccctcgcgcgccntggtgttngagggggggggggggccccccc

SEQ ID NO: 144604 - DNA, 293 bp, Zea mays
  Clone ID: MRT4577_63364C.1
attaatgaaggaaagcggcttcttaattaattacaaagggtggacgggaacgtgtagcacaacagaggatgattttcgcaaatgcacaatcgactacaaactccgatgtgtctatgctatggcacactgctcaagccggaaggtgtcaggctacctcaggcttctttagaaatcaagatgctggacaggtaacgaaactggcgacccttcctgaaccggtctgaagcgtcctgcaagaaagagaacagagctcacgcaggttttgcaaagcccctggtggactcactgcccgt

SEQ ID NO: 144605 - DNA, 348 bp, Zea mays
  unsure (1)..(348): unsure at all n locations
  Clone ID: MRT4577_63365C.1
ggggggggggctaaaaaattttctctttcctctagcctttttntgtgtgtgtggcgtgttgtggggagtttntgagacctccncttntgctagtgcttaccgggcaccaaccacccaactctttacttcccaactatttttctgtttgctgggagcctcngnattttaatgcgngggccccagactacccacatatctatcttaatctnatgattcttatccattatgtgtgcacattgtatgtttgggttctttnggtttagttctggggttcttnctttttttatttaaantaatctntntntgagggggcgggcgtnntaactannaagtatcctttntgnnnnc

SEQ ID NO: 144606 - DNA, 886 bp, Zea mays
  Clone ID: MRT4577_63366C.1
tttggggtaccctccgggtccggccggatttttaaaaggtgtttcgtgcatcgtgggcacttgcccctcacccacgatcctcacaccggcgccgctccttcgtccgcctccgccctccgccgccgctcctcagtccgtctccaccctctgtcgtacttccgccgccacagcgccgccctccctcctccgcctactgcagcggagaacatctacagtttgaggttcccatatctccctttggaaatgcatccccctctgactttacataggcatcctatgtgtgctgagattattgaagaattccagaagtgccatctggatcaccctatcaagaagttattcggagagcgcacagaccttaaaatcaagctagaccgctgcttccgacaggaggtcagtgagatctgaacagaagtgtgaaggtatatccttgagacccagactctagtagtagtgaccaccatttccctgatttgatagcaaagtcttttaaattttctcctttacccactccagaagggtagatgtagatatcaatttgactagtgtaaggctaacttccgcaacaccatgtatgcgggcatgtataaaacggttttgcactgtagatatactgttttcatagtgaagtttgaaatagtgaagtttgaaatagtgaatgagatagagagtggaatagggagactgctggagataactggggagatgagtggcatgaaggcacccgaggtagttaaggtggtcagtgatgaagttttctatttgtttcatcctagatgttttttcttattggtgccctgtttttcatgtacatcgatcttggcgacctcttactgtagtatggactatgaaattggtgcccaaaaaaaaaaaaaaaaaagcggcc

SEQ ID NO: 144607 - DNA, 118 bp, Zea mays
  unsure (1)..(118): unsure at all n locations
  Clone ID: MRT4577_63367C.1
aactcgttagcccaacacaggcgtgctttaaggaaagattaananaagtanaangaacttcggcaaacacganccccgcntgtttaccaanaacatncacctctagctaacnagtgtt

SEQ ID NO: 144608 - DNA, 361 bp, Zea mays
  unsure (1)..(361): unsure at all n locations
  Clone ID: MRT4577_63368C.1
cttcttcataacatnccggggcacgcaccattcggaatgttttgataacacaacnctcttacaanaaaatcactaaaatcctctccattttccaaaagcaaaatcatgaataactcttcaatccatttgatcaaaaacacaattcctaacaattcaacgtatactacaaatgcctcacactacttttttcaaataaaaagaatctataaaactgacactacttactaatggaataaacataaaaacatgcaattttggcaatttccactgatactaatatagtaatttacatatccacttcccctcaaatcaaatacaacaattcactctctgactctcctctgctatgcattttatcctg

SEQ ID NO: 144609 - DNA, 181 bp, Zea mays
  Clone ID: MRT4577_63369C.1
tacgaattccagctgacccactccaactgcggaaaatcccacgaaagatgggggacgcggcaacacggaagaagaggacctcgacagaccgtgcgacgacttcatccttcgttctcggcctgcgatccgttttgcatctccaccacatacaccggctaacgggcgcgtggacacctgtttg

SEQ ID NO: 144610 - DNA, 259 bp, Zea mays
  Clone ID: MRT4577_6336C.1
ctctttaataatttcttgtggcaaagaaattcagctcgtgagttttacttgtcagtgacagggcaacgtgcctcgaaccaacagcggaaacaaaagtgcccacagccagaaaaagaaagatccaagagcaaaggatcacccaacaaaaaatatcgggtactacaagcaccatgttgaacacgggacgaaaccaggtacaccgggcctcaaaatacacatggccagcgtgcaagctctggatggatgaaaggattgagag

SEQ ID NO: 144611 - DNA, 440 bp, Zea mays
  Clone ID: MRT4577_63370C.1
aaaaatggaaccccccgccttttacgggggccaaaaaaataacccccccagggcccaacccaccccaaataaagtttaagggggccccccgccccaactggcgaaaacttttgggagaaactgggccagccagaaactggggcacactcaaaactgacaacaaaccggttagtccacctccttaattttggggccagggcccccccttccgggaggggggttcttgtccatgccgccagggccccccattttttaaccccccccctggaacattttgggaaaaaagggggtgcaaaggctttccacctcctttattttggccccaaactcgccccccttggggaggtggttggggtccacccagcttatggccccgtcaagggggccctcaattttttttttgggatgggccgggagtttggaaccaaattttttgccct

SEQ ID NO: 144612 - DNA, 365 bp, Zea mays
  Clone ID: MRT4577_63371C.1
cccaaccaaataaattttttgaaccctgagcattgatgggacaaggctacattctattacaagatgccactcagtgtccaatttgggggagtaactgaaacaactctggggtgattttttacaactaccccagtaagggggtagcaaatctagcccgaaaaaaaaaggacggcaacaggcttaaaactactactggggaacgaacaagaaacgccccggccttcgttttggttccgggggcccaagaggaaccccggaaaaattggggggggacaaaaagcggggaaggggtttccctttcccaagaataccccgagcgcgagggcccccatttcccttgtttggccgggggcctttgagaaaaa

SEQ ID NO: 144613 - DNA, 1179 bp, Zea mays
  Clone ID: MRT4577_63372C.1
cttacgcgtgggcggacgcgtggggcggttagctcgctctcgcccgagagcatcgagcacaacgatctgctcatagttgggcctggcgtgctcggccgaatcgtcgctgagatgtggaaacaggaatatccaggttgcaaggtttatggccagactgcaaccacagatcatcacagtgaattgactgatattggtatcattccctccttgaaggggtccgtaccgggtccaaaatttccatatgttatcttctgtgctcctccatatcgttctgaggattatgctggagatctgaggattctccttgtgtacccattggtcaaagcactcgtactgatgtgcttctaaaagctgaaaatgttgtccttgaggcaggcggctgtgttcttaggctagtaggactttataaatcagatcggggtcctcatgtttactggctgtcaaaaggaaccttggatgtgcgtcctgatcatatactcaatctgatacattatgaagatgcagcctctcttgtaatttccatcatgaaaaagagattacggagctgcatctcttagatgtttacattgcctgattcctactgaattaaattgggccaaattggtgagatattccttgacttccattacaaatcagatcggggtcctcatgtttactggctgtcaaaaggaaccttggatgtgcgtcctgatcatatactcaatctgatacattatgaagatgcagcctctcttgtaatttccatcatgaaaaagagattacggagctgcatctttgtgggttgtgacaacgagcctctgtccaggctagagatcatggaccgtgtcaacagaagcaggaaatttgacacacagtttcatggcttcactgggactgatggtccgctggggaagaggatggacaactccaaaactcgggcaaagcttggatggcagcccaagtatccgagctttacagagttccttggtctcagcaatctctaactttcatgcgatgtcactaaatacctgttattaaagatgaatatactgatacataaaagagatgatgacagatttggaagtggaatgttgtttgcttataccgcagttttcgactatcttttgatttcttctgttagatcttgtaaagcattgcagcatggtgtggcatgtacctgtgttgccttctattcgcttc

SEQ ID NO: 144614 - DNA, 1969 bp, Zea mays
  unsure (1)..(1969): unsure at all n locations
  Clone ID: MRT4577_63373C.1
cgagccggcgggttgattcgaaaacggcatctcgtccaccctcgggccgggccgggagggcagcagcaccacttctaccgcgtcccattattccgcagttccatctccatccccaccatctcgtccaccagtcgtgtcttccctatctccacgctaccgcacctgtcgccgccgcctccgccctctttgctcccggccccacttcaagcccaagcgtccgcgtctcccgcccgcgccgccacgcctcgatgtccgccgccgccgattcctcctcctccattgtagtatcgggtgatgcagcggttagctcgctctcacccgagagcatcgagcacaacgatctgctcatagttgggcctggcgtgctcggccgaatcgtcgctgagatgtggaaacaggaatatccaggttgcaaggtttatggccagactgcaaccacagatcatcacagtgaattgactgatattggtatcattccctccttgaaggggtccgtaccgggtccaaaatttccatatgttatcttctgtgctcctccatatcgttctgaggattatgctggagatctgagagtagcagcttcaaattggaatggaaaaggctctttcctattcacctcgagtactgctgtgtatgactgcagtgacaatggattctgcagtgaggattctccttgtgtacccattggtcaaagcactcgtactgatgtgcttctaaaagctgaaaatgttgtccttgaggcaggcggctgtgttcttaggctagtaggactttataaatcagatcggggtcctcatgtttactggctgtcaaaaggaaccttggatgtgcgtcctgatcatatactcaatctgatacattatgaagatgcagcctctcttgtaatttccatcatgaaaaagagattacggagctgcatctttgtgggttgtgacaacgagcctctgtccaggctagagatcatggaccgtgtcaacagaagcaggaaatttgacacacagtttcatggcttcactgggactgatggttcgctggggaagaggatggacaactccaaaactcgggcaaagcttggatggcagcccaagtatccgagctttacagagttccttggtctcagcaatctctaactttcatgcgatgtcactaaatacctgttattaaagatgaatatactgatacataaaagagatgatgacagatttggaagtggaatgttgtttgcttataccgcagttttcgactatcttttgatttcttctgttagatcttgtaaagcattgcagcatggtgtggcatgtacctgtgttgccttctattcgcttctgttaactcatgaaagcattgacttcaatacctgttaattgtttccatggcttcaatctctggagtgttcgatggaataccgcgtgtaataccgaaatgatcatgttcttcaggcgagatcaccaccaaggaccacctcgactaccagaagattatccgcggcgccatcaaggacatcggctacgactcgtccgagaagggcttcgactacaagacctgcaacgttcttgttgccattgagcagcagtcgcccgacatcgctcagggtctgcactatgagcaagcgctcgagcagctcggtgctggtgaccagggtatcatgttcggatatgccaccgacgagacccccgaactcctccccctcactctcctcctctcccacaagctcaacaaggccatgaaggatgcccgcaacgaccgctccctcccatggctgcgacccgacaccaagaaccaggtcaccgtacaagtacgcccacgaaggaggtgctgtcatgcccaagcgtgtcgaacaccgtcgtcgtctctgcccagcacagcgaggctatctccactgaggagctccgncagggagatcaggagaggatcatncagaaggtcattcccgncgagctgctcgacgacnagaccgtctacacatcca

SEQ ID NO: 144615 - DNA, 328 bp, Zea mays
  Clone ID: MRT4577_63374C.1
accggattcccgagccgccgccctttttttttttttttttttttttttttttttttttttttttttttttttttttttggattttatttcattggagttatattgcatgagagggggggccaaacccaaaacaaagccccgccaacataaaacaaacaaatggaaacccacgtggcaaaaacctgaaaaaataacaaccggcaacctttcaccctggagccaataattcagaaaattaaattaccggttcccccaaaacaagaaccctacagaataaacgcaaaaaaaatattataaccaaccaacttaacacaaaaaccgagggaaa

SEQ ID NO: 144616 - DNA, 253 bp, Zea mays
  Clone ID: MRT4577_63375C.1
gtggtggaggtctatctggttccaatggcggactgctaagcccaggcacatgcatgcattcaaattaaccctagctgaactgctcgcatgcatgcaatggcgtacttgtacatgcatgcatgctagctagctctcctctttgttatatctcctgcatgcattccgcgcttacacacgtttgctccaagttaagttgatgaatattgcgtccatgcatatgcatggtcgagcagaggcggcatggttcgacatg

SEQ ID NO: 144617 - DNA, 488 bp, Zea mays
  Clone ID: MRT4577_63376C.1
aaacccaaaaaaaaacggaggccctgcaaaagaaaaaaggggggggcaacaaagggtttcaccgggaacccaaacttacttatcctaaaattaatggaaccccctaaggcttcccgaagcaggcaggtcaaaccaaaaaggagtaaaaaaccgattttactttggttttaagccattagcgacattttcggggatcttgccactgatctcgggataataaaatcaaacggccagtttaagggccacctctttgggggcactgattccaaaggaaggtctcaccaaaactttcacgttgccaaaaaacaccccaaagagcaaacaagggggcaaccttaaattgttgggaaccacgtaagttccctcacagggttgcatgccagggatgcttataacagcattaacagcctaagccaagctttcctttactccaagccaatactaataaactcgttaagtctttggatccatgtttccccaggcttttg

SEQ ID NO: 144618 - DNA, 289 bp, Zea mays
  Clone ID: MRT4577_63377C.1
tccgccccgcgtccggtggttgccccaccctccttttggttggtggcgggtgcgccggtgtctctctcagcccctctcgaaccggatggccacactgccgcgccgtctgtgctcgcatgtttcactgctctggcttttcgccatggtcggcccacgcttctttcccgtgcttgctgtcgcggtgccgttgttctcactcttctccctgtttgcctcggtcactgcatagtctgcagtagctggattggtgctgtctacatccatggctcgttcttgtgctcgttttcgt

SEQ ID NO: 144619 - DNA, 738 bp, Zea mays
  Clone ID: MRT4577_63378C.1
aattcggcacgagggcgccgagaggcagaagggctggggcgcggccgcgcggggaggcgtcaagcagtttagcagccatgagcggcggcgggctggaagtgcaggttcacgtggtgggcggcgcccggagctgctttgccgcgctcccgcttcacctcatccacgacttggagcgcacctcagccaccggcgacctcccgcccgtcctcgcgctcgaacttcgcggtcccgccggcgcccgctggtccctcgcctggtccggcgccgcttcccgatccagcgccatcgaggttgcacaagagttggcagactgcatctcgctgcctgatggaactatagcacagttgagcgtagctcgttctctggccaaagctgactcgatcagtattgaaccctacagtgaggatgactgggagatactggagagccgtgctgatttggctgaagaaacaatcttgaagcaggttggcatcgtttatgagggcatgaaattcccattgtggttggatggacataatattgtgaagtttgttgtcttgtcatctttccctgagaagacagttgttcaacttgtaccaggcactgaagttgttgttgcacctaaaaaacgaaaagagaagccttctcaggatctacaaaagcaaagtgcactgaaagaaacagtcaaaataaaggcactcctgcgtgttcaagcagctgataggaagtatgcacatacattcaaatttgaaggtgtcg

SEQ ID NO: 144620 - DNA, 270 bp, Zea mays
  Clone ID: MRT4577_63379C.1
taccggattcccagattcgagccacgcctcacgaactagaccgctagcttctcccccttcattttgggtccctgtttcctcggcatgtatcaattccagagggggcacacacatcattgtaaacgagtaagtaaccacattcaacatctgtggcaaatgggaacgttgactatggcaagacggccaccacaggacacctgatctacaagaaaaaccccttgacctgttaaaagcctaaaaaaaattttccggaatcctgatgttgacaac

SEQ ID NO: 144621 - DNA, 205 bp, Zea mays
  Clone ID: MRT4577_6337C.1
actatacaagagctatgacttggcttgcccccttccttaacttcgaatttcgcttcaggatgacttaaccaccaattcctttggggagggccaagaaccttgatctggcttctttaaaaaggtggaaagtctccaaccctgcgaagtttcatatctctaatctggaacccatatatttgctgtatatagggacaattttttcaag

SEQ ID NO: 144622 - DNA, 241 bp, Zea mays
  unsure (1)..(241): unsure at all n locations
  Clone ID: MRT4577_63380C.1
tcccgctcccccacggtactcatccgctagcctgcgattcctccntacgccaccgccacctagcgtggagtaccgcctccncccttctccnatatcttcatcggcgaacaaatcccaccacatcccgccccttccatggagtccgtcgttaaccctaatgcatacccgcttgctgatgcccaacttacaattgatatcctccatatcatccaacaggccccctactacaaacagcttaata

SEQ ID NO: 144623 - DNA, 311 bp, Zea mays
  Clone ID: MRT4577_63381C.1
atattgtacaccacatcttccttgtagcacaacattctgaaattatatggttattggaatgatgttgatcgggagttgagataatgcctgaagaatgagtacgtagataacatgaccaagagcagggagcatggcattgcattgcgaaagaaacttttcaatcctccagaggaattcgaaaaataaatagtatattcactcgatgccttggctgagagaagacctaaagactctgggtagatacctgaaagagtcctggcttatctagtctccataatcctttgaatggaaagtgacctgtgagagattga

SEQ ID NO: 144624 - DNA, 278 bp, Zea mays
  Clone ID: MRT4577_63383C.1
atatacagagagctttttaatctggaaaatgcgactctacactgcctatttaagcaaaagatgtgaacagatttatcagtagttctatgaacaggtcaatctttttcctaaaagcaaaaaaagcttgatcttctttttttttggggtgaggtttgcaaaaaaaggggatgacccaatattatccccattcccccattgggaaagaaaaggaaatgccccccgaaaacttggaatatttgccttgtttgttcagcagccctacaaaatgtggacggggc

SEQ ID NO: 144625 - DNA, 603 bp, Zea mays
  Clone ID: MRT4577_63384C.1
agtcatacacattgccagcacactacatgcttccacagtacatgttacaaacataccacggttgcaccacagaggcttgcatcgttcacacggacccagcgtttactaagacagacgttgagcgactgatctggctgaaactatcatctacaatcttggagggggacttttgtgcttgtccttcttttagctctgtttgcttttttgggaccatttgctcatagatacaatttgcaatcggatggccaccatttcatgaactatctattcattccctaaagaaatgaacaacctttggctccatgttgtcagacttaactctcttaagtatataaaaaacttgggatctaagattctacatgaaatattggttcataccaacagcactacaacatattgggtatttcatcagccttttaaaaagctacctgggttttagaaacttatcatgacccagcttccttggctagtttatcagccttttaattacatcacacttagtcgaattacatatttccaaatattgcatacctgaaaaatcaataaaaactcaaactccatattgccattgttatgataattaagctcctctactgctggtta

SEQ ID NO: 144626 - DNA, 450 bp, Zea mays
  Clone ID: MRT4577_63386C.1
accatttttcttgtctgtttattgtgctcatgtagaagttgcaactctaggctatgctaacttgcttaggactaaaagttttttttgcttaggactaaaaggctttgttttttttctcaaatggctgttcctaaggtattttttgttggtccaaatagcatgtaaataaaacaggtatgttatcccaaaatccaaagcataaggaacttattgagtattgatttatctttagcaatgtattaaaagactttgttgtacatttctaaattatttttctaaacttatagcttgtttgtagagtattgatttatctttagcaatgtattactagactttgttgtacatttctaaattatttttctaaacttatagcttgattgtagctcggaaactgacagtacttcctgttttaacgatagctctggcaaagggaggcagcaagcttgcatt

SEQ ID NO: 144627 - DNA, 1466 bp, Zea mays
  Clone ID: MRT4577_63387C.1
gtgaccgggatccccatccgttccagccccccagaacccagagctccaaacctaggccggagccgcggtgcaagcagctacgtggattggacttggacgtctggctctggaggtcccaagttcccaacgcttgctggagttgagatctggtgggcttccggaggagacgccgacggtttgcgaggtttgctggctccgtggcgtcgcggaaggtcatggagcaccgcgccttcgactgcagcgggagtgatgatgatctccctccaacatatcaaattagagtaccgagaatgcatttcagtgggaacagaaggccattagcaggcgcattttctcagccaagaccacacaacaagttggatagcgatatacatcagattgagcaacaggcatatactggtgttcttagagcattcaaaatgcaatcggatgccctgacatgggaaaaagaaagtctaattactgaactaagaagagagttgaaagtctctgatgtggaacacaggatgctattaaacatggtcaatgaagaggaggctatccatacaataaggcagtcaaggcagggatgtggaatgcaatctagcttgccttataatagcgtagttgatcacaaccttggacctatcaagcggcagaagaaatcacatcccatctattcactccctgtggatccccattcacccagcatgcctttgaaagcattggtgggcaacaagacatatacactggcacctgaaacataagacggggatctgcctatcaaacccttccacatcaggttggttggctggcatctgatggtgctacgaaaggtatggatgggagaagcggaaggtatcacacgaacgagtattatgcttcacataatgacatggggcttttgaacttcaatcgtactgacatacctgatactgaaactcttgtgaaaaaggtggagagggtattatcccggccagatgtgtatgcaattgaaagggcaaaggaactgcttataggccaagagcagtcattgcttgatgcaattgccaaacttgatgaagcatctgaccatgaaagcgatgatatgctagttgggagccggatacacgccaccattgggtgacgcgggcagcacgcctctgacacggggcgatgctttggagttcagacctctggcagcaggcggagaggcaacgatatgtgaaatagtgctgtgtattgtaaaacgctacctgttgttagtccggtagtagcctagtaggttaggttcttttggcagcctggcaaatctgtgcatgcgccatgcagtgtgatgggaatatatgtcttgagcaccatcacatgtgatgtgatgctgtctcgtttcatcttcaacctgagtaagcccgactcctcgaaatatgggtcgggtcactagttgtagtattgtagattgattgcccttccccaagttgcacaacttggaaacatgggtcggttttact

SEQ ID NO: 144628 - DNA, 2028 bp, Zea mays
  Clone ID: MRT4577_63388C.1
aattacctggatccggtgaccgggatccccatccgttccagccccccacaacccagagctccaaacctaggccggagccgcggtgcaagcagctacgtggattggacttggacgtctggctctggaggtcccaagttcccaacgcttgctggagttgagatctggtgggcttccggaggagacgccgacggtttgcgaggtttgctggctccgtggcgtcgcggaaggtcatggagcaccgcgccttcgactgcagcgggagtgatgatgatctccctccaacatatcaaattagagtaccgagaatgcatttcagtgggaacagaaggccattagcaggcgcattttctcagccaagaccacacaacaagttggatagcgatatacatcagattgagcaacaggcatatactggtgttcttagagcattcaaaatgcaatcggatgccctgacatgggaaaaagaaagtctaattactgaactaagaagagagttgaaagtctctgatgtggaacacaggatgctattaaacatggtcaatgaagaggaggctatccatagaataaggcagtcaaggcagggatgtggaatgcaatctagcttgccttataatagcgtagttgatcacaaccttggacctatcaagcggcagaagaaatcacatcccatctattcactccctgtggatccccattcacccagcatgcctttgaaagcattggtgggcaacaagacatatacagtaggtttggagtattcctgatcctgctttttgttcaccatcaagagtgtgcttatagttcttaatagctgacctcctgtcaagcgcgaaaaacatgccagttgcaaacaaattatgttcaagtggcacacgcacatacacacaaattgaaccaagatgaaaaattaatcttttgaaaaataggcaagtcaggaaaggtaatatgaaagcatgttgtggcatcctttttcattggcaatgttttgttgacgaggagccagaattctctacctgctggtttaatgttctaatacatttttagtcaatgcttgatcaagcattgccctaacctagcatctgatattttgcttaatgagttgggttcaacgcccattttattgtttcaaaatcttaatcatcattgaacactcatgtgtagttagtgtagcatgctttgtgtcgcactggcagttaaaaagtccccccaccccccaccccaccccgacagctggcacctgaaaacataagacggggatctgcctatcaaacccttccacatcaggttggttggctggcatctgatggtgctacgaaaggtatggatgggagaagcggaaggtatcacacgaacgagtattatgcttcacataatgacatggggcttttgaacttcaatcgtactgacatacctgatactgaaactcttgtgaaaaaggtggagagggtattatcccggccagatgtgtattcaattgaaagggcaaaggaactgcttataggccaagagcagtcattgcttgatgcaattgccaaacttgatgaagcatctgaccatgaaagcgatgatacgctcgttgggagccggatacacgccgccattgggtgacgcgggcagcacgcctctgacagggggcgatgctttggagttcagacctctggcagcaggcggagaggcaacgatatgtgaaatagtgctgtgtaagtaaaacgctacctgttgttagtccggtaggttaggttcttttggcagccaggcaaatctgtgcatgcaccatgcagtgtgatgggaatatatgtcttgagcaccatcacatgtgatgtgatgctgtctcgtttcatcttcaacctgagtaagcccgactcctcgaaatatgggtcgggtccctagttgtagtattgtagattgattgcccttccccaagttgcacaacttggaaacatgggtcggttttactagttgtagtcttgtagattccatgcccttttccaagttggacaactgctaatatcttaggatgtcccttgg

SEQ ID NO: 144629 - DNA, 628 bp, Zea mays
  Clone ID: MRT4577_63389C.1
atttcaattctactttggagttttctaatgaatttgacatgactgctcaagttaatgctagaatgcctctaacaattcatttgacatgcaaaagtgcaaatgcccttgctttattgtaataacatcataaactcccttcttcataggtagtaagaccaaaaaatgcttttagatgctaactagggaaaaatactatttgatactcataaacttgtaatagtaccaaaaacaatgtgttctgtggcaagccacaaaactagttcaggttttgattttcacccaaggagctaaggtactattcttttacaaataagatgataatcattgcagaatctgggtaaatgctcaatatgaactaattgtatataatttccatttcctgtaggatggttgatcaagtcagattcactcagatgtttccagactgaaaaggaatttttgctctgtgtactattagggaattcttgagagattagcacttaaattctttgaaacatcccttttctcgatgtacctcctatatatatcgtatgcttgattcatctacatgtttgtgttgctttttgaagtatctagacctgcagttatgattcaggatttcaaatagaagctttttatccatctaatc

SEQ ID NO: 144630 - DNA, 297 bp, Zea mays
  Clone ID: MRT4577_6338C.1
acacgtgcacgaaaactttattcccgactcttgaaaaatgaggaccatgacgctgaacctggtagggatagaaagcgcactcatctatgcacgcatggtcctggcaccgctaaactccgaaccgaccttctacccatacataccgaccttcagagacgccgcctacgcacccgtctgtaccttctacggtccttctagcgtctgaggctcatctgctggcaacgctcactggtctggcgcctagcgtctggggacacggatgactgcctgatctccatgcaccgcaacaggagcaca

SEQ ID NO: 144631 - DNA, 698 bp, Zea mays
  Clone ID: MRT4577_63390C.1
ccggccgggcttatgaagacactacctggaaatattgctacagtgctagtcctcttgagatgcctgatgtgccaaccataaccctgacatttgctgcggacaagagcttgcaagctgttaatcctatcttgccatttaatgacaaacagggggcacttgccgggttctgcttagctgtgctgccatcaacagaacccattggaattattgcccagaatttcctggttggataccatgttgttttcgacagagaaagcatgaagctgggctggtaccgctccgaatgtcgctacgttgaggacagcacgacagtgccgttgggcccatcgcagcacgacagtccagaggacccgttgccgtcgaacgagcagcagacttccccggccgtgacgcctgcgacggcaggcacggctccgctctcctgtgcgacgacgaatctgcagatgctccttgctagctcttacccattgctgttgctgacgatgtcgagtgtgttcttcgtctcgtgaacaaccgatatactactaatcgatagccttgtatattgtatgtgctttatttatggtgtttttttttctttatgtgttgctctagaggtttatagatcagctgtattttgcctccgttgttggtccctgggatagcctagcaatagcaatcccccgactcgaaatgcagaagtttcagaaatggtgcgg

SEQ ID NO: 144632 - DNA, 457 bp, Zea mays
  unsure (1)..(457): unsure at all n locations
  Clone ID: MRT4577_63391C.1
ccaaaaaatgtccttttttattttggggaagccacaaacttcaaacaaaaattttttttttggacctttacctcaaaaaaattttaaaggggggcccccccattgatggttttttggaaaaacccttttggttttttaaaaacaagttggttaaatggcaccatttgttgcaattttaaaagggtcccccctttaggcccaccttgttggtaaaacgccaacaactggggttttttcaaaaaggtggcggggctcaccccattttgctgggtgaatgggagtatttgttgcttttgtaaataacccggaaatttcattgctccccgttggttaaaaggaaaaaatttttgggggtaggcaaaagggacctgcctaaatggggnttgttgtttgtgcaaataaaaagcaaatttcaatgccctttgttggttaaaaggaaaaaactgcttttttttaa

SEQ ID NO: 144633 - DNA, 1886 bp, Zea mays
  unsure (1)..(1886): unsure at all n locations
  Clone ID: MRT4577_63392C.1
ctgacggtctgaccctaccctatctctgaggaggtcgaatctgggcgtccgcgaatcctgcccttctccgtcctccccccgtccgcggatcctttctcgcagtccaacgaaaccctcggaggcacggttcggttcgccgacatgctgtctggcgtgaagctggttccgcgagaccagatccagtctgatcagaagcgtaggggtgaccagggctccgattccgactcctccgacggcaagaagccgtggaagcacagtaaaagaaggcggggcaagaaagagaagaagagacgaagcagccggcggcagcggaggcggagcaagaggtactcgtcggaagattcttcggggtcagacaccgacgattcaatcggagaggaagaggaggatgatgtcagtcggagcaagcgtcgcgggaaggacaggaggcggcgacgcaacttttctgacgacgatgattccgaatccggtgaatctgaccggggaagagcctctcgcagggggaagcagagacgtgatgacgatgatgaggaagaagagactgaaggtgatgggcttagggcaagtgaggtggtcaggagggagatggggcttgaatggatgctcaagccagcaagcagcagccaaactgagggcaccggtgttcgtaaggttgataatgtcgagaaggatgaatctgcacatgaagagattatgagaccgaacccaaaggaacttaacccataccttaaagataatggaaccggatacccagaagaatcaaccccatcaaatgctggcagtcagttgcttgcatcctctgttgtgggtgatggaggtgccagctggagacttaaagctttgaagcgtgcaaaggagcaagctgctcgcgaaggaagaaaacttgaggaggttgttgaagagagatggagctcattaggcgacttagctgtttcagtatcagcatcaagagctgcccattcacatgctcatttgcatgccattagaggcagaaaatctggtaatgctgacaactcagaagaacgtgttaaaagaaatccagagggtcagctggatggtagcagtggcagacgtgaatatctacgggatgtttcttctcagcaccatgccatgagaaaaccaaaacctgattctgtcccatggaaaaagagaagacagaatatatcttctgaagatcaggcacttatctcatcagcggtagcaagcttaaataagttttctgatgatggaagctttatggaaaagattagcaatgttgagagcaagaacacaaatgtttccactgctagtgctagtgctgatgagcagagggacaatgggcagaaaacccctaaggagagttcaaacaaagtacaattagtgagcactcagaaactaaatgcaaaccagatggctgcaaagattctgcagctccgaatgaaaggcaagcatcaagaagctgaacaactttcgagagaaatggaagctttgctggagaatcaggatactgcccatgagaagcctggtcatggaaaagaaagaagctcaatcaggcctacattgaagcctactgcagctgatcacaggagaagagaagatgatgcggaccttcatttggctaataaaattatgcacaacaagcagtataacatgtccaaaagtatagaagatgaatatgattttggtgatgctcccactaaaaaggacaaaaaaaaaaaaaaagaagcacgtgacgagaggaaaagcactgatagacgtatgttgactcagaaggagcgttgtatgtattgctttgagaacccatccaggccaaaacatnctggtgttgctattggaaacttcagctacttgatgctgccacagtttgagcctgttgttcctgggcactgtattattctcccattaca

SEQ ID NO: 144634 - DNA, 724 bp, Zea mays
  Clone ID: MRT4577_63393C.1
ggaattcctgcgtcgacccacgcgtccggcggcccgtgcagacaggtgcccagcagcccaggaagccggcctgcgcccgccccagcaggaggcttcgccgtccctgtgagaacgtcaccatggccgaggcgcctcgggctgagaccttcgtctttctggacctggaagccaccgggctccccagcgtagaccccgagatcgccgagatctccctgtttgccatccaccgctcctcgctggagaacccggagcgggatgagtccggcgcccccgtgctgccccgggtcctggacaagctcacgctctgcatgagcccggagcaccccttcaccgccaaggccagtgagatcaccggcctgagcagcgagggcctggccaggtgccggaaggccggcttcgacggcgcggtggtgcggacgctgcaggccttcctgagccgccaggagggccccgtgtgccttgtggcccacaacggcttcgactacgacttccccttgctgcgcacggagatctggcgcctgggcgcccacctgccccaggacactgtctgcctggacacgctgccggcgctgcggagcctggaccgtgcccacagccacggcacccggggccagggtcgcaagggttacaggctgggcagcctcttccgccgctacttccaggcagagcccagagcagcgcactcgcgcgagggtgacgggcacaccctgctcctggccttcct

SEQ ID NO: 144635 - DNA, 503 bp, Zea mays
  unsure (1)..(503): unsure at all n locations
  Clone ID: MRT4577_63394C.1
ggtaccctccgnggtctcggccggggaccgattcatactacctcagtacacccccgacatgtgcctcgcaagagctgcgaggggatcccttgatgttcaccaacatcggctagtatccgattagcggcgacctgactgttattatctataatgcgcacctaacgggcaaggtgcatgctcgtgcgcaagaccgtgctaggctggtacgtcaccagaaccgacgcgtccctcctcgacggcgtgcgcaagttcctcgaactatgcgtcacctgccacgttctcagctccaccgtcgccaaccctaacaacgggaaccgcgggaagttggacgcggagcagagcctggagcagtgcttggtgaaccccacgccgcttatgcgcaacaagaaccagatccgcgttaccttcgactgagaggcggagaagcaggacatgccgggcaccatcatcggcaataacaaccacgcctccgagttgttcctcgagaccatgactgtgaacga

SEQ ID NO: 144636 - DNA, 1391 bp, Zea mays
  Clone ID: MRT4577_63395C.1
atggctcggacgctacgccgacgcctttagcttcgttgacaccctcgtttcgatcgctttgtcctctctcactcgttttttcccttcctgtctcaagatggctgaatcctttgttctcaataccggcgcaagaatcccgtcggttggccttggcacatggcaaatagagcatggagctgtcagcgacgccatctatgctgctgttaaggctgggtatcggcacattgattcagctgtagcataccgcaatcagaaggaggttgggctggctttacagaaactatttgaggatggcgtggtcaagcgtgaagatctgtttgtcacctctaagctatggccaggtaaccatgcacctgaagatgtgcaggaggatctttgctcggccctcgaagatttgcggctcgactacgtagatctgtaccttattcatggtccaatccgtatccagaaaggaaccatgtttatcccggaaaacctaatccctacggacatccctgctacatggggagcgatggagaagctataccacgcaggcaaagctcgcgcgatcggtgtgagcaatttttcctgcaagaagctgcaggatctgctcgctgttgcgcgtgtgcctccagcggtcaaccaggtcgagtgccatccagtttggcagcaagacaagctacgcaagctgtgccagtcaacgggtgttcatctttctgcatattcgcccttaggctcacccggatcacctggatacagtgggccaaacgtccttagcaaccccgttgtcatgtctgttgccgagaggttgcagaaaacgcctgcccaggtcgctctgcgctgggggattcaaatggggcagagtgtgcttcccaagagtgccgacagaacaaggatcggagagaacttcgacatatttgattggtccatccctcacgatctgatggcgaagttctctgcaatcaaacaggttaggctgctaaaagtcgagtttgtagttcacccgaacagtggatacaataccttggaggatctttgggacggtgaagtggaatacgaggacgaaagaacagagaatcaggaccattctgatttcttgagatgcttttcgtgaacagtcgagaatatcgccttcttcgcgtggagaaacccctgaggaataatggcctctatgctgctcctcttatatgtatgtagagttgtgtttcaacaagattatccacatgtgactgctgcttgcttaacaaatactactacagttcgacttcagagtatagctacaaggtgttatcgtagtcaactatatttgtgtttgtctattcaggctctgaatacaaggaaaaataaaaaaataaagcaaatacaagaaatggcattgtattcaaatggaagatgtttggagtctagttttt

SEQ ID NO: 144637 - DNA, 314 bp, Zea mays
  Clone ID: MRT4577_63396C.1
gtcctactgtgatggcttgataatcgatgctgctcgtgatccacatgacggtagcctcatgtagaagaaaagttaccacgcaaaagacacttttaatagcaagagacgatggactgtcttcctgaaatccagcaactccctgtataaaaatcgtgttgcatgttggatggaacttgtgtcttgtcttggcaaaaaaaaaaaaaaaaaaaaaaaaaaaaaaaaaaaaaaaaaaaaaaaaaaaaaaaaaaaaaaaaaaaaaaaaaaaaaaaaaaaaaaaaaaaaaaaaaaaaaaaaaaaagggggggcccgtttta

SEQ ID NO: 144638 - DNA, 573 bp, Zea mays
  Clone ID: MRT4577_63397C.1
gcgttcgctggtatcttcttttttttaaaaaaaactaggatagctgcatattttttatataatgaaaggtagacacggtaccatagactcccatataagtattcatttttgtttccggaagcacttgtctgacatgttttttatctcggataactaagaggtattgtaaatttttgattagggagcacttccccatattcttaagaacacaaaggaagattttttcaagaggatcattggtctgctagcggaaacatcagagatatgtttcagcggaataaaggacatcaagtgcatcacatgccctcacaagccagaaggttccatgtttgtcatggtaatcaatttactaaattatatgctgttgttgtggttgagcaaaaaaaaagtaacatttaagtatcgtgttagagcaaccagctgcacctgaagtcgtaatataaaaggttcagtttagtcatgttatataatcataatctctctctctatataatatatatgtatctgttacacacaaccatactgaatgaaacatatagatactcttagaacatgtttgtcagttttctgact

SEQ ID NO: 144639 - DNA, 553 bp, Zea mays
  Clone ID: MRT4577_63398C.1
gtcatgtaacgagcacggttggagtcatccggagggaagccacgataatcgacgctacagacgcgctgcttgaataccgctgcatctcgtattgttacatccttagctggcatggaacctcctcaacgtcaagcttatgagaaaggcttcacaacgtgggctcagctgaggaactccgactagcgagtgactcttgtgatggcaatgcgtcgaagatgtaaataaccgtagggtcctaactcgggattgcgaaacgactaagcgctggattaacaaaattggaacaacaatcataacgttgatagaaggataaaaccctatgactgaacgaacactatgactgttttcacgaccgtcccgcctatgatggagaacgatgagcttctcaaggatgctgctggacccctgagagagccattgttgtaggttattgccggtgaatagaactcatgaaaggcgactttcataaatgctctacacgcaaagcaggatctctaagagggaggtgtgcctacgatcagtgagatcacactactattatattgtgaggatg

SEQ ID NO: 144640 - DNA, 299 bp, Zea mays
  Clone ID: MRT4577_63399C.1
ggccccaacttttacacatgttttttttctaaggtgcaaatttgtttttccacattcccaacggtggccttttgagctatttatgttctaagttgaaaagggctaggaattatttattggaacagagtcccgaattcttgatctatcattacagggcgggaaatggacacacttttggatgggcaaccaaagatctaggaaagcttcagtggtaaataaggaatttacttgtgaaaggttgcatttttcctcccacaccaccaacagtttatattgattgaacagctttaccacaaggt

SEQ ID NO: 144641 - DNA, 297 bp, Zea mays
  Clone ID: MRT4577_6339C.1
aaaaaaaaaaatcggccccagccgagccaattataaaccttaaaaagggaaccaaaactgttgggtttcgatgggaaggaaaaaaaaaaggcccgggtaaaaaaaaaagggggtggggcaaaacattaaaaccttgaaccttttttgggaagggggtctaaaccctggggggcttatccaaaagcgaggccgggccgtgtacccaactttggggttgggaaggggaacaaagcccgggctttctttttgttcatcggagggggggggggaagggaaacacagaattcctttaaaact

SEQ ID NO: 144642 - DNA, 2031 bp, Zea mays
  Clone ID: MRT4577_633C.1
gaccgcactcgtccgcccacgcgtccgaacattgagatattagttttgttactaagaaagatgcaataaaggttgtgtcctgtcttccatgctgcacctgtttcacattacaccagcacgttttaaacaatatacaaggattatgtcccacagtgctcatgaaggacataacggatgagtgggttttatttcaacttctgctgttatgtctttctataatcttttaaactagtctcacttgctctatattcttaaaagctgctagcgatgtgtatcatctttattggttcttgacacctctaagctgctcattttcgacctggcctgctcccgtgtccgcccggcctcttccgtctcggagcgagaaatcagcggcatcgccgcgcgcatccgaagcgcacacgacaatgcagggcggatccagcggcatcgtctatggtggcctcaagtaccaggcacggtgtatcgccgacgtgcgcgcggacgccagctcgaccaccttcctcgccgggaccctcagcctcaaggaggagaacgaggtgcacctgatccggctttcgccggcggagagtgagctggtgtgcgatggagtcttctaccaccccaacgagatctgggatctcaaatcatgtcccttcgatcacagggtcttctccacagtctacacgtctggtgagggctttggtgcgtcagtttggaagatcccagagcttaatgggcaatcaaactcaccgcagcttgagcagctctttgagcttagtgggcatacgggcaagattagacgtgtgatctggtggccacttggaaagcatgataaactaattagcattgatgaccgaaatatttttctttggaacgtagacatgtcaaataaatcagctaaggtgatctcacagggatcagctgacatgcttccaaatttgagtggtggggcttgggatccacacaatcataattcaattgcttcaatatctgattcatcacttcatttgtgggatctacgttctatggaaaaatcatctgcaattgaacatgcacatatacgggatgtggattataaccccaagaagcaacacattattgcaacaacagaagatgactttggaattcgcttgtgggatctcagaatgtttaagcttcctctgaaagacctccctgggcactcacattgcccttctggttcacccaatagacaagaagaaccattacttaactcatatactgactatgaagacagcatctatggtattgcatggagctcccatgatccatcattattcgcttctttgtcctatgatggaagggttgtcttggaatcagtcaagccctacttgcagagaaaatgaatcttgctggtctaacttttggattgtaagcaatggcagaaaaaaacataataaggatgttgcagaaatcatcctgcttgacatcaggtcttcaaccctcttgattgaagccagcaatggctccaaaacactcagatctagcttcagttgagatattacagcacagttgagattgtcagcagtttcctttcctgtatcttcaaattttgtccactaggatttcatgttcagttgctagaaatttggctgtgaagatctgatctgtatgttaataactgttgcccatctgtctgaaatagttttctatacttgattcttaggatgttgtatatttgaaaagtgttcacaaaaagatattgcggtatatgacgaggtggagttggactgaatttgtaaaaccattcagaatttcaaattcccaggattagcttgttttaccaaaaaaaaaaaaaaaaaaaaaaaaaaaagtactctgcgttgttaccactgcttaggctggccttgccattctgtagcctcttaacaagcatttatgtgatgattcggcttactgttgtagcaatggcagaaaaatggataacaagattgttacagaaatcaatttttaggatgttgtaaaaaaaaaaaaaaaaaaaaaaaaaaaaaaaaaaaaaaaaaagaaggaaaaccaataaagggcggcccg

SEQ ID NO: 144643 - DNA, 974 bp, Zea mays
  Clone ID: MRT4577_63400C.1
cggccgctcgaggcggcaggccgggtgtgtgtgtctgcgagcgagatccagtccagagcggcagcagttatagccagcgcctcccccaccaccaccaccaccttccccctcctcctcctccgatcgcatctcctctcctccgtcctcccctcccgtcgcccgtctcagcctcctccgagctcgctcgctcgctcgctcgccacgatattctgtaggaaatggctgacggtgaggacatccagccccttgtctgcgacaatggaaccggaatggtcaaggctggtttcgctggagatgatgcgccaagggctgttttccctagcatagttggtcgccctcggcacactggtgtcatggtagggatggggcagaaggatgcctatgttggtgatgaggcgcagtccaagagaggtatcctcacactcaagtacccgatcgagcacggtatcgtgagcaactgggatgacatggagaaaatctggcatcacaccttctacaatgagctccgtgtggcacctgaggagcaccctgtgttgctcactgaggctcctttgaacccaaaagccaacagagagaagatgacccagattatgtttgagactttcaatgttcctgccatgtacgtcgcaattcaggccgtgctttccctctatgcaagtggtcgtactactggtatcgttctcgactctggtgatggtgtcagccacactgtgcccatttacgaaggatatgcgcttcctcatgccattcttcgtttggatctcgctggtcgggatctcacggactcccttatgaagatcctcaccgagagaggttactccttcacaacctcagccgagcgggaaattgtaagggacatcaaggagaagcttgcgtacgttgcccttgattatgaacaggagctggagactgccaagaacagctcctcagttgagaagagctacgagccttcctgatggtcaggtcatcacgat

SEQ ID NO: 144644 - DNA, 478 bp, Zea mays
  unsure (1)..(478): unsure at all n locations
  Clone ID: MRT4577_63401C.1
cctctacaccggccgacctttgttttctttccaaattcctttttttttaacttttttcatcatctttatttttttaccaacttatttcttaatatcttttatcaccttttttttaccatctctactctttctctttcttcttttttccacattcatcatncccacccgagagtggctaatcnncccctcaaannanttcctaaacaaccacaaaccaccttnctaccttaccataaaattaaaaaacttnatacccctctacaacactaacaatcttnnnaaataaataaaccanactacatatcttaaaaattttcaaaaaaatatatnancatgggatataaaccccaaatcttttttttttcaaannnncccncaaaannnaatncctttaaataaaactaccacgaatttattttcagcaataaaaaaaactattgacaacttttaataatattattattaatgggaggcaaaa

SEQ ID NO: 144645 - DNA, 429 bp, Zea mays
  Clone ID: MRT4577_63402C.1
ggggccaaccggggtgatgaaaatgctagacagccggggggcacagatacccagaatgcatgcctgcctgccttgaaacaaaaggggaagcttatttttgccttgggggttatccctaaatgggaacccccggggacccccccctgaacggccttgggtttttgccccttcctggtgaaatgggccccgggacatgctcgggatcatgttggggttcctagggggggaaatggaccccccccgcataaaaaggaactgatttcaaaactggtgtccaagccttcacattattgatttcaaaaacccttttagggaaaggatccctgacatttttaaaagaaaaatcatctgggaggtcaactccaatttgggggaacccatacttttaaaccatttgtttttttttccccccaccatttaaaaaggggg

SEQ ID NO: 144646 - DNA, 202 bp, Zea mays
  Clone ID: MRT4577_63403C.1
gccggccgggtaccgggacccgccaagagccccacttcatattgcaaacttacgacaagaatgccccacgcgtgacagcgacagaagatcaacgggttccttttccccgattgtcaggcggctcgctcgtgctctccaccgagaaggctgttgataggcgcggccgctcccaccaccaccaccactaccctatggttttcat

SEQ ID NO: 144647 - DNA, 584 bp, Zea mays
  Clone ID: MRT4577_63404C.1
cctcgaggccggccgggaatcctttctggatgagctctgaggcaccacttcgctcctcgcttcgggcggaacccaaataccgagccctagcgcaagcacaatgtggaggaagcagaatatacgtcgaggtcacgtggaggatgacaatcggagtatacctctagttcctcctccctacccgcgtcgacgtcggactccacgagaacggcgctcataaatcgaccttgacatggcttccacgagacgacgactcgtccggctggagaccacaacacgcggacatgaattcaatcgtgcgcgcctctcagcaaagcgacatcatggcgcctctccgagacctaggcttggggacgtgctcccagatgatgccgattccaagctcaacatggtcatgatcgaggagatcctcgtcgagagccctggcgtcccatgtacacaagctgaggagacagctgcctgtgctgatccgataacctatggtgagaaagatacgcgctgatcgcatgacccgcacagcctgtgtaaagaacgactatctctgcacctcattgagacatgacgaagacgtgcttactacgactgaa

SEQ ID NO: 144648 - DNA, 477 bp, Zea mays
  unsure (1)..(477): unsure at all n locations
  Clone ID: MRT4577_63405C.1
gtgggggtgtgtgttttttttttttttttttttttttttttttttttttttttttttttttttttttttttttttttttttttttttggggggaatacatcacatacgaattaaattaagaggcggcaaacaaacaacccaacacgtattgatcgggggggcgggggggaattaagctactaacaggaacaggggcgggaaccccgccgnccccgcccccgcttccgttttaaaaaaggagggccctcgcacgcgagcaggttttggctggcctgnatcggnagggaggggggggnggggatntcggggcccccgggggggggcgccttgacctggtggtggtgggacacttggggcagccggtggatcttctttttcagggcctttgggggaggggctttaaagaacttgtcctgggggaacgccgcgaatctttgcttgaaaagggtggggccgcccgggagaaaagaaccgggg

SEQ ID NO: 144649 - DNA, 373 bp, Zea mays
  Clone ID: MRT4577_63406C.1
ctcaagctggctcgctgacaccatggcccgacaacgctacgggcagggcagacacgtggcatcgatcccgaatgcaaattgcccctatctatccctccctacaaaacgaaacacagaaagataaaatcgagaggacgccaaagacggttctctgacttacttgggacgacttcgccgagtgttctccgaccaatggcggcacgaccggacaatcaacctgagcacgaccgaagacatgactcgagaaaaccaccgcgaccgcaactgtgagtgcgcacgcgcgcgcaagcctaacgccgagaactacgaacaggggctcacaccgcagctacacccccagattgacaagaaagatctggatgacaatgcccac

SEQ ID NO: 144650 - DNA, 631 bp, Zea mays
  Clone ID: MRT4577_63407C.1
aaaaaaaatttcaaacatgtcttcagatgaagagccccctgcctcctgcgcctccacttccatcgcctccccaagatcgcagatccgctccggtgagaatccgtcgccatgtcttccagcgaggtcgcctgcacccttgccgccctcatcctccacgatgacgggatccccatcacttctgagaagatcgcgacggtggtgaaggctgccggaatcaaggttgaggcctactggcccgcgctcttcgccaagctcctggagaagaggagcgtcgatgacctcatcctttccgtcggatctggtggaggtggtgctccagctgctgctgctgctgccccggctgctggtggtgctgctgccgctgaagagaagaaagaagagaaaaaggaggaggccaaggaagagagcgatgatgacatgggcttcagcttgttcgactaagcagttcaattccagttctcctgtggaatcttctatgctaaagattacttatcttatgtgcttttaggtcgaattttgcagatttaatatgttatgctgttgagactaagtatctgtgcaatgagtactgcaaaacctccttgggatggtcttgttagaatgaaaatggttctacattggtgcttggttg

SEQ ID NO: 144651 - DNA, 388 bp, Zea mays
  Clone ID: MRT4577_63408C.1
aacacgggcatgcaacgtaatcatccatctattatctatatataacacgggcatgcaacgtaatcatccatctattatctatatatattcacgttgaccttcacatgacgcaactagctacctatagctcactgttggtgtcttgatgaggtggttctctgcctcggccggccagaggtgaggggcgcgagaagtgtctgtgcctacaaataagtaagacgaggacgtggtgtcctgcgagaagtgtctgtgcctacaaataagtaagacgaggacgtggtgtcctcgacgacccaacgcatgcggtgctgtggtagcagctgtactgacgaggtcgtgctatccaacgtacggctgctactcgtccgggcgggcgggcccccacccc

SEQ ID NO: 144652 - DNA, 411 bp, Zea mays
  Clone ID: MRT4577_63409C.1
actggatgtaatagtaatagtagcattttgcctagaatccgctagccatatccagggagtaattacactcgtactaggtgcctgtgacctgaaggtgtccgcctgcctagacacaatcaggatatttgatgcatccaactatctacattcaacgggagtggggcttatgcagacgggctaatcatggtcgagttatacatttagacaggtgatctcacagtgacatctcttgaaacttgagaggcttcatatgggccatgtaacacatgtctaagcggaaatggaccacttcgctttaggcgatagtgcttacatagttaagcccaataagatactcatgacagatagtccaaatatctgattcagggcatccttacacgccgtgacatgaacacgttacttgttctcaag

SEQ ID NO: 144653 - DNA, 180 bp, Zea mays
  Clone ID: MRT4577_6340C.1
ctacaagcagcatggaaagtgcaatccagtggcagcaatgaagcaacaatggagaccacgagatgctctctgcttaagctccacgctcgctatacatgtgctgatgacccgacaattattactgaatgctcacaagctcatatagctatggttgctgcaccagacctaccatcaatgata

SEQ ID NO: 144654 - DNA, 1288 bp, Zea mays
  Clone ID: MRT4577_63410C.1
ctccttctcgccggtgccttctgctggaggcaaacgaaactcctcctcctcctcctgcccctctctcccacgcttcccccttcgtctccgtcgacaggaagcaaccaggagaggcgaggcggcgacgatgcagatgaagcagaaggtctacgagctctacaaggggacggtggagcgggtcacgggcccgcgcaccgtctcggcgttcctcgagaagggcgtcctctccgtccccgagttcatcctcgccggcgacaacctcgtatccaagtgcccaacctggtcctgggaggcgggcgatccgagcaagaggaagccatacctcccctccgataagcagttcctcgtcaccaggaacgtgccctgcctaagacgagctgtggcggtcgaggaagagtatgatgcagcgggagctgaggttgttctcgatgatgatgaggatggcgaaggctggctcgcaacacatgggctgcaagcatcagagtcaaaagaggaggaagacataccgtctatggatacattggacatagggaaagtcgaagagatcaaatctatcccctcctactttggtgctagtgaaaagccagatgaggaggaggatatacctgacatggacacctatgaagacacaggagatcattctacagctacccctcagccttcatattttgtcgcagaagagcctgatgatgacaacattcttctcaccagaacatatgatgttagcatcacatatgacaagtactaccaaactccacgtgtctggcttacaggctatgatgaggcaagaatgccattaaagcctgaacttgtgtttcagatatcagtcaagacatgcacgaaaaacggtgactattgaggaccatcctcacttattggctgggaagcatgcatcagtgcacccatgcaaacatgcagctgtgatgaaaaagatcatcgacgttccaatgtcggggggagtggaaccagaagttgacaagtaccttttcatatttttgaaattcatagcgacagtcataccgactatcgagtacgattatacaatggacgtcgaccttggcagtacaagctgattattggttggcttgaagtttgtcacttggctcgggaaaaggaagcaccctaccctaccagaaggcgcagggaggctgaattgcgcgtgtttgtggttgaacatttgtgcatatgtgcttgttccttggatcggtttgcatttgtgaacaaactctgaaaagctcaaaggcaatacccatcttgtacattcaaaaaaaaaaaaaaaaaagcggcc

SEQ ID NO: 144655 - DNA, 1826 bp, Zea mays
  Clone ID: MRT4577_63411C.1
cgggatagatagcacaggccacaggcaggcaggaggatcggacgagtcggcgaggaagctgcctgctttcagatagagagagttattaagatggcgttgcttcgagtgcttgccagtctgcctgctcttcgcagcggccactcctgtcagggacatcgaccacgatgccatgctcgccagaagagaaggatatcccaccacctgaccaacatgctcggggctccacctgacgctgcaccacccgcagagcccctgctccccggcgccgatgctccgccgaccttgccttatccggggcgctcgcccacgacggcgcagcgcgtagggacgctcgtctcacgcctaatcaagacgccgtcctctcgggccaccttgcttgactagatccattgcgtgttccaatccgctggcgtagcgtagaacacagcatctccggtagcgtcaccgtaggcctcgcaagtaaactgacctgccttctccgctttcccctccgtctccgtcgggagtcgagacaaagggagccagagttagtcccggcgccgtgtcgcgagcggaaggagaaggactgaaggaggcgacgatgcaggtgaagcagaaggtctacgagttctacaaaggcacggtggagcgggtcacggccccgcgcaccgtctccgcgttcctcgagaagggcgtcctctccgtccccgagttcattctcgccggcgacaacctcgtcgccaagtgccccacctggtcctgggaagcgggcgatccaagcaagaggaagccgtatctccccgccaataagcagttcctcgtcacccgtaatgtgccctgtttaagacgtgccatctcggttgaggaagagtatgatgcagcaggagcagaggtggttctcgatgaggatggcgaaggctggcttgcaacacatggagtgcaagcatcaaagacagaagaggaggaagacattccctctatggacaccttggacatagggagatctgatggaataaagtctatcccctcttactttagcggtggcaaggatgaagaggaggaagatatacctgacatggatacttatgaagacacaggggataatttggctgctgctgaaccatcatactttatcgcagaagaaccagaagatgacaacattcttcataccagaacatatgatgttagcataacgtatgacaagtactaccaaactccacgtgtctggctaactggatatgacgagtcaagaatgccattaatgcctgaacttgtgtttgaagacatcagccaagaccacgcacgaaaaacggtgactattgaggaccatcctcacttattggctgggaagcatgcatcagtgcacccatgcaaacatgcagctgtgatgaaaaagatcatcgacgttccaatgtcggggggagtggaaccagaagttgacaagtaccttttcatatttttgaaattcatagcgacagtcataccgactattgagtacgattatacaatggacgtcgaccttggcagtacaagctgattattggttggcttgaagcttgtcacttgtctcgggaaaaggaagcaccctaccagaaggcgcaggaagaaggctgaattgcgtgtttgtggttgaacatttgtgcatatgtgcttgttccttggatcggtttgcatttgtgaacaaactctgaaaagctcaaaggcaagacccatcttgtacattctgtgacgctgtcagcttgtgaatccattcgttaatataaatctcaacaacccgttcggcgtgcgtgggaactactcgtgcaaaaataaaacaaaaaaaaaaaaaaaaaaaggcccctagggcc

SEQ ID NO: 144656 - DNA, 253 bp, Zea mays
  Clone ID: MRT4577_63412C.1
tcggagctaataaggtttttataccggcggctgggcgggttggcctgccgcccgaattttgctccgggcgtaaaaaacaccggacctgtcccgtggctttcaaccgaacttggaacggagacacaattcgcggttgatggaatcctgtaggggattgagggacatgcttgagtctacaccgcagtactcagtgtttggacggcaagggggggcatggaaaacaagcaatggacaattattttgccaccagaca

SEQ ID NO: 144657 - DNA, 489 bp, Zea mays
  Clone ID: MRT4577_63413C.1
gagccagaggccagacattccatcccttagcggctcaactactggtggtacatcacaaccaagaaccgccgattggaaactgctcctgccgcacattttctacactccgatgcttcccatcttggaccacaaagcctaattgagcgcaccatacaggcgcggggcagtaaaaaggcagcatgacacctactagtcaagggtctcaactgctttaagcctgtctagaaccctaattcccgtgcgcgaacctgattcccctttcaatggaagacttgcactcgacctttacgctttacacccccttcttttggcattaggtgagctcacccataccatatacttgatccactccctttttgtcaagaactaccttagctgcaaataactgttaatgtgcaactgctgatagttcaaaaaatcactgcacaatgtacagaaccccattaagaccccctaaacatgcctttgcataaacaagaccatcatatg

SEQ ID NO: 144658 - DNA, 411 bp, Zea mays
  Clone ID: MRT4577_63414C.1
ggcgggcggggaaacttttccaacagggggcgctagccacagcgtttgcccgcactaacgaaacccgccgggaccccacccctccgcggcagcccgggcgccaaagcctgacggaggagagcaccaccaccccgggagggggagcagggacagcgaggacaaagggcgggccgccacccgccgcaaggcgcacctccgcacggcccgagaggggcccaccctcccagacagcaagagggagcacgggagcacgatggctgccgacaacagcgagaaggccggcacgctccagcaggcgccccgccgcgggcgaggcgggcagcaacacgagcaagaccagaccggcaacacgacccccccaacgagggagcccaccgaaagcattgaccagtgcccggtcaagaccccgga

SEQ ID NO: 144659 - DNA, 341 bp, Zea mays
  Clone ID: MRT4577_63415C.1
ctctcgctcgccaggagaagcagccgccgttgctgctgccgcgtccacagatggggggtttcgtgaagacccataagaccaatgcgtatttcaaacgtttccaagtgaaattcaagagaaggcgggctggccagacagactacagggccaggataaggctgattaacctagatcaaaacacgtacagctcacccaaatacagatttgctgagggattgtccgacaccgtcatgactgggcagaggctacctgttagcatgcgcggaccgcgacgagatcaagaacatgtccaaggacgagatagccaaggacccggcgggcatgtgcgacttttttggggc

SEQ ID NO: 144660 - DNA, 655 bp, Zea mays
  Clone ID: MRT4577_63416C.1
gatccaccgtctatccttccgtagcccatctgcaccccaccccacactcaactaccacaaccaccccatccactccctccagctactccttacaatggcgactgagcgtgagagcaagactttcctcgcccggctgtgcgaacaggctgagcgctacgatgagatggttacgtacatgaaggaagtcgctaaggtcgccggtgaactcaccggtgacgagcgcaaccttctgtccgtcgcctacaagaacgtcgttggtacccgacgcgcgtcgtggcgcatcatctcctcaatcgagcaaaaggaagagtccaagggcaccgagaagcacgttggcaccatccgtgactaccgccagaagatcgagaccgagctcgagcaggtttgccaggatgtcctaaacgtcctcgacgactccctcatccccaaggccgagtccggcgagtccaaggtcttctaccacaagatgaagggagactaccaccgttaccttgctgaatttgcttccggtgagaagcgcaaggttgccgccactgctgcacacgaggcctacaagacggccaccgatgttgcccagactgagctcacacccacgcaccccatccgtctcggacttgccctgaactttttggtcttttactacgagatcctgaac

SEQ ID NO: 144661 - DNA, 180 bp, Zea mays
  Clone ID: MRT4577_63417C.1
ttggaacctttgggctgatttatgtgcatgtgaatcgaaagggtgaggctgcatgcgtcgctgtactaattctccgaggattaccgacagtacagtggcgggactattatacacatgtggatagatctaagattatataccacactgactgtcctatcgatcatccggctaaccattaca

SEQ ID NO: 144662 - DNA, 391 bp, Zea mays
  Clone ID: MRT4577_63418C.1
aaaaaaacacccacaaaaccaccttgttttcctgcgaggccctgctcgatccccgaggagaattcactcccgaacccatcaatctgctctccgcagtccgccgatccgtggatcgatccgagcgcgggctcggtccgccccaggttccgatctggtcgccgactcgcctgaggagatgaacggcgcccggggcaaacaccaccagcatctgcataggctcccgcagcagcagcagcaagcgctcctaatgcagcacgcgctgcaacatcagcagcaccagcactaccagtccggcgtcctccccgccgcggcggcggcggccatgacccatatggaacctgttttcaatggcaaccttccacctgggtctgatccttccacttgtcgcagt

SEQ ID NO: 144663 - DNA, 467 bp, Zea mays
  Clone ID: MRT4577_63419C.1
atatatattcccacggaacgggcctgcaatggaggttattcctcctttagtagccaacagggtgcagcctcgaaacggttccgggtaataatgatgcgcaaaggctaaaccatgaggatgaggatgacccccttctcctccttatatacacatgaataatcgaggcccatggggagcccttccactcagagactgactgataaggtctgcgtgatgggtaagcaacgaaccacggcagcaaataggctatagggttgctgttcgttccgaccggaggacgggatgcatggatgggaggttcatgccctgcagtcacgaaacacaccggacccggacggttcttagcccgcccagttccacaccataactgctcaacccctcgatcccctacttgggctgacattcgaacaccttctttgccttggcattggcggaacagacgagttctgcctttacaagccttgagc

SEQ ID NO: 144664 - DNA, 425 bp, Zea mays
  Clone ID: MRT4577_6341C.1
cccacgccactctccctactcccttcctctttctctatctccctctctctagctcggcatgcagcagcagccccccctcccttggagctagcgaccgagccctcccatgctcctccctcaccttggcagctcttccatggcgtcaccccctcctctacggtagcaaggtgtaggaccgagagatgctgatcgtgcaagtgatgaggtgccaaccacaagatgcagttggtggatgacctgaagaatggtggaattaaccagtggatgctcgccaagcgagtatcccccagcaaacactaatttctaagtgttaaattaaagatggtcgagagggttactgcttccgcaggagaggaccaagagtagcgtggccaggcttcgccattattactcgccgaagaatcctaaaaaaagaaacaccttca

SEQ ID NO: 144665 - DNA, 247 bp, Zea mays
  unsure (1)..(247): unsure at all n locations
  Clone ID: MRT4577_63420C.1
ctcgagccggcgggcccncttcatcactaccacaccactgccccggatcataccagctgcagcagcagcgcgcgcgagctagcttcggtcggtcgatagatcgatcgatcgctcggccatcatgacgcgggaggagcaggcgctgctgtcgacggagatcgagaacacgcggcgtgcagccgccacgaccagagcacaacagaggacggagaggacggagacgacgcacaccatcacgggcagagat

SEQ ID NO: 144666 - DNA, 369 bp, Zea mays
  Clone ID: MRT4577_63421C.1
aaaaaaatgaacaaggggttaaagtgaaaccatttccaacatgaatctctaacattaaacgggcgtgatttaatcactaacccggtagcaattcaagagaattaacttcttttaaaaaatggggagccccaaaccacacatttcttaaacaccaaacacgacttcaaacggattgaaagaacatctctttacaaaggaaggaataaggtttgaatacaggcctaatgtttgggaatcaagttcttccaataaaatctctaagcccttttgtggcgtccttttccttttaaacctaagaatgaacctccaccgagtcctttttgagcgccataaaagatttgacggacctaaaaaaaatacctttttttt

SEQ ID NO: 144667 - DNA, 331 bp, Zea mays
  Clone ID: MRT4577_63422C.1
tttacgcgtccggtgttagatcgcgagcggtctggttcagctgattcttcctaccgagggcttgatctaataacgcacgataacaatcggcatcacagtcgcgggtactcaggtagtgtcaatgtgtggtacggctactgtacgcggtcgcagcgacgtgtaactgagatggatcccgatgccctggtcaatggtgatgatatggataaggggggaccaatggatcacaactcggagaactggtgcgctgatgtggtggcatctgaggaggagcaccataactgactcgagcgcctcagcgggtaggtggaatcatgctcaggaagggtgg

SEQ ID NO: 144668 - DNA, 360 bp, Zea mays
  Clone ID: MRT4577_63423C.1
agaccattaacttaatctactacagagcgcacaataacccgatcgacaccaacaagagcggtggggttgcccacgctcgtggggctctagatacgagcgccacctccacgcatacaaccggagggtgcagatgccagcaaacgacgccggcgcatttatcaccgatgtcgcaccagccatctctaggtgacctgccacatcccgtgcatcttccaccgccggaccaactgccgccggcggtcaacatgctataaccgtgccatgtgccgacggcggatcatctgatgacgacaccatgccactaccccattaaagcgcacaagactcaggagcataaccagtcacacatattcccgaacc

SEQ ID NO: 144669 - DNA, 362 bp, Zea mays
  Clone ID: MRT4577_63424C.1
gcttccaatgcgtgaaggaacagacgtgaaggccggtagctttatacttgattgcggtttgcttggggtcttctttgcagtaatcaagacgagccgcggtcgtagagccggaggtgagcatagcactctaagttaagattccgatggcgtggtgaccaagaagtacactgggattgccgactgtttgaccagagttcacaaggaagaaggtattagagctatttggagaggcaacctggctaactgtatcagatactagcccactcaagccttgaacttcgcttgcagggatgcctacaagcagattttttgctgatacaacttcaagactggattatgcaagtcctggtgtggaaacttag

SEQ ID NO: 144670 - DNA, 452 bp, Zea mays
  Clone ID: MRT4577_63425C.1
cgctacagagcagagcagagtcttgctccagtatttgccctctcctgcctgtagagcatccataacgtgaagttcacggacaaacatgtctccggtgaacgtgttcgggcacccgatgttgacaaacgtcgcacgggtgctgctcttcctggaggagtgtgggcgccgagtacgagctcgtgcccgtcgacttcgtcgccggcgagcacaagaggccccaacacgtgcagctaaacgtaagcagacggtaattcggcaatgggtcaccgtatcaggttcaggtgatgatctctgacagagatgctacttgcagccgtttgccaagatgcctggggtccaagatggcgatctcgtcctgttcgagtcgcgcgccatcgcgaagtacatcctccacaagtacggagggactgccggcctgcacctcctcggagaaaacagtggaatcgaagaat

SEQ ID NO: 144671 - DNA, 794 bp, Zea mays
  unsure (1)..(794): unsure at all n locations
  Clone ID: MRT4577_63426C.1
acaacacacacacacacacacgccacagagcagagcagagtcttgctccagtatctgccctctcctgcctgtagagcatccataacgtgaagttcacggacaaacatgtctccggtgaaggtgttcgggcacccgatgttgacaaacgtcgcacgggtgctgctcttcctggaggaggtgggcgccgagtacgagctcgtgcccgtcgacttcgtcgccggcgagcacaagaggccccaacacgtccagctaaacccgtttgcgaagatgcctgggttccaagatggcgagtcattacacatcagtacacacatcaagtcgcgcgccatcgcgaagtacatcctccgcaagtacggggggacagccggcctggacctcctcggagaaaacagcggaatcgaagaattagcaatggtggacgtgtggacggaggtggaggcccagcagtactacccggccatctcgcccgtggtgttcgagtgcatcatcattcccttcatcatccctggcggtggcgcggcgccgaaccagaccgtcgtggacgagagcctggagcggctgaggggtgtgctggggatctacgaggcccggctggagaagagcaggtacttggccggggactccatcagcttcgccgatctgaaccacattccattcaccttctacttcatgaccaccccgtacgccaaggtgtttgatgagtaccccaaggtgaaggcctggtgggagatgctcatggcgagaccgncggtgcagagggtctgcaagcatatgcctaccgagnttaagctacg

SEQ ID NO: 144672 - DNA, 2666 bp, Zea mays
  Clone ID: MRT4577_63427C.1
ggcgcatgcggcagcaggcgcaggcggagctgggccgcgcgcacgcactacgggaccacgccgtgcggcaggtggacgccacgctgctgcaggtcacctgctacagctgccgctgcaagttccgggcacgtgtggctggcggcggcgccatgagctccgaggtggccagctacgtctcctccgttgtcacggccgagggcggcgacgccgaggtggacgacgacgacccgtctgcctcccccaaggacctggtgaaatatgcacagagctgcatgtacactcctgtctaccgtaactaccggtagtgctgctgggatcaattctgcagtaataaaatatgtcgacgcagatgatcctgcaatgttgtagtttttttttttttcatgacagggacgcccacagcgcgccaaatgttccagtatcatatatgcatagacaggtacagtgtctagcagccacaaaggtggtcagcagcagggccaacaaatgaaaaaataaactacaacattgcaggatcatctgcgtcgacatattttattactgcagaattgatcccagcagcactaccggtagttacggtagacaggagtgtacatgcagctctgtgcatatttcaccaggtcccttgggggaggcagacgggtcgccaaaccgagttcataagcttttgcagccacggctgcggcaatgcgcgcagagatctttctaatgttggtgaagggcgggaagattgatcccttgtcgaagttctcctgtgtggcctgagcagctagtgcttccgaggcggcaagaagcatgtcctcgtggacacggatggctccagagataacaagaccgaggccaaatccagggaaaatgtaggcgttgttcgactgtccaggtacaaaaaccttcccatcgtactccacagggccaaatggactgccactggcaaatattacacgaccctgagtccagttatatgcttcttcagcagtacattcagaatgagaggttggatttgacagtgaaaagatgataggcctctcattgaaggaagccatggcctcaacaacttcttttgtgaatgttcttccaactccagacgtcccaatcagaactgtaggtttgatggactgaacagcatcgtacaaagttgtcaagggctcatgctcatgtgcccaaggttttttgaatgactgaacggagtttttacgagagtcaacaatcaaccccccccccccccccacccaaatcttcttgcggcactcttcaattggagccgacgtctgttttgaaatctcaagagcaatgagttctgcaataccagttccagcctccccagcaccaaggaataaataagtgtgctctgccaaggtcccaccaaccaccttgagtgccgctaacaaacctgcaaggaccactgatgctgtgccctggatgtcatcattgaaaacaagatggctcttgctatattttgcaagcaaattaaaagcattatgattcgcgaagtcctcaaactgaatgaggactttctcgccatagatttgcttaacagcagccatgaactcttccataagctcatgatactcctcgccagttgcacgtttttgccggagtccaatgtaaaactcatcattaagcagtttctcattatttgtgccaacatcgattgtgataggcaaacaagctgatggacgaactcctccaagagcagtgtatagagcaagtttgcctacaggaattcccattccctgagaacccaaatctccaagtcccaagattcgctcaccatcagtaacacagataacttgaatgttcctatgtggccagttccttagaacttctaggaccttccccttgtccctcaagctgacatacagaccctgtggttgtcgaaagatggacccatacttctggcaggcctcacctacagttggtgtataaaccacaggaagcagctcctccacgttatcaattaaaagcttgtagaaaagcctctcgttcctctcctgaaggtccatcatggccatatagcgctgcaaagggacctggtactgccgcaggttgtgcatgatcttcttaatttggagttcttgaggcacaactgcaggaggaagcagcccccgcaagtggtgtgcatccctctccttctccatgaaagcaagacccttgttgtgatgtggatccctcaagagggtgtaaccgcttgcgacggagaaggcccagggcatgatgggcagctcctcggtggcgctgtcctcgccgtagtggtcctcgacgacgacgccggccgcggccgcggctacctccgcctcctcctgctccacctccgcggcggagcccattttgaccgcctccaccgccctcgacggcaaggcacgcaccttcgctgctgcggccctccgcaaagtgttcctgtaagtccgacatccgtcgcaactgccgccgccctcgcttcgtcctccccgcttccacagggaagcgggggaagctgcggcggtgcgcgcggagatcatggtggcttctcgagctcggcggatggagagagggaggcgggagcggcgcggcagtggcaacgggcgtcctcctccctccctcttcggaccggagctggcagtggagagggcaatgcgcgtggcgaggggtataaaagggaagcgagagggctcgcctcgtgccgaatt

SEQ ID NO: 144673 - DNA, 177 bp, Zea mays
  Clone ID: MRT4577_63428C.1
tcgttccaacatacagctaactggcgagccgtggacgctcgtccagctttggtggcctactaacgatggcttctttttctttcaatgtcatcttggtccaaaaattgaaaagcattattgatttcaatttaatgaaaataaattatattaaagaaaaaagaaacttattaggtcctt

SEQ ID NO: 144674 - DNA, 2155 bp, Zea mays
  Clone ID: MRT4577_63429C.1
gggcacccggccggggtgtcccgtcctcgcatcccacgccacaccctcccaatcccctccccctcgcgtctccacacctttcacacgcgacgccggagagacagagcgcgcgcgcgcgcccgaaagatgtcgacgtgcgcggcggacctggcgccgctgctgggcccggcggcggcgaacgccacggactacctgtgcgggcagttcgcggacacggcctccgcggtggacgccacgtacctgctcttctcggcctacctcgtgttcgccatgcagctcggcttcgccatgctgtgcgccggctccgtccgcgccaagaacaccatgaacatcatgctcaccaacgtgctcgacgccgccgcgggggcgctcttctactacctcttcggcttcgccttcgccttcggcacgccctccaacggcttcatcggcaagcagttcttcgggctcaagcacctgcccaggaccggcttcgactacgacttcttcctctaccagtgggccttcgccatcgccgccgcgggcatcacgtcgggctccatcgccgagcggacccagttcgtcgcctacctcatctactccgcgttcctgacggggttcgtctaccccgtggtgtcgcactggttctggtccgccgacggctgggccggcgccagccgcacgtccggcccgctgctcttcgggtccggcgtcatcgacttcgccggctccggcgtcgtccacatggtcggcggcatcgcggggctgtggggcgcgctcatcgagggcccccgcatcgggcgcttcgaccacgccggccgctccgtggcgctcaagggccacagcgcgtcgctagtggtgctcggcaccttcctgctgtggttcggctggtacgggttcaaccccgggtccttcaccaccatcctcaagtcgtacggccccgccgggaccgtccacgggcagtggtcggccgtgggccgcaccgccgtcaccaccaccctcgccggcagcgtcgccgcgctcaccacgctgttcgggaagcggctccagacgggccactggaacgtggtggacgtctgcaacggcctcctcggcgggttcgcggccatcacggccgggtgcagcgtggtggagccgtgggcggccgtcatctgcgggttcgtgtccgcgtgggtgctcatcggcgccaacgccctcgcggcgcgcttcaggttcgacgacccgctggaggcggcgcagctgcacggcgggtgtggcgcctggggcgtcctcttcacggggctcttcgcgaggcgaaagtacgtggaggagatctacggcgccgggaggccctacgggctgttcatgggcggcggcgggaagctcctcgccgcgcagatcatccagatcctggtgatcgccgggtgggtgagctgcaccatgggcccgctcttctacgcgctcaagaagctgggcctgctgcgcatctcggccgacgacgagatgtccggcatggacctgacccggcacggcggcttcgcctacgtctaccacgacgaggaccctggcgacaaggccggggttggtgggttcatgctcaagtccgcgcagaaccgtgtcgagccggcggcggcggtggcggcggcgaccagcagccaggtgtaaaaaaaaaatcaggagcaaattgaaaccgagctgaagttacgtgcttgcctttttcagtatgttgtcgcgtatcacgtttgaggtggatcgtatctgccggtcagtacgcagtgtttgggcaaatacttggctacttgggagtcgcaagaaattgtgtaaattatatagaggaggatggcgacgaagcacgcatgtgttacgtagttggggtttgtgtgcacatggtggtgggcaggggctaggagagggtttatctttaggttattttcgtagtggaatgaatcttatgatcggatatccatcgtcggaaggtgtggcgggctgctggtcaagataggtggcttctatgactatgagggttgaaacaacaagtggacgattctgtcctgtggtcactgctcatcatccaatctagcggctttgacggtcgtgcctttttagtatcaataatattattccaagtttaaaataaaaaaaaaaaaacggccagagagggcgcccgccgacaaatgagcgcgtcgacccggatatt

SEQ ID NO: 144675 - DNA, 458 bp, Zea mays
  Clone ID: MRT4577_6342C.1
ccggtttcggaatccgggccgacccactcgtaccgacgatacctagcactacttatcaaccttggctaccaagatattaaccctgcttgcgcgtgctgctttatcagtctgcgcgtcatatgcctccatcaatccacaatgaacacttgctcacagtgatattataccaaaattcctccgacctgttactacaacggtcttcgaacaccgagctgcccaagcttacaggctacaacatacgacatcgactagcatcttacatcatccaattatcccactgcaacatcaatctttgacacatcttactatacaaaccaactacacacaatatctagaaccaacactaccagccatgacacctctagatgtggtaaaccctgaatattacttgcaacatcaagtgctagcattcaaccaacagtgatctatctaacgtaactgcataccatcaactacat

SEQ ID NO: 144676 - DNA, 179 bp, Zea mays
  Clone ID: MRT4577_63430C.1
ggggaatcagaaattgtgtgaaaattttacaaatcgtacaggaacatatgcaattttcaaggtatcactccacaggcttaggcactaatttatatccaaacgctttacccttaaaaaaggaccgactttattcaacatatttcatggcgcacacaaagggggtttggatttaccaaggc

SEQ ID NO: 144677 - DNA, 588 bp, Zea mays
  unsure (1)..(588): unsure at all n locations
  Clone ID: MRT4577_63431C.1
gccggccgttcccgggttgcttgctcccaagatcaagcgcctcccgcctccagcactcttaactcaggggacacgatcgccatggccgccacatcgaccgccgccgccgtgctgtgcccgccgtccgtggccgggctccgcctggcgccgtctcccggccgggcgcgcgcagaacggcaagacgcacttcgacgccggcgacgagcgcgccaaggagttcgcggccctgctcaagtccaacgaccccgtgggcttcaacctcgtcgacgtcctcgcctggggctcgctcggccacatcgtcgcctactacatcctcgccacctccagcaacggatacgaccccaacttcttctgagcggtcgtcggggatgtactctacagacagccgtgtgcgtgtgcttgtcatgtatccgatcaaagtttggttaatttggacaagtagtgcaactgcagaataattggtatttgtatagtgcagcatgccaacatgaatttgatctgtctctgtcttcactattcnnnanaaaaaaaaaaaaaaaaaaaaaaaaaaaaaaaaaaaaggaaaaaaaaaaaaaaaaaaggccccta

SEQ ID NO: 144678 - DNA, 181 bp, Zea mays
  unsure (1)..(181): unsure at all n locations
  Clone ID: MRT4577_63432C.1
gagacaataaaatggctggagggacagaccaaactatctttctttttttgatanganaaagggctatgggggagggaggcgtcccattatttttgtttttattataagactagacctcgttccgtaagatacatgtatcaatattatataaaaacaaaccatcacttcttgtgctgctcat

SEQ ID NO: 144679 - DNA, 346 bp, Zea mays
  Clone ID: MRT4577_63433C.1
catcacatgttatacacaatgacagcgcacttgtttttatacaacagaggttcaaccatacataggatcccccgcacaggcacgaagcatacaaacaaatttgcacgtagttctgacaggagaataaccacagatctgctttagcatgggagaaaaacactaaggaaaggcaccatcctcaaacttggtatgcatccctacctcaatctctatgacagatgaggacagctcaccactgggcttcagcccattcatacttgatatgcatgcactacacttactctcgaaactgacgcaagaaactttggttttcatcaagggcggactgatgagcttgatgatgtgc

SEQ ID NO: 144680 - DNA, 1064 bp, Zea mays
  Clone ID: MRT4577_63434C.1
gtgcggcgctcaggcggctggcttccctatcgagtctttaatcaagcggtccccctgcttgctcccaagatcaagcgcctcccgcctccagcactcttaactcaggggacacgatcgccatggccgccacatcgaccgccgccgccgtgctgtgcccgccgtccgtggccgggctccgcctggcgccgtctcccggccgggcgcgcgtgtcgttccgcgcggcgccggcgccggcgcggcggtccgtggcggcgcgcgcggagctgagctcggcgctggtgatcagcctgagcacgggcgtgtcgctcttcctgggccgcttcgtcttcttcaacttccagcgggagaacgtggcgaagcaggtgcccgcgcagaacggcaagacgcacttcgacgccggcgacgagcgcgccaaggagttcgcggccctgctcaagtccaacgaccccgtgggcttcaacctcgtcgacgtcctcgcctggggctcgctcggccacatcgtcgcctactacatcctcgccacctccagcaacggatacgaccccaacttcttctgagcggtcgtcggggatgtactctacagacagccgtgtgcgtgcgtgtgtgcttgtcatgtatccgatcaaagtttggttaatttggacaagtagtgcaactgcagaataattggtatttgtatagtgcaccatgccaacatgaatttgatctgtctctgtcttcactaaaaaaaaaaaaaaaaaaggcccctacctgctcaagtccaacgaccccgtgggcttcaacctcgtcgacgtcctcgcttggggctcgctgggccacatagtcgcctattacatcctcgccccctcaagcaacggatccgcccccaactttttttgaacggccggctgcgggcatgttccccacacccccgtattttaccccgtgtgtgttgagccaaaaatctgatgcccaaggattggttaatttgaacaagtggggcaacggcgcgggtaaaaaaaaaaaaaaaaaaaaaaaaaaaaaaaaaaaaaaaaaaaaaaaaaaaaaaaaaaacccccccaccc

SEQ ID NO: 144681 - DNA, 535 bp, Zea mays
  Clone ID: MRT4577_63435C.1
gggggattacaaacgctcgcattgcaaacaattttggagttctcagtggaaacaattggatcacaattcaatcgggggattttttccggtccgggccgggtagcaaacctcaatatacgggaaagggccctttcattgggggaaatctatagggggctatacccccaactcaaaaactttaagcggcccccccttagggggggccttttataaggcattaaaactattagggggggtttggggacaaggggatcacaggaggattgggttccccctcaatcccccccaatcctcccggaatcccagggccccaaatcagcccttaagcttaaaaggaataacagatacctttgggggcaaaccaccgggctaaaacacaaacatatggggttttgcatcatccctgggggagggataagggtatccggggaccccccccccgggggatatgaaaaattttttttcccgggttgcccttggggccggggcccgggggggggacctagttgggtggcccgtgggggggggggggggg

SEQ ID NO: 144682 - DNA, 360 bp, Zea mays
  Clone ID: MRT4577_63437C.1
atatatatagttttaaattatattattgtggaccaattaatatatggtttcagtttactcttttttttaagggacatgcttgtttatttaggaaaaaaacacggggtctaaaataaaggtgcacttttaaagggttaacttgggagggccgttttctaggaataacacgggcaacaaaaatgcggtttacaacgaacaaaggggggccgggtctttattgtttcaaaaacagggggtgcctttaaaatccatttttttagggaaagccttcgaacaaaaaaaataaattttttgggggtcgctctagcagccgggatttaaacaaaattggtattccgggaaaattttcttacaaaaagg

SEQ ID NO: 144683 - DNA, 543 bp, Zea mays
  unsure (1)..(543): unsure at all n locations
  Clone ID: MRT4577_63438C.1
ccggccggggagtgcacggccctgcccctgccgctgcggcctcggcgccgcgcaccacgcgcacgccctctgctcctccggggcgccgtcgtccacgtccatggagccgcgtgccggcacggacttctcctgcctcagctggctcctcttccgcgtctccgcctacgacgacgacgacacccacaacctcctcctcctcgccgccggcgccctctagcacacacagagacacagacacagcaggcctgtctgcctgctgccgccaacagctcttactccctccacttctaccaatttgctccatccacacatagctaggttgttagttagttgagttctctctctgccgtctctcagtgtcagctgctgcaactcatcaatacaactgctgctagctagcttattagccttagctgcggtacacccaaaccaagaaagctaattaagggaaggaaataaagctccgtcgtctcgagccgatcgacgaccaccatgttggcggcacggcggtgcgggggcggtcggngatggctggatagggcg

SEQ ID NO: 144684 - DNA, 658 bp, Zea mays
  Clone ID: MRT4577_63439C.1
ccggggtgcctacctgccctgccactgccacacacaccacatataactccctggtgtccgtgtccacagatgagtgcacggccctgcccctgccgctgcggcctcggcgccgcgcaccacgcgcacgcgggtgcctccccttgctcctccggggtgccgtcgacgtcgtcgtccacgtccatggagccgcgtgccggcacggacttctcctgcctcagctggctcctcttccgcgtctccgcctacgacgacgacgacacccacaacctcctcctcctcgccgccggcgccctctagcgcgcgcctcctgccgcccacagctcttcttccctccacttctaccaatttgctccctccatccacacatacatacatagctaggttagttagttagttgagttctctctccgccgtctgtcagtgtcagctgctgcaactcatcaatacaactgctgctagctagcttattagccttagctgcggtacacccaaaccaagaaagctaattaagggaaggaaataaagctccgtcgtctcgagccgatcgacgaccaccatgtcggcggcacggcggtgcggcggcgtccggcgtcggctggatagggcggcggcgggagacaacgccaacggatacgtcgagactgaccccaccggtcgc

SEQ ID NO: 144685 - DNA, 386 bp, Zea mays
  Clone ID: MRT4577_6343C.1
ccggccgggacggcccatacccatacgtatgcgctccctccctcggccctcgatcgtacggcgcgagcgttgcgctccacgccttcctcttcctcgtctggcatcgcgaaccgccgcaccccatccacccgtccacaggtgacagcccacccgcttctacaggtctgtccccgagggagggggtggcggttctgcgggcatgaccgggcgcaccaggataatctaagaggaggggcaggcacccttattgcaggccccccaggaggggatatggtggcagaggaagaagcccgactgctccagggggggatttggtggacgcaaggcggggagtggaagccttcctgtacgcaacatgctatcgagggctatagggcatgatcttg

SEQ ID NO: 144686 - DNA, 522 bp, Zea mays
  Clone ID: MRT4577_63440C.1
ggaggaagaatactgcgtctttaatgaaacactgaggagtacacatatgagcggctagcggacatgttcaatatgcacagtggtagaacatgcgtacaaacatgacagcaatgttgaatctagagggctaacgcgcctttactgaaatgctactcatgactttcagagacactatgaatgcatgcatacaaaccagcaaaggcaaaattcctaaccaaccaatataccctttcatgcaacgtaagaagcggacctggatcatactctaacaacaacaccatggatgacctgaggggtctcacattatgagggtcttggacacacaaaaggcctacatgagaacacccataattgactccaagtcaataactcacaaaaattgattagtcgatcaattccaattcattgccatctctcaacaacctgcatgctatgtgcactcaccacctgaaggatttacttgctgctcgcttccacttaaaatgctagcctgcacctaaatctcctatcctgggacacata

SEQ ID NO: 144687 - DNA, 321 bp, Zea mays
  Clone ID: MRT4577_63441C.1
acgagtccaaccttgatgggaccccgcttatcaaggggggaaggaccgtggggttgggggccgcccacccgcggggggtggcaagaaccggggtgctttccaaggcgaattcattcaaggtggcttttaaggatttggaccccttttattagttgcagcatttggtggccaatctggtggcaatgctgtccaagttgggacaaaagaaattccatccaagatgagggatgggggctattaacaaaaagtgaatgaaactgtgaatggtgtgttgcaatataaactgccgaaaatggaaaccagacttgggggatcattaaa

SEQ ID NO: 144688 - DNA, 449 bp, Zea mays
  Clone ID: MRT4577_63442C.1
ctcaaaacttaaaaccaatcgatatttagaccggcgacgaggcattagcgctcgccggcaatggatttttgactacggagtcgcactgtgcgagcatgtctgagtgtgcacatgaagctctcgctctagcaggcatagctggcccagtgccttcaaacaaccaatgatatggtgcagtctagtgatgttgaagaggcagctggcccatcatgtgctcatagtatcagacctgcattacctaagacccattggcagactattgctcatggcgtcaggtagacaggtgccgagcttgctgccacgggcatatgtgaacactactctgttatggtgggcattgaattctgtggactacactccgtatgacgacacaatgactgtggaaggctctatgaggctctcatggatcacatccaagacaatacactcattggtcaccttggtggatc

SEQ ID NO: 144689 - DNA, 521 bp, Zea mays
  Clone ID: MRT4577_63443C.1
ccaacattattaggcataaaaacaagaacccacaggcccgggacccccacgggcccccgggccccacaggcacaggcgggcgggggggggggggggaacaggggaagggggggccccacataccccaagggcaaggaaacgggaaaagggttcaggggcccagggccaaaagcccaaaaccggaaaaacccggaaaaagaaaacggggaaggggcccgggggaaaagagctaaagaaagacggaaaaacacaagcttccatgacccgagcgggccaagggccccgggggggggagggggggaacaaaaacaggacccgaaccagaacgaaaccggacgcggggggggacccggaaaacccggaccgggacccggaggcgaaccagcttgcccaaaagggggggggaaaagagcccgggggaaagaggggaaaagggggttccggggggaaagtgttaaccggtaacaatttcacacaaaaaaaaagccgggagcataaagagtaaagccgggggggcccaa

SEQ ID NO: 144690 - DNA, 510 bp, Zea mays
  unsure (1)..(510): unsure at all n locations
  Clone ID: MRT4577_63444C.1
tttggggtttttggaaagtaacttcttatttctgggggggcacatacatcactccaaaaaactttattattgagttacaactaataatcaatctaaaagagggaccaccaatgatgtgttgttggtaggaggctgctgggtttgggagggcgggtggtactaaggggaacaattgtggtagttgtaagaggggtgcggggttagccgcaaactgcttgtggaaagggggcaactgtggctgtgtcaagaaggaggcacgacttgctgcagctagctcgctaaatgggaggagtatttgctgctgcgaataagcagcgggggtcagtgcggccaattgggtaaatggaaaaaggtgttgttgctgagagtaggcantanctanctgggtaaatgggaataggtgtggcgtggaataagcagcagggggtcagtgtgaacaggtgggtgaatggaaaaaattgttgttgctgagagtagggagaaaggggtgccanagctacttgggtgatc

SEQ ID NO: 144691 - DNA, 223 bp, Zea mays
  Clone ID: MRT4577_63445C.1
cccggccgacggcacaagaaccagtctaggcggtcgatgcttttatttaccgcgtatgagaacggaaccgacaagggaagctacacacacccgacttcgaacggcctgtatcggttcacggagcgcagctgagagccatggcccaccgacgcccaggcgcggacgctgcttgacaggctctttggcggccagagcccctacgcgcggttcccgacccagcgca

SEQ ID NO: 144692 - DNA, 265 bp, Zea mays
  Clone ID: MRT4577_63446C.1
tttttattaaaattttaatctgtcatattataccttttccggttatgcacaaatttacaacaagaataaccaatacatacatatactacacataaaaaagttttcaacatcccaacttatttaaaaaaataatccaacaaaacccttacactataccaactaccctcccactcatatcatgaacctcaacaaaacaaattgaccaaactccaaaactacacatcctatctacgaatactactaaactgcccaaaaaagttgactc

SEQ ID NO: 144693 - DNA, 268 bp, Zea mays
  Clone ID: MRT4577_63447C.1
tagcgcgtttgggccaatggggcaactttattgctacgccaggccggggcacgctcgcgtgagagtaaaagcacgcatccgtagagaccggaaggaccgaaggagcttgtacctaggaagacttgccttgctcgtttgcatcagcctgagcggtcgtagagcagtcggacctgactgagcctccaactccaaggcagagctcacaacctcacagcgaggatgcaagttgaatgagtgtcgtgcccgcgtttgcacatgtcacctgcag

SEQ ID NO: 144694 - DNA, 314 bp, Zea mays
  Clone ID: MRT4577_63448C.1
gaaaaaaaaaaatactaaaaatacctaaaaataaaaaaaaaaaaaaaaaaaaaaaaaaaaaaaaaaaaataaaaaaagaggattaaattaaaaaggagggggggggtcctttttaaagtaaccaatctaactaactcgtgcattcgacgtaatagtttttttatagggtaacttaaattaaattcattggccggtttttaaaaacgttataactgggaaaaccttgttgttacccaattaaatcgttttaaataaatccctttttcttcatttgggaaaataataaaaaagccctcactaatcgccttttcaaa

SEQ ID NO: 144695 - DNA, 133 bp, Zea mays
  Clone ID: MRT4577_63449C.1
gagacattatcacgatcaaggaaagatggtattacggacgacaaggagtcgcccgtggggcagtgatattgatcagttgtccgggacgtggggagcaggttgaaggtgcctcagatgacactagcaacggcaa

SEQ ID NO: 144696 - DNA, 593 bp, Zea mays
  Clone ID: MRT4577_6344C.1
atttcctctccctccctctcccacgccactctccctactccctccctctctctctatctccctctctctagctccccatgcagcagcagccccccctcccttggagctagcgaccgagccctcccatgctcctccctcaccttggcagctcttccatggcgtcaccccctcctctacggtagcaaggtgtaggaccgagagatgctgatcgtgcaagtgatgaggtgccaaccacaagatgcagttggtggatgacctgaagaatggtggaattaaccagtggatgctcgccaagcgagtaccccccagcaaacactatctaagtgttaaattaaaggtacctccttgattggttgctggtgtgacttgaccttcatccttgccaccgggacagatggtcgagagggttactgcttccgcaggagaggaccaggagtagcgtggccaggcttcgccattattactcggttttctccccgaagatcctgaagaaagaaacaccttcagtagtgccgaagctatcacctataaagcttcggcataatgacatgtttcaagacaaaggagtgaaccgacttaaagatgaaatgacc

SEQ ID NO: 144697 - DNA, 864 bp, Zea mays
  unsure (1)..(864): unsure at all n locations
  Clone ID: MRT4577_63450C.1
attgccagcccaatctcacggccacgggcctcagtgcacaaaaaccctagatcgactgagggctgaggcacccgtccggtcgtccaactcccagtcccaagtcccacaaaaaccctagtcgcgtcgcgtcctcctgtgatactgtccgccgtccgccgtcttggtgaatcgtcccgggctcccgacggccggctccccgcaaccccaagtccccaacgcggcaagccggcaacgcccgtctgcacctgctggctgctgctgtgtgggcgccgggccagcggctgtgcgactgctgcggcctgcgtcttctgcctggtgcggtggtgcctgtgctgtgcggtgttgtgcggtgctgcctgctgcgtgcggtgctgtgtgcggtgttgtgcggtgctgcccgctgcgtctggccgtcctctgctgcggtgctgcctggtggctggtgcggtgctgcctgcagcccggcacggctggccgcctggccgagtggccgactggccgtagtcagattcgtgacccgcctggtgcggcagtggtgtggtgcctgactgcctgcacggctgaccgagtggcctgactgcctgcgagcctgtgagctgcgactgcgactgtcgtcttccgtcttcctcaggccgcgacgctcggattccccaactctagcagccgtggcgccacctccacggcaacccgtctcaccgaccgccgcagggacgggcggagcagctcctgctcctttccgacctctaggacaaggagtctctcttcctccccngactcctttacgtttgtctatcgctgctcgacggggncgtcatttccatggatgggaaccgaacttgatcgatgacatacttgtcatcattt

SEQ ID NO: 144698 - DNA, 274 bp, Zea mays
  Clone ID: MRT4577_63451C.1
tcgtgcacacagggggcgaaagggacgcagggcggaataggtaaaaaaagcgcgcggaaagaaccacgacaacacaacggaggagaagatcgccacgaccaagaacgctaggaggggagccaagggaaccaaccccaacaaggggggcggcacgaaggagtgcgcgaaagcggccagcagaggggccaccggacccgcgacagccaagcgacgagacggaggggggcgccggcagaggagaacctaacaggccagaggcgaaacgaaaagcaca

SEQ ID NO: 144699 - DNA, 418 bp, Zea mays
  Clone ID: MRT4577_63452C.1
gctttgacatgatccgatgatcagagcgaggcggccccatgtaactttttgtacggcagaatggaaatggcaaccattccaggggatctgatctggcacattgtgaggaagaacaacatcttgcttgtgaagcagttcggcaacagcaatgccaacgtgcaattcaccaatgagccaaacaacctatacaacatgcactcatttaaacactacgaattggcgaacaagaagactgtgactatccactcagctgcaaaggactagactgtggatctctgtactaacaagaccaacaaacaaaacgcacctgcgaagctcatgcacaagtctgagatgctcaaggagcatcgcaagatggccaaggctgtgaaaaaccaggttggtgacaactactacaggcctgatctgaccaagccag

SEQ ID NO: 144700 - DNA, 575 bp, Zea mays
  unsure (1)..(575): unsure at all n locations
  Clone ID: MRT4577_63453C.1
ccacgcgggcgggcctgctgagaaaggaggcaggaacttcatgattgatttcatgatgggcggggtttcanctgctgtgtcaaagactgcggctgctcccatcgagcgtgtgaagctgcttattcagaaccaagatgagatgattaactctggggggggatcagagccgtacaangggattgtggactgcttcaaacgtaccattaaggatgaaggggtctcttccttgtggagggggaacactgcgaatgtgattcgttacttccctactcaggctttgaactttgcatttaaggactacttcaagagggggtgcaacttcaaaaagatagggatggtattggaagtgggttgctggcaacctgggctctgggggggctgctggggcttcctctttgtgttttgtgtgctccctgggctacgcgagaacaaggtggggtaatgacgcgaangctgcgcaaggangaggtgaaaggcgnttcaatgggcttgtcnatgtctaccgcgagacactcaaggctgatgggattgctgngctttaccgtgggtttaacatctcctgtgtggggatcatt

SEQ ID NO: 144701 - DNA, 543 bp, Zea mays
  unsure (1)..(543): unsure at all n locations
  Clone ID: MRT4577_63454C.1
ctttcgtaaaaaaaaaaannnaanaaaaaaaaaattttccaaaaaaaaaaaaaaaaaaaaaaaaaaaaaaaaaaaaaaaaaaaaaaaaaaaaaaaaaaaaaaaaaaaaaaaaaaaaaaaaaaaaaaaaaaaaaaaaaaaaaaaaaaaaaaaaaagggcccctagggcgggggcggtttaaaaattaggggacccccggggtgggggaaattcaaaataaagtttttcaaacccgccaacctcgggggggggcccggaaccaaattcccccaaaagggagttaatttacgggggttaatgggcggtgttttaaaaaggtggggaggggaaaaacctgggggttacccaatttaatcgctttgaagaaaatccccttttcgcagggtggggaaaaaggaaaaaggcccgaacgaaacgcttttccaaaaatttgcgcaccctgatggggaaaggaaaattgtaagggtaaattttttgtaaaatttcgggtaaaatttttgaaaaaaaagctaatttttttaaacaaaaggccggaaatgggaaa

SEQ ID NO: 144702 - DNA, 577 bp, Zea mays
  Clone ID: MRT4577_63455C.1
agtcccgccgccgccgccgccgccgccatggtcaccgccggagctctccacgctggcagccgtgtcctcctaccgatccgccgaagcttcagcacaccctggtcccacgtccgctcccacctccactccaccaagcccccttctgctccactcccgcccccacctccgccgccgccttcttcccacgcggcgtccacgcgcttcacccctgccttcacccctaccactaggaggagcggatcaatcggctccggggtagtcgcgtggtacctcggctcgatcgaggcgcggccgctgctgaccaagagcatcacggctgccacaatttacaccgttgccgacctcacctcccagatgatcacacttcctgctgaggagtcactcgatctaactaggactctgcgcatggctagttatgggatgctgttctcaggaccttcactgcactattggttcaactttatctcaaaagtagtccccaaaaaggatgtagtgagcaccttcaagaagatgtttctaggacaagcagcttatggcccaactattaattgtattttcttctcgtataatgcaggat

SEQ ID NO: 144703 - DNA, 155 bp, Zea mays
  Clone ID: MRT4577_63456C.1
accaaatctactccacactatttctatacactatctacaaagcaataaatacattctttacatctaatccactttgatctactatccttcttcaaacactactaaactcacaatccaaaattctttccatatgatgaatctacaccattctacat

SEQ ID NO: 144704 - DNA, 404 bp, Zea mays
  Clone ID: MRT4577_63457C.1
attcggctcgagggcagattgctatcgaaaaattttcagaatctcgggcactgtgggccgcacggccatgcttcagcttgccttgcgagaaatgtattacgctaggctatgagccctcatgcgaacaaacatactcggactttgtggccaagctgagtttactcggggcatgctgaaactcttatcggcttgtgttgcggtgccacaatatcacacaagctccaaaccagaagccacatccttaaagcctgggattgataaagggcgagccaacctatattgagtgtcatgccctgccaatcaattttgcacagtgtcaagcggtagtaccagttgaactaattaaggggccaattatcctagagggactcatggccataggtgctcccggagggaaattcttt

SEQ ID NO: 144705 - DNA, 302 bp, Zea mays
  Clone ID: MRT4577_63458C.1
tttattgtatcgtgtttaggggttttaagggagtgggaccaaagcttggtacaccatttatttatatcttatacgagttcacatggtgtacatttaaggctacaactattcaagccagaacggccatttcggcccaatctataaagcctgcaactatttcttataagagctggctaatattatgacatactatactcacatcgtgtgggtggttagtctggacatacatagatttttccatccttcaatactccctaaacctgctgaggagaaccatatagcttctcaatggcacagccagc

SEQ ID NO: 144706 - DNA, 121 bp, Zea mays
  Clone ID: MRT4577_63459C.1
tacattccatccaatatctacatatatattagacataatcagaaatattcagggattaaggaattctacaaggtgatgttgggtatgaacaactttatcaacaacatctacatgaaacaca

SEQ ID NO: 144707 - DNA, 389 bp, Zea mays
  unsure (1)..(389): unsure at all n locations
  Clone ID: MRT4577_6345C.1
agactatcaagcaccaancacaacgcgaatcggggctgtttctaaggtctcaggctacccctttccgatctccaattcagtccaagtcaccattactgtactagcacttcacacgacaagactgctagaattaggtcaatagataaaatccatcctttgcgaataatggctgggcatcattctcatattgattgcgtccactgtcatctaaacagtaactacattgccactgactctagcgacaaaaccttaaagctatgggatgttcagaccggtgaatgcatacagatgtctattggtcataggagtatagatttatcactgccaatgtcacctgatggacaatccatcacctacggagatgaacatcgaacaatcatgatatggga

SEQ ID NO: 144708 - DNA, 581 bp, Zea mays
  Clone ID: MRT4577_63460C.1
gtcaatacttaggtataggtagggctgactacgccacctcagcagctgggactggaattgcttacaatgcatctggccactgactgaattcgaagtagggccagtgtataaagaccggcttatctctcttaagacttagtccactttctactagaatcagattttctagtttgcaagcaggtgtgccagctgtaacaaaaacttacggcttaggtggatttctttagtcagtctataactcaggcttttctttataggactcccacacaagtaagtagctagctagctggtattgccaaagccaaaaacactgctgcattcgaaaaggcgaaccgcgcggacccgacttcttccttttatgctgaaactagccgccgggggaaaagagcccggaagggtaaaaaaaacaactagaagccattgggctattactgctacagcgagatattgcctgaaagagttatcccaaaagaaggttcttctgaaacgagtgctcaagccaacaagcaaacgtatacttgattttcttcttttcttgcagcattcctaaactcaaagctctatattctattcttacgctt

SEQ ID NO: 144709 - DNA, 635 bp, Zea mays
  Clone ID: MRT4577_63461C.1
attcgcatgcaactttttttttcttggttcaaaatcgaaatagcattgctaatgttaatccagcggttcatttctccgtgctgtgcctgttaattaacgtatcagttagttaacgtatattctgatgttcaggataatatttatataaataaaaaatatagcaaaaataaaatgatgttcctataaaataaaatttctgggttacgtaaggttagggacgacagcaggcccgggttaggtctgctaaataataagacttcagctcgtgctgatgaggcaaagaacatggttaactgaaatgcagatgaaacactacatatataataaagccaggtcggtggcaaaggattttaaacagcgatatgatatagattataaaaattacaatgtattttttattacattctagaggagaggaggaagtctatcttagtaaccaccggagtatgagagcacttcatagcccaatcatgtgcaagctgtcaaagctgtttatggtatgaagccatctctaagagtttgatattttcaattcaatgataaatttctgtatcaagattttcatgctttaaagacagatatttttctatttttaaacaaggaaagtgtctccatattacatgtacggactcata

SEQ ID NO: 144710 - DNA, 1307 bp, Zea mays
  unsure (1)..(1307): unsure at all n locations
  Clone ID: MRT4577_63462C.1
gaattaaactgctcagggctcactggctcctctcagcgctaagcccagctgtaaagctaaggttccgacttccaagcagtgtggtcgccggaagagcgtagcgagcggcgttcagctcaccagcgttgcattggaaggaagggcgagagacggagcgtgagatcgatcgagcttcaaggagggcaagatgatttcggcggcggacttgtaccacgtgatgacggccgtggtgccgctgtacgtggcgatgatcctggcgtacgggtcggtgcggtggtggcgcatcttctctccggaccagtgctccgggatcaaccgcttcgtggcgctcttcgcggtgccgctgctgtccttccacttcatctccaccaacaacccctacaccatgaacctgcgcttcatcgccgccgacacgctgcagaagctcatggtgctggccatgctcaccgcgtggggccacctcagccgccgggggcggggcagcctcgacctggactggaccatcacgctcttctccctctccacgctgcccaacacgctcgtcatgggcatcccgctgctcaggggcatgtacggcgacttctcgggaagcctcatggtgcagatcgtcgtgctccagtgcatcatctggtacacgctcatgctcttcatgttcgagtaccgcgccgcgcggctgctcatcgccgagcagttcccgggcaacgccgccggggccatcgcctccatcgccgtcgacccggacgtggtctccctcgtcgaccacggccgcggggacgccatcgagacggaggccgaggtcagggaggacggcaggatacacgtcaccgtgcgccgctccagcgcgtcgcgctccgacgtcgtctactcgcgccgctccgtgggcggcttctccggcgccaccccgcgccccagcaacctcaccaacgccgagatctactccctgcagtcgtcgcgcaacccgacgccgcggggatccagcttcaaccacaccgacttctactccatggtcggccgcagctccaacttcggcgcggccgacgcgttcggcgccgtccgcacgccgcgcccgtccaactacgaggacgacgcgtccaggcccaagtacccgctgcccggggtggcaggccactacccggcgccctggagcgccaggaaggcggcgacgaacgggcatgccaagggcgaggacctccacatgttcgtctggagctccagcgcgtcacccgtatcggacgtcttcggcggcggcgcgccagactacaacgaccacgccggggccgtttagaggtnccaagaaaaagtacgcg

SEQ ID NO: 144711 - DNA, 367 bp, Zea mays
  Clone ID: MRT4577_63463C.1
cacaacaacaacaaaccttaccaagttgagggcaaaacagcccggagaaacaaacactcccttgagggggtttaagcgggggggggcaaagccccttaaggggacctgttccgggtaaaggagggcccccccctaaaaggggccctggtcctagatcaggaccttggccccctcttttgggcccttataaaaaacctcacccttggccaacttggaaacctcctggccaaaaaagggcccaatgccaatttgggaaaccggtggcccaaaaaaggccaaaagccccttgccataggggggggggtaaaaccctcccatgggcttttggaaaaaggcaaccttggggaaggggcccatgggggggggg

SEQ ID NO: 144712 - DNA, 1441 bp, Zea mays
  Clone ID: MRT4577_63464C.1
ccacgcgtccgggatggtccaaggagagcttggggctcgctgccacctcgcgcgccagcgcctaaataaatcactcccacgcacacccaccaccgcgccgagcacctcctccttcccttccttctctctcccaccctcctcactagctctatctagctgagtgaactgaacagctcactggctcgtcttagctaagctcagctgtaaagctaaggttcggagttagctagcgtggtggccggagagtgtagcgagcggcgttcagctcaccgggggctgctgggtgagtgagggagctagcgtcgtcgtgagagcgctccacgatgattacggggacggacttctaccacgtcatgacggccgtggtgccgctgtacgtggcgatgatcctggcctacgggtcggtgcggtggtggcgcatcttctcgccggaccagtgctccgggatcaaccgcttcgtggcgctcttcgcggtgccgctgctgtccttccacttcatctccaccaacaacccctacaccatgaacctgcgcttcatcgccgccgacacgctgcagaagctcatggtgctggccatgctcaccgcgtggagccacctcagccgccggggcagcctggagtggaccatcacgctcttctccctctccacgctgcccaacacgctcgtcatgggcatccccctgctcaagggcatgtacggcgacttctccggcagcctcatggtgcagatcgtcgtgctccagtgcatcatctggtacacgctcatgctcttcatgttcgagtaccgcggcgcgcggatgctcatcaccgagcagttcccggacaacgccggggccatcgcctccatcgtcgtcgacccggacgtggtctccctcgacggccgcagggacgccatcgagacggaggccgaggtcaaggaggacggcaggatacacgtcaccgtgcgccgctccaacgcctcgcgctccgacatctactcgcgccgctccatgggcttctccagcaccacgccgcgccccagcaacctgaccaacgccgagatctactcgctgcagtcgtcgcgcaacccgaccccgcggggctccagcttcaaccacaacgacttctactccatggtcggccgcagctccaacttcggcgcggccgacgcgttcggcatccgcaccggcgccacgccgcgcccgtccaactacgaggacgacgcgtccaagcccaagtaccctctccccgtggtgaatgcgacgtccggggcgggggcggcggcggcggcggctcactaccccgcgccgaacccggccgtggccgcggcgcccaagggcgccaggaaggcggcgacgaacgggcaggccaagggcgaggacctccacatgttcgtctggagctccagcgcgtcgcccgtgtcggacgtcttcggcggtggcgccccggactacaacgacgc

SEQ ID NO: 144713 - DNA, 248 bp, Zea mays
  unsure (1)..(248): unsure at all n locations
  Clone ID: MRT4577_63465C.1
cgcggncgcgtgggcctgccctgtgggtggggggggggtccactcccctgtcggggtcgcgccgtttgccggggctggtgggttcgttcagtctctgttgccggcgacgctgccgttcgtcggtgccctcctgggggtgtgttcctttctgttcctgggcgctcttctntgttttgtggggggcgatccttggtagcctttgttggggttgggtgtcggtgctgggtttgtgcccctgctggttgcgt

SEQ ID NO: 144714 - DNA, 1732 bp, Zea mays
  Clone ID: MRT4577_63466C.1
agccacctcacccccacttcgccctccactcccggtctcccgcaccgtgtccgtgccgacacccaaggcccgccaggaaagcgaaagagagcgtcagtcacgcacgcaccgatggcggacgtgtcgccgctactgccgccggggaagccaccggccaccacggcgcggttcgcgcggtgcgcgtcgagcgcgaacgacgagctccgcagcttccgcgcctgcctggcctggctctgcgtggaccactcctcctccccgcgcgtggcggccgtgggctcctgggcggtcttcctcctcctcgccgtcgccgcgcccgcggccgtccgcctcctgggcaccgctccgccgcggccctgcgccggggaggtccaggtctcgctcaccctggccgcgtcgctcgcctacgtctgcctccgcgcgctcctccaccgcgcggggggcctccgccgcctgctccacctcgacagcctccgccgcgactccgaggacgtgcaggcgggctacgccgcgcagctcgcgcgctccttccgcgtcctcgcctgcttcgtgctcccctgcgccctcgccgaggccgcgtacaaggcctactggtaccgcgccgccgcggcctgcgccgtcgaggtcgcctcctgggtgtaccgcgtcgcgctcttcttcatggtctgcgtcctcttccgggtcatctgctacctgcagatcctgcggatggtcgggttcgcgcgcgagttcggcaggttcgccgacgtcgccaccgtgctgcagcaccaccgccggatcagggagcagctcaggaagatcagtcaccggtaccgcaagttcatagtctgcagcctcgtgctcgtctccgccagccagttcgccgcgctactcgccaccaccaggccgcacgccatcgtcaatctcgccaccgcaggcgagctcgcgttgtgctcggtcagccttgtggcgggtctgctgatgtgcctgtacagcgcggcgaagatcacgcacaagacgcaggcgatgacgagcgtggcggcggcgtggcacgcggacgccacggtgcacgccttcgacaacgaccaggagaacccggacccggacctgccgcccaccgcgggctacctggcgcccgccaacgcctaccgcgtggccgccggcgacgagtccggcagcggcggcgacgacgacgacgacagccggagcgagtgctcctcgctcgacgacccaaagtacgtgccgttccaggccaacaacatcagcttccagaagaggcaggcgctggtgacgtacctggagaacaaccgggcggggatcacggtgtacggcttcgtggtggaccgggcgtggctgcacgcgctcttcatgatcgagttctcgctcgtcatgtggctgctcgggaagaccgtcggcatctcctgagctcacgcacacccttctttttgccggctctggctcctgtcaggtgcagagttctcagcggaggattgtacaaagtgagtgcagatacaagatactctgatcatctgatggagatcagaacagctgctttgatttgtaggttcatttgacagctcgtatgttagatatcgcaacttctagttcgtgtgttttgatttgtgcttgttttttttttcactgcgttgcttcctccggtatgtcggggtttttttttttttttttttgtaactgacgcttcatagacacaagtgatgcacgtgctgtggtgtgctgtgaaatggaatttgcaagg

SEQ ID NO: 144715 - DNA, 276 bp, Zea mays
  Clone ID: MRT4577_63467C.1
tctttccttctacctctttcttttcttatcaactcagacccgcaatatctccgggcgatgctctctcacacaaggtgcggacgttccactgtgcgtcattcatagcagatcaaccctccccatacctccccaacatatccccctccgaaatgcagtacaatgctgatgataacattgcccaaatcgtacccaacatcctcatggaccccctcaacatgatctgttgcgatttcggccccttctttcctcatatttccaccaaggagcctatttggc

SEQ ID NO: 144716 - DNA, 370 bp, Zea mays
  Clone ID: MRT4577_63468C.1
ggcgacaacgctgcggccatgcgatacaccgaagtgcgcatgaccaagctggcgcacgagctgctggccgacctgcacaaagaaaccgtggactgggtgccgaactacgacggcaccgaaatgatcccggcggtcatgccgacccgtattcccaacctgctggtcaacggctccagcggtatcgccgtgggcatggccaccaacattccgccgcacaacctcggtgaagtcatcgacggttgcttggccctcatcgacaaccccgagttgaccgtcgatgagctgatgcaatacatccccggcccggacttcccgaccgccgcgatcatcaacggtcgcgccggtatcatcgaagcctaccgtaccggtc

SEQ ID NO: 144717 - DNA, 664 bp, Zea mays
  Clone ID: MRT4577_63469C.1
atctctcctctcgatgctactcagcctccttcttcgacctcgaaatccccgtatccatgtgtagcaatcagaccagcaccctcttcaatcttacgcccaggccggaatgcctcctacctacccgcagcatctgtggcaccggacgtaagaaactgttcatcaaacatcaaaaaccgcccctggaaagcggtgtgaatatctaccccaatcagtgcgaaccatggacatgccaaatgtcacattagctcccatacaactattcaaaccataaaaaaatcggaaaatatgtgtgtacctgtacgtcacagcaacttgctgtctatctcacacatgacgtcaccagtacgtgacgtacctactgtgatatgatatcatcatgagccatgcgatcctgtgagctctctctgtatcgttccgatgagcagcactataggatgatcttactcctcccaactgatgaaactcttgcgtgccaaatcaaggaagacgatgaaagcgactacgatcgtgctgtgactgttcacacagctatgtcggaggatcaaatctgaaccctgctgaattcagcacgccagaaacttccctgcctggatatactgatgctcaccacctaaatctaaaatttcagtgtataatgcattgctacagagacatccatatgtct

SEQ ID NO: 144718 - DNA, 270 bp, Zea mays
  Clone ID: MRT4577_6346C.1
gataaacaaagggggttgggctggttctgcacagacgttaacatcaacgcacatctaaatacatggctcatgcaccggtttatctcatatgccctctaaacgtaaaagcgcatcgcacaggaatggagcttacaactaagttatcagagcaaacgcattcaacctctggaacaataccgcactataaacatatgagtgatgactccatggctacttgcaaacttaggaccggtgctatgtttttctttaccaacccgaaagagttaccac

SEQ ID NO: 144719 - DNA, 403 bp, Zea mays
  Clone ID: MRT4577_63470C.1
cgaaagccattgggaattcaccaagcttttttaccatgccacctccataccatcataacattggggagcaacaagaaggggggggccatgagagccaccctttttgggctactccttactttaaaccccatgaaccacccccaccattatgttttatgcccaccacttttggtaattactactatacctaccttcgccttaaagggaaggtgcttttttttccccctttttgtccaaaaaaagtaaaggggaaaaacaagcttgaaaaaaaaaaaaaatactttttgtagtagtggaaaagaaaaaaaaagaagaaaaaaggggtggggggggggttttcatgcatgtctcatgtatactgggaatccaatccaatccaatccggggactttgttccaaccat

SEQ ID NO: 144720 - DNA, 613 bp, Zea mays
  Clone ID: MRT4577_63471C.1
ggtacccgcggcccccaaaactatttttttttttttttttttttaatttttaaatttattttttttgtgaacgataaacatcaaaattgcatcagtagacgaaaggcttacaattctgggtcggggctctgctatatagttaattgacagatagaccaccagcttataactcatcgacaatgcaatgctatgcctttaccctatatacatcatgctatcatctccaggtctgctacctgctttccaatcttatcacagatgaacaatagtgatgtacgatgcatgatatactaccgcctgaacaccagtgcaccagtcaccagattaccaaaacctacaccagtcacgacacgaaatttaccagcatggccagtttaaaagcttggccactcaaacctacactcgtcataagtggttaatgcaaaattgagctctctactgctcctcgccgacctcctcagcctacagtcgtgccgggttcttgtatggtggaaggacatggaacctcttcacatgatctttccttgacctgcagtacgacaacaggtgcctctcgtccacctccccagtatctgataaccggacaccgtactccagtagcctcctcacatcc

SEQ ID NO: 144721 - DNA, 1875 bp, Zea mays
  Clone ID: MRT4577_63472C.1
ctcgaggccggccgggccgggcccacagcagctgcaagatcaccctggattcctggaggacggagagagagccgagcgagcagctgtcggcacttgggagtggcactgtggaatctggagaacctaggtagaaaatcaagcaaagcatctcccactccaagcagtagcaccaacaccgccctgcattcagcgctgccagctttcacataaacaagttggggaatcagttgaggttttctaattcttcttcttggaaggattgagatctccagttctgataatgggttcttttgggatgaactggaatcagaaggaccccatggtgtgggattgggaacatctagtaccgtctgtgtcgaatgcagttacaaggcacggatctgctaattcatctggtggtactcttacttctaactcagagctaggacatggttcatccaagagctctatttcagcgtccattgattcaccctctggagtagggaacagcttagagttcaacttcgccgctgtcgagaggcatgttaagaacacgggcacgaacggcagagtcgatgactcggggaattctccatcgtcaatgatagctttcaaccaaggagagccattaatcagcctgaaacttgggaagagggcttacttcgaaaacgcctgcggaggacaggatgccaaggtttctgcagcttcagacgttacttctgcagccaccgtggtcaagaagactaaggtgtctcagcagaatgcaaagaactggtactgtcaggttgaagggtgcaaagttgacctgtcttctgctaaagattacaatcgcaagcacaaggtctgtgtagtccattctaaagctaccaaggtggttgttgctggtctagagcgtcggttttgtcaacagtgtagccgttttcatggtttagcggagtttgatcagaacaaacgaagctgtcgtaggcgtctgatgcatcataatgcacggaggaggaaacctcaggcagacacaatttcattcaattcatcgacaatgttttatgatacaaggcagcggacaaatcttttctttagtcaaccactttatggccaagtgaggagcaatgcagggtcttcatgggataacttgggaggcttaaaattcatggagacgaaacatccgccagtgcatccaacaaaaacagcatcccctgatgaactgcatttctcagccctccagataactagtgctgcggctcacaccggacatcatcatgatctcgatgggttcatggcgttcaagggaaccagcacaaaggtccttaaccaaggcgtggaggcttgggcggccgcttccagctcgaacaacggaggcccagaaggtgggcgtgctctctctcttctgtcagacggctcgtggggctcgagttcagccgtcatccagcagcccacatctcacgcggacgccggtgcattgctgccgcccttcgccaccgttgctgtttccaacgccgccgccgccgccgccgggcatcctctggacccgtccccgggaaggttctggccgcaagacgatcatcccccgctcgtcgacggacccgccacgcagattccggagctggcgcacctccggatatggtgaaaggaaacgcatgtgatgcggtgacatgccagttcgagggcctggctgggaacacatctggttggttagtctgccgctctggcttgaatttgccggcgacgacagtctttgtttgtatcttttgatcagaacggacacagacatgtttgcccaatataatgtgacgagtccctctggggttgaggagtgaggagatggagaacgataggaggcaaaaaaaatatatatttgtttcgcgcgttttcccggaagtatttaaaatatttaggatc

SEQ ID NO: 144722 - DNA, 501 bp, Zea mays
  Clone ID: MRT4577_63473C.1
actgccaggtggcagtattcgtttcagaattcacagttttttgcttctgcaaaaaaaaaaaaaaaaaaaacaaaaaaaaaaaaaaaaaaaaaaaaaaaaaaaaaaaaaaaaaaaaaaaaaaaaaaaaaaaaaaaaaaaaaattaaaaaaaaaaaaaaaaaaaaaaaaaaaataaatagttccctggcccgaaaccacccaaagggaaaattttgaaaaaatcaaaaaaactgggggccgttaaaccatccattaaaaggcccaaattcccccaaaaggaagccgaaaaaaaataaattgcccgggttttaaaaacgccgaaactgaaaaaaccctggggtaaccaaattaaatccccttgaaaaaaatccccttttcccaagttggggaaaaaccaaaaaggccccaaccaatcccctttccaaaaattggcccaccctaaatggaaaatgaaccccccttgaaccgcccaataaagcccggggggggggggggttacccc

SEQ ID NO: 144723 - DNA, 460 bp, Zea mays
  unsure (1)..(460): unsure at all n locations
  Clone ID: MRT4577_63474C.1
ggggacaaccaccgaacagggggggcaatctaaaaaaaggggaaaaacaaccaaacagggggggggggaaaaaaaacatttcccagtttgggggggggacttacaaaaaaaggggccaaaaccaaaattaactgggccgggggaaaaaaaacccacggggaggggggggccaaaaaaacaaataccccaaaacgagggggaaaggacaatcataaagggccgaagggagtctaaatttttaaaaaaaactttgggttttttgataaacaccggccatccaaaatttccagaaaggtttccggtctccgggcccaaatggttttttccaccaaaaaccaggttcaagagaggaggaaaacctgggaagagcatataaagaagaatgggcacagggaaagaacaaacaacaaacttaggatttccccccatttggggggggcggngggaaccgggtaggggg

SEQ ID NO: 144724 - DNA, 765 bp, Zea mays
  Clone ID: MRT4577_63475C.1
ccggccgggagatttgtcaccgtcgaccacttcgtctctctcgtctctcgcctcctcggcttcaactccgttgttgtcgtcatcttctttgccatcgcccggcgccaccgtagaaaccagcctccccgagtgagctattccggtcgtacttgtattattcggcccactgtcgtgctacaagtattaggtttgtgttgactagagatttagaattcattttttcattgcgggtgatccattgcatgctcaaggatcggtctcgaactttcgatttcctcagaggactttggttccgtgttgagggcattcaaattactactaaaaaattggaagttcaagacagccctgatgccatcagcacctagggagaaggatccacaagttactacgagccctgcaacggggcctcctcgggtgcacactctcatgcctgttaatgccacaggaagtcctgccatggacctgaagctggcgcaaccatcttgccctggccatttagtactcctgcacccttgtgcaccttggcctcttcatttgctagtcccgttgtctcttccacaccaaaatgtggttcactctctaaccgaatttcaaatcctctctattaatggggaacaatgcctattgtccttattctatttattgatgggcaggatgctctagtggatgtggctgcagcagatgttaaccctacgaccgatacctgtgatgagaagatgtttcccaagggtcacgctgtggaagacgtcaaagaatataatcact

SEQ ID NO: 144725 - DNA, 485 bp, Zea mays
  Clone ID: MRT4577_63476C.1
actgccaggtggcagtattcgtttcagaattcacagttttttgcttctgcaaaaaaaaaaaaaaaaaaaacaaaaaaaaaaaaaaaaaaaaaaaaaaaaaaaaaaaaaaaaaaaaaaaaaaaaaaaaaaaaaaaaaaaaaattaaaaaaaaaaaaaaaaaaaaaaaaaaaaatttttttttcctgggccgaaacaacccaaagggaaaattttgaaaaaatcaaaaaaactggcgggccgttaaacaatccattaaaaggcccaaattcccccaaaaggaagccgaataaaaataaacggcccgcgttttaaaaacgtggaaacggaaaaaaccttggggtaaccaaattaaatccctttgaaaaaaatccccttttcccaagtggggaaaaaacaaaaaagccccgaaccaatcccctttccaaaaatttgccaaccctaaatggaaaaggaaccccccctgaaccggccaataaaccccgggg

SEQ ID NO: 144726 - DNA, 301 bp, Zea mays
  Clone ID: MRT4577_63477C.1
gaccaaagcagaccacattccttcctaccaatcgcctacccaaatcggcggtccacccggaggcggggatggagacgtagcatgcaaaccttgacaagatgcatatcctccatagctaccggatcgtttggtacaccgacgtgacgaacgccatccaggccgacttcccctactgatgactgacgctgaggtggtgaccatccatcgaccctgcctagcaaatctcaccttcacacgtttctgcggcctttgattctgcatcccatagccttccgtagatccgaggacacttaatttgacc

SEQ ID NO: 144727 - DNA, 295 bp, Zea mays
  Clone ID: MRT4577_63478C.1
aagggatccagagccgcggccgtaggctatggttatgcttacgtatgggactcaacgcgactggcgagttcttccgacgctggaccattggatgacgcaccctatggtggggaaccatgtgcaccacgccacacccgggctcgtgataggcatagtggacttcgagatctacctaggtggcgaggccggctacaaccggctctaccgcccctaagaggacaaccaccactaaatcgacagcaggatacgagactcgggaaagaacttgcagctacgattaccaagcaatgaggct

SEQ ID NO: 144728 - DNA, 232 bp, Zea mays
  Clone ID: MRT4577_63479C.1
attcttttactggcgtgcagtgttataattagaaaaaacgcttcatatttgattgcaacacaaaaaaaaaaaaaaaaaaaaaaaaaaaaaaaaaaaaaagaaaaaaaaaaaaaaaaaaaaaaaaaaaaaaaaaaaaaaaaaaaaaaaagagggctggtacctggccagaacggccgaatggaaagggaaatttctgcaaatttccaccaaactggcggggcgccaaaagggc

SEQ ID NO: 144729 - DNA, 371 bp, Zea mays
  unsure (1)..(371): unsure at all n locations
  Clone ID: MRT4577_6347C.1
attcatcgtccgnaggcagcgagcgcctcttagttgttccttttccacgcatcgcgccaaggaagagagagagaacgccgctcccctactcggcgtcaggggggcggcagccctcccttcgcacgcgaggcttgacagggcgcagaagtaccattgatatcgacgagaacgttacatggagtttcatcttatgctggcacaccaagcatcgagggacattgcctctaaatagtggacccgaccgtgatgatgttatcactgaactcaggccacggagcctaccttgtaaaagtgccacccggacacaatacctaccacaaagttcctgttaggatgaatagtggaccgcatgagaaataatatatcaccat

SEQ ID NO: 144730 - DNA, 831 bp, Zea mays
  Clone ID: MRT4577_63480C.1
cagatccgcaaagaggaggagcgaaacgaaacagcatccctgccttcctccacgcccgtagggtttccggatcggaggagcccaagccgccgcagccatggttcgcggatcgctcgggaggttggcgtcgcgcaccctctccgtcgccggcaaatggcagcaccagcagctccgccgcctcaacatccacgagtaccagggcgcggagttgatggggaagttcgggatcaacgtgcccaagggcgccgtggtggggtcagtgcaggaggtcaaggaagttttgaagaacgttttccccagtgagaaagagatagttgtgaaaagccaaatccttgccggtggccgtggattgggaactttcaaaagtggactaaagggtggtgttcatattgttaaggctgaggaggctgaaagccttgcagctaaaatgcttaaccaggtcctggtaacaaaacaaactggtccacaggggaaggttgtgggcaaggtctacttatgcgagaaaatgtcacttgttaatgagatgtactttgcgatcacccttgacaggaagactgctggtccactcattatagcttgcgccgagggaggaacgagcattgaagatcttgcagagaagttccctgataagatcgttaaggttcctgttgatgtattcaagggaatcactgatgaggatgcagctaaagttgttgatggtctggcaccaaagacagcagacaggcaatcttctatagaacagattaagaagctatatgaacttttctgcaagaccgactgcacaatgctgggagataaatcctcttgctgagacagctgaataaaagctag

SEQ ID NO: 144731 - DNA, 538 bp, Zea mays
  Clone ID: MRT4577_63481C.1
gccgtacgctgaccctgcccccccccctgccgtggagtaggtgttacagtactggccctttcttgtcttgagcccgtggtcccattgataacaaggctatacctctcggcgtgctgtggcacgctgccgtgtactgcgctctttctgcagcgcataccacagaaacactaatctgaagctggtgcgctgatatgcgatagctcctcgaggactgcgcgttgaaggataaatagtttctacaacgaaaaaacagacatgaacgtcggcactattacgaaacatcagactattttaccgcatctacagacttggacttgtacatatatgggactacgatctaatcgcttggcaaatgttagcttgagctctctatacaactgctggcctatactaacaagtgtgatgttccttatcctaccaatgctcctcatatgatgccatgaggagtgatgctagactccatgatgtacaacgagggagacgatgtggctgaacatccacaaataggcgacgcgcgcatcaatagagaggatcatcg

SEQ ID NO: 144732 - DNA, 176 bp, Zea mays
  Clone ID: MRT4577_63482C.1
ggtaaaggtctctctatccccataccggttcctcaccgccggcgagaggtacgtattcgtgcgccacctacacttccgcccgacatggccgatacctgcacgtatcagattctggtgcgtctcctacacgggcgcaccacatgcctgcgcttatcaacgcccaccgattccggcgc

SEQ ID NO: 144733 - DNA, 431 bp, Zea mays
  Clone ID: MRT4577_63483C.1
agactacaaacttttgggtcgtgtcataccagcccaaagggtagaaacagtggcgcaggtcgatcctaaaccacgttatgttttcgttgggccgtgacgatcagtccgacccattacccatatatttgaacaatataaaatctaaatattacaactaaataaagtccatagcttactaaattaaagatattaaacaatactaacatcatttaaccacataaagtgcaaatattacaacaatgtaaagtatatagcttactaaattaaaaaattaaacaattactagttagatgcccgtgcgttgcaacggcaatacaaaatatttttacacaataattacatataaatgaacaccacatatataatccaacccaatatcttaaaaaaaaattggcaacaattaatacagaaataaactgatacatattaat

SEQ ID NO: 144734 - DNA, 922 bp, Zea mays
  Clone ID: MRT4577_63484C.1
aaagatgaacatgcattccttattcgccagctgttccaacttaaacaaaccgaaactgtgtcagattacatcgatcagtttgctcatttaattgatcaattgaatgcctatcagaccgttaacgttcccttgtattacaccatgaaatttttagaagggttatggcatgatattaaatctgtagtgatgattcagaggcttcgcgacttggatactgcttttgtcttggctcaattgcaggaagaggtggcagatgcgtccaagaaccatgatgctcgtcgatgggaaggcggggtgtcttctcggccatactctaaagggccgatgcctctgcctcccccaccagtctaggacggttgacttccacctcctcagcgtccggacgacaagaagtccttcgacatacccaaacctgctactgctgatcgtatcgccaacctctatgcataccgtaaagctcaaggcctctgctataagtgtggtctccagtactctcgaggacataaatgtgcagaaactgttcaacttcatctggtggaagaaatgtggcagttaatggatctttctgactctgatgacagtcatgatgttcctcctgcacaagtgaactctatcctcttgtcataagctgctgtggatggatccttagcgccgaaaactatcaagttcctcgggtctgtgcaaggcattgaagtattaattctgttggattccagcagttctcacacattcatcagtgcgtcagtggctgctcagcttcatggatgtacaacagtgcctcacaggttgtcagtacaagtagctgatggttctcgattgacatgtacctcagagctagtcaatgcagtctggtttcttaatgattatcaattttaatctacactgaaggtgttgtccctctcaaaaaaaaaaaaaaaaaaaa

SEQ ID NO: 144735 - DNA, 312 bp, Zea mays
  Clone ID: MRT4577_63485C.1
attcggctcgagcgcataccgaacccatgatcatttccaatagaaccatgaagcaaggggggggcaatatgcggcactgggggcagaacccaaccggagccacgattaaacgccctcctactccctgtacttacatacaatcatgcacggagctaggtaccaactacaacctctgaactcacctcctgtcgagaggagcccggacaggtctcaaaatgaatattgccttccaattagctgtgtctgaaccaactgcgacttcctcagaatcagtaactagtgtaccccttgaatacgctactcctgatggta

SEQ ID NO: 144736 - DNA, 320 bp, Zea mays
  Clone ID: MRT4577_63486C.1
cccccagccaaaaaactttttccatgcaaaatcttttaggtgggggtacctgaaaacggccttccactttgggcaaatttaaagctggtttggccaaacacagaaaacagcacccccccccaggggggccttgtttaatgcccccaaaacgccgaaagaccccccagaaatccctacagcttctttccctttctaccgccttttttgtaagtgttttccggggggcccggggaaacaccctaaagggcgccgttttttatcccaaaacaggcaagccccctgggggtaaattgggccccatgtccgggggttttgttttt

SEQ ID NO: 144737 - DNA, 174 bp, Zea mays
  Clone ID: MRT4577_63487C.1
attcggctcgtggtgggcttccggacttttttattaaccaccgcccagatcccgcaggcgggccagctgtccctttagcgagtagcataagaccctggcgacacaatggggctggctgtatcccgtgggaaatagttatccgtttacaacgtcactcaacataccagcccgaag

SEQ ID NO: 144738 - DNA, 270 bp, Zea mays
  Clone ID: MRT4577_63488C.1
gggcttcacagttaatggagatttgttaagccattcctggatgatgggtgatcatcggttcatcaactagggtgacagatagagagagagagagagagaggagactctaaaaggcatgcaccagattacacggtatgcacgcactttggctcctacaccacattatcttactgaaaacacaacaaaacttgggagctattattaatagagcagccaggaagacgaccatccatggggagctgcctccggaatttgccatgttaattaaac

SEQ ID NO: 144739 - DNA, 1389 bp, Zea mays
  Clone ID: MRT4577_63489C.1
atggcccgtttcttgaaagggataagaccaaaacttaagactatcctcgccagccaagatttcctcagcttcttgcacctctcaaacaaggccatacaagtggaaagggctagagaagaagagaatggtcacctcaagaggaagtttcaggtcctccgagctcagcagcaggacaggcaccagagaattcgatcctttgggtttccacccaagggaccaagcttcaacaagccagctggacccactccgtcatgtttcagtcagcagggtcaaagttcccttcaggccccctccgttgcaagcaaccaacctccagccaatgcctattggcactgcggagaccccagtcactacaagaataattgtcctcagttgaagacattcgtgcctacctactccaactcggtgaatggccccaagagtgccccagcacccgcctccaaggcaccctcctccaacagccagctaagcaagacccagtcgacactcaagaggctcagcaagccccgggaaattgacgtgatcttaggaatggataggttaaccaagcacaatggcgtcataagttgcacagataagatcgttcttctcactgagcaccaaggaaagtcagtttcatgtcaggctcagccacccacccaagatccaatggtatttaatctagcagcagaaagcatatctgtagtagaagaattcatggatgtgtttccagaagaattgccaggaatgccgccagaaagagaagtagagttctacattgatctaattcccggcaccgcaccaatcgcaaaaagaccataccgcatggctcccactgaattggcagaactaaaactccagatcgcagaacttcaacagaaagggtacattcatcctagctcatctccttggggagcagcagtcctgtttgtcaccaaaaaggatggaagtatgaggatgtgcattgactatcgatccttcaatgaagttacaataaaaaacaagtacccactacctcggatcgatgacctcttcgaccagcttcaaggggccaagtatttctccaagatagacctaaggtcaggatatcaccagctgagaatcaaggaagcagacgttcagaagacgacgtttgtcacccggtacggacaatatgagttcacagtaatgccctttggactaaccaacgcacccgcctttttcatgaatcttatgaataaggtattcatggaagagttggataagtttgtcgtagtcttcattgacgacaaccttatctactccaaaagtcgcaaggatcatgagcatcacctttggattgtcctcggaagactcagagcacataaactctatgctaagctttttgggaatggaaggatattactgtcgttttatcaaagggttctctag

SEQ ID NO: 144740 - DNA, 254 bp, Zea mays
  Clone ID: MRT4577_6348C.1
caatttactaaggaacaacaggctcaccaactgatgtcaaacataagaaccccacatcagactgatacgatatggtactactttgaatctgttactagtaccatcttgacagaggatacatgctcccaaaacgtttgttaccacacttaaaaatcactgccatcattaagcatcagtttcaaaattatagccattcatgatttacgttttccagatgactatcattagtctagtcctttgaatttgtaagggga

SEQ ID NO: 144741 - DNA, 511 bp, Zea mays
  Clone ID: MRT4577_63490C.1
ctcgaggccggccgggaactgtcccgtcaccgcccacgaccacgccatgtcgctcccgtacaagcaagacttgcctccgtccggcgggttcaacccgatcaagtacaagcgcaacctcccgaccaagggcccgtccggtgccatcatctttggcgccgtgttcgccgtgtgcacgtttggcttctggcgcgtcggcctcggtaacctcgaaaagcgtgagcttcaacgtgagcgagtgtggtcgaggatccacctcactccgttactcctcgccgaatcggaccgcgacgtctaccgccgcgagcaggcagcgttggcgcgcgagaaggagatcatgaaggacgtacccgattgggaggctggcaagagttcttaccacacgaaacgttacactcccaacaccattgtcgtcatctaatcttgttcactttcgcctgtgtctcttcttgtgtctgtgcacgcgcaacgccgtctctttttttcccctaaaaaaaaaaaaaaaaaagcggcc

SEQ ID NO: 144742 - DNA, 1828 bp, Zea mays
  Clone ID: MRT4577_63491C.1
ttttagttttttttttttttttttttttttttttttttgcaagctgatctttactacttttcagttttgtcaagctcaagtttacaggaaaccacgaccacgagactggtgtcaactgtcaatgcatatttttatgggaatacagaatagaggccgggtctatgaaaaggtagctggtgcattagaaacaaatatccaatcgacgcagatcgtgccttcgtcacttcgtggactcttggtccatgactgttgcagttacttccgtgcttcggacttcctctgctccttggcagctttctcctcttcgcgtttcttcgccgcatcagccctttgttgtcttattaaagcaagacgttccaaatcttttcgtgcttgttctgtttttccttgctcctgaagcttcatataacgttcatgagctttttgtttctcaagctcctctctttcacgccttgagagttcagttgtcttgccaaaatcaacttccttggcctttatattcttggctttcaccaagtttggattttcaatctgaataataccctcagtgcctttatgtttagtcttttcatcagaatcctcttcagattcttcctcagactcttctctttctacctcttcctcatcttcctcttcctccttcttcttaaaggtgcgtggccgacctgaagtaccagcagcgatctcctcgggtgtggagaagttgcggcggcctgtgggcttccccttgaactttcccctccccatggcggcgacggcggcgggcgaggctgatgcagattacagagcgagctggaaggagcggagggggaggcggttctcgcctaggttgcacgctgggtgggcaccgcccacgcgtgggcggacgcgtgggcggacgcgtgggtttgtttatggttcatggccatggatgctgatgagccgtctcgagtcctgccgaagacagcgcctgtcctcgtcaccaaccctgctcgcccggatccgtaactccctagttcaagtcggctgattcgtgtgctggggagccgttctcagttgctcgccgtggtcggctgctgctccctaatcgcctcagccacaacctcactgtcgttcttcagctcgctgcgcgctaagctcccttgtcgtagttttctcgtgcgcagcgtttcgtggtccctcgtcgtgccgagttatcctctgcacgcagtcgtgtcctattttctgctcgccagcgtgtcctctcggctcgctcggctttaattcccaatcgcgtcgtcgatctcgtcgtttgccgtcgagtcgtcaaacacgtcatccccggctcgatccccacctcaccagcttaccccagacttcaatcgaaggtcgtcgtcgttcgtgcatccccaagaaatcccaagaatcgggtgaagacgaagttagcagcgcgatattccccaagcgctcgacaaattatctggatcggaaaatcactaccgatcttgcggcttcgtgtcagctgttgaaacggtaagctgatgaattattcagaatagttcgattgttgaatgaattcatgtgttagtgcgaggctcattaaggtgctcaataaattgcgtaagtcacgaaactctcgtcgacttcgctgtttttgcgattatcgagccagattcggttatagcgagttatttcgctattccggtcacttagctgaattagtggatcgagtagaaattttggtaggcgtgtgtgatgataaaatattttaatcacttctatagatttatgtatatttatgataaagaaatatttaattaattgttgatatgtaaaatatgtggggagagaaataaaattaaattagttc

SEQ ID NO: 144743 - DNA, 173 bp, Zea mays
  Clone ID: MRT4577_63492C.1
ccggaaggggagagacagtcccatggctgcgcacattccgatgcgtcggcatgttttttgattccacacaccttttgtccgggttggcgttgttccctctttctcaaaaatttagcgaattgattcattccgcttatgttcttcccctgacagatggattaacacttgtatca

SEQ ID NO: 144744 - DNA, 1068 bp, Zea mays
  Clone ID: MRT4577_63493C.1
gcacgagggtcgccggcgacaacaaggaaagtgcttctaagcgaaaaagaggtggacctggtggtttaaataaaatttgtgcaatttcacctgaacttcagaccattgttggtgagactgctatgtcaagaacccagattgtgaagcagctatgggcatatatcaggcagaacaatcttcaagaccctgatgacaaaaggaagatcatttgcaatgacgaacttcgtgtggtttttgaaactgacaccaccgacatgtttaaaatgaataagttgttggctaagcacataaccccacttgacccaaaaaagatcagcttcatgaagtaaaaagaatgaaggctcccacagtggctcctcaaccacctcccattaatcagcccagtgtagttatttctgatgcacttgcaaagttcatcggaacagatggaacatttcctcaagatgatgccctgaaatacctgtgggattacataaaagcaaaccaacttgaggatgtcatcaatggatcaatattatgtgattcaaagcttcaagagctctttggctgtgagagcattcctatgtcaggactatcagaaatgcttggtcaccacttcatcaagaaaacatagcaaatcctcgttaactgatctaggattgcagtttggcagataggcctaacattacaatatggtgttcttgacagaatggacagcatagcgtctgtatttcttcaatgttatggaatatgaatggtgtctggcaaagatcatattatttgcggtagcctgtgctttgttacgtgtgcaggccaccgctgcggcgtctggtggaacctctttactgaactcgtagtgctagttcctaaatgtcaaaatgtcatttctgactatgtaaagttgctttctatttgagtgccagattgtactcttaaaaaggaatttgaaggaatttctgtaggtaccgataatacttgttacttccgaattgcgaagatgaaatctttgaaggtcagcacagtttggatgtgtagaatttgaatgaactagaatcatattgtttgggcaaaaaaatatactttatcctt

SEQ ID NO: 144745 - DNA, 1756 bp, Zea mays
  Clone ID: MRT4577_63494C.1
gtgatttcttctagttcttctaagcgaaaaagaggtggacctggtggtttaaataaagtttgcgcaatttcacctgaacttcagaccattgttggtgagactgccatgtcaagaactcagattgtgaagcagctctgggcatatatcaggcagaacaatcttcaagatcctgatgacaaaaggaagattatttgcaatgacgaacttcgtgtggtttttgaaactgacaacaccgacatgtttaaaatgaataaattattggctaagcacataaccccacttgacccaagtacagacttctatttcttttgatcaacatatgctactttatgtttgcattactaaagttcagtcctggaatttgctcaagtgcttcctaatgacattgcagaaggtcaacttcatgaagtaaaaagaatgaaggctcccaccatgtctcctcaacctggacgttccattgatcaaccctccatagttatttctgacgcactagcaaagttcattggaacagatggaacatttcctcacgattttgccctgaaatatctgtgggattacataaaagcaaaccaacttgaggtatggttaggttaggtcctaccttttagtttgcagaataaccctgccatgtgttcttggttttgctgcaagcctgtagcgaatatcaagaattgaagtgcgaaagcaccttttgttttgtagctgtacatcgtatatgttcagtgcagtccattcaatttttggaaacaaattttcattaaggtacagatgtagtatgacagtatacaagtgcaggacaaccgggtggagtcaattggcagctacttagtgttattgctacaatcttgctcatatcccctatttggttaattgtttggctatacttgtgtgaacctatatcaccgcagtctacccaaaaagactagtttgtcaggataactaggtaggaatgttcttagtgtgaatattttattgtaggctgcaatggctgatgcagagcgttgtgggtggacgcatgtagatatttgtttattacactaggaacttgttcgttgaaacatgttaattcagatatgctggaatctgattgaggttaggacactaacagttaaaaaaattctgcacaattttgcgctaacagataaaaaaagtcattttgattatgaagtgtggattcactgtgagctgtgaaatttatggcttaatacaccacaaatattaattgctctgtttggtattgcataggatgtcatcaacgaatcaatattatgcgattcaaaacttcaagagctctttggctgtgagagcattcctatgtcaggactatcagaaatgcttggtcaccacttcatcaagaaaacatagcaaatcctcattaactgatctaggattgcagtgtggcagataggcctaacattacaacatggtgttctttacagaatggacagcatagtttatgtatttcttcaattttgttgattatgaattgtgtccggcacatatcagattatttgcggtaagcctgtacattgttatgcgtgctggctactgctgtgttgtctggtgtaagtgtgtaaccttctctactgaattcgtagtgctaattcctaaatgtcattgctgactatgtaaagttaagctttctattcgagtgtcagattgttactcttaagtcttaaaagtcataagtttttctttgactaatattttaatgttgaggaaatccgactaaagtagttcacttcaaaaaccaaaa

SEQ ID NO: 144746 - DNA, 103 bp, Zea mays
  Clone ID: MRT4577_63495C.1
tttgcccggccggcttccaagccggccgaaggaacccgaaaaccaaggcaagaaccccggaagggctgagggaagggccgccgggcatggctcgccggccggc

SEQ ID NO: 144747 - DNA, 528 bp, Zea mays
  Clone ID: MRT4577_63496C.1
aaacttgttttttgtttttaaattttttttttttttttttttgggttttttttttttttttaggaacgaaaacttattttttttttaaaagtttaacaaagggcggagtttttgggaacacaccttaaaaaaaaacattaaagtttaaggactttaaaaagtattaaaacaaaccttgaaaacttaccaaattaattcaccttttttatttttggaacaagaacgtttccaacaaaagggggatttttttttatttcaaaaaaaagggccatttccccgcccttggccttgtaaatttttccaattattgggtttgaaattcccttaaagttctttattttgtttttgaaatttttcaacttaaacaaattgttttttttcaaccaacttattgggccctcaaaaggatttttgatttttttttttttcttaagggggaagtttgaagggaatttttcggcctttaagggggtccttatgttggagggattatttttgaaggcgttttttgggttcaacttttttttt

SEQ ID NO: 144748 - DNA, 502 bp, Zea mays
  unsure (1)..(502): unsure at all n locations
  Clone ID: MRT4577_63497C.1
tatggaggaaagctggcacgcccgcaggcacggatcctgtatagcgggcgcgatccacgcgtccggaagaacccgatcaacaccatgagggagtaagtgggtagccctcgctctcctgaatatcgctgcgagcgccaccttcacagcatacaaacggcggctgtggttgacagccaccgtcgccggatgatgtaccgccgacgatgcatatgccatcttcggttcatctaggacctaactgagcatgttccaccgccggtacacctgacgacatcggtccacctgccaccgacaccccatgtgccagcgtcgggtcatgtgactgccgtactatgcgcactaccatactcaacagtcgctgccttatcctcatccccagcaacacccatgcctgtgccaacagccgcatccaatccagtaccagctgcaggaaaactgcggagatggcatgaccccgatcctgngccagcgcgtccagtatctgatgcatcactgatgccga

SEQ ID NO: 144749 - DNA, 311 bp, Zea mays
  unsure (1)..(311): unsure at all n locations
  Clone ID: MRT4577_63498C.1
gggttaaaaaccaccacgcagccaaaacagggggggcaagatggacaacaaatgccgtataaaaccccaagcacggcaaagcgacggcacagaacagcaagcagcccaagcgacgggaaccngccaggcgacgaccaggaagcccacgaggagagagangacgacaagagcagagggagccaccaaacccagccagagggagcagccggaaaccccgagcgacgggcggagggcccaaccaacgccaagccacgagaccccggcaagccaagagaggacagccagcaggaggggagcaaaaccgccaccaa

SEQ ID NO: 144750 - DNA, 137 bp, Zea mays
  Clone ID: MRT4577_63499C.1
cgcaggcacgcctgcgtaagctcggaattcggctcgagccggtcggtctagctcttattttagcgggcgcgcgaaaggtttctgggtcgtatcttggaagaaccaagataggcaacttaatgaccagggaaatgaaa

SEQ ID NO: 144751 - DNA, 194 bp, Zea mays
  Clone ID: MRT4577_6349C.1
gcatggtttccttgggcaggtttaccttcattagcacccaaaatgttccgaagggttgaaggcaacaatttaccaaccccgggtcgtttaggccgaaatcctacctggttggcaaaagtaacttcctgtccgggccgccggaaagcggtgatgtcggggaaggaggtgttttggtaaaaactcccctttgttgg

SEQ ID NO: 144752 - DNA, 559 bp, Zea mays
  Clone ID: MRT4577_634C.1
ctgcatctgcagacctgcattgctgcctcctcgctccctgcctcgatctccaccaccacagccaccgcgcgcgcccatggattataggcctatagctagcacccgtgacctggcagatgacgatgagggggctcctccggtgcgtgtccacggggacgtgtagggtggtgcttggtgtcgtggcggagccggtgccagcgttgccgggggccaccagtggggaacgtgccggtggaggttggcgcggagggggaggatacacagcggttcgtcgtccctgtcgagctgctgggccgcccgcccatcgctgagatgctccgccgcgacgcgccgcgcacgagtacgggtacgcgcgtcggggtccgccgctccacatcccctgcctcgtggccgcatttcaccgcctcctctttgtgctcgtagggaccaccaccgtcgttggcccagacggtgggctcacactcgcttgcttcgccgtggtcgtctgaggccgtggtggaggaggttacaacggcagcggtggacaatttggctgggtggatattatttgtgcgctcgt

SEQ ID NO: 144753 - DNA, 484 bp, Zea mays
  Clone ID: MRT4577_63500C.1
aactccagcaagcatcagttccttcggtaccgtagctgtaagcaacgcagcaagaagcatagaccatggcagctccagccaaggcatcgtggatggtggtgatgagcgtgggcactgtggaggcgctcaaggaccaggccgggctctgccgctggaactacacgctcaggtccatccaccgggcagccaaggccaacgtccgcagcggcgtctcgcagggtaacaagcagctgcctgcctcagtgtccgccgtggccgagaggcgcccagcggagaaggccgaggaggggctgaggactgtcatgtaccttagctgctggggcctaaattaggagtggtagtagctaggagtgttgtgtttgttgcagcaagcaacttagtattactaagcatccatgggctgagacttggctctggttgacccctgatcggtttgtaaagataccaggacgatgatgatgatgaaaattttggctatgagtct

SEQ ID NO: 144754 - DNA, 304 bp, Zea mays
  unsure (1)..(304): unsure at all n locations
  Clone ID: MRT4577_63501C.1
gtgacgcgtagccaaatgctcattctcgacatatcgcctgccagggagggttatctgtcctgtgagccttggctgccatnattggcatcgtgaccatcaatccagacattggtccttgcgttataggcatataatgtttattagggtgctatatgatccacatccctatccgttctactgctacctggctataagcagtcacgcgtacgatatccatctgccgctctggactatcacaattctaactcaagaacctgatgctggcgtaagacttccaatgctgctgatgctggagcttctgcgg

SEQ ID NO: 144755 - DNA, 256 bp, Zea mays
  Clone ID: MRT4577_63502C.1
gcagggaaggtcttccaagtcaactaaggttggcgacatcatgaactggaagaagaccagactgatgacagtgaattccgacaccaagggcctgcaagcaatgcagcttatgacagaaaaccgggttagacacataccggtgatcgacaggacagggatactctggatagggtccatcggcgacgtcgtgcgcgcggtggtgggcgagcacagggaggagctgaaccggcttaatgactacattcagggagggttc

SEQ ID NO: 144756 - DNA, 446 bp, Zea mays
  unsure (1)..(446): unsure at all n locations
  Clone ID: MRT4577_63503C.1
gctccaagttcgcgaacccggctaggcgtcctcctatctcggttgcaatggatgacctcgtcaccatgttccctcacctctcccactctagatctgtcacgctgttgttcctcttcctcaccacggcttttctccttgtcggctgcagccgtaaatcgggcgccgtcatgttggccgtgctgcggtggctcgctgcgccggtgcttactctgccgtggcacagagcttcgggcgggcggggcacgcggcgcgggttgtccgtccaggtgacggaccgcgccgnggcccgccgngcgctggtgcagcacagngccgcgttcctggaccgcccgacgggcgccgtcccgagcaccatcctcacgcgcaaccgggactacaacatcctttcgggaccggacggggcctactggcgcgccgcgcgacgcaacgtgtccactggagtgctg

SEQ ID NO: 144757 - DNA, 290 bp, Zea mays
  Clone ID: MRT4577_63504C.1
ctacagaacacttacgtgtgcattattcatcaagtatttagttcagccttatttctgcaaatatttgttttcaagttcaagttcaaactattgtgcatattgtgtttatcaaggctctgtagaggtttggaacatgatcctatcttaggccaatctcagggccggccctgagggtatgcgaccgatcagggccccatttgtccagcttatgtccaaatacatatacattatagataatttctattcttgttcaaaaaaaaaaaaaagagaaaaaagaagaaaagaaggga

SEQ ID NO: 144758 - DNA, 281 bp, Zea mays
  Clone ID: MRT4577_63505C.1
tgccacccgcgcttttttttttttttttttttcttgttcaacatcaacctgacattgcaacatctccccctaagggatggtcaatacacaaaatgcaattgccaaatgtacaacccgatttcaaccatggccaacacccaaacttaaggtttacctgccctctatgataaccttgctaacacccccattcaaaaaactttcatccatttttacatctatcaacgcgttcactatctacatcgctcctccataacatgccctcactaaacaggtatctctcc

SEQ ID NO: 144759 - DNA, 418 bp, Zea mays
  Clone ID: MRT4577_63506C.1
agagacgaagggaggctagcagatcacctcttctgcaacaaactccttaactgactgcagatagtatctctcatcgtatctctgttaccagtgtctaaggtgaaaacagctgctccaggatgattccgcaacctcgcaactggaaaccttgcatgaggaaagtggtccagttctaccgtctagcgtgacaacctcgaatcctatcctttctccgccctctctcacctctcgggtatagaatccgcgaatgttgaggttcgggtgggagcctctgagggtttcaaacacccgcatgaccagcgtcgtcttccccacgcccggcgggccagtgacgaggaggaacctcgacggcacagcggccatggtccggcgaggcaagcggcggcaccgtcgttcgagtgagttctgtgattttttc

SEQ ID NO: 144760 - DNA, 841 bp, Zea mays
  unsure (1)..(841): unsure at all n locations
  Clone ID: MRT4577_63507C.1
cattgggtacctcgaggccggccgggagtgtgctccatctccatttttctcctcctctcgtttttgcgtttaggcccctggggaagcagggattctggcgacggtccctccccccggctctcccgcctcgcggctccgatcgaggccgcagcgtcagtgcagttgcattaatgggaaaccaatgccaaaatggaacctacgggtacgggagcaattacaacagctacaaccactttcagaaggagcctctggcttctaggcactgtgatggggacgatactgagggttgctacacagggccatctagaccgagcatagcagaccttatgcggcaaggactgaggcagactttaacgtccatctctgttcttggtcgagagactcctaatgtcacagagcattatacccttggccggcagcttggagagggtctcactgggaccacctacctctgcaccgagaccagcactgggtgccagttcgcatgcaagtccatcctgaagacaaggttccggaacatgcaagatgtcgaagacgtgcgccgtgaggtccagataatgcgctacctttcagggcaaaaggatgtagtcgccatcaaggacgcgtacgaggacgaggaggccgtgcacattgtcatggagctctgcgaaggcggcgagctgtatgaccggattaagaaggggaactacagcgagcagaaggctgcacatcttataagggactatntgttggcgtcatagagaacttccattcacttggtgtcatggcaccgggatcttaagccagaaaacttcctctttacagataaagacgatgatttgtcgatagaagtaatcgactt

SEQ ID NO: 144761 - DNA, 1378 bp, Zea mays
  Clone ID: MRT4577_63508C.1
cattgggacccggacgcgtgggcgggcgcgtggggaaaaaatcacagaactcactcgaacgacggtgccgccgcttgcctcgccggaccatggccgctgtgccgtcggggttcctcctcatcactggcccgccgggcgtggggaagacgacgctggtcatgcgggtgtttgaaaccctcagaggctcccacccgaacctcaacattcgcggattctatacccgagaggtgagagagggcggagaaaggatagggttcgaggttgtcacgctcgacggtagaactggaccactttcctcatgcaaggtttccagcccggagtctgttagatggcctaccgtcgggaaatacaaagtagacgtagcatccttggaatcattagcagtacctgagctgcaggttaaggaagaaacagatctcttcatcattgacgaagtgggtaaaatggagctgttcagttcagcatttttccctgcggtaatgagagttattgaatccaatataccagtgttggccaccatacccattcctaggcagggccgggacattccaggagttgcgaggttgcggaatcatcctggagcagctgttttcaccttagacactggtaacagagatacgatgagagatactatatgcagtcagctaaggagtttgttgcagaggtgatctgctaacctccctgtgtctatgtagccactgctttttttgacataagataacaagcaaacgatcaagagtagaagttttctctcagaacctcgagtatctgttttcaagtttagctctgaatggatgataagcatgtcgttcagtttgttcttagttacgtatgtggttattcaatcatgtatttgcattcggtgggggcaaggttttattgccacaataactctcgcttgtatggatgcggttagcatgtagtgactctacaacaggtatcacatgatttgcacaaaaaaaaaaaaaaaaaaaaatcctcatgcaaggtttccagcccggagtctgttagatggcctaccgtcgggaaatacaaagtagacgtagcatccttggaatcattagcagtacctgagctgcaggttaaggaagaaacagatctcttcatcattgacgaagtgggtaaaatggaagctgttcagttcagcatttttccctgcggtaatgagagttattgaatccaatataccagtgttggccaccatacccattcctaggcagggccgggacattccaggagttgcgaggttgcggaatcatcctggagcagctgttttcaccttagacactggtaacagagatacgatgagagatactatctgcagtcagttaaggagtttgttgcagaagaggtgatctgctagcctcccttcgtctct

SEQ ID NO: 144762 - DNA, 446 bp, Zea mays
  Clone ID: MRT4577_63509C.1
attttatttgtagcccatcgatgcctgtctatataaacttatttccttgctcacttttttattcgttgtccaccgacttttaccgataataaattattcacttcattctatcaaacaataaaaaaaatttcataaaaaaaaaaaaaaaaaaaaaaaaaaaaaaaaaaaaaaaaaaaaaaaaaaaaaaaaaaaaaaaaaaaaaaaaaaaaaaaaaaaaaaaataaaaaaaaaaaaggggggccccttttaaaagatcaaagtttacgaacccgtcaatgggtagttaaagttttttttaagggcccccaaaattaatttaaggggccgtcatttaaaaaatgcggacatgaaaaaaccctgcgttacccaaatatatccccttgttaaaaaatcccctttttccctgctggggtattagcaaaaaggcgcgccccgacctcctttcc

SEQ ID NO: 144763 - DNA, 423 bp, Zea mays
  unsure (1)..(423): unsure at all n locations
  Clone ID: MRT4577_6350C.1
gttcctgcagccctgcctcctctctctgctggaatcaagggggggcgcttctatcctggccaagggacccaaggccctggcccacccgcccacccccctgccccccagctgacatggaaaccccagccctctgggccccagccaggcagggtgagggggcatctctgccaatctacctcacgggcccacactctgccggccatgccatggatcatgggccgggaaggctctgggggcagaaacaccactccctggtcaccctctcaccccacactggcccacagcagccagagggtcccgggagaagagggggcagggaggagggcttggccccttcatggggaaggaaaccagcacgcctncattctccaggaggtgtccaagaagtgccttaaatggtttgcacagaccaggtggttggga

SEQ ID NO: 144764 - DNA, 491 bp, Zea mays
  unsure (1)..(491): unsure at all n locations
  Clone ID: MRT4577_63510C.1
ccagtgtgatgggatatnctggcagaaaattccgccctctcgggccggcccgggngncaggtaccttcttttcttcttcttttcttcttctttaattatatctttatttcttatattctttcttttcttttcttttctttttcttttgttttttcttttttttcttttttaacaaaaaaaacgggaaagggaacttcttatttcgggggggccacatacatcatccaaaaaactttattatggaattacaactaataagcaatctaaaagagggcccccccaatgatgggttgttggaaggaggctgctgggtttgccaaagcaagggggacaaagggcaacaattggtggagttgtaaaagggttgcggggttagccccaaactgctggtagaaaggcaccaactgttgctgggtcaagaaggaaacacagcttgctgcacctagctggctaaatggnantagtatttgctggcgcnaataagcagcggg

SEQ ID NO: 144765 - DNA, 523 bp, Zea mays
  Clone ID: MRT4577_63511C.1
ccctcgcgtccgggaagacgacgctcagccgctcaggaatcgaaggagcgacgaagctaaaggagggcgcatctaagccgaattgaagcatgagggaatcgattaatcgtccgcctacgccgagcgcggtggaggatcgggacaaggagccttctctcgtagaaatcattaacatcaaggtaattaccagtagtgttccccatctcgctggaatcaaccgaggaaaccctcgatggtggccccccttctggctcgggagtcgggattagagttcttgatgcttacaagctggagttcttcagcttattgttggtgctccaagtgggtagtctcagttagctttggttagggtttgggcgtttgggtgtacgaggagagatgtcttggagtagttttaacgactacaacacattgatggtttaattataatggctactgccgctgttgttccttgggccgtggtacaatgaggtgggttttggtttgtgaagtttgtaaagagtggagaagaagagaaagctga

SEQ ID NO: 144766 - DNA, 419 bp, Zea mays
  Clone ID: MRT4577_63512C.1
ttctttggttttggtaaatttttttttttttttttttttttttttttttttttttttccccaggaactaaagggcccaaaaccaaaactttgaattcttacatgaggtctttttggcaggggcggggactcggtttttttcaagcaaaacttttaaaaactaaatttgccaccccccgtgtttgcccacaatcgcaagtacaaattatttttattttaacagggcaagacttaggtcttccggtggggggtttctttggaaagcagcttttccctggccttggttttcccctgggatttggagcccataataccccccccccattttttcttgacctaataaaaattgggggggaagatagccttgatagccccccaaattttggtgaaatcaagcttggccttgtttttgaggggggg

SEQ ID NO: 144767 - DNA, 185 bp, Zea mays
  Clone ID: MRT4577_63513C.1
acaattcactaacgaccaaataaagtaaggccaatagaatgtggggagatacagatacatatggtggtggtgagctaaatctgaaggtggctttaagatacagacgccgcctagaagggggggtgactaaaaagcgtgagggctgtggggcttgacacataggtgagcagaacatgcgcgcgtga

SEQ ID NO: 144768 - DNA, 418 bp, Zea mays
  Clone ID: MRT4577_63514C.1
ccttcagactatgtaacatggttactatgatcccatatggccatatgggaagcgtaattagtagcattgtgatctttaacattgttctgcagactgcatggatccagtaacaatagtgttttcaatgcagtaggagtattgattaaactatgtataaccctgctggttgtatatttctttgtgatgtggtaagtgagaccatagacttgtgttttttagccttcttattgagtgtgctttgagtatgtcgaagatgaacacttgtagttctgaatcttaacacatccaacatgtaagagtgtgtttacttcgaaatctaaaacgaaaaaatttctaatgaatacctactaaagcatttgggatgctcttgcacacctaaacttacttacccaaaccacttaagtaaatggatttggtc

SEQ ID NO: 144769 - DNA, 332 bp, Zea mays
  Clone ID: MRT4577_63515C.1
tccacgcgtccgcctagctctagatcgcgagggggctgcaagagaccccgcgttttcctcactcaggccttgcatgcggtccacagcaatacattccagaggatggatctcgaaataaaaacccaacagtgacacaacccgaatgtaatagacaccaccgttggctcacgacgccagggtggtgctggggcagttgccgacgccgcaggccggatacgtggggtagtcccggcagatggagaagtggtcctacacgctgtcatcccggctctttttgagctccaacagcagactgatgaggttgaacgccgctagcttcacgaacccaaagg

SEQ ID NO: 144770 - DNA, 296 bp, Zea mays
  unsure (1)..(296): unsure at all n locations
  Clone ID: MRT4577_63516C.1
tatacttgatcatgatccatntccaaccttctcccatctgctcctgtctctatacttgatcatgatccatntccaaccttctcccatctgctcctgtctcgctgtccagttcgggaaagcaagtgattgattagttccattggtctattggcttcagcttccagtctacctcatttctatcaaaatgatctggtgtctctagcgcgtactaccagttaaggagccatatccgaggctctatcagctgttataccctcctgggcaagcgtgttattgagggctctttatcccgtttt

SEQ ID NO: 144771 - DNA, 404 bp, Zea mays
  Clone ID: MRT4577_63517C.1
tttttgtttttttttttttttttttttttttttgtttttttttttttttctttccttttctctctggagtggacaagactaaaaaggagtcattcgccctaccaacctcggggtccatgggggcccgagcaccaaaagcgcgcaaatccattgcgggggggggcgcgggcccaaaagcgcggaaagcgggtccaagggagaaaggggcccaagggaggcatgggccacagggtatgggaaaagaggcacaaaccataaactgcccgataggggccatgaggaagaaaaaagccaaagaactcaaggaactggcttctgggaaattagctgggcaaaaaccccatggaccgaaaaaagagaaaattggacaacaaaatggacgtctcccccaaagaaaggttttt

SEQ ID NO: 144772 - DNA, 390 bp, Zea mays
  Clone ID: MRT4577_63518C.1
cttcggctcgagcaccatgccacatttttttgaaataggggcgcgaaaatggataagggggggatggagaggttctgtcatcaagaggagccaacgctggagcccacggaaatgctgctccgatttgctctgggataccaattactacagctattcctatcagggaggcgaaagaggacatttttaaatcgctattgaaggctgtatgatggggcctggccttaaaccaaagggatcgaaaccggaattgcaaaccatatcctaatggacgcatttatatgagatgcggaggctgaagtgttggtatatggacaggaataggccgatgcataattagggcgttccggcaatctgatgaactgacaacggaattactaaagtgatccgagt

SEQ ID NO: 144773 - DNA, 294 bp, Zea mays
  Clone ID: MRT4577_63519C.1
tcggcgcttcctggttctctacagatccttctcttcttctctcgggctttgtcgtcgtcgtcgtcgtgtcctgatctcgggcttctgcgaccttcatgggttgcaaaactgctgcagacacttggagcaacgaccgagtcgttgaaggttaagggtcctccttcttcttcatggcggacgtgtacaaaggcgaactcacgccgcttcaaaagcacgtcttcttttttgaccccaacaaggaccgggtcatctaccccttcgagacatacccaagggttccagctatcgggtgtg

SEQ ID NO: 144774 - DNA, 758 bp, Zea mays
  Clone ID: MRT4577_6351C.1
tgttaacgagttcgcaggcgtttgcgtgggcgccccgtgccggccgggaaaaccatggatgccatcgtttaagaaattcgccgcttgatgtgtggatccgtcgcggctgccgtcaagcatagacaccaagaaccagacctcggggtggatcatcggggtcgcggaggtctactggatggggtcaagaagtatccgggcaagtcgtctctgggaaccctgcttattgctcgccggatgctagcgccgccgtggactgcgcggctccgagaagtcgaggtcgtcgcgacatatcccaggaaccttcggacttggaacgaagctgtccataatatggaaagcatgattgggacgaaggtcgaatcaattctgaagctatgcgcaaggaagcttcggctcagtagcagaaaaaggaaccgacctaaaaaggaaaaggctatttagtcctcgatagattgtccttaagtcaattgtaaacatgaagagcatgaatgcaattttatacaggttgtgcccaaaaaaaaaaaatagatatttgataccggagaagatcaggtggttcaagaggagccatgcaacgaggagttcggtttgatctaggtggcgtctccaagttgacttgcaccaaggatgatccttagttcgttttatatttataatttattttgtaagtcttccgctatgtaataaatactctgattattgtgacatttatctctatacactctgttattacaaaaaaaaaaaaaaaatttgcggcc

SEQ ID NO: 144775 - DNA, 259 bp, Zea mays
  unsure (1)..(259): unsure at all n locations
  Clone ID: MRT4577_63520C.1
cggnacgcgtggtgtgcagtcgccattcactccagtgcaggnggcttgtgcctcggctgccgtggctggcagcttgtagtagggactgcgccgcgcttgcgagcagggcacgtttgtcccggcgcagcgcgtcgtagccgttgtacccggggtcggcctgcacgacccggtgcttgttgtcgcccgttgccctgcccgcctcgtcggcctggcctttggcgtccagcgtgctgctgctccatgctctcgcccaccgtcg

SEQ ID NO: 144776 - DNA, 403 bp, Zea mays
  Clone ID: MRT4577_63521C.1
attattttttgtggaacatgttaagggcagaaaatgctttttatatgttatctgtctacccgaccctggggcacattgatggccccgaagatcacagagcgacaccactatcgaagccgaccaacccgctacgcaacccaacgcaagaacgcacgggctgctttcatggcaacacaaagacatccacggggaaaagaggaatatattagaactcgcacggcgagaacagactctgatacatagatgcgggggaaatctatccacaacttcagaggacaactaactaaatgtccattacgcacgcaatatggacgactaacgccactagctgacgcacaaaatgaacgggacagatcacactgacaagcaatctcgcacttgggcacagcgaaggggctgtact

SEQ ID NO: 144777 - DNA, 367 bp, Zea mays
  unsure (1)..(367): unsure at all n locations
  Clone ID: MRT4577_63522C.1
gtcgggcacgacgacgccattgcgagatttgttaacctgtaggatccttgcgatctcgtggggcgcgtactttgcatatggtgtacgcctgtctgatatgtctgtaaacctaccggcgaattcatactcttttcggggtcggagcaccggccggcggaccggaagcggtggatggcggatctgggcgccgacaagctgcgcgtgcaccaggtggtgtggcccggcacgcacgactcgggcaccaacaagatcggcgtgccgcttgngacccggcccttcgcgcaatgccagtccatgtccgggtaccagcagctggccatgggcacgcgcgtcgtccacgtgcgcgtgcaagaggagcgccgggtct

SEQ ID NO: 144778 - DNA, 400 bp, Zea mays
  Clone ID: MRT4577_63523C.1
ggactatgcaattgaaacaccattggagattttgcccaattcagaaggacagcccctttatgaaatgcaaatcaaatttgataaagacattccaatcgccgctgtcaactttgttctaaaggaagaggaaacaggtgcatggtttcagcataagggcagggatttcagaatacccttaaatggatccttcaatgatggcggaaaacaagatattgatatctggccaggttgttaagaatttcattaacaattacatttatttggatcatagtgatgtgcttgccaccaagtgggtgtacattttgtgagtggcaaacatatatcagggttctatgaggaataccccatccttaaatcagagtatgttcagaatcttgttactgtcactgtgaggagagac

SEQ ID NO: 144779 - DNA, 139 bp, Zea mays
  Clone ID: MRT4577_63524C.1
gcgctcatgagtcaagcgcgccaagctccaggaggagctccgctccatcgaggcgccagggcttatgctcatgggagaccacctacctacaggagactaatcaaattggaagtgtctgaagggtttcgaatcttttttg

SEQ ID NO: 144780 - DNA, 829 bp, Zea mays
  unsure (1)..(829): unsure at all n locations
  Clone ID: MRT4577_63525C.1
cgccgtcgcccggcagttccgtctcccttcttcgccttctcagtcaagctaaaacctcgctcgcctcgtccagtcagacatggcatgaaaccctagggcgcccgcctcccctccgcaatttgccattgcgctccgcgatgcaggcatccgcgcgcctctcctactccgtggcctccaggaaagtgatcgcgggtgtctctatcgcgcccccacggtcgtgctatcggacctcccgggggaaggcgcatgcggcgccgctgcctgcgcaggagccgccaccgaaggggctgaagaggattacaaagcaggagcggagggttcgaatagtggaatttgttgagaattatagggcttcaaacgaagttgaagtcactgaacaccccatgcctaaggatgaagctagagtggttgaaagtcaaggaatactagaagtttctgagcactccatgcccaaggatgatgctgaagtggctcaacctcaaggaacagctgaagtttttgagcacttcttatctaaagatgaaggtaaggtggctcagtgtcaaggaacgtttcactttcctgagcactcaagacctaaggatgacagtggaaagactgctcgacatgatatggacacttcagaaacctgtaagactgcagatgccccagctttatctgatctaacagagaatgagggaattttatctgaccaaacagagagtgaggacaaaccagatcctggaaatcagcaaagagaaatagaagctaacaaattntgatttgaagaatttcgaaaaaaatctgaatggcaatgattcanacgcatcagaatcaagtggaagtgata

SEQ ID NO: 144781 - DNA, 312 bp, Zea mays
  Clone ID: MRT4577_63526C.1
aaagaaaggaacggggcgacctacgcgtacggacaaaacgctgatgttccgttctctttccaaaacactgaaaaaaccgggcgcggtggggatcatatttgttgctaacatcctaacacccagcaacgctggaggacgccgcgatgaataacacactcaagttcaggcccgccgtcgtggactcccgtcactggatacaccaatgggtgaactgaatgaagcccatgatttgcgccgtcctatacggaataaactacgaatacctcaaattcaaacctgaccccgaggaagaagaagaagcccacaccgagc

SEQ ID NO: 144782 - DNA, 187 bp, Zea mays
  Clone ID: MRT4577_63527C.1
gtctcttatattgtacccaccccttttttctacacctaggctactttcttccgtcgcatttcaaagaggcgtgcgcactctctataccctatcacatagagaaactcatctcatcctaacccttcatactactacacaaccagtaacgccgcccacatgcccccaacattaaaaaacaaattcattc

SEQ ID NO: 144783 - DNA, 1394 bp, Zea mays
  Clone ID: MRT4577_63528C.1
ttaacatgcggccgccgccgcccggcagttccgtctcccttcttcgccttctcagtcaagctaaaacctcgctcgcctcgtccagtcagacatggcatgaaaccctagggcgcccgcctcccctccgcaatttgccattgcgctccgcgatgcaggcatccgcgcgcctctcctactccgtggcctccaggaaagtgatcgcgggtgtctctatcgcgtccccacggtcgtgctatcggacctcccgggggaaggcgcatgcggcgccgctgcctgcgcaggagccgccaccgaaggggcagaagaggattacaaagcaggagcggagggttcgaatagtggaatttgttgagaattatagggcttcaaacgaaggcaagtttcctactgtaaaaaatatctgtcagcaaattggaggtggttactatgcagtgcgtgagttacttcaagaaatgaaatataatcatgcaaaattaccactgggtaatgctaaggcagctccacttcaaacaacagttgaagtcactgaacaccccatgcctaaggatgaagctagagtggttgaaagtcaaggaatactagaagtttctgagcactccatgcccaaggatgatgctgaagtggctcaacctcaaggaacagctgaagtttttgagcacttcttatctaaagatgaaggtaaggtggctcagtgtcaaggaacgtttcactttcctgagcactcaagacctaaggatgacagtggaaagactgctcgacatgatatggacactccagaaacctgtaagactgcagatgcccccgctttatctgatcaaacagagagcgaggtaatgtactgacctaacggacaaaccagaccctggaaaccagcaaagagaaatagaagctaacaaatttgatttgaagaatttcgaaaaaaatctgaatgcaaatgatttaaacgcatcagatcaaagtggaagtgatatggtgaatgaggcaaagacacatgccaggggagacaacccaaagcttgaggaatccgcgaacacgggtcttttgggcagcctgagatcttttgcttatggcatcagaaacttctggaaaaatatgtaaatctgttgttttttttttgccgtgagtcacctaaaattgaaaaggctacagaatcgagaacttgcctctttgtcacgggcttttggttgcataggatcggagaggagagggcttttggttggagaggattgatggtttgtttgggagcaaggggagagcctctccaattcacttgctcccaaacaaaacaagccatgagacataatcccttgctattactagctattactagtaagagattatgtctctaaattcccttcaatccttatgcaataaaagccccaagcgtttgtgat

SEQ ID NO: 144784 - DNA, 231 bp, Zea mays
  Clone ID: MRT4577_63529C.1
gttggttctcagccggtttttttgtcgcccggtacgccactgcgcagcggccacgcgtagttcgacgtcggagacgttgagctccgggtacccgtgggcgcccaccatgcgggtgccgttgtagtagatggccccgttgagcagccagtgcgcggaggagagcaccgacacgtcgatcgtgttttgcatgtgccgtccaccgggtagtcgagaagtgtcgaggagcattgt

SEQ ID NO: 144785 - DNA, 383 bp, Zea mays
  Clone ID: MRT4577_6352C.1
gaatctttgtgtgctcaagttcttcgtgcaaaatatttcccgatgaagaacattccgggggcaaaacctaaaggaggaatatcatgttcctatacttggcgagtatcctaaatggattgcaacttttaagaaatgggctgatctggagagttggtaattgcaattctatcaatatttggaaggatccatggaccccacgtggagaaaccaggaagataattactccatccaaggggtcaatccgtcatccaaagagtttatgaactgataaatccatttaagggcttgttcgggtagctcttctcaaatatggattgagtgagatttggtggggttaaaatcccagcatggacaaaaggcacacacgtggtccagctttctac

SEQ ID NO: 144786 - DNA, 178 bp, Zea mays
  Clone ID: MRT4577_63530C.1
cgagggactccccttcacaccgccggcgaagaatctctgggcgcctgcggagacggcgaaggccaaccactcccagccgtcgtataacaaggtggaagagcgactggatacagattgctcggtataatgccctgaagcagcggcaatttctcaagcaccggcgggatcgggagctcgc

SEQ ID NO: 144787 - DNA, 188 bp, Zea mays
  Clone ID: MRT4577_63531C.1
gagaatccctaaggggcatggcatcctctcctactagaggggtaacctggccaacgtgatccgttacttccccacccaagatcacagaatcgccttcaaggacaagtacaagtagctcttcttagggggtgtgcatctgcataagcagttctggcgctactttgctggtaacctggcgtccggtgggg

SEQ ID NO: 144788 - DNA, 214 bp, Zea mays
  Clone ID: MRT4577_63532C.1
tcccttctgtacgcactcttcctcgacttatttcattgattctttaatatttctatctcctctttcaccacaacctctaagatggttttcaacttcggatcgacctgcatctacttctcaaacttcaaattctttacaatccattttctactcttcaccttcatcaacacttacactgacctttattatactcacaccctctctcactccacca

SEQ ID NO: 144789 - DNA, 266 bp, Zea mays
  Clone ID: MRT4577_63533C.1
aaaagaccagttgatccatcacctcgctcctaatattaccaccaaccaagccaagatcaagtgtttgagtacgcagttgaccccccacatgcagctgcaatgtaaactctcttacaaagagaggtcgagatgctaatctttttcccttcctcaatactacaagatttactaacacttgtttttaatgttatacaatctattttttttttatattttattctttgttgttattactatgttcggttttttacaatctactaattttt

SEQ ID NO: 144790 - DNA, 265 bp, Zea mays
  Clone ID: MRT4577_63534C.1
gggtttcaacgctgtttccgtatcatgctaatggtccgctatgaatatctatgcatgcatgggtaccgtttgcggtatttaattattattacttcgtagaccttactatttaaaattcaagcgttctcgttaaagtcctctgtaatcttgcgatggaatatatttgatacattccttttaaaatcattccattgaaatgccattggtcctagcctcaaaccgtgactaccattgtattgaccgaatatatattgaatgcctcttt

SEQ ID NO: 144791 - DNA, 571 bp, Zea mays
  Clone ID: MRT4577_63535C.1
ccgtcccgccgcaagccgtcggcgcccacggcgtcgcacctccaaactctccgcatctccaagaatccgcggttgaggcgccggtgatggtggctccctggtcgacgcccgatacctgctccaggctgacagggtcgcgccgccacctctcgcgccctcatttccacaatggatgcgccctcgacatgctcagactcgaatggtatgatgctgtaaacttatgacctgaatcaaaaatggaggtgcattggttcgacttgatgtgaagaaaatacactccttgtttaaatgccggtttaaagatcgctatctatctccttgagcctatcaaagcctagatccacctatgacatatgcagacctgtttcaacttgctggtacgtactctgaccaacagactggggtgccatactgccgactgtattccttgcaaccctgatgcttatttgcgcccacaactattaccatttagccaatgttgctactggctactctcatcagcaacaccttctttcatttaaccacttggccgcactgaaccccgctgcttatttgcagcaacaatactact

SEQ ID NO: 144792 - DNA, 433 bp, Zea mays
  unsure (1)..(433): unsure at all n locations
  Clone ID: MRT4577_63536C.1
acaaaagctccccccgtcacctccctcgcccttttctcctccaccgtcgacgtttcccaccgcggcgtacttataaaggccggtgttcatgaaaacnatncatgatctgatccgcacagacttgcaacagtacatggcgagcgtgaccttgcgcgccggatgccgctcctttttcttggccgacctctacatgccccatctcgtcaactgcgtcattctctccacctcccagcgagtcacccggatgcagtagctcctgcgctttcatgagccatcaaatactctcccaaaccgtcaatcaatcttctatgactaactctcatcatcttttcttatcaatatcaaacttccaagttattattttcctttttttaaaactttattctctccaaccgctgttaaacctaaacagcagtaaaaagagtctcaactg

SEQ ID NO: 144793 - DNA, 686 bp, Zea mays
  Clone ID: MRT4577_63537C.1
cctcgaggccggccgggacgcgcacgctcgcactgatgacagtgggcaagggcacagcccagaactgagagagaagcgcggagtcaacaagcggagcagcaacagcatgccggaggaagagaagagaaggacaggaggtatgaggcaggaggaagaacaagagcaagatgctgcgcggagactcaagcgtgctggggatcatcaacttcatcaccttgctgatctcgatcccgatcctgggcggcggaatctggtctggcgtgcacgggccaactccaccgactgcatccgctttcgtagcagtgggccatcatcatcgcggggctcgacgtcatggacatctccctcatgggcttcctcggtgcctgataccgacagacctgtctgctccaactctacctcttcgcatgctcttcgacttcctctgcgcgtatctcttcttgcatcgccttcgccttcgccggcaccgaccgcggcgacggccaggccgtcatgaaccgccgcgttgcccgagaaccaactctcacgactacggaggatggctccgcgatcgcgacgacgatccacagtactggaacacgatcagcgcctgcctccgcgacagccaattctgcgacgaaaagatgcgcctcacacgggagcccaacactgacatgatcgcgccggagacttccaccatgtactac

SEQ ID NO: 144794 - DNA, 682 bp, Zea mays
  Clone ID: MRT4577_63538C.1
actcggattctctaccgatcccaccaaacgcgtctactccatattggtgcgatgacacctcccgaagccaagccctccacccaacatgaccataactgtgcaccctgctccgcccatactatactgaggagggccacgaccgttgtagatcgcgcatgctgctcgcagacagacgtatggcactgccaccgcttccggcagctcaaccgtaaccgggtggcgctccgctgccctgacgagcgcaagcctggccctgagagcgccacaaatcaccgcatcacacacaggcccctgtagcgtagcgcatcgatggcctcaagtgcaaggcactgtggagcaatgttcggcagcatctaccccacgctcaactacgcacgatcacactgaattgacttccaggactaatgacaccgactgcaccgcgaaggacgctaccgccgacatcgcgaccagcatgcaagatcatgacatgcccgactatgacatatcaacagatacacagacactggatacatgagcaagaatgaaatgcatacacgagagactcacattctacactactccgacgatatgaagactattggcaattctcatctcaacaagcacgttgaatatctgatagactaaaagctgacgatgatcagctagagactataggcctgtatcgccacgtgggtccaat

SEQ ID NO: 144795 - DNA, 156 bp, Zea mays
  Clone ID: MRT4577_63539C.1
ccgatggccgcaccgccggacgcatcgctagtagcacgcaccgcagtgccgccgcgccttgggccaaccagcggttgtcgggttggccccgccgtcctcggtccgagcaggaggcgcccgtaggtgcatctgccgggctcgccatgcctggcaggg

SEQ ID NO: 144796 - DNA, 213 bp, Zea mays
  Clone ID: MRT4577_6353C.1
gggatatccagaaaccacttcaggaaattgtcgacaaaaaattccaaattccagttacggtgccacagcaggtccaaaaaaacccaatttcattgggtcaggagatcattcctcctttggccggattctgcggggttattattaggcattaccaaagggggggcttttttcctgcactgggggagggccagcggctggggcttgggtaccaaa

SEQ ID NO: 144797 - DNA, 244 bp, Zea mays
  Clone ID: MRT4577_63540C.1
gcgacgcatactaatgagacctattagatgcattaaatgcacagtattgatcgacccgagggcatccagaatattcagctaccttatgctgcgcgggcttactgtaggtgtctgatctcagaaacattatctcacaatgttcacacgattatatggattgaattctgctcccatacctctcacaaaacgagtattatatgtgcgaaatcctgattgctacaccctacaagatccaacatgcaat

SEQ ID NO: 144798 - DNA, 1129 bp, Zea mays
  Clone ID: MRT4577_63541C.1
aattcggcacgaggccggcaagcaggcggtggcgccgcggcgacaccgttccacggttccactccacccctgaggccctgacgcgcggaactggcggtggcgagcgcagctaatggccatccatgccccgctccgcctctgcctccgcctccatgcgaggaaggtagccagacgcgtataaagggcagccagaaattcggatccacctgtatgcgtctccgttcgttcacgccacaggcaaggcacagaggcttgtgagggagagcgaggagcggaggaggacatggtgcacgggacgctggaggtgctgctcgttggggccaagggcctcgagaacaccgattacctctgtaacatggatccgtatgcaattctcaagtgccgttcacaggagcagaagagcagtattgcaactggaaaaggaactacccctgagtggaatgaaaactttatcttcactgtgtctgaccggacaacagacttggtaatcaagcttatggacagtgatacaggcacagcagatgactttgttggtgaagcaacgattccattggaagcagtgtatactgaaaggagcattccaccaacactctataatgttgtgaaaggtgaaaaatactgcggggaaatcaaagttggtctcacattcactcctgaggatactcgccagcggggtctcccagaggacttcggtggatggaagcaatcatcttagagctagatgctttaagggtgcaccagagcacagcgacaattcatgcgcttggagccttcagccgtcgagtacttcatgctaatgcagaattcattcgatttggcttcttttgattgtttcagaagaagtgttattagtgagtttcaacaaaaaatagctccatattgctctatatcccgtattggaaattctaaggccgtttgtgattactgcttacaacaagaagttttgtttctagttcccactacgcttttttttttgaagttttgagtggaacatctttgtgttcaacgttttgggaggtgtaggccagtaatactgcaagaaaggaataatttcccttgcagcaatattgttttttgtgatccttgaacaaaattgttccccaaaaaaaaaaaaaaaaaaggggcggcc

SEQ ID NO: 144799 - DNA, 3387 bp, Zea mays
  Clone ID: MRT4577_63542C.1
gccggccgggccgggctgttccgtcgtttcgtcgactaacctccaaagttttttcctctccacaactcggcaactacggagctgcctccaactcatttgcttaccatccctaccgcctggctcagatctcgatgcggcgcaagcttcccggcgacgcgccgctgtcggcggcggggcctggtcatgcgttgtccgcatccgcgccgtccgaggtggacctcgctcagctctccgccgccatcgcggccggggaggaccttggccccttcgtgcgccgggccttcgcgtgcggccgccccgagccgctgctcgcctcgctccgcggcgcggcgcgggaccgcgaggcggagatcgaggagctctgccgcgcacacttccacgattttatccgcgccgtcgacgacctccggtccctccttgccgacgccgacgcgctcaagggctccctctcggcgtcccactccgcgcttctctcctcggcggccccgttgctcgcctcgcttgaatccttcctcgccgcgcgctcgctcgcggggaatctctcctccgcgctagcctcctcccgacgctgcgtacggctgctcgcgctcgcggcgcgggcgaacgcgcacttacaggccggcaatcatgggctctacctcgccctgcgcgccgtcgacgccatcgaccgtgatctcgcctcgggacccgagcctctgccgctacccacgctccgccgcatgctgctcagcgtcgtccctgcggtgcgtgcgcatgccgagcgcgagatctcccgggagttctcagactggatggttagcattcgcgctgcttcgaggcacctcggccaggtggccatcagccggtcggctgccgcgaggcagcgccaggaggagctccgctccaagcaccgcccgctggaggagtgcatcaccttggatgacgatggtgttggtgacctcgacgattttgcggcagccgcggcaacagctgaagcagcagatggtgccgctgcagcctcttttgaccttacgccgctctatcgagcgatgcatatacaccagacgctggcgctaggtgagcggttcaagaagtactacctggaaaacaggaagctgcagctgacatcggactttgatgtcattgcggcgacgccattcctcgagtcccaccaggtgtttttctcgcagattgctgggttttttattgttgaggaccgggtgtttagaacagggggtgggcttacatctcggccagatgtagatgcactttgggatgctgctgtggggaagatggtctctgtgatggaagacaacttctccaggatgcagacagcaaatcacttgcttctcatcactgattatgctgctttgctttcggccacaatgcggcggtacggttatccagtagggatgctactcgatgtgctggctaagcacagggacaagtaccatgatttgctgcttgcagattgccgtaggcaggtggcagaggcactgactgcagataagtttgatcagatgctcatgagaaaggagtatgaatactcaatgaatgtccttgcatttggaattcagagctcagacattaccccagctttcccatatgttgcaccgttctcatgcactgtcccagatatttgccgtattgttcgttcgttcattgaagattctgtgagcttcatggcacatgggggtggtggggatacctatgcagcagtgaagaagtaccttggccgtatcctttctgaggtggtggatgcttccattcaaaaacttgttgattcaggcagtggtctaagtgtgtcccaggcaatgcaggtcgctgctaacatgtctgtgatggagcgggcatgtgagttctttacacgccatgctgcacaactgtgtggtgtgccactgcgtgctgtggaccgtggtcggcgggacttcccacttcgcaggtcacgtgatgctgcggaggcgctcctgctgcggcttctatgtgctaaggttgatgagttcatgcgacaatctgatggtatcaactggatggctgatgactctcctcctggcggcaatgagtatgcgaatgaggtcatcatctaccttgagacgctcacatcaacggcacagcagatccttccccttcctgtgctacaccgtgtacttgtggcagtgcttgcccacatctctgaaaggatcatcgagctcttcttgaacgattcagtgaagcggttcaatgccaatgcggtcactggtatagatactgatctcaaaatgtttgagacgtttgcagagggcatgtctagcctgtttgtggactcaggtcaagaatctgcaaaaaatgaaatgaaggctgcactagtggaagcaaggcagctagtgaatcttcttatgagcaatagtccagagaatttcctaaatccagtgatccgtgagaagagctataacaagctagattatagaaaggttgcaatcatctcagagaagtttagagatacctcagagagttatttctcaacatttgggacaaggggtgccaggcagaacccaaagaagaaatctctggataccctgatcaagaggctcagagaagccagttagatatcctcccagctgtaagataatacatgcaactggcttctcacatcctcatattttcgtgaaataatctgtatctggtttgtgttatgcctgtttcagtcgttaaccttatgctgtaattgctgttagattctatgtttcatatgtgtggaaatcatcttgttgattcttttgccatttactatatgatcgaggtatagtatattagtatgtcaaaaaaaaaaaaaaaaaaagcctgtgaggagaaattgctcgctaagaccaatattttatatttttcttcaggagatagggatgcttttatttcccccctccagttccttactcttggtaacaaacgatttaatgttatatatatttgaatgttataaaggtaaacttcggtaagagatcaacaaatccttgtaacttgatattgctaagaagtgatcaccccataagtagcaatgccttaggattaaatttgggaactgaacctacctgagttggtgaagggtgtggatgcacacctagaagatctaagttctagtccttgggatagcatgcctagtttgtccaaagtccgtaatataaagcttcctttcttttgagttggtttatttattttaaaagtagttatgacagattgtttattctattagaagctgcagaacctcagtcatttttccttcccaattcagaaatacccattctttaaatcaacagaggattttcttcccaatatagagaaaccagatccataaagaatatggtatcctctttttacacttgttttgtatcatatttgtagtactttttatatagctttggcccgccttctgaa

SEQ ID NO: 144800 - DNA, 558 bp, Zea mays
  Clone ID: MRT4577_63543C.1
ctttccgaattggcgagaagctattaagcaggtgttttccattgggcagaaatgcatgggtgatttgctcattcgaatccgatcgatcatttgccccttaattaattaattcaccctatgatcgtagagagagctagtaataagcaggctattgggagaaaactatataatcagccacttgtgctcctacccacactcattgcaaaacactaagcactgccgagagtcgtcggaatcttgccaccgacgcgacctccatttctcctgtcgcctcactcactcatcgctccagacatggagctcaatttgtagggctctctctttgtgctgtgtgtggtagacatgcatcggcatgatgcatcgtgcacgctagagatgcgtgctggaacgacagcgctactcattcggcgtcatttcgcatcaccgctctgcaccaaaactgtcggcaaactggggaatgcgacgcgcgtccggttcgccctttctctccccttcatttatttaccacaaaaatattacatggtggattatgcggagggaggctttgtttagtgtgtg

SEQ ID NO: 144801 - DNA, 464 bp, Zea mays
  Clone ID: MRT4577_63544C.1
aaaaaaacttcccccacaattcaacaatccctggggacggggaaaaaaacggggcccaagttggggatatcggggaaaacttttttgaccccttccggacccaaaaaccaaaaccgggggttttaacaaacaaggggggcaaaaggggggccaacctttttgggccatttttactacccaaagctttcccgttaaaaggccaaaccctaaaaaagggggggttaaaagcctggaaaagggcccttcctggggggggcccccccttggattttcacccccccccccaaaaaggggccccacccccttttgggggaataaaaacccggaaacaacaaaaccggggggggtttcccccccccggggagaaacccccttacaaccccgggggtccattaaaaaggttgccccagggggcgaatcccaggctaggggggaaccccttttcaaaaaaaaagggagggcgc

SEQ ID NO: 144802 - DNA, 219 bp, Zea mays
  Clone ID: MRT4577_63545C.1
ggtcttcgtactcgcgtaattccgcggctcacacctttcgtccgtctcgcacttccctacgtcggccgctgttgtatctcgttcgacgacatcatgagggagtgtattttgggccagatcggtaaggacggtagctacgtctgtggcgcgtgctgggtgatgaactgcgttgatgatgtcagtcatggtggttgctatatgaccggtgtcaacagtgtt

SEQ ID NO: 144803 - DNA, 602 bp, Zea mays
  Clone ID: MRT4577_63546C.1
cgaggagtcaaacgatttaagtttggccaaagttatataaaaagtgctacaaatatgatacaaaacaagtataaaaagaggataccatattctttatggatctggtttctctatattggtaggaaaatcctggggtgatttaaagattcgctatttctgaattggtaaggaaaaatgactgaggttctgcagctccaaacaatcatctaccctgttagtcatcatccaatttcaatatacctaaacagcgaggtaaattgaactccaaagcccctttataactttcaaatatataacatcaagtcgcttgtcaccaagtgcatggaactggagggaggaaataaaagcatccctatcttagcagggaggatatctaactggcttctctgagcctcttgatcagggtatccagagatttcttctttgggttctgcctggcaccccttgttccgaatgttgagaaataactctctgaggtatctctaaacttttctgagatgattgcaacctttctataatctagcttggtatagctcttttcacgaatcactggatttaggaaagtctctggactattgctcataagaagattcactagctga

SEQ ID NO: 144804 - DNA, 518 bp, Zea mays
  Clone ID: MRT4577_63547C.1
gggttgtttgtttttttttttttttttttttgggtttttttttttttttttttttttttttttttagcttcataaaccatagggaaccggggttttgcacaaaaatgcaacattaaggggcctgggggggcccaaagggggcttttttgggggggggggagaataataaagaacaataagtaatcataatggcaaattagccctactacgaacaacattttctttttttttaaaatctcaccatgaaactgggatacatgcctgaatcagctaactttatgggccctactataatactacctccggtctcaaatatttatcggcctctagttcatttttaaactaaacccccacaaataaaaaagaacgggggggggaataaacaagggggtaaccggtgggaacagcggcaattagcattcaaccacaaaacgggtcaactaagtcaggttgacatcatgtatttggtcaaacaaaatcctatttcctcaacagaattgacataaaccctttttatt

SEQ ID NO: 144805 - DNA, 229 bp, Zea mays
  Clone ID: MRT4577_63548C.1
gtttaactatccaaagatatgtggaaaacctatcacaaaatacaccactgggcgggggctacccacgccgagacttgatgatacccccagccttacacaggcatgaagcatgcctatctaaaaactcgacaccagatagataacaaaatcaagattcacctaccatgcttgaggagggcatacaacatttggtgggaatggagcaaaaaagggcctcaataccctaaaa

SEQ ID NO: 144806 - DNA, 122 bp, Zea mays
  Clone ID: MRT4577_63549C.1
ggggggaaaaaccaacactttttgttcttattagcatcacagggtaacatttaaaccaagttttcaaacacaacaactttgttaggacacgtttcaacattggatcccaacaaagggaaatt

SEQ ID NO: 144807 - DNA, 803 bp, Zea mays
  Clone ID: MRT4577_6354C.1
ccggccggatcggtcaccgaagctctgcccggaaaccgtaatcaccgcgctgtatatagaagaattgtgcccaaaccagcgataccctgttttcgtctggattcgtcatgggcaccttatcgcaggctgacgaggcccagctcaaggcccagctccaggacgccgtcattagctgcaccgagcgctgcctctatcactcggccaaatgggctgcagaactgctcgactctctcccttcgcctgacgacgatgatggctcagacacggatgtcgactcgcccatgtctgacgcgcacccaccaccaacaccagcacctgtgcccaaagacgctactgaagcgcgtctagaagcgcgtgaagcccacaagttcctccttgcaaaaacatactttgactgtcgcgaatacgatcgatgtgccgccgtctttctcccggggcccttgcccaagggcgcgtcgaatccttcttcgaccccaacgtcaaagtccaagtcggccaagggaaaggccaccatgtttaccccaacaaagggaaaactgtccaatgatacagtcaagggcatcagccagaagtcgctcttcctggcactctatgccaagtacattgcgggtgagaagcgcatgaacgaggatagcgagatgatactgggtccccaagatggaggcgtcaccatgaacaaagagttaccagttgtttccgctgtcctggacgagtggttcagagatctccctaacagtgggccggcaccacaaggctggctcgagaatctgtacggcatggtgctggccaaaggaaagaacgag

SEQ ID NO: 144808 - DNA, 467 bp, Zea mays
  Clone ID: MRT4577_63550C.1
cttccggcattcaagcttaaaacaagcttcccgccacgttccgaccaaattagttaattgcctcaacaccaccatggttttccttaagggccccaagcccaacagaattgccggcccaggcaaggaacctgggcccaaacttattcaaaacggcaacaaaccctgaagccgtaaaaaccggcgacctaaaaaaggttaaccaaaagccccggaaacccaaaaggaaggtgaaaaccaccaaccagccgccgggggccaaaaaggaccttccagcccttttgaatggtaatgaagcttccttccttaatgaaatccatccatggtaataaacctacacctccttttcttggttctcccttgtgacccggcttgtccgtccctttatgtttgataatcccaaataattcctattataaaattctggtcctttcctaaaaaaaaaagtacaattcaaccaattccttgtg

SEQ ID NO: 144809 - DNA, 113 bp, Zea mays
  unsure (1)..(113): unsure at all n locations
  Clone ID: MRT4577_63551C.1
cgtgtcgaggataaagagagagttgcgcanaatagagggaatactgtgcgtgaattgcagcgaagatctattgaattcagttccattatacagagtcatcgatcgatgagatc

SEQ ID NO: 144810 - DNA, 216 bp, Zea mays
  Clone ID: MRT4577_63552C.1
cttcttttttaaacataatcgctgatattctcgtgaccattttaaaaaatggagagaaatgacatgcaacctatatgtggtggcaaaaagaattcggggaaccacaaaaggaaaggggagaggagggggggcccgcgcttcatcgaaaactgcggcggcaaatgcacaggaccaaactctggccgtgggctcttaacatggatggattgggattac

SEQ ID NO: 144811 - DNA, 518 bp, Zea mays
  Clone ID: MRT4577_63553C.1
ccaacacagccaccgcggacgcaagcactctgatacccgcccgggctgctgcagtaaaaatctgcccagcacgctccgaaggcacctaccttccctgccgacacgagcactgacaacatgctgagcctatgcgggctctacaagctatgcctatgggtggcagatgtgaataccgaccgttcggacgtatatctcaccaagaggacaaggccccgagcgcatgcctggaacgctgaggacagcaaatacaatgatgacgcgatgaatgactacatcaccaagtgaagcagctcagatgaggctgccgcctcttaaaattctcttaatagtgatgacaaacaactctttgtcaaatgagctttctgccatttcctcattagaagcatatgattcgatccattggggatctctgaaccatctacctgttaatgtaactgatgttgtttttgaacgaccgcaccaggactgcacacccatgtatcaaagccacatgtaaaacaattggccatacagatgat

SEQ ID NO: 144812 - DNA, 136 bp, Zea mays
  unsure (1)..(136): unsure at all n locations
  Clone ID: MRT4577_63554C.1
tttgaaaacggnaaagggatttgccttgtttgcaccagnattgtaccattaaacattggtaagtaccaagggataaatgtcacctaccgacaggagattaaaaaatacattcgtccaggttgggtttccactaacc

SEQ ID NO: 144813 - DNA, 374 bp, Zea mays
  unsure (1)..(374): unsure at all n locations
  Clone ID: MRT4577_63555C.1
cggacgcgtgggataaaatatttcatgtaggttttgatatcgaagtccagtagtctgatttaattaggagaaccattgatgtacttgtactccagatcggagtttatagcccgcacaaggtagcttgctgtaactggcactgcctcactctttagagccttcggttccatgtcagtatgtcaccaactcacgatgacaaactggaatttggaatgacatctgcttgtgtggaaatttcaaagccgaataaactatctcttcaggcttcatttgtcanagattccaaagtatattaacatagccacccttcgttttccattggaatcttaacctgtaaaattacgcccgtgcaactgatgatggcatcaacacag

SEQ ID NO: 144814 - DNA, 845 bp, Zea mays
  Clone ID: MRT4577_63556C.1
agcccctcctccgcgcgctcccccattcggccattccttcaatccttcacctccctctctctcttccccccgctctcctcctccctcctcgatcccctccacgccagccctgccgcgaccacggacgggcccgtgccgccgcttccgccggccgtactcccctgcgcgtgcctgtgggtctggagcgggcggatttgcacggcgcgttcttgggccgccgccttgcgctgcgctgcgctgcgccgtgctttctcctcctccagtcctgtgcaggtgcgcaacaatccggtcccgtgagccgaggatttgaataacccgccactcctgaacccccgacgggccgtttcttccgtccttccttggcggctgcgagtccctgcgcagtttgcttccgagcctttcgagattccgcggagatctgctcagttcgtgccgctcttgtctggttctgatgcgcggacggctgctgcctgtgaggcgttgcgaggagctgaggcccgtctgaggtgactaggtgggagaggagaggagctcgtggctcgacggcagaacagtcctttcgttcgttgcacgcctgcgggccgcggcctgtttctctccattccaggcttcttccagttccagccatggaggaggtggaggtggccaaccgggccgcggtggagagctgccacagggtgctggccctgctctcgcagcagctggacccggccctgctcaagagtgtagcgtcagagacggccgaagcctgcgccaagttcaggaaggtagccgccctcctcggcagcggcggcggccacgctagaggcaggttctccagacgagtccggcctctggggctcgtc

SEQ ID NO: 144815 - DNA, 429 bp, Zea mays
  unsure (1)..(429): unsure at all n locations
  Clone ID: MRT4577_63557C.1
atcaaattcctgcacgcccaagttggttcccccagcgtccgcccacgcgtccgggcagcaagaagtaccacctcacaaggtattgagggacggaggaggtgaggcagcgggagcaaatggagaactcactggccgagggctgtgcctggttccgatatcgagcacctttgcggtggccagcgagacgacgacgacgacgacgacgccgccgctcgacttctggacaccgtttggaggccctgccttccggtagcagacgtgtatccgggagctggcttttactaattacaataatttgacagttgatctagctgtagtcacaatagatcaagtcctaactcacatcgtataatgcagttactagtgatcatatatatagcaatctatatatggctgatgttatggagtataaaaaaaanaaaaaaanna

SEQ ID NO: 144816 - DNA, 469 bp, Zea mays
  Clone ID: MRT4577_63558C.1
cacacgaccatggccgcggcgatgaccggcagaactcgcgccagcggaggctccttcctcgagcttatctatgacgagctggccggtgtctgagacgtaacgactgctgccaccaccgcggtgagagctactgatgccactaacagtggtgacagcaacgcggtgacgcgtttgacgatgacggagactgcgtccacggggcatgagaatggcatcatacagagcctgctgggctgattcacacaggtgttcaagatgctcataaaggatgtatgggaaagcaaggagcctacctgacggtctgcatcatatggtgcaaccagaagagcatatgttgtatgatccagtgaaatctcgcgccgttgccgcccacgacggcgtactgggcaccggagcgcaagccgccatggcccaagccacccacgcacgaacctcccacgcccaagccacccacgcccgtgcccacaca

SEQ ID NO: 144817 - DNA, 509 bp, Zea mays
  Clone ID: MRT4577_63559C.1
ggttgcaagagcactcgatatcctgcgtacaccatggacggacatatggggcgccaagggtagggacggctccatgagataacggacagaggagacaccgtggtgaaagcagagcctgatgcgccgctctggcgttgtcagcaactgcatcttgcatcacctgctcataatactctgttgacagacgctctggtggacggaggagacggacttaaatataatgctgcaacagaacgaccttggcgacgccgatgatgtacatagaatgctcggaagcatactacaacacttagatggtgccattaccctgacccagataacgctggactccaacattggatcctgtggccactggatggatcaacaaccgctctcgttagttcatgacagagcccaacggcaacaggatccccagattctatgcgcaggcggctaccatgctcatagactctatcgactacatcatacttacagaggtcccagacagctccttggagaagccagaagct

SEQ ID NO: 144818 - DNA, 707 bp, Zea mays
  Clone ID: MRT4577_6355C.1
ttgggaccctcgaggccggccgggacgactctaatcgcatctgttctcagatctccccgccgccgctagcgccctcctctgggatatgtggtgcgaattagaaaaacgacagaatgctgaaggtcatgaaggtcaatgatgctctcaagctcatgacgatgctgaaaaagactgaaacgcccggactggatctggccatcttccacagctagcatcaagcccctgaccctgatgaacagactaggctactttgttcagcgccagtacgtgaatgaccacacgagctgggaactgaatacagcagctgaatggaagactcactaaatgtgtgcgatatgaggccaggttcatacgtacccgctaaggacatatactcatggacgcctcactgttcttccatctcagaagaactgcatacatcacactaaccacatatgctgtaagtatgagaccatcatgacgccccaccatacaatgactgtgatcagattccattttactgttattgaagaactcaatgtatggaacaacaaatgactgccacaagttgactgatctgctgaagcatgatgaaactgcataactgagccttctgaccatgttataattgactactactatgcatttaagacaccataatgtgtaagagatgcacctgctagatcctctggcactccacaaacgcggtcctatagatgcagctcttt

SEQ ID NO: 144819 - DNA, 632 bp, Zea mays
  Clone ID: MRT4577_63560C.1
tacatacatagagggatcacagtagcaacaatcgaggcaacaacggcgaccaaggaactcttcctccttatgctccttgctctttctgcgtgagctgctaacgcgacactcttcgcctcacatgctcacaagctcctatagctttccttcttcccccataccttccatgaatgatagctgcaaaatgcgaaaacccaactcttacaccctataggctccaacaagcaatcgcagcatgcatcatacattcatgacccttgatcaaacaatcgccatacctatctttggacgcagtcattgatacaaaccatcaaggcacagaagctgaagaaccatcgcgctaccgtgcgatcaacacaagtagttctgacaaacctttctccctactattagcatcaacactatcttccattcaaccaactatctacactgaaccctgctgcttattagcaacaacaactattaccatttacccagatagctactgtctactctcatcaacaacaacttcttacatttaaccaaatggacgaactgaaccccgctgcttatttgcaccagtaaatattactaccatttatgcagctagctgacaacagccgtgcttccttcttgacacagaaacagttgct

SEQ ID NO: 144820 - DNA, 275 bp, Zea mays
  Clone ID: MRT4577_63561C.1
ttaagcagtggtaacaacgcagagtacgcgggtacaacagattatatgagactgatcaaaaaactatgcgtccagctcggccgccttcaccagcgccttcacggcggcacatggcgctgagggggaacctcggcccgctcaccgggaccagtgggcagatcaggctcacctgctggaggctgatctcgtcctattatttaaggacggacgtccgatggacgatcctgcgcaatcgtgtcgggcgtgcgtggtgcgcgtgcgtgggggtgctgctg

SEQ ID NO: 144821 - DNA, 394 bp, Zea mays
  Clone ID: MRT4577_63562C.1
ccgagaccgagcgtgagagagagatcgggaggggagtgacgcagtcagagctcgggagcggcaggaagagagaaaagcggaagagcttcgtcgacagctcgtgtacagagtcgctctgtcctcgatagatggcttgggagggtcgtacaggcgtcccaatggtgtcatgaccttaccccacagaacttgggcagtcgtgcggaactttctcgacgacgtcgaggaaccaccggacttccgccctgcgccgtggtcagtgctgatgctcgcgtggctcacccgaggttacgagttgactgaacatcaccctggttactgggatctcaagtgccaagcgcgttgagcccttgatccactcttggtacccaataatgatctttattatcactattca

SEQ ID NO: 144822 - DNA, 821 bp, Zea mays
  unsure (1)..(821): unsure at all n locations
  Clone ID: MRT4577_63563C.1
gccgctgcccattgttcccctttccaactccacccacaaatccacatcttgttcctcatccatctccaattgatcctgccggcgtcgtcaagatccatccgagaaaatccaatccgttccaatccagacaaagctagctaggatggatccataccatgctcctatggcggggatttcgttaggttcgctggctccgccggacgtcgacgccggcgccgccgctgacctcccccagagctgccttcttgacagcaagcctttcttcggcgagaggataaacgacaccacggccatctccagcaccaccgacccggacgacgaacagcgccccatggtcatccagaccaccttgttcgtcgcccgcccgcctcgcgtctcctacgtgcttgcctgggccaccggcacccgcttcaccgaggagcctctcgtcctctccacccacggcggcttcgtccttctctccatggccgtacgcttcaagaaatggccgttctccgaatactacatctaccataccggccgagatcacggcggtgatggccgtccggagctctatcagatccagcaaccaacagcatgcgcttggtcaacgaatgctgtgcggtgggcctcgtttctcatggcggaggctaccacgtcgctgcactagccatggaggagaatggagagttcctgctctgcatcttcagctccgagacgcgagcctggaccatcaagaaaccagtcttgtcaatggcagatggagccactgaccttggcgactacatgccgngcaaggcgatcgctgtcgntgatggcggtgtcatggcgttcgtcaactt

SEQ ID NO: 144823 - DNA, 1955 bp, Zea mays
  Clone ID: MRT4577_63564C.1
cgaatcgcgctgcgtcccctcctccccgcctgcttcatcatggaagccgacgtccccattgccgctgctacccccaggtacggagcaagcctaagccaatagctgcacccggagacacagatttggagtattgagctggctctctgttttgtcggttgtgtgcttctacttcatagaaaagagctgcattttcttcttagtgctttggatgctggccagatgaagagtagtagatttctgttcctttgtgcaatgttctgtcttatggctcggctgggagctgccaatgtcgtgctaatggggaataatctgaccctgtccttcgatgacattgaggcgagcttttctccaggagtgaaagggtctggagtcagtggagtagtttatgcttctgaacctttgaatgcctgcagcccattaacaatcaaaacagtcaatggccctccatctccctttgcgttaattataagaggcgggtgcacatttgatgagaaagtaaaaaatgcacaggatgctggattcaaagctgcaatcgtatacgacaataaaaatagtggggtcctggtttcaatggctggaagctcaagtggcattcatatatatgccgtgttcgtttcaaaggcctcgggagaggtgttgaagaaattctcaggcaatatggatgtagaggtgtggatactacctacttttgagaactcagcctggtcgatcatggcaatctcattcgtatcgctacttgccatgtgtgctgtactgggtacgtgtttctttgtgagaaggcatcgaataaggagggagcaccctagaatcgcagaagatcgagaattccatggaatgagcagtcagttagttaaggctattccaagtcttatttttacaaaagtgcaagaagataactgcacatcttcaatgtgtgccatttgcttggcagactacaatgtcggagaaaagctaagagtgctgccttgccgtcacaagtttcatgcagcttgtgtggacttgtggctgacttcttggcgaacattctgtcctatatgcaagagagatgcaaggagtggagcatcagaagttgttgcgacagaggctacccccttgctttcttctgctgctcggttaccttcattccggtcgagtgtggcagcatcccctccaaggccaataagccggcatccttcatcgcactcggtttctcgtgcttactctgtttctagtacccccaattctcccaacccctttatatcttctcacataagctcacctggcatccgtgcaagcagaagcatcacagaccttggaaatatatcatctctccatcctcgcatctcacatttgtcatcgacgcactccctggttggcagccacttgtctccaccaatcagtataaggtattggtcgtcccatgtggcgcattcagggtatggatcacccagtccacacgtgagttcatcctacatctccaattctgggtatggttcttcaagctactgctatctgggactgggaggctccagccacagccagcatgggacatacctaaggcgctgtggagaatcggggccaagcctgtgtaccatggtgccgcagcagttgcagtgggagactaatgtagcagcaggtgcgtcgtcagcaaagtccctgcggcagtcctcctacctgagacactgtggcgattcagacgccagtttgtctgacatgacgtcagcccagtcgttgccgaggtgctgagggggctctggatttgtgatttgtgcattacacagtgaggagtgtgtgacataacattactacattggctgtggtgtggagagaaacatgcatagcaatagaacatacacatagtagcacatagtagggttttgttctcttgtttctgagatgagatgtgttcttgtgctcgcgatgcgtacatatggcaagtaacatgcatgagggaataatatttatttggttgtcgt

SEQ ID NO: 144824 - DNA, 292 bp, Zea mays
  Clone ID: MRT4577_63565C.1
cctcgaccgctgatggagaagaggagatgcagggcaatacgaatggcccgtctatcggcatcgatctcagcacgtccgactcttgcgcagcggggtggaagcgagaccgcttcaagctcattgccaacgaccagcgtagccgcaccacgacctcgaacgtcagcatcgccggtctacgagcgcctagacggagatgcggtcaagagctagagacccatgaaccgcaccatcacggtctatgatgacaagaaggctcatcgctgatgaggttaaatgatgagggtgtccagag

SEQ ID NO: 144825 - DNA, 380 bp, Zea mays
  Clone ID: MRT4577_63566C.1
cccgggctcgtcgatcggttttgctaagaggcaccattgcttgtcgtctgatccccgccgggcgcgtgtcgctgcacaagatgacgacggcaacagccgttggcagcgtcgccgaccgcatcatgccgcacctcctcaacatgtaatttactacctttttgcttagcttgcgtttctgacaagcctcatccgcctctggtgggggggggggagtaatgatttcctttcttctatttagtttgtttccctcataaattatttaagctagattatggtaaaaaaaataaaaaatcactttagaaatataaataaactaaaataagctagtgttgagttgcttatttgtaaatctaaaaaagttttttacttttatttccttc

SEQ ID NO: 144826 - DNA, 140 bp, Zea mays
  Clone ID: MRT4577_63567C.1
tgtacgtgcgcgcctaaacacccaacgagccggagcgacggaaccgttcgccgccgttctggacctggacgccgatcttctggcacttaaggtcgaagcgacacacggacacgcccgccgtgcggagaggcgagtgtgcg

SEQ ID NO: 144827 - DNA, 296 bp, Zea mays
  Clone ID: MRT4577_63568C.1
gccacatcgacggcaagctccgctacggcttaaacggcttctccaacagggaccccaagacccccgtgaagctggttgattactcaaacgcacccgccggggggttaagttccacccggttggccacgtggcccccggcgtggaccggccccttcatatgattcccaatgttattaccggcgagtttcgcacccttattgagatcgcgttcgagaacccccagaagagcatatactccctccacagggatgggtacaccctcttctgcgttgggatgggcccccggaagtggtctc

SEQ ID NO: 144828 - DNA, 574 bp, Zea mays
  Clone ID: MRT4577_63569C.1
ggcggggaaggcaaagcacctccgatgcgagtgggattgagcaaattgagccacagccgtggaaccacatcaattgcaaagttctatccccttgcaaacactccaggaggttagataggccacgtataacgtatgtgaggtcttggcaggggaaaggatgtatcggtattcaaggaattcatcaccggagtatcccctacacggcggagccgcgctgtgtcatgtcgtgaatcggctcgaccacaacatgtcaacatcgttaccggtgagacccccttcttgaggtttcgccttaatcggtccaacatagagcactttgcatagtaggatatagttcgccttcggaccgggaattcaacgttgtagtgagacgttgtcacgggtgtactgctcatcgtggtcgttgcgtaccattagctttcgtcgctggttggtaatccctttgaatttgtaggactctcatataggtgtagatccatttagatcacaggatagagccctagtgcacggagtaggcatccttcggccatggcgccgccgtgtgtggcctatgctgcctggctcggtcggcgga

SEQ ID NO: 144829 - DNA, 294 bp, Zea mays
  Clone ID: MRT4577_6356C.1
attcggttcgagccggtgcggccagttttttacagagcgagcgcgctgggttttttttgttttattttggccaggggccacacagttacgcgtttatgctgcgcttatatgaggtgggagaacacttgcttaacatattggttgtgctctcctcacttcgattatgtgcggaggaacacatcactgttggctcgggttccctaatggaggtccaagccctagctattccatgataaagagtgcgccactataaatagtcgagatctaaacttactgagcctaattgataaggaa

SEQ ID NO: 144830 - DNA, 487 bp, Zea mays
  Clone ID: MRT4577_63570C.1
cttttcctcccaccctgtctccaatggcggccacggccgcggcggcgacgctggcggcggccacttcctccctcctccggcgctcccccctgctgcggccgcacgcgctccgggtctcccgcgacttcgctccccgaagatttgcgcgccatattgcttcatcaacaaatgaagaggctgctgccaaaacagcggcagcgactgctgatactggaggaccgaccatttttgacaagatcattgcaaaggaaatcccttcaagcattgtctatgaggatgagaaagtcttggcatttagagatatcaatccacaagctcctgtccatgttttagtcatcccaaaactaagagatgggctaactggacttgacaaggctgaaccaaggcatgctgaaattttggggcagctgctttacgctgcgaaggtagtggctgagaaggaaggcgtagcagatggattccgcgtcgtcataaacaacggagcaga

SEQ ID NO: 144831 - DNA, 487 bp, Zea mays
  Clone ID: MRT4577_63571C.1
cgaataatgagttgacatgccatcgcgtgtgactcattattaacaataaaacaagtttcctcttattatcttttaaaaaaaaaaaaaaaaaaaaaaaaaaaaaaaaaaaaaaaaaaaaaaaaaaaaaaaaaaaaaaaaaaaaaaaaaaaaaaaaaaaaaaaaaaaaaaaaaaggaaaaaaaaaaaaaaaaaaaaaaaaaacaaactaggggcccggaactgtggggaacaaaggcaaaaaaccaaaccctggcaaacctcctggcccagtagggtgctccctgtgggaaaaaggcttgtcctctaacattcccccccaacataccagcggaaaaaacaaggcgcaaacaccgggggagccaaatgagagacctaacccaaattaataaagttggtttcactgcccgaaatccagacggcaaacctgttgagccaactgcacaacccacttgcacaaagaaaaaaaaaagccggccggcgtattgggc

SEQ ID NO: 144832 - DNA, 227 bp, Zea mays
  unsure (1)..(227): unsure at all n locations
  Clone ID: MRT4577_63572C.1
agacggccgacaggangaagagcaaagacaaggcgcgcnggcgagacagacgacagggccagganaagaggggaaaaccgagcacacaaacaagcacaagacacccaaaaacagaagaggggggcganngaccaacaaggacaacacagcacaaagcancagngcgagcgcagcaggagacagggngacgggcgcaagaaaaccggcaagagcagccacgagaaggc

SEQ ID NO: 144833 - DNA, 337 bp, Zea mays
  Clone ID: MRT4577_63573C.1
attttagttgccttgcgtccgcccccttccttgctccgtcctctctccttttttgttccgcctactttcttttttttggccggcgttaccaactttttgggtggggaaccctctccctcccactttaatctccttgccgtcctcccctttttgctcgctcgccttatccctttttcgcccgctccgttcttccttacgatcccttgccctgtctgtctgtcgaatggtaccccccctttaccggcttatttacccctccgtgtgtgttggttttacccatcggggctgtttttttttcccccttctttacgccccctttttttgcttttttcccttc

SEQ ID NO: 144834 - DNA, 294 bp, Zea mays
  Clone ID: MRT4577_63574C.1
cacttattatttgtttttgtttttttgtttgttctttttttttttttttttttctttttttttttctttttaaaaaaaagatcgccggggccccgtttttggggaaaaaaaaaactgcaaatgcaggcgcccaacagtgtgaaggggcttttctttgggaaacgcatttatgcccaggggcgccaagagacagtttggtgtgctaacatacccccttaaacgggcgggggctctaaatgatcacgcctacttaaaataataaaccaggtcctaataaaaaacagacgcgggggg

SEQ ID NO: 144835 - DNA, 884 bp, Zea mays
  Clone ID: MRT4577_63575C.1
agtacgggacccccccaggggccgggcccgaagcgaaccccccggccccaaccgcccccagccccgccccccctttttgttttcttttactcaagtttgtatattgcaggcgcaagaccgccctttttttttttttttttttttattgcgagcttttctctttttttttttttttagctccttgaaacagcttactattttttttacatctcagcaaacttggatagtactgtagtatttcgaaagcagcctagcgaaccacgctgagtacgtgacgcgcccagaggccgggagcaaagcgaactcgactaaactaaacgccgacagccctgcctgatgtcgccgccggcgcctctaggcggtggcatgcttctcgtccttgaggtggcgcgccttctccttctcctttacctccgagccctgcgacgtgtcgtactcggagtggctaggatggatctcggcgccggggtgttccacggggtcgttcccgccgtacaccccgccgaagccctcctcgtcggagcgcgtcgagtacccctccccgaacgagtgggtcatcacgtccctggtgtgcttgtgcatgtcgtcgcgtttgttctcgccaccggcggcgtcccgcgggggcaccttgggctgctgctgctgcttcggctggtccatgccgacgccctggtcgcccggcacgggtgcgctgccggccggcgtcgaggagacgctcctcccgcgtgctacgcccgctgcgggtaccaccaagcctggcgcagcgacgccgccgctcctcgtggtgccgccgatccggccgagcgcgaacccgagtgccgtgctgctgctgctgctgctggcggccgcccgaaacgtgtaggggtacatgagcagcaatgaag

SEQ ID NO: 144836 - DNA, 885 bp, Zea mays
  unsure (1)..(885): unsure at all n locations
  Clone ID: MRT4577_63576C.1
ngaaacactactagcagcggcggactgcaggagtggacgaacggacgacgatggctgcgccagcgccgcatcaggggcaggggcagcagggcgaccaccaccagccgaagctgcagaaggtgatggtggcggtggacgagagcgagtgcagcggccacgcgctggagtgggtgctgcggaacctggcgcccacgctggcgccgccgctgctggtgctcaccgtgcagccgcacttccccctcggctatgtctccgccgcggcctttggcgcacctctgggcaccgttcctccggtagctccggagctcatcaagtcgatgcaggagcagcagaggcagctcacgcaggcgctcctcgacaaggtcgtggccatctgcgctgagcatggggttgctgtagagacaattgttgaggtaggagatgcaaaagagatgatatgtgaggcagctgagatgaaaaatgttgatctgctggttcttggaagccacagtcgtgggccaatacaaaggttgtttcttgggagcgtcagtaactactgcgtacaccattcaaagcgtccagttcttgttgtgaagaaccaaggctgaaggttcctgttcctgaacaaatcaactccctggtcgtcctaattatgttcggggtatttatcaacaaatatgtaagaagtattactttagccaaacacattggcaaataaaatagcttgcttctgggagggccgaggatggcaaaggaggggttccttttttttccttgtcagtttgtcttgcttccggactggcatatatacgttatggtctcgcagggttgtaaataagaactagtatgaactttgtgcgtgtttatgcttgatgtcagttattctgttatggcctggctgctcat

SEQ ID NO: 144837 - DNA, 273 bp, Zea mays
  Clone ID: MRT4577_63577C.1
aagagggaacgaaaaggcggctggggaccccgccgcaattcccccgatgcctcgacccttttgctttggctcatccatcgtaggcagtggcaggcgaggtgctttcagctgagtctcagcgactgaaggatctgaccgatgctcatctgggggctttggcagcaagagcctgtacaaccttggggtgaacacgagcatcttcatgagtgtggctgggtcacgacaaggcgcctgttatggaggtgctgaaggcttgagcactgatggctttga

SEQ ID NO: 144838 - DNA, 247 bp, Zea mays
  Clone ID: MRT4577_63578C.1
ttggaactttgggctgatttagtgcttgggtaattacacgtagtggtgacggtcggcgcattggatcagtacatgcccattgttacgacagagatcactgagttcaagtatgtgtccacgtactgacgtgcgtgtatcatatttcacatagattcctatccataaggagggcgattacatagggttcataaaacgggttatatccgtacaaggatcgtcacgcgcgtgatatcggataccgactagc

SEQ ID NO: 144839 - DNA, 410 bp, Zea mays
  Clone ID: MRT4577_63579C.1
tttatttgtccgcaaagttacccggaacctcggggggggcacccttcgccacaacctgggcggcaccgatcgagccccggctgcaccccgagaggtgtagggaaatttttaaaattggtgttcaaacagtcagttaactcgttccttatatttcgtggtttatctgtctttctctgtctctattgtgggaactactgggtgacctcgctgtacgcgacgttctaaggcatgtgtccaggtcttcctcggacagttcgcaaaagagcagcctacatgaaaacatggctcataaaatagcaactgaagagctagtagaaaagcttcttgagaagctgtgtgatgattcttgggatcatgctgactaaggttagaactatgaagatggccatgcacactgcttcaacataata

SEQ ID NO: 144840 - DNA, 435 bp, Zea mays
  Clone ID: MRT4577_6357C.1
caagactaacaaacacttgaatggcgaacaggagggttcatttaaactcgagaacattcaacctcacaacaccggttgaaaggggtagctcttaacatgttggcgccgaccatgcaacagctggaagaggtattacgggtaaaggtcacagcgtggcaaggacactatctatcttgagttgccacacggggcctccctggaagagccgacaggagctcaagaggggcgatgccattacctggaagccttgacgccatgtgaactcgtgatccttcgatccgttgaccacctatctcacctagaaagccagcgctagaatccaatcgttttggagaataaagccggctacagactacgtcatggataacaactaatccctaaaatctccatgccgtcctttggctgtagaacctgtgccttgccatatcctgcaga

SEQ ID NO: 144841 - DNA, 472 bp, Zea mays
  Clone ID: MRT4577_63580C.1
ggccgcaaattttttttttttttttttctttttttttttttttttttttgctggaatctgtagttgttgtttgtttggcataggagatggggtacaatatatagactcaaaagaccgtagccctaatgggtcgacagctgaacagtggcgtaagggcacatacacacacaacctaatatccccgaagtcccaacggaggcacaacacacgataagccttgagtagaagcccatgcgagccgacggggtgatatatcctacaatcacagcggggcgagggtgtgaatcttgaggctggataaaagaccggggaggactccgagaagacaatagcccctagatgctgagataacccaattccccgtgcccgcggttgagagacatgcaacagtaccccggtcttggagaggggacaacgttcccgtgtcttgggttgggggggcgacacaacagaataggaccagcagggcgac

SEQ ID NO: 144842 - DNA, 261 bp, Zea mays
  Clone ID: MRT4577_63581C.1
atcgtcgataccccacctatgatcgttgttggtcttgtgggatacatcgagactccccgaggcctgcgatccctcaccaccgtctgggccgagcatctgggcgacgagcttaagcgccgattctacaagaactggtacaagagcaagaagaaggctttcaccaagtacgccaagaagcactccgagaacagcggtgcctctatcacccgcgagctcgagcgcatcaagaagtactgcaccgtcgtccgtgtcctcgcccac

SEQ ID NO: 144843 - DNA, 419 bp, Zea mays
  Clone ID: MRT4577_63583C.1
ggccccaagactaaccggggggtaatttaaaaaggaaaaagggggccacaaaaaaaaaaagggagttttggtagaacaaaaaaacaaccccaaaaaaggggcaaaaaggggggggggggcaatggggagctttaaccaggaaaaaaaattgggcaacccactttttttaaccaaaaaaaaataaaaggatttcctttttcgaaaaaaggggaaaaccccaaacggggaatggggggtattaaaaaaaacccgcccttgacaaaaatagggaaggaaatcagggcatgggggaccccaaggggaaaggggctaaaaggggaaaaattttaaaaagcccaatttggaccaaatttccgattccagggggggcacccgccaacccctgggggtgtaaaaataaatgggcaaccccgcttggg

SEQ ID NO: 144844 - DNA, 384 bp, Zea mays
  Clone ID: MRT4577_63584C.1
cggacgcgtgggtttcttatgagaataatgcttattgatgtgatttattagaagccttaaaaaacaatggccattcatgtagtgattgccatgtccctagaaaaatgtcatagacttacatgattgacatagatgggaaacattgttttattgaatcaactgtacgtttaactccatgacttggcagacatgtagtattttctgaaaatcattattgaatctagtacacctctttgtatttttagtaatctttgagtagggctattgaatctagtaatctttgctagggtataaagctttctgccctatgtaatatttagagatgaaaaggtcagttaatctaaaaatgatcctgtgcattcattttcttggtgaaacatcact

SEQ ID NO: 144845 - DNA, 490 bp, Zea mays
  Clone ID: MRT4577_63585C.1
ttggtgatcggcgacagtggtatctgttaaagatggcgcctcaaacctgtatctcggcgctgagactccggctgtgcgtgacgggattccagcccagcttctgccaccaggtcggcaatgacgcgccgaagctgaaggtcaggccgaccgtgtacgaaagggagcggaggtgctcgtccgccgggagcccgacgtcgagcggcaccaggaagcgcgtcggtggctggagatgtcggccgggagcggcagcggcgacgaggacgacgacgagggcgatctcaagaatctgggtctgtccaaggaccatgccgccgtgctcgaggagtgcttcaaaacgcaccacaccttcacttcgtaacagaacgcaggactggccagccgcctgggcctccgggcgcggaaagtgtaggtgtggttacaaaaccggcgcgcccgaaccaaactgaagcagacggtagtcgactgcgaatacctcaggcgctggtgcgag

SEQ ID NO: 144846 - DNA, 483 bp, Zea mays
  unsure (1)..(483): unsure at all n locations
  Clone ID: MRT4577_63586C.1
gtttactgaagccatatgtggtggcggaacctgaaattcaggtgagaatctgtgatttgattatgccaaaaatccaagtctctttttttgttaacagcttaatttcggggaagccagttttttgaccagttttgttacattagaactgccaaaaaagcaaaagtatatgttatgtcattatgtgtacaattaaaccacagtcctgaataccatttaacagtttatttattgactgcccttgatatgtaattggaagcaagagaagctgttccattaatatgcgattgttacttttgctggtccatcagttgatcgcatgtagaatttatttatttgtcgatctgtagaacttcgctcactgacttaggacttggtaattaggccctgtttggaagcaacctagnttttaagaatctagcttctatcttcagtttatagaaactggtttataaaaaaaagtggtcagtggngtttggaaccacc

SEQ ID NO: 144847 - DNA, 564 bp, Zea mays
  Clone ID: MRT4577_63587C.1
cctcgaggccggccgggagacgtcgcctatccaaggctctagactgctcccaggattgttgacagggtcctcggtctacgatagctgaggtatataagacacccctacgctttgaccttcttacaactacacaacaccaccattacccactaaactacccctcaactaaacaaacaccccctcacacaagtctccagcatggctcagttcaacatcactctcaagaaggacgctcccaaggaggagctcgaggcagcaaagaagcacgtcacggaccagggcggcaagatcgtcaacgagttcaccctcatcaagggcttcactgctgagatccccgacgacgccgtctcaacccttgagtccaacgagcacgtcaccgtcgagaaggacgccgaggtccgtacgcaataggtcgtctacacagccaccgctgatgggtaccacaaagatccaaatgtaataccgtgagtgacgatacgggggcatgatgcatgagcacatgatttcatgggtatatagcgataatcaacagccgtgccgaaaaaaaaaaaaaaaaaagcggcc

SEQ ID NO: 144848 - DNA, 683 bp, Zea mays
  Clone ID: MRT4577_63588C.1
atttctgaccagcagcatccggcgcccgatcgcgtcgccgccgtccgcgcacgacctctataccccacaagaagaagaagctgccaccgacccacgttcaccggcgaatacatatatgtgttcgcgagggcgatatctatagaaaagtcacgtcgcggtcacccccaacctgcgagcctactgcaatcgtgaacacaacgaccaacattcgaaccgtgcctggcatctgctcatgggcaccatggttcgaccacgctcacacattcccttgcgggaactgctgcaatcattgcctcggaagttacagcagatgttcgcatgacggacactccatcagataaagcatacctggccatgacgatcatgtctactgctctctctctttacaataataccactggagaaacgccgaaaaactacaactctgagataaaggctaagacctacttgatctgacctattgactcagctggactgtgtgatccttcctcggtacctgagttgctctgtctacatcttgagagcggctctctatgtgctataatgtattgaatgagcccgagggcaaactgtaaatgtgattctgcatctccatgaggtacagattactgcagttcatcacctatctcaatatgtacgacagctgtctatgaacttcaggtctggggagaggaagcttatca

SEQ ID NO: 144849 - DNA, 291 bp, Zea mays
  Clone ID: MRT4577_63589C.1
ctcaagactctaactatgatattagcacaacaatagtgacattgaataaccatgccttggctctagaggagcgttcaaaggcagaaattgttcacagtgctgagattggccagtttgcagcaggaatccttccccaaaaatctgaactgtctaactgtgaaactgacagaggacggggttcggaacctgaagcatacgagtcactcataggagaaccgtgattgcacactgatgggggataataatctgtaccatatccgtatatcctctgataacgtgctggccacttca

SEQ ID NO: 144850 - DNA, 294 bp, Zea mays
  Clone ID: MRT4577_6358C.1
aacaaaaaaaagggtttttaattacaggagagttcagggggggattttgtgttttcaaacccaaaacaggaaaataaaggggagttttttcctgtaaaaaaaaattttactttttggaaccacattatacacattacgacggggttaaagttcctgggaactagttaacattccaaaaccagcaaatttcgctgtttttgtttgttgccctaaaggcttatgaggggggcatgccaattgccaggccgtaatttgggccttggaaaatccgccccttcagggggttttcaaaaa

SEQ ID NO: 144851 - DNA, 797 bp, Zea mays
  Clone ID: MRT4577_63590C.1
gggaccctgggccggccgggccgcccaccacgcacgagggcgcgtagggcgctgctccgatcgagggccttagttattcgcgccggccccgtactcgggagatcctcgggtaccacacgtacatctgttcggcgcgcattggctgttccttccatcgcttttgcggtcggccgttgagtatagcttgtgcgcatagacggttgtggctctgaacaccgccaccgccggtgcacgcactgacgagcatgctcgacgctactgggcaaggcctgggctggatcacccaaggtaaaaaaaaacagttacttcgatctactacaatgacactttaaattaagactcagaggctgctgtgcttttggcaagcttaccagtgtaaatgcgtaattacctaggttggcataactgatgccgctacagtggtgcttacatcatctgtgcctattgtgtgcaattccatgatgagcatcgttcagcagacctgagcgtagattggctatttggaagaggagaattccctatatttctttatgattcctatctgcaggagctgacgaaactagatcaagagcatggcgtgcaaaggtgaccactataatacctgcaacagtggcggacaactgctattagctatggtagcctgatcttacaccacaaataaccttacatgactacgaaccctattctgacttgagaatatgaaataggcaaccaattaataaaactgatgaacgggatacctggctctcaaaagtaggcataggtggaggataaccgctgcccgacaaacatatcta

SEQ ID NO: 144852 - DNA, 237 bp, Zea mays
  unsure (1)..(237): unsure at all n locations
  Clone ID: MRT4577_63591C.1
cgtanggtggtttnttttttttttgtttacataaaagaacataaatcacctggttgtgacntggcgcatacggcannttagcatccatcgcctcaaatataggaatagaatcaccagattacntgttcggtctcaaggttctncatgagttctaaagaccaatttgctgctagatgtcgtggcaccaacaatttggttatattcaccagagcgtaccnnaataataatantaataac

SEQ ID NO: 144853 - DNA, 487 bp, Zea mays
  Clone ID: MRT4577_63592C.1
gatttaggtgacactatagaaggccggccgggagtttttatgcaccataaaagaagagttgaaaaaaataaaaaaaaagaaaaataacaactaaaaaaaaaataaaaagaccaaacccaaattgctataagaagacgataataggtacaagcaatgatgcataagggggcccgattgcccacatttttccaccttgaatggggattccttgggccccttggggggaagacattaccccttggtctccggttactagctgtgccgcttaccgtacacaactctttgttggatccgactaaacggggatagcctcggggggcaaaatggaggcgcttgcttattatgattctgcggggccctctgcccgtgtgctaggaggagcagcgggtggccactctacttttggctaatcacacgatcctgggaggagcctatttcctattgtgcccgtctctccgtattatactgcattgatggggggggttct

SEQ ID NO: 144854 - DNA, 630 bp, Zea mays
  unsure (1)..(630): unsure at all n locations
  Clone ID: MRT4577_63593C.1
ccgggnaaaaaaaaacaaaaaaaaaaaaaaaaaaaaaaaaaaaaaaaaaaaaaaaggaaaaaaaaaaaaaaaaaaaaaaaaaaaaaaaaaatttttcgcaatggatctagtcaccatatccggggtagggtagtttttaaaaagattttttaatcccttcgccgcccgccgcccgccgggattaacccccgccgggtcgccacgcccgaagcccgccgacgcaaagccgcccgcgaggcctttcccttgcgtacgcggggataaaaatggtccaccgggaccttgttggaaaggggcctggttccgtaaagttggtgccgagggaggaggacaatttggggaacgcgtacaacctaattgccattggggacagcctcaaggccgtcaccgtacggaaggtgctgaaagagggggtatttggaggacgtgatgccgagcgtgtgaagtttaagttaaaaattgtagtcgagtttgtaaactatgacaaggggggatttgttttacgtgggcggggaaaaatattactggaaaggaccatgtgaagatgggccagttccacacgttagagcttgggctgaaaaaactttttgttttacgaagggaaatttgggatgggtaagcctttgaaac

SEQ ID NO: 144855 - DNA, 563 bp, Zea mays
  unsure (1)..(563): unsure at all n locations
  Clone ID: MRT4577_63594C.1
cgggccggnatccagtgctgatcagattatacaccgtcagtgctaaacatattcataagggacaccaatccgttgccgctgtgtagtcatgtgctccaggattccagcgcttgggtccttgaggttatgcgtggcggcatacaagtcatctaataaaggggtagagaagtaactccgttctggaatatatatttgtgaactaaaatgagacatgtggggggagcgggcgagaggtacttgtaaaggccactacacaaccattgctctttctgacgttaaccccactaatctatccaaggtgatcgagtactgcaacaagcacgtacatgaggccgccgccgccgccgccagctacaaggccggttccgggggggggggacgccgtctccgacgttttttatgccgcctccggtgaggacctcaagaactgggatgcggacttcgtcaaggtcgaccaggccacgcttttcgacctcatcttggctgcagactatctgaacatcaagggtcctagtcgacctgacctgtcagactgttggtgacatgatcaagggcaagacacc

SEQ ID NO: 144856 - DNA, 312 bp, Zea mays
  Clone ID: MRT4577_63595C.1
ccggccgggacgggctgcttcgctggcagttaccttacctgccgctgactcgctccagtggccaggacctgctgcagtggacgtggtgccggcggcgggccaccgcggaagcagccatggaggcagtgcagacggcactgagtgagagaacgaacccgctgctcaacaggtcatccggtccatccgtcgtcactcggcttcaacctgacgccggcaacggcgcgggcttctatgacggggcctactctttcctcgacaccaccaaggcctgcgctacccgggtcagcagcgggacagggacatccgacgact

SEQ ID NO: 144857 - DNA, 491 bp, Zea mays
  Clone ID: MRT4577_63596C.1
gtgaggcggcgctcggcttctcagcgtgaggcttctccccagcagcgctcgtctacagcgcgaggcttccagcagtggcgctcggactcctgtctccaccgccggtgctcgctgtccaccgaatgcagtaggcctccgtcccttgcctccggttcacgccaccatcgcaaaagatccagtgaggacgccatctagacatgaaagaaggaatctttttcttttgcgctgatggaaaatatgcatttgatgcttgtttatctacttctatcttccgtcctggtcgatgaagctctgtgcttttgcgtaccttgcaacattgtataggacatgttcgcctgtcctcaacggttatgcttgtcttgtgttgctggagcatcttgttgatctccatggaccttggatctttggttgtaccctaggtcccgtgtaacatatggatagaccgaattcttgaaccttgtatgaaacctatgctatggttctactctggt

SEQ ID NO: 144858 - DNA, 169 bp, Zea mays
  Clone ID: MRT4577_63597C.1
aaaaaaaaaaaaaaaaaaaaaaaaaaaaaaaataaaaataaaaaaaaaaaaggggcacactctggatagaggtaaaattttacgcacgctcgcatgcgacgatatatctcttatattgtgtcccacatataaaatactgtggacggattttcaaaacgatgactctgaa

SEQ ID NO: 144859 - DNA, 438 bp, Zea mays
  Clone ID: MRT4577_63598C.1
acgaggcgcaccggtgctgggaggacatcttcgacgccatcagcggcgctaagcacctgatgtacatcacgggttggtcggtgtacacggagatcacgctactcaaggacggcgcccgcccacccaggcccggcagcggcgtcacgctcggcgagctgctcaagaagaaagccggcgagggcgtacgtgtgctcatgctcgtctgggacgaccgcacctgcgtcggggcgctcaagaaggacgggctcatggccacccacgacgaggagacgatgaactacttcgagggcaccgacgtacactgcgtgctatgcccgcgaaaccccgacgacttcgggagcatcgtgcatgacctgcagatctccaccatgttcacgcaccaccagaagatcgtcgtcgtcgaccacgacatgccggtgcagcggtcgcatcggcagc

SEQ ID NO: 144860 - DNA, 424 bp, Zea mays
  Clone ID: MRT4577_63599C.1
atttctaaaaaaaaaaaaaaaaaaaaaaaaaaaaaaaactagaaccataccaggacagcacagataaaaagggcaaaatactgaaaatatccatacaacactggcggcctgttcaagcatgcattctaaagggcccagattggccctttccggggggggggggccgttccactggcccgtgtttcccttttgccgccccctgggggggccctcccgccccccttctggggggccttcttcccctttgggggcccgtcttcccccttcctggcccgtgttccccccccgggcggcctggcaaacccttgggctccccgaatgtcttggggtcgcgcccttccccttttcttagccgcggtctttgtggtggggccgcgccgggtggccgttccccttggtggccccctttcgcggggtcctgtcc

SEQ ID NO: 144861 - DNA, 286 bp, Zea mays
  Clone ID: MRT4577_6359C.1
gggaacgcaacaaccattttacttgggcacttttttttttaaaactttaataatggggaggggaaacaacttgtaaacctaaaagggggagcaaaaaaaattcgggaaaccccagggaaggggggggatatctaaaaactttaggccccccttaatgctgcaccaactggccccgggatcaggtcacaaatcccctaataagggttgccgaaggtacttggactgggggccattgggcttatcaatccagttttatttcttgcatctgttcatggggcccattcaa

SEQ ID NO: 144862 - DNA, 295 bp, Zea mays
  Clone ID: MRT4577_635C.1
gtgatcctgccgatcttaccaagtgtctccatgcggttagggtacgcttaggagcttagcacagggctcgatggctcgctgctagacgtggacgtaccgttagctttctggagagccattgcctagatccaccagcctctagttagctggagactgccttcgcctactgacgaggctgatcctccgactgctaggtcatgacctaccagctagatcaaggagcgctggcgccttctgctacgtctaccttgtgctcctgcgactagcatcctccacgctatcgagaacatgcacg

SEQ ID NO: 144863 - DNA, 380 bp, Zea mays
  unsure (1)..(380): unsure at all n locations
  Clone ID: MRT4577_63600C.1
ccaggcnnngcaccggacgcccagcccnnngccggggcgggcgacgagncnagcccncagcgcggacgaacggggaaggagcagcggccccgagngcagncaccaggcggggggggggggggcacngagcaaagagngcaaacagcgggcnggacaacggcgaccggaacggcggcgagaagcncacggcagcagcnggacccgccggggnnaaggcccacggcgcccccccggcgcaccgcagncccgagggaagcagcaagacgaccgaggcaagccggggcgccancccggagagccgcagccagcncgccgagcgcgaccnngcgaaccgcangggcagcgacgacggcgccgcgggcnnggcagcggcaaagcag

SEQ ID NO: 144864 - DNA, 329 bp, Zea mays
  unsure (1)..(329): unsure at all n locations
  Clone ID: MRT4577_63601C.1
gggcgggancgcgatgggtaactcgaggaggggcggggaactttccgcccgagctagctcccggattctggttgacccctgctccgcccagggggtgtgggacctcggctcagggaatcagttcattcttccaagtgagtgcaaccagactccagtatggaggtcaaagccgacgaaatcaccatggcaatgataagcatcgatcgtgatctgccacaccagcagccgcgcaaaagcccaagagccctcccgctccatcatccccagtcagcctggtgtcgtggccagcgcccgcacctgcggagacgaaccacgtgaacctcgtggac

SEQ ID NO: 144865 - DNA, 373 bp, Zea mays
  Clone ID: MRT4577_63602C.1
gtgttgttctcccgtgataaataaacccgggcgtgtgcatgaggaggcttcgggtgcaggccatcaggacgcagcgggagaagcagcggacggaggtgcccgtctaggagtccgcccccgccagggacgccgtcgcgcccctggacggaaacggagccgtagcggacggctacttggttccttcctcggacgacagctgggttattaagctcgagcactcgttcaacattttcgatacggattctgtgattatggtactcaagggcgtgtatggtgatcggtactacgccaggttctttgcgctggagacgattgcaagggtgccttacttcgcattcatatcggtgcttcacttgtatgcgacctttggatg

SEQ ID NO: 144866 - DNA, 244 bp, Zea mays
  Clone ID: MRT4577_63603C.1
acgccgcacgtccgctaattattggtggaccacccatcctagaacgtaatagataaaccatgtcacgaggatcacatgtgaagagcgcagagggacgcgcatttgacccaaacacggagggatgagttccttcgcagcggatgctgcttatatttcttgccccctaagcagacggccacgagctgatgtgtcatcctttgaaggaaagaggcttgagttctccataggaaaagctacagcagga

SEQ ID NO: 144867 - DNA, 415 bp, Zea mays
  Clone ID: MRT4577_63604C.1
caacaaagcaaacggaaattttaatttcatgggagggccccttcaccatggctttagaaaggcaacacattacaaccaagttactgggacccgcacgggaacaaaaacaaaaaaaggctacctttattcttctttggggcctaaaaaatggggcaaggaaccatcgggttgtttttgctgaaagcattgatctaagtaattttttcctccaacgccgccttaagtttccttttttaaccgtccttgccagaaaggggattctggagtccctcaattttaaactggagctggtaaccttaaaccttctggaacactagggcttttggaaaaaagttcttctcgtcgttaaggcccaactgttgggcataaagttcgccaaaggacccttgcagttgaaacaaaaaaagccggatcc

SEQ ID NO: 144868 - DNA, 1691 bp, Zea mays
  Clone ID: MRT4577_63605C.1
ggaaaataaaaaggaattaagaataacatcgtcaacaagttagttgacacctgtgaagatatgccaacatattatgtttgatttttgtaacttctcaaataaacagatgatagaatcacacaaatagcagaaaagggtcccttcatgcttatgtggaatggtttcgttaaaaaaaatgcttatgcaggatggttaaactttagtttgatgggtccattggtaaggtcaccaatcatagtagaatgcaatgttttcaagtcgataagtcgagtcgacaaggtaccgacttgttgactagtcgataagtcagtcgactagttgtcgacttgccaatatagtggctgttttgcctatataatggcttcatatagacaatatagcatttatatatggagaaagggcatttttacctcatttgaagcctgaaatgaaactgaaataaccagcaaggcttacctcatttgaagcctcaaactgaaccaaatcagccacataaatgataagtcataaactactagaatgatgctttttaagcagaaacatcttacagatttgctgcggttggcagaagagggatactcttataaaaaaatatagttcatcaaccaaattgtgatcacagtagttatgatcagattgaccattaaactttagtttgatgggtccattggtaaggtcaccaatcatagtaaaatgatgctttttaagcagaaacatcttacagatttgctgcagttggcagaaggatactcttataaaaatatgtagttcatcaaccaagttgtgatcacagtagtgatgattgaccattaatagaaacacactgagcattgcgttgcatatgtgtggatagagagtttagcaagtaccactgtaggaaactaggaatgatactcggcagtttagcagcagccgctttatctgacatgtcaatgataagctttttcagcttctttgagccgtgattaggtcatattatttagaacacatcgagtgagccagcgattatcgggtaaaaatcagtaatcaggcaagtatctagtccaagaaccgtaacatcactaatatcaagaacggaccttacctgagaatttatcattctgcgcctccacgagcggtgatccctccagcttgcaggagaggaggtgaatacaacagccgttgggttcctcatcgacgcggaccaggaggacggggcagacctcaagcgcgaagaaacggaagcggtacacgtagcaccggaaggtggagtcgtcgacgcgttcgatgcgctcggcgtccagcaccgagtactggctggctggcaagctcatgtactccgcgagcgggcggaccagctgctggacggggacggactcggagcggcgggcgacgaaccgcgctttgggggaagaaaacgacgacgcccccccccatgacgaggaggaggaggaggaggaggaggcgcggacgacggcgcgggatcggcggaaggcggaagggagcggaggcggggagcagagtgacgcagccattgagcgcctgcgtgcgtgactgcggtgcgcggccgcgtcagtcgcctcgccgctcaccggtgcctcgttgcgtgcggttgcgtgccgtactgccgtcccccacgggccacgggaggagacgaggccacgagcccacgagggagggaatggagggggatttctccctcgtgccgaatt

SEQ ID NO: 144869 - DNA, 500 bp, Zea mays
  unsure (1)..(500): unsure at all n locations
  Clone ID: MRT4577_63606C.1
cggacgcgtgggcggacgcgtggggaatccattatcagttggtgtagttgtcgagggaggcgtgcggctcggcggccctggcggcgggggtgggctcaccggcggctccggcgtcttcgagggcgtatacggccaggtcaagctcaaccagatcgtcttccccttcaagatcttctacaccttctacctccggggaatgccgcacctgcttcgtgagctgctgtggcacccagaacggcctgatcgagaacaacaccattttggaccagctgggcctgatgagcatgctcgtgccggcctacctggacgcgctcctcatgggcgtgtcctccgtcgtgatcttgtacttcatctggatctggctcaagatgcacgcctgccccgacctcttcactggcttcctgccgggccggctcttcttcctgctgcgatgactatgatcttattgttgcgttttttattcggtnttccggcttgtctgctgactgttttttttttcc

SEQ ID NO: 144870 - DNA, 398 bp, Zea mays
  Clone ID: MRT4577_63607C.1
gacgccgcatgcactccaccgaagctcaaaattcttctcgagctttctttcctgcatacggttaaaagctgagcctaaatttcacggcatgtgggcctccaaaacatccatcaaaagacaatatcatatcccttcctccaatttcaccaacaccccgttatattaaatattttttgctgacccaaataaaacacattaaccaaccaagtcaaattacttatacctccacacacaatgatcaaacacatataaaagatccactcctcctcttcatattcataaatgtaattaaattcaaattaaactatccatcacgaataaagcaataattattgcctcccccttaacaagttcatatatctcgtataataaaacacacactacatcttaagacaact

SEQ ID NO: 144871 - DNA, 201 bp, Zea mays
  Clone ID: MRT4577_63608C.1
cccactcgtccggcccttttgttccacacgagatgtctgagctcgttgagctcatgtcaagacacctgcgttatctcataacagatgtgctctcccagccaaactccccacttgacaatgtcttgcgctcagatcggcccacataggccggtccttgctgtcaaaacgagaggcggtgcccagctaaggacccacggaata

SEQ ID NO: 144872 - DNA, 673 bp, Zea mays
  Clone ID: MRT4577_63609C.1
ccggccggggccgacctgctctttgtctccgattcccaattcctccttcgtatctccgattcagcgcagtgcaggcgggaaggaaggtggacgcggaggaggatggggatcgcgttcgggaagctcttcagccggatcttcgccaagaacgagatgcggatcctcatggacagcctcgacgccgacgtcaaaaccaccatcctctacatagctcaagctcgatgagatcgtcaccaccatccccaccatcggcttcaatggtgaaagtgatgactacaacaacattatcttcactgcctggaatgtcctcggccaggacaagatcagacctctttgtaggaattacttccacaacacccagcggcttatttttgatgtggacagcaatgaccgtgaccgcgccgttgaagccacagatgagctccacaggatggtgaacgaggatgagctacgcgatgctgtgctgatctgctgttgccaacaagcaagatcttcccaatgccatgaatgctgctgagattactgacaagctcggattacactccctgcgccagcgacactgatacatccatagcacttgtgccacgaccggcgagggcctgaatgaggtgctggactggatgtccagcaacattgcgagcaaggcttgactgctaccttgaatatcgactgc

SEQ ID NO: 144873 - DNA, 636 bp, Zea mays
  Clone ID: MRT4577_6360C.1
tatcgggcgatgcccgagcctggttcgataaaagggagtcctggggcaacaggtgaagtcatatgccatggaatcggagcttgctgggccaagcgttgatatagttcatgaagagcagagatggtacgagcgcggctgaggtcggagtctttgtggagggcgaaaatgtcgaggtgtactccattttcgcggaggtgagtgaggagggcaagttgaaggccgatgagaatatctttcatcgtggcctgggcgatttcgtcgccgacttcgaagcgatgtccaagtctgccgacatgaccattccattgcgtcaagatatcctccctgcttcgttgcagcgagaaatccagatcagcagcagaggctgcttgtgaatgcaagctgcgtcgttctcgccatttcctcttgatatcctggaagactttacttccatcttggtaggcggagataactagaacaggcacatgggtatgagacttgattgtatagcggcatagatggaataaaacaatggaatgaaggatgcctacctgcggccacacacgcgacaacagcaaccacctccactccagacataatggggaggggagaggatgttgtgagaactaagtatagttgtgatggtgaggaatggcg

SEQ ID NO: 144874 - DNA, 368 bp, Zea mays
  unsure (1)..(368): unsure at all n locations
  Clone ID: MRT4577_63610C.1
tttactcatntttttaccnaatctttcnagtccgcttacacctaaacaaaaggcacncgggaacctcctcataatcatgtattccaanacccacattaatccatttatattccatcaactttaaaaatacaacactcactacaaccaaaaataaatacatttaaacaaaccttcaaacaacgcatgacaattatttattcatcaacaatgcatctgatccctccacacataggcagcccccacaatcaaaaaatacacaaatcttatctacacaattcagcataacctatataaacactttttacaatatcatttcaacacatataggattactcatcacatatgccaactcaaattctcctcaaaac

SEQ ID NO: 144875 - DNA, 217 bp, Zea mays
  Clone ID: MRT4577_63611C.1
aaagcccacagcagggggcagcattggatcactaaccattcatggtctgataatccaaccgaatggcaaatagttgatgacataggctccataatggacttttaacattaaaggggccaagaccacaaatggcaaaattttgaaaatgcacccagggacaggcccgcttgttgttttgatggggaatgatcggacagtgggagtttccaagcacccc

SEQ ID NO: 144876 - DNA, 402 bp, Zea mays
  Clone ID: MRT4577_63612C.1
ttataaaactaatagataatagtggcacatactagaaaataaagaagttacatattccaaaaaaaaaaaaaaaaaaaaaaaaaaaaaaaaaaaaaaaaaaaaaaaaaaaaaaaaaaaaaaaaaaaaaaaaaaaaaaaaaaaaaaaaaaaaaaaaatatccttcccccgggggggcctctaaaaggcacaaattttagaaggacaccaatcacccttagggggggtggaataaaaattaaggggcccaaattaaacattttgggagcgggaaaaaattaactggccccaatttaataactttgcaacaaaaaaaactttggccttccccattttaatcaattagccccccaccccccttttttccgaaaggttaaacacccaaaaggccgaacgaacccccct

SEQ ID NO: 144877 - DNA, 407 bp, Zea mays
  Clone ID: MRT4577_63613C.1
agcttggccttgcagctaaaaacctactcgctatgagtggggcgcctccagaattctgggaaccggttccagaattacataacaacgccgtgactctactgtgctttgtctgccactagatctgcgtgtgtaccttaaccaccatgtacggatcgtagaaacggtcgtctggctgaacggaacgaatcggtggatgtacgggatcacaatgcggcacatgctacccctattactatgacaaatgctggacaccacgggagcatgatacatgaagtgcaacacctgacactacatgaatggtttaactatgcttcggtgccactagatcagctatatgatcaaaaaaaaacccattgctatctacagattggtactaaggaggcttagtgtcatgttatttgtctcta

SEQ ID NO: 144878 - DNA, 731 bp, Zea mays
  unsure (1)..(731): unsure at all n locations
  Clone ID: MRT4577_63614C.1
aaatacaaatcccttcctccccgccgccgccgccgccgccgccgtcccacccgtagccgccgtcgcgcgagaagatgctcgacatcaacctcttccgcaaggagaagggcggcgaccctgagcttgtccgcgagtcgcagcgcagacgctccgccgacgccaagcccgaaacattagaagaaaacgttgcgctcgtcgacgaggtcatcgtcctcgacgaggcgtggcgccagaggcagtttgagcttgacaagatccggcaggagctcaacaagaccagcaaggagatcggcaagctcaaggccaaaaagcaggatgcgacggagctgatacagagcacagaggagatcaagaggaggctggccgccaaggagaaggatgtggaggaggccaagaccaccctcgatgccaagctcgtcaccattggcaacctcgtgcatgaatctgtgcccatcagcggcgacgaggcaaacaatgctattgtccggacatggggagagaggagactggaggagaacttgaagaatcatgtggatctttgcctaatgcttgacattgcatctttggacaagggtgccgatgtagctgngtggaagaggtttctttttgaagggnaatggtgtcctcctgaaccaggcattgataaattttggcctaacattcctgagaatacgaggcttcacaccaatgcaaactcccttttttcatgagaaaggaaatcatggcaaaat

SEQ ID NO: 144879 - DNA, 945 bp, Zea mays
  Clone ID: MRT4577_63615C.1
gaaccaatctcccgggctcccctacccgttcagacttctccacacagccgccgcgagacatgctacggcgcgccgccactacggctacgctcaatggccgcgcggcggcgtggttccgtcacctcacccgtaggccgatgacgcttccgcccgctcatctcgggcgccaccatctgcaggcccaactccgaccaccacgcgtcgtgtgggtgccgccgctcccgcacttgtgtggcgcgcggggctacagctacactcgcatggcgcggcgcatcccaatcgcgaggcccgacgggtactccagctccgacggcgaggcagaggatccggacgcgggcgaggccggggagatcacggagcctgtcggcgagggcgcggagggcgacaactcggagggcagcgagaccgaggtggaggggttcatgctggacttgtcatctgacaacttgttcggcgacagcgacggtgacggcgacggcgacgaggaaggcacagaagagggagggaaatagcgaggcgggatttcgctgtggggagctggcgaatcgagcttcgtcttggggaaggtacgttcgtcaggtgctcgtggaaatgccgtaaagcatcgcgtctattttagccaggtgctagggtagacggaaggtttaagttacgacgatggtgtgtttttggatatttgaatatttgatattggttttaccaacgttttcaactagaaatagcatttcctctatttttttactgtactatctagtgctccgatgccatgttccgtgtttcagagtagcgtctagggaagagacaaagacagacggctagtgaagcgctgctcttctcaaacgaagcaccgtttttagcattactagctttcaacagtggaatatttccatctgacatctgtatgtgatgcaagatatattccagtttctttgtatttgtttgcct

SEQ ID NO: 144880 - DNA, 262 bp, Zea mays
  Clone ID: MRT4577_63616C.1
ctcccttgtacaccgttcctgctctctcttctctgcgcggtcggctcttggaattaggcacaactcattcattttcaccgctggccgtggcctcttgctcatgccgccggaccccaggccacgctcggctcataagctttctcccgatccactccggccatgagctcctcccagtgaatccctctgctaccgcttttctcgctggtggtggctgccatggagctcgcccaggtctccccgcagcgctcaacgcccaacgtca

SEQ ID NO: 144881 - DNA, 549 bp, Zea mays
  unsure (1)..(549): unsure at all n locations
  Clone ID: MRT4577_63617C.1
caacacaatgacacgctctgaaaaaaagatacggcagtagaattcaagttagatagctttaaacaacactctgggacaaacataaatgaggaactaaattcgagagccagaactaccaagaccatcagacgaggttatttcttgcgcgaggacgaaataatgagtttacgaagaatgcncgcgatgtagtaccattcttactccttaggatagggcgtatccgggaaaacgccctgagttcctttacatcacttcgaaacgtatcccagttgaatatcctacgacgaagaggaccttctgcaccaaatccggctgtcacctcaagaaaagctgacgttgtaccttaaaaacaggcgtccttggggacaaatgcccgattttatttaccgatcatgaccttacaagcaaaagcacagttacggataatagaaacaaggtgaatgatccatacgcctaccatgattaggactagccccttgggaggaactttagccaccaaatggttcttgccttttgggggaaaacatggctgttattgtaggcaacgtc

SEQ ID NO: 144882 - DNA, 351 bp, Zea mays
  Clone ID: MRT4577_63618C.1
cggtccggaattatattgcctggacgacgagctcataaggtcggcggccgcccttgatttttttgggttgtcaattagaaagcactgtcatttatctcgagagctgcgcgggcctatgagacaaatccaatggcgaaggataaacataatcagcaacatggatctacactcctggattggtatgccacccggagaggcactaactggacatgaactgcagtaattaaagatatcctggtccgggcaatccagagcgctgcataattcagaaaagatccttggatagatatggtggcacgtatatcgaatggacgtcagcacgtgccgaaggcaaaaggtgttggtctaact

SEQ ID NO: 144883 - DNA, 257 bp, Zea mays
  Clone ID: MRT4577_63619C.1
ctcactccttcgctcgcgccgccgccgccgcttttcgtacgccacgtaccttgattcattgggggtcacctaaatgaccgcgcgcactaagaaggcatgaattgctgacatatatccaaccatggatcgtgctagcttgcgcaaacaaatcaagaagatggatgtatctcatcattgcacgtactctagcgaggtctgaaggaagtttgctagaaaaaagcaagcagaatgaatttgggcatgcactgactgaagga

SEQ ID NO: 144884 - DNA, 241 bp, Zea mays
  unsure (1)..(241): unsure at all n locations
  Clone ID: MRT4577_6361C.1
tcacaacacaaaccatacaaattcttttaaaaacaanaccatccatgggcaatggcagagacactaaataacccatatacagcaacatgtaaaacaactgatggcttaataaaaaccgggaagacggagcaacacgtggagggggcgctacttttggatatggcactctgaaaaggggggagcataatccacctggttaccagcaaaaataaaaagatgatggtctgggggaatcccctaa

SEQ ID NO: 144885 - DNA, 301 bp, Zea mays
  Clone ID: MRT4577_63620C.1
ggttgcatgatgggtaagcgattcgaaagcagacactaggcatgcacggcaacccccatagaattttgttattgcaaaaggaaacacaagagcggagcttacatccagactttgggccatgcacaaaggcggtcttcttgcacattctaacgtgcggaatgttgactacaactgcgcacagaaaatgtcactcgaaggaagacgcgaagatgatctgcccccccttgagtacccctcccagatccctctacttgggctacttgaagaaaatggatttctcttgcctggacgacaccggcct

SEQ ID NO: 144886 - DNA, 644 bp, Zea mays
  Clone ID: MRT4577_63621C.1
ccggctacgagcatgaccgttacgatccaccaccatcttttctccgacaccgctaagcttgagatcggggtcaccctaaccctagaacacttaactgctgctccaaagacacactgccatatgagggagaggctgctaagcgtatccaaccacaccaccatatccgcatggatggtgtaccatatgaaggaaagcgtaccactcctcttctgtgacagctgcgcgattattccgttttttatagcgaaccacaaccgctgtctcgcgggcggcagttgctacctgacgatgctgacacgaccaatgacgtcttcatcgacgatgaggctcccgcacttcttgcttaccgggaggcgagggggggttgcactagctctgatcgagcagcgccgtgccctggaaccggctgccgcaatctagcccgtctgtgccctccacgctctgatggaggcgcgtgagggccttgcctgggaggatccggaccctgacactcgcctcttactgagcactcagtgccttcgagaccgtttagaggctgccacgtctacaacattagacatgccttgcgcgagcattgccactccgacttgcatgcgatccgctactggcctgatacctagcctgcggtgactatcatctccatg

SEQ ID NO: 144887 - DNA, 1565 bp, Zea mays
  Clone ID: MRT4577_63622C.1
agtagtcacatgatgcaagaggatttgcacaaatgaacataacctttgtgttgccatatttcttttaaatttgtctttttttcccttttgacgattcttatatctaccacattttgttttaaggtcagtgagtatatttcaaatgatgcaagaggaatctgcacaaacgaacataacctttgtgttgattgttttggagtgcctttttttttttcatttctcattcattcacgtaaatcttacctttttgctgattttgttttctgcttgatgcccttacgtagattcacatattttttccccagggagggtgcaagagtagtctggggctatgttgatcgtattctgggtcagccatcactgataagggagtcatcacgtgggaaatatccctggtctggtttcctctcacgtgctacaagtaccctgactagcaaactgaagaatggaagcaacctagggaaggacagaaatgggtttggtgatgttattctaaatccttctctccagaagagagtgaagcagcttgctaatgccacggccaatacaaaacttcatcaagctcctttcaggaacatgcttttctatgggcctcctggcacagggaaaaccatggcagcacgagaacttgctcgcaattctggattagattatgcactaatgactggtggagatgttgcaccattgggatcacaagcagtcaccaagattcatcagttgtttgactgggcgaagaaatctaacaggggtttgcttctcttcatagatgaagcagatgctttcttgtgcgaacggaacaaaacttacatgagtgaagctcaaaggagtgccctgaatgctctcctcttccgcacaggtgaccaatccaaggacattgtccttgcacttgccaccaacagacccggtgatcttgactctgctgttgctgaccgtattgatgaggtcctggaatttcccctgcctggggaagatgagcgattcaagctcctgaagctatatctggacaagtacataatcaaagctggtgacaaacatgagaagagctggctccagttcttccgtcgccagccccagaagattgaggtgaaaggcatcactgatgacctgatccgggaggcggcatccaggacccagggcttctctggaagagagatagcgaagatgatggcaagcgtccaggccgctgtctatgggagcaaggactgcgagctcaccccaggcctgttccgtgaggttgtggactacaaggtcgctgagcacaagcagcggagaagattagccggtgaggagccaaagcaggatgcctagtttaccaatttttttgattcacccccattttgccgtgggatgtactgtgtttcccccccgggatagattgcttcatcgggcaggcgttttgcatgccccgtgttattcttttgttccatttgccttaccaggttggtctaaggtggtaggcgatggtaacttttttggtataagagatgagggttgcatgtggcatgtgatggaaactttggcgacaggtcacacacacacccagcaagctggccccgttttgatgc

SEQ ID NO: 144888 - DNA, 453 bp, Zea mays
  Clone ID: MRT4577_63623C.1
gccgccgctgggtcatccacgtcgagaggatcacccgcgagaaggtgaacggctccaccgtcaacgtgggcatccacccctcgaaggtgatcgtcaccaagctgaagctcgacaaggaccgcaaggcgctcctcgaccgcaaggcccggggccgcaacgccgacaaggctaagggcaagttcaccgccgacgacgtcgccgccgctgctggtggtgccgccgccaccggtgcctctctccaggagatcgactaggcgcttcgcggggatctgatggtggttgtaccgccttttcctccttatcgctctagtttttgctatcaatgattatgtgctaggagttttaaattacttgaaaactgctttatgcctcgatgagagttttggaacttaatgtggatctatgtgtttctgtgatctgagatatgaagaactcactatatggttaatatct

SEQ ID NO: 144889 - DNA, 171 bp, Zea mays
  Clone ID: MRT4577_63624C.1
atggcgcaatgctcagctctaaccatcctctttggtaagccttacacttcacgtgagctcccacctttggcgagttcatgcacattattccccacaacttgttcagcgatgaacgtcaagaacaggtaccgcaggatgaggcgcaagaaggatgttgcgatgagttcgtga

SEQ ID NO: 144890 - DNA, 675 bp, Zea mays
  unsure (1)..(675): unsure at all n locations
  Clone ID: MRT4577_63625C.1
aacctgacaaatcaaagatctgcatttttattattttttcaaaggagggcaaaagttttgccgtaatttttattagacgaagaaaataaaagacaaatccattcttgattataggctgcgcacacagataattgtttttttgagtaatccacacagataattgtttccatgcacaattacatgtcgattgatagtgggtctgtttcttcatgtactagggcgcacttgtaccacttttatcttgggtggcaggaaggtgtccatcatttgagcagcttagaagatctggaagtcttctcaattgtggtcctccaagtggtctcccgttcatgcgttttggctttatatcctggtcaaatatcgccgtagggatggcaagagttgttactgcattaggagagtccactattccagatatcctaccctcgcatgggcagcatgatagtaaaagatatacctgctccttagagtacccaaatttggaaaggtactcaatggcattcagaactgcacgtttgtaggcaacagatgcatcaagaaaatgctgcttcccagactcatctacactgatgccctcaaacaccaaccactctgagaaacgtggctcaacaggacctatctcaaagatagggctcacatgaagtggtgttggaccaactggggttaagtattnct

SEQ ID NO: 144891 - DNA, 239 bp, Zea mays
  Clone ID: MRT4577_63626C.1
gcccggtcaggctgcgcgtatccatcatttgatgcgggagaccacattgtagctgcacacgtttaaacaactctcgactgggacaggtgaattcactcacctgaatcgtgctcaaccaactgactttcccaccagttagaaaagcagcttcttcatcatcgaacaatccagccatatccatgcagttctatctctcattgacagaatgaatcccatacagatcgtttatcttctcatat

SEQ ID NO: 144892 - DNA, 837 bp, Zea mays
  Clone ID: MRT4577_63627C.1
cggggagtaccaccaccaacaccatcgcggcatcacagttcacgagtgcttgccatcccttcgctccgtcctcgagtgctggccggaggctagagtaagtgggtgatgggcaccaaggatgcggcagctttgcataccatcctctgctccttgcttcttctctcgttgagctgcgggtgcctggcggcagagtcggagggggctcagacggcactgctggaggtcgatacgtcatggaaggccgccagaaagatccctcaaaccctctttggcttgttctttgaggaaatcaaccacgctggagctggtggattgtgggcggagcttgtcagtaacagaggttttgaagctggagggccttacactccttcaaatatagatccatggtccatcattggtgacgaatcctccatatacgtgaagactgaaagagcatcttgtttcagtagaaatatggttgctctaaggatggaaattctttgtgccaagtgtccagctggcggtgttggtatttacaacccaggattctggggcatgaacatagaagaggggaagagctataatctggtaatgtatatcagatcactagaatccgtggagttgactgcttcactcacatgttcagatggactgcaaaatatagcagcagctgtcatagtagatacaaatgtgtcagattggcgaaagatacagatgcaattattagctaaagtaacgtgcagaacttcaagacttgaattaacaacttccaaaaggggagtcatatggatcgatcaagtgtcactcataccttcagatacatacaagggccatggctttcgcaggaactcatacaca

SEQ ID NO: 144893 - DNA, 202 bp, Zea mays
  Clone ID: MRT4577_63628C.1
ggaacaacatcggcaagacagggggggctagaataacatacacgcatgacacaatgcacatccacacgatgacggctgcataaatatagcaccggactagtacaaccatggaggtgtaggactatgaggctttaagcgcacaaccaattaaaccatgcatgtttagcaacaactaaacggacaatctaggggattccaaaca

SEQ ID NO: 144894 - DNA, 836 bp, Zea mays
  Clone ID: MRT4577_63629C.1
aattcggcacgagggacgtctatagcttcggcgtcgtgctacttgagctcgtcaccggaaggaagcctgtaggcgagttcggcgacggcgtcgacatcgtccagtgggcgaagctgacgacaggctcgaacaaagaacaggtgatgaggatcctggacccaaggctctcaaccgttccgctgcacgaggtgacgcatgccttctatgtcgcattgctgtgcaccgaagagcagagcgtgcagcgcccgacgatgagggaggtcgtgcagatcctgagcgagtttccaaggccatctagcaagcaaggcgaggaggccccagattccggtgacggctctgcttccagtcctctacatccagcaccagttgggtccaatgaagcgccaaccgccgaagcgagagaacagcagcagcagcagcaaacaagctgtcggtcatcgccaactccagatctcatcagcatctgagtaaccaaaactgaaaactttaccattgtgaaatccactcgtcagtctagcatgcttaaaggtcgtaatttaggatgcggtaagtttggtttcttgtgctgtacatagtcatgtttgttgtttccagtttaccttgttttcatttgctgctgcagtgtaggagacagtctgtagcgagttgagttacattgctttgagcctctgatttcccagtaggcactaaagtgtaagggcactcgtagtcaaatttagcaccagaacctttgttgtggaaccaagatccttgtgctctctacagtacccgtgtaaacagtggaagtgggccgtaattaaaggccttgaagtccggtattaagctacactggttcc

SEQ ID NO: 144895 - DNA, 207 bp, Zea mays
  unsure (1)..(207): unsure at all n locations
  Clone ID: MRT4577_6362C.1
cctcactcttcacacnacgcccgtttttttaaagcttgcccgccacccaactaatactaaccactcttcctctatcatcaaccttctaatctccccatgccacttcctatctccataccctaccttcatcctacctataatctccattatatataccccatctccacccaccatcctccctattatcttcccccatctcctactcca

SEQ ID NO: 144896 - DNA, 644 bp, Zea mays
  unsure (1)..(644): unsure at all n locations
  Clone ID: MRT4577_63630C.1
gccgggaagaataatggnactatacgaaaaaaaaaaaaataaaaaaaaaaaaaaaaaaaaaaaaaaaaaaaaaaaaaaaaaaaaaaaaaaaaaaaaaaaaaaaaaaaaccccaaaaaaaaaaaaaaaaaaaaaggaaaaaaaaaaaaaaaattcccccccggtggcggggtttaagccttagggggggggcctttgggcaggggccccccggggggcccctagttggttttttttgcccccccggggtgttcccccccggggtcccccgggggggggggggggtttcgggcccccccagcggggggggggtttccccggggggggcccaaaaccgcaaaagcggggccccttttttccgggctttaaggcccgaacggcccgaccctttggggggttttttttgggttttcccgggtttttcctggccggccccggtttcccccccccgggggccccccccggggtgggtttttttaacccggggttggggccggccgnntttggcctggggcttttggggcccggtttcttccccccggggggccccgggggtcttggcctgcccgttttttcccgggtttcccggtcccctgggggggtgccccccgcgggcccccccccgttggcccccccgggggggggt

SEQ ID NO: 144897 - DNA, 338 bp, Zea mays
  Clone ID: MRT4577_63631C.1
agcatagtagtaccaagtacagccgcgagattttcattaaacattactacatgagaggcgctctgaggggcgacgacgcggataaccacttatgaagcaggagaccagcccagccctaagttctagtgtcatccataggcacctgtttctgctattagcagatcggaaaaagacacgagagctctgagagttcattaaccatacaaaaactaaagggaaaaaaaagtgcctggagcttcccatgtggccataaccgagtgcctgcatcgagcgctctagagcgccttgatctcctgtgccacttgaacgagcgctactatcatccttgtgattaccct

SEQ ID NO: 144898 - DNA, 473 bp, Zea mays
  Clone ID: MRT4577_63632C.1
ggtacttgatattgtttcatagtgtggcaacgatgctgctgctcagtagcacaacagaacacttggcatgtataagttcttcccattacatgttttgtttcgtccttctaaaatatatattgtagcatttttctcatgccaactatgcctcaagctgagaattagtagcatgctacgcaaattattctacgatttatttttatgtgttgcttgtattcatatagtgcactaacattttatcgaataatttgtgcgcccctgcctctccctccctcctcccccgccacatcacggagctccatctttgccggtcgctgcgccatccctgcgccggcacccacacgtaccttatcgactgcacgccgtcgtcaacaaggcccttgtgaccatgctccgccactccattgtcgtcctatggagattatattccctccttgaaactgccccctcgtcctcaacctcacgcgccttgc

SEQ ID NO: 144899 - DNA, 550 bp, Zea mays
  Clone ID: MRT4577_63633C.1
cggccggatccggatcggcggtgctgtaagtatgcattttggggtctgtgactgtttccgtttcacttttcgaacaccacgatctgggcactccgaatctcacacggccagcgtcctgaatcatcatatcctattgcgcaagataattgccattcgcatgggcgggaggggaccggcagcgatgacacgctcctcctcctacccgtagcgctctcctcccatctcctccgcgcgttggccaaggatgatatgttcacacatcccgctgcctgatgagtctcttctcctccttccagacgaaggttgccttcggccgatttaaagatgaacgatgactccgcgaagacgttccagatactcgtgctggacaaacataatagcgtatatgtcaaggacgtgaagctggccgcgaatacctgatttccacctagtgaccgtgaaagagctgttgctgatagtccggatcatggtggaggtgggatgcgccgatcatgacgacctgcatcatgtctgtgtgcacatactctacgaactgatgaccgagactcga

SEQ ID NO: 144900 - DNA, 185 bp, Zea mays
  Clone ID: MRT4577_63634C.1
ggtagaagatggtgtgccagttctgtctgtaagaccttggcctcgcctatgaggcactatacgtctcaatcactaggctgcagttgggaccctgggagatcagtgtcgtagtacatgtcgcttaaggtctgcaaactagatggtagttgtgtcgggaccatctggggcagctgcttggactgtct

SEQ ID NO: 144901 - DNA, 918 bp, Zea mays
  Clone ID: MRT4577_63635C.1
cttataccttcccttctccgagttctcccagcagaattgttaacgttaattcgatcgtgagttctctttcctcaccattagtggtactgcaggcacggttttctaccatggatgcaaatatttttgaactccaatgtcagtttagaatcaatgaagttgcaactctacaattcttttgtggctacattaccacgacctgacctgcgtgtatttccaatcgcagatgcacactgtaggttttgtcgacgctgaagatatgaacttgagaaaacataaatatagaagttggttaggatactcaaatagcaagctggcacaggtaaaattcagtagcatgcttcacaagaaaattcctgcagaggctggcatcggtgtagtttgcgcttctcctggaattgtcgacacgaacgttgcaagagatcttcctaagattgtcgtagccgcgtaccatttgattccctacttcatatttgacgctcaagaaggttctaggagtgcactgtttgcagcatccgatccccaagtcccggagtactgcgagacgctcaagtcggaggactggccagtttgtgcctgcattaactatgactgtagtccgatgaatgcgtctgaagaagcgcacaatctggagacctcgcagctggtctgggagaagacactggagatggtcggccttccgccggatgccctggagaagctcatcgccggagaatcagttcagtgccgttacggacaacaggatacaacttaactttttagttagcagtttagaggtggtttgttcggttgttatgtcattttgatcctaaatttgcagggaggaaaacacagggaagggagaaaaagaatttgttgacagctcccccattatttgactattcctaatcaattatatacttgagacagaaattaagagat

SEQ ID NO: 144902 - DNA, 280 bp, Zea mays
  Clone ID: MRT4577_63636C.1
cgcacgcgtgcgcccacgcgtacgcccatgtactcgaatagactcaatgcacacagtggggtaattcatatttcatgggacgctgcactcactgatggggtagatgcaggtgcaggagaaaactaatccgttggagacagcaagataggtgacaatcctgaagccatctccctcaaaagcgggtatgacacttacggtatacaactgcgggcgtgcgtgagcttgcatttcaacattagggagcggacctagtttgagtgcacggagtcattattgcatt

SEQ ID NO: 144903 - DNA, 1167 bp, Zea mays
  Clone ID: MRT4577_63637C.1
accccaacgccagtagacagcgtcttcggatctacgccatcttcaccagcgaaggcatcaacgccgatgacccctcgaagcccaaggtggcacaagacttgattcagaggtggcagaaccaaaattcagaaacaggaaggccactaaacgctgaggtgatggaacttgacctactctccctcgactcggtcgcaaattttgctgacgcttggaatgctcgtatggcacccctacacgtgctgatcaacaacgctggcatcttcgctataggagaaccccagcgtttctcaaaggacggacatgaagaacacatgcaagtgaaccatcttgcacctgcgttactggcgatgctgcttataccttcccttctccgaggttctcccacccgtacggttaacgttaattcgatcatgcacactgtaggttttgtcgacgccgaagatatgaacttgagaaaacataaatatagaagttggttaggatactcaaatagcaagctggcacaggtaaaattcagtagcatgcttcacaagaaaattcctgcagaggctggcatcggtgtagtttgcgcttctcctggaattgtcgacacgaacgttgcaagagatcttcctaagattgtcgtagccgcgtaccatttgattccctacttcatatttgacgctcaagaaggttctaggagtgcactgtttgcagcatccgatccccaagtcccggaatactgcgagacgctcaagtcggaggactggccagtttgtgcctgcattaactatgactgtagtccgatgaatgcgtctgaagaagcgcacaatcttgagacctcgcagctggtctgggagaagacactggagatggtcggccttccgccggatgccctggagaagctcatcgccggagaatcagttcagtgccgttacggacaacaggatacaactttttagttagcagtttagaggtggtttgttcggttgttatgtcattttgatcctaaatttgcagggaggaaaacacagggaagggagaaaaagaatttgttgacagctaccaatctttgctctttttctgtatgtgtgcaagatgttgtgaaggaggcgtagaaacacatctcccccattatttgactattcctaatcaatgatatacttgagacagaaattaagagatccc

SEQ ID NO: 144904 - DNA, 319 bp, Zea mays
  Clone ID: MRT4577_63638C.1
gcctaactatatggtttaccgggcccgttgggaacgctgaaacaccttattttacaccttcaacatacaataacagcacttatctgcaaccaccttaaattacactgggcttataccccaacatgaacggacataatttatacaaggcaagactcctactagactataagctacttataacacattgatgagctacaaatcaagtcgtctagtataatacaaaaacttttgttcagctggtataattttatcaaatgactttacaaaaacataatatttgaagcattcattgcttactatatggcaacaggtttcaaat

SEQ ID NO: 144905 - DNA, 230 bp, Zea mays
  Clone ID: MRT4577_63639C.1
tcagaacattcgaagctggtgaatgatggattcattattaagaagccacagaaaatgcagggaaggtcccgggcaaggagggcccatgaggccaagcataaggggaggcactcgggttacggtatacttgtgcaccactcatttactctgtccgttgccatgtgaatttatatctgaataatctatttttctagccctgcattatgtatgctaatatgatctcaccctgc

SEQ ID NO: 144906 - DNA, 782 bp, Zea mays
  Clone ID: MRT4577_6363C.1
attgggtacctcgaggtctcctctgattgcaatgtttctcttcctctctcccacctctcctctcctctccattgcaaaccttcgggatgaaggttgagagcctgctctgaaacgacgtacgtaaagggagcaaggaaccggagagcgtgcggcgggcttctggattttagagtaggcacctgtcgcttggacgtgcttcggaggagtaggtgtccaaaagttgcctacagtgggtccagaggtcatgatatagactgtcatggaggcagctgcagatgaggagaggccactgattcagtacctggctccagaggatgatgaagcttcctcacgatacactagcgacggaacgctcgatatcaacaagcagcgtgctctgaagaagagcaccgggaactggagagcatgcttcatgattctgggtaccgagttcgccgaatgcctggcattttacgcgaccgcaaagaacctggtcacctacctcacggctgagcttggtgagagcaacatcgatgccgcgacgaacgtgtccacctggattggcagctgctacctcacgccgctcatcggcgccttcttggccgacacgtactggggaagatacaagacgatgatagtcttcctcttgctctacatcgttgggatgcttacctctgaaggcgtcggcgtgcctcccctggccaatgaggacgacctcgcctaacacagcggacttcggcgtgccacagcgtacctggggctctacctcgtttccctaggcacaggaggcatcaagccctgca

SEQ ID NO: 144907 - DNA, 1549 bp, Zea mays
  Clone ID: MRT4577_63640C.1
gttattctatacttttattagcatcactaaaagttgatggttatataccttaaaaaatataagattccataaaatgataatgtattatataaggcattgtacgtaaccaatatgataaaattactacgtaaagtgctaaggtatatgtctgtacgttactacggaaccaatatgataaaattactacgtaaagtgctaaggaattttggcaagaagtgcatcaataaggcattgtgtatgttgaccctgaatgctatcttctctttgtttgacatcctcctcagatcaacggcttccaaccagtacaaaatcagcttgtaagtctggagatcctcacggcttctttcgtcctcctactgtcagggcgaattgtaggaacctcaaccatcatgttataaggtccactgactccttcaaaccctcgacatggaatgagtttatcaaacgggagcccagggttgcttctctcttgtcgttgggactcaatatgttcagatgtgaaaactggtgagctatagacaggggtactgcaaaatgccaccatctaatggaaaagttgtaacttctagaatgtcagcgttcattttattttgataattatatttcaagaaaacaaggccatacaaatggtataccacagatcattctaatttgaaatatgttaaaatttagaaacttaaacatatcatgagaataatttctagagctgtcaaagattagaatatacagaagaaaatcaaacttaaacatatgaatgcaaacaaaggttagaaatatacagaagaaaatcaaacttgtgagacactggaacaattcttaagtttgctagcaccgtcgtgatttgcaattgtatgggaaatagaccagattgagggggagggaaaggacatacaagtaggtacttgaggtttgcgaaatagcagtgatagagcaagacatgctggaatcaccaaaagaccttctgatagtaggataaaggaactccaatttacatcaggagcatacggttcaattagtagttggaagttgggacatgctgtgctctgattatccaatcaataaggtttattttacatttctgccttgaattggaaagcaacatagagatttctccattgctgtggagatatgtgggcaaatatgctcaacacctcctaatcacacaaatatctagtggtacaaaattctattttcctcttctactcacgcaaaggttaaaaacagataagttattacaggttttaaaagtgcaatttggtttgaatataatacaaaaacaaagtaagatccatgaccatctccagcattagcctaacatattccattcaactgcaattgtcagactgttaatgaacgccacacaatagctacgctatgatcctatgaaaattcacagacactcattatccaagcagtacataaaagtgattggtgatgaagtgctattgatcaatacataccgttgactggagaacatgactggatccttttcctatccttattcttctcgcgacacttcatgtctagaactctgaatctggtgccgaat

SEQ ID NO: 144908 - DNA, 239 bp, Zea mays
  Clone ID: MRT4577_63641C.1
gttctagatcgtgagctcgcgcactttcattagcttgttaatgtcctgacagatagggcaactactacataacgtctacatgctcttgcccaagccaagtacaaagatgattcataatgagacactttgcttaatatcctcccttgacattcacgtcgccctcagatcctagcattatctcctttatgacatggcatgtgagatgaacgacgaatatgattacgaactgctaaaattgt

SEQ ID NO: 144909 - DNA, 258 bp, Zea mays
  unsure (1)..(258): unsure at all n locations
  Clone ID: MRT4577_63642C.1
ggatgtgtgtgcntagctccgtctcagctcatcttcgctcatgaaagtagaggacacgggtcgcatgtgccgcctacagggcgcgaagatacgagtatccaccatgacaacacacttgctcgaactagtcggctaggatgcgggtcttgaatgaccacactgcctcagtgctctgagcgatgtctctgataactggaacgagccaggtaagctgtacgaactgcatctactgaggtggcatccatactgcatggctcg

SEQ ID NO: 144910 - DNA, 595 bp, Zea mays
  Clone ID: MRT4577_63643C.1
ggtgtggggggttttttttttttttttccataaaatgataatgtattatataaggcattgacgtaaccaatatgataaaattactacgtaaagtgctaaggtatatgtctgtacgttactacgggaaccaatatgataaaattactacttaaaggggtggggaattttggcaagaaggggatcaataaggcattgtgtatgttgaccctgaatgctatcttctctttgtttgacatcctcctcagatcaatggcttccaaccagtacaaaatcagcctggaatatcgaatccagtaaaaacggtgtatcgaaactaaactggcaaactgaacaattgcatcagccaaagagcataaatgtagctcttttgtaagtctggagcagatcctcgcagcttctttcatcctcccactgtcacgacgaattgtaggaacctcaaccatcatgttataaggtgcactgactccttcaaaccctcgacatggaatgagtttatcaaacgggagcccaagggtgctttttttttgtcggtgggactcaatatgttcagatgtgaaaactggtgagctatagacaggggtactgcaaaatgccc

SEQ ID NO: 144911 - DNA, 313 bp, Zea mays
  Clone ID: MRT4577_63644C.1
acaaaaaaaaaaaacaaaaaacaaaactataattatttttttttctattttttacctaatacaaatataaaaaaaaatcaaaaatctatactctataaaaactaatatctatctaatttttttaatacatgcattcaagaccacactttttgtgcatctgcttgcctcaacccatgctcctcttcgtcctctcgtttttgagacattaagttcgccctgtctcccggttctctcatctcactatgaaaagaataaacacttcccctatgtcgcaacccgccgctcagcccgcctcgcacacctgcagcccgtc

SEQ ID NO: 144912 - DNA, 552 bp, Zea mays
  unsure (1)..(552): unsure at all n locations
  Clone ID: MRT4577_63645C.1
ccggnaaaaaaaaaaaaaaaaaaaaaaaaaaaaaaaaaaaaaaaaaaaaaaatcccggcggcattccgctgtcgtgcgtcgtcggcgagcatggcgcggtggtcgtccccgaaggaccctgccctggaggcggcgctccggcgcaaccgccgttgggtcgttaacaaccagatcaagcgcctcctactccgcttcccgtcccgcacggcgcccgtgcgtttcctccaatcccgcttcaagacactcgatctcatgggtcgcgccgccaactggctcagcaagtacccttcctgcttcgaggtcttctccgcggacgatggtggcggtgagcaggaaccccatttcggcttcaccaagcggatggcggcgctcgtccacgcggaggaggctgccgtcgcggcttccgagccggccatggcggaccgcctcgcgcgcgtgctcatgctcgcccgcggacgccgcctacaggtttccaagctcgccgcgctgcggggccctctcggccttcccgatgactacctcctncgcctcgtccccgccaacaccgatctt

SEQ ID NO: 144913 - DNA, 323 bp, Zea mays
  Clone ID: MRT4577_63646C.1
cacaggaagatgtggcttctttgttaaaaaaaacacgcttacatttctccttgactgtcaacattttttttttttttagaaagggtccacataacaatattcctaacgtacattgttcacgacaactgaactttcctggtaacgtgcagatcctcgagtgcaaaacataattttgtgtccccgtgctgtaatttagataaatcggtgggtgccgccttctacaggcttttaggtgtgtcacttgtgggcccacggtgtttggcctcttttttcattaaagggggggtcttcagggtgcaatttttttggctggcactgttttt

SEQ ID NO: 144914 - DNA, 196 bp, Zea mays
  Clone ID: MRT4577_63647C.1
agacgtgaggtgacaggatatatatgatgggccgggagaacacgtgggaggggatacattcataccaggacagatctgtgtcggatattatgagggcagcgcagactgaccgggaggagcaccagcagacactcgacaccaagaaggggcagagacaaagcaggcgtatatcatctgagctccgcacagagagagg

SEQ ID NO: 144915 - DNA, 1587 bp, Zea mays
  unsure (1)..(1587): unsure at all n locations
  Clone ID: MRT4577_63648C.1
attgggttcctcgaggccggccggggaagcgaaaacaaaccctagccacggtcggctcctcgaccggacgacgtggctgcgcatctgcaggaggaggaagaggtgaaatggtgaaggccgcgacgtggctactcgatcggctcctctacctactcaagcaggacaagggcaacgacgccaacgccgcgcgtgaccgacggcgaaggaggcgtgctccggccggtggcgccgccaacgccgttggaaacgatgatggcgaggagcagcacctcaacacctttctcgacactgcgaatgcgtcgttcgcctcctcaagggtgcagttcaggaatatggcgtcgcgcgcgcggtgggtggaggaagccggcgctgcggaggtggtggagaacaggggcaagctgtggctgaccaccggtgtcactcgggggggcaagctgtactacaacgttgaggagaccgggttcttggccgaaatgggtgccttgattcttctcaatgataaggatgagacgataggaattgaagatatctatgggaagcttgctggaggaaattatgggtgctcctgggatacctttcaggcttataagcacttgaaatcacttggatatattgttggaagatttggtgttccctggacaatgaagcatggtggtactcatcacaccattgctccccagatcaatatacttgagactgatcagagcttaaatagagttgatggggcctccaatgacataaccaaattgctcaaggaaatacagattgacgggatatgtccatcttttgaagtttatctgccaaatagcaagttcaaaaagtcatccccagggtgccctagtttcctcttatgtctattaaggggtaaaccgccctcaagggttgaattggaagcagtggaaaataatttcagaggcattcctctgaagtatgctcatgtggataatggacgggtcagctttctctcctttgatgaagttacactccccagcttgccctgatgggtagcagcagaacatgtgaagtgataaatagtgtgtttggtttgaggaatgaagtgatccatcttcttctcactcctcacttttttatttggtttgtggaatagaatgggttgatctatcatcactccatttctcataagctaataattagtatatgggtctgagcttcagaacaatcttgtcagaaatgataaagggtctcagcttcagaacagtgtcttgagatgcattcgccgcaagcgcagggggggcaaagtatttcagtactaacttttgaacatactaaagtatggaattccctggagtctcacaatccagcgatctgttgtacactccagattgtatgttggaaggagaaatcatgtctagtcttcttgttcgtctctaatagtagtcctttatggacgcagctaattttatgagcatagatccaatgcagtttcatttttgtgcaattcatcttctgtggatctttcagtatttcagtgtagggtaactaggtctatcttctaaccagggggnggttaagtgagaattggctggcggtgaatatgaacacatatacaaggttactacaatatct

SEQ ID NO: 144916 - DNA, 482 bp, Zea mays
  unsure (1)..(482): unsure at all n locations
  Clone ID: MRT4577_63649C.1
aattcccgggntcgactccacgtcgtctcgtcccacgtcgtctcgcgtgacgtcgtgagggctatgagtctcgtaccggcagttgtctaagggacgtgagagacggctaaccgtacaaagtcttcgatctgtccctcgcttatttcggcaaaccatgttcgtctgcccgagggagtatctctcgtcgcctaggtttctgagcgtaagttcgcgtggatggatgccatctgaatgtttctctgaatggtagaaaatcatcaagaagcccagtggtctacaagttcccatgcataccttcaatggatctcacataagggaccagtcaacttaaaggatgcctgtgccgtcattgcacggaactaggaagtctcnttccgtattattgaatggaaccccaactgctnnngcatcgcttggcccctatggtnnttcgagtaagacaaaataactggaaacgatattctaagtgtttagactttggg

SEQ ID NO: 144917 - DNA, 261 bp, Zea mays
  unsure (1)..(261): unsure at all n locations
  Clone ID: MRT4577_6364C.1
aaacccgggccgaccgcacgcttccggccagttcaagcgccatctttggccctttactcgcttcgccgacaagtgccaaatcntcgccaacttttccaaggtcctgcggcgtaacataaaaaaccacctctgccttgacctcgtccgccaggtcccattcttccagcacatgtactacctctgctctataacattttctacagggtgaaatccttaatctttcccaaggtagaaaccatcttaagggaggtctacttttta

SEQ ID NO: 144918 - DNA, 1127 bp, Zea mays
  Clone ID: MRT4577_63650C.1
gtgattgtgaccacgctgggttctgcggatctgggaacctcctcaagggtgcagttcaggaatatggcgtcgcgcgcgcggtgggtggaggaagccggcgctgcggaggtggtggagaacaggggcaagctgtggctgaccaccggtgtcactcgggggggcaagctgtactacaacgttgaggagaccgggttcttggccgaaatgggtgccttgattcttctcaatgataaggatgagacgataggaattgaagatatctatgggaagcttgctggaggaaattatgggtgctcctgggatacctttcaggcttataagcacttgaaatcacttggatatattgttggaagatttggtgttccctggacaatgaagcatggtggtactcatcacaccattgctccccagatgaatatacttgagactgatcagagcttaaatagagttgatggggcctccaatgacataaccaaattgctcaaggaaatacagattgacgggatatgtccatcttttgaagtttatctgccaaatagcaagttcaaaaagtcatccccagggtgccctagtttcctcttatgtctattaaggggtaaaccgccctcaagggttgaattggaagcagtggaaaataatttcagaggcattcctctgaagtatgcccatgtggataatggacgggtcagctttctctcctttgatgaagttacactccccagcttgccctgatgggtagcagcagaacatgtgaagtgataaagggtctgagcttcagaacaatcttgtcagaaatgataaagggtctcagcttcagaacagtgtcttgagatgcattcgccgcaagcgcagggggggcaaagtatttcagtactaacttttgaacatactaaagtatggaattccctggagtctcacaatccagcgatctgttgtacactccagattgtatgttggaaggagaaatcatgtctagtctttgcttcttgttcgtctctgatgattttgtttctgaggctgcacctgtgactttcggatttccaactgcaacaaatgcaatagtagtcctttatcgactcagttaattttatgatcatagatccaatgcagtttcatttttgtgcaat

SEQ ID NO: 144919 - DNA, 832 bp, Zea mays
  Clone ID: MRT4577_63651C.1
gggattgtgaccacgctgggttctgcggatctgggaacaggaatatggcgtcgcgcgcgcggtgggtggaggaagccggcgctgcggaggtggtggagaacaggggcaagctgtggctgaccaccggtgtcactcgggggggcaagctgtactacaacgttgaggagaccgggttcttggccgaaatgggtgccttgattcttctcaatgataaggatgagacgataggaattgaagatatctatgggaagcttgctggaggaaattatgggtgctcctgggatacctttcaggcttataagcacttgaaatcacttggatatattgttggaagatttggtgttccctggacaatgaagcatggtggtactcatcacaccattgctccccagatgaatatacttgagactgatcagagcttaaatagagttgatggggcctccaatgacataaccaaattgctcaaggaaatacagattgacgggatatgtccatcttttgaagtttatctgccaaatagcaagttcaaaaagtcatccccagggtgccctagtttcctcttatgtctattaaggtaatagtagtcctttatcgactcagttaattttatgatcatagatccaatgcagtttcatttttgtgcaattcatcttctgtggatctttcagtatttcagtgtagggtaactaggtctatcttctaaccaggcttttctttaattgtgtaattgtctgtctgtaaatatgaacacatatacaatgttactacaatatcttcttgattggaaaatgtgagtgaatcctggtacatatgggctgagctcaaggttcac

SEQ ID NO: 144920 - DNA, 928 bp, Zea mays
  unsure (1)..(928): unsure at all n locations
  Clone ID: MRT4577_63652C.1
aattcggcacgaggcttgcccctgttctccaccacctccgcagcgccggcttcctccacccaccgcgcgcgcgacgccatattcctgttccgagatccgcagaacccagcgtggtcacaatcccaccaggacgagccaacacggacagaaaaaaagcaaagcatctgcaagagaaacgaagcacgcacctgaactgcacccttgaggaggcggacgacgcattcgcagcgtcgagaaaggtgttgaggttcattgtgaagctgaggtgagtatataggcataaagagagcatgaacactgttagtggtacaaagcgtgcaccaaggagacagtcgcaagatgggtctggtgataaactagtggtgatcgtggaagcaagctcccggggggtggggagccgtcgtggaccacatgcccctattcctggcgccctaaactcacccattgatgtggaggccatcgaagatgaagttcaggcagtatctccttcgcgagtgcccctgccaaggaggaacaggagaaccaggagggaacctataacagtggttgattgggaggttgaagcntagccggaagggagcaaacggcgtccggttgaaccagtaggacgtcacctctatccagattggggagcaaggtctagcttgcaggtatttattttataatcttgattgaagggaataactttttcaacttcaaggctaggttgatagaagacctatttgtgtactttcaggtttgtaatgtgcataagttttcctgttaatgctcaatcttaacttgcactttcaacattcccatataatgttatttatgtaactttgtccttttagtgacttgtttgaaattcatattttccttagccaaccaaatctttgaacatgcatatatacatccttttatggcgtgatatgggttctgttcacat

SEQ ID NO: 144921 - DNA, 596 bp, Zea mays
  Clone ID: MRT4577_63653C.1
ccggccgggattctgctttccctcactgctgcggccagcagctccatctcttgaacccttactaatccactcaccgatgctctgctccacacctctgccgctgatcagcctgcgaagcgtggctgattgacgacaccaagacttgacttgctatctctctctcgtcaccgcacgccgaccgcacgtgcgagttaggaggatcgtctggcatcctattcaccgagctctgccacgactgcctgtacttctgcctcgacgacgacctggatccgcttatctcttgcattcttggccatgacgataacaacattgaggatacgtggtcgaaaaactgactgttgaccagactgagaaccatgacctgccttgtctagctggacaaaagctacgaatgcacgatgtgtgagatcgggaagatcagcctactgtgttcaagtacgatagagaccacgccgttcgtgcacgtgatgaatgacatacgacaacatgctctccgtacccggatcgcccgttcattctctcgagcctgacccctccgttcactcatattcctgagcggcgatgatgtccacgctcgcgagagccctgcacaggct

SEQ ID NO: 144922 - DNA, 568 bp, Zea mays
  Clone ID: MRT4577_63654C.1
aatattctgagagaaagaaataacatcaaagtatgatgtattcagtctgggtgttatcatcatacggataatagcaggacatgagggctactccaatgcgcacatacgcctttgcaagaatttcttgagcatgtacatgaaaactggggaaaacgactacagacaacaatgccaccacatacatcagatcaaattcaaacatgcatcgaaatagcactaagatgtgtggaggttgatcgtgagaaaaggccaactatagccgagattgtcggtgaactaaacaaggtctccgacttccaaagcaagcctgccttaaaccaaaacacactgtcagagtgccgaggcggaacgcccctgttgccattccacgcttggtctactgaagacgaggtccatgtcaccgttggcgtgttgtcccctttggaaccacaaacccgacatggacatcctttacgtcggcgttggctatcgtcgtcgtggcggcgtgacctagctagactagcattagcactagcagtcatagtaggcgtattagcaggagtacgagcatggatatcagtgatcgttg

SEQ ID NO: 144923 - DNA, 330 bp, Zea mays
  Clone ID: MRT4577_63655C.1
gagagcagcagcaggggcatttcaacttctcatccatgggagggaacagaaagaattacatcctgcttggtgcttttttttacccacgtgaattgcacgtgctagctagctagctagaccttttttgctagctaccaagtctgcacacactgacagacgggacccatagacgttcagaaaccaaagaaaatcaaagggtcattagaacatttttaaccatgatcgatcatgctctttagaatagaataccttattgacctatatatatggttttaagaagaagattgattaaaccgatgggttttcagttcacacctctaaaaaccaaag

SEQ ID NO: 144924 - DNA, 532 bp, Zea mays
  Clone ID: MRT4577_63656C.1
attcggctcgagagatcgagaggcctttccaattatagcataatactacatcgatcaatcgaaacagatgctaagcatctcttcctgacccaaaattacacggtactacgtactattagtagaactggtcgccccagcaaacaaacgcagcagcagtacacgctagcctgctaatttaaccatggctagcccaaaacggcatgtgatcgccaactaggagctcgccgctccagcaaacacgtaggcgcgcatgcagcatggctcgcacgcgcgccggcccaatccgtgaaaacatggggcacgcgacgcgcgcggcaacactcacacggcacgcgtcatcagaatgtgggcacgacgccgtagccggcggcgaagtcgagcacgtaccggtacgatggctgcggctacggctgcggctgcgaccgcgccggcggagccggcgcggcagcctcgtcgaggtcggcgtcggcgtcgttgtcatccgcgcgcttggcgaaccggcccttgatgcgcggccgcaaactgatagctc

SEQ ID NO: 144925 - DNA, 327 bp, Zea mays
  Clone ID: MRT4577_63657C.1
aaacgacgtcaattttcacacgtcatacaaacactacaaactttaaatttttttcacaaatttactacaatactatactattttcaaaccaaaccacaaaacatcttcatctctcccataaaattatgaataaaaccacaacctattttcactaccagccttccaatcaatccattttcattacctccaagttaaatcttctccattctttatccaactaatcttcagtctactcatacttccttcctttccctccaccatcaaacaactctcgtactatccccctgttttggaactcactacttcctctcccccatctctctaact

SEQ ID NO: 144926 - DNA, 186 bp, Zea mays
  Clone ID: MRT4577_63658C.1
ccgggccggactgctccgtaatcccaggcggacgcacacgcgcgctcccatattcctagcacaggccgtcgctcgctcgctgcagctacgcacgcacatatgtgctggtcccgttaggtcccaaaaggctcgactcaggggggggccaaggcgcaacagaagatcctggagtacaatttcaagggc

SEQ ID NO: 144927 - DNA, 249 bp, Zea mays
  Clone ID: MRT4577_63659C.1
gcttcctcttttccctccccttcctagacttctcctgctcaataagaccccaactgcatcggggagaattcctcccaaaccaaggaggtctgcaccctaaccccttattgtttgcccaagataagaaccaagtcctttgcactctccctctcaaaaaaagagaggttgcccccctttattagaaaaagaccccctctcccacccaaatattttttccctagaccattttttatacttgccaaatacccc

SEQ ID NO: 144928 - DNA, 2222 bp, Zea mays
  Clone ID: MRT4577_6365C.1
aatatcggcacctcgaggccggccgggctctctgactctcttgtctcctcttcattgcaaatgtttctcttcctctctcccacctctcctctcctctcctctccattgcaaaccttcgggatgaaggttgagagcctgctctgaaacgacgtacgtaaagggagcaaggaaccggagagcgtgcggcgggcttctggattttagagtaggcacctgtcgcttggacgtgcttcggagaagtaggtgtccaaaagttgcttacagtggatccagatccttcgaacaacattgctcaagctcatgatatagactgtcatggaggcagctgcagatgaggagaggccactgattcagtacctggctccagaggatgatgaagcttcctcacgatacactagcgacggaacgctcgatatcaacaagcagcgtgctctgaagaagagcaccgggaactggagagcatgcttcatgattctgggtaccgagttcgccgaatgcctggcattttacgcgaccgcaaagaacctggtcacctacctcacggctgagcttggtgagaccaacatcgatgccgcgacgaacgtgtccacctggattggcagctgctacctcacgccgctcatcggcgccttcttggccgacacgtactggggaagatacaagacgatgatagtcttcctcttgctctacatcgttgggatgcttactctgacagcgtcggcgtggctccccttggccatggaggacgactcacctgacaacagcggacttcggcgtgccacagcgtacctggggctctacctcgtttccctaggcacaggaggcatcaagccctgcacggcggccctcggggccgaccagttcgacggcggcgacgcggcggagcgggtcaccaaggcctccttcttcaactggtactacttctgcaccaacatcggctccctgctgtcggggaccgtgctcgtctgggtgcaggaaaatattggatggggagtcgggtttacggtgcagacggtgttcatgctgttcggcctcgccgtgttcgtcgccggtcgcaaggtgtataggtacaagaagctgggcgggagccctctcacaagggtagcccaggtggttgtcgcagctgtgaggaactgccatctcgtgctgcctgatgatacgtcagccctgtaccacgataagcttctaccaactgaaccaaatttcaggattgagtctgccagacaattcagattctttgacaaggctgccataatcaccggcgagaagggtgcagcagcgccgacgagcccgtggagactgtgcacggtgtcccaggtggaggagctgaagatgctgctccggttgctgccggtctgggcatccatggtgctcttcttcgccgtcagtgcgcagacggtaaccacgttcattgagcaggctagggtgatggacaaccgcatcggcccgttcaccattcctccggcgtcgatagcgaccttcgacgtgatcagcgtcatggtctgcgtccccgtctacgacgccgtgctggtgcctctggcccggcgtgccactggcaacgaccgcggcctgtcgcagctgcaccggctctccatcgggatcgcgctgtccgtggtcgtcatggtgtacgcggcgctgctcgagggcaggcgcctggccctcgcgcgggccaacatgcccgccatgaacatcgcgtggcaggcacccatgttcgccgtgcacggcgcggcggcggtcttcgccaccgtcggcgtgctcgagttcttctacgaccagtcgccggacgggatgaagagcctcggcaacgcgctcgcgctgctctccatggcggccgggagctatttcaactcgcttgcgctcagcgctgtcgggtcgatcacggcgcgcggcggggaacgcgggtggctcccggacgacctgaacaagggtcatatggactatttcttctggatgatggccgctcttggaacgctcaacctgctgcacttcttgcactactgcaacagacgatacagaggcaacaacaacaacacttcttgacgtgtgctgtcatgctgtgtgcaccatgtttctcaaaatcatagtttgataatactatattttgtaattatcataataatactatagttttagccagctccaaaaatactaggttctaagaaacattgcttaaatacaacatcatggcgttaggagcttactcttgagtaagttctcgagtt

SEQ ID NO: 144929 - DNA, 237 bp, Zea mays
  Clone ID: MRT4577_63660C.1
gaccaccgacagacaatgggcgcctccgcctcaccgactcggcctcgccggagcctccctggccagccgccgggctttctcgaccaggttcacgcggggcagccggtggtcgccgaggaacccccggaggagaagaaacctggagaggaaggggaggatcaccggcaggaggttgccccggaacgggtggagagggaaccggaggcccatgggcggcgggctgatcagcgggatggg

SEQ ID NO: 144930 - DNA, 666 bp, Zea mays
  Clone ID: MRT4577_63661C.1
ttgggacctcgagccggcggcttgcttcctttccccgcagctacggacggccacagcgccacacactcggtgggtggcgtctgctcgtgctcgaatacgcggcggcagcgaggacgtcggaacttccagccatggacgcggcagcgacggccgtgtcgtcgagcggcgacgctcccgttctcctccttgccctcgccgtctccctgctcctcctcgcggcggccgtctggtcgtcgaggcggagtggtcaggggcacggcaacggcaacggcgcgccgagcccgccgtcgcgcccgctgctgggccacctgcacctgctcggcaagccgctgcaccgctcgctggcggcgctggcggccacgcacggcgcagggggccagctggcgccgctcctgtccctgcgcctgggcgcgcggcgggcgctggtggtgtcggagcgcggcgcggccgaggagtgcttcaccgcgcacgacgccgcgctggcgggtcggccgcgggtgctggccggcgaccggctcgggtacgggtacacgatgctggtgtgggcggtcccacggggaccactggcgcgcgctccgccggctcctggccgccgagatcttctcggcggcccgcgtggccgcgcgcgccgccgaccgccgcttctaggtcgacccgctcgtcgcc

SEQ ID NO: 144931 - DNA, 328 bp, Zea mays
  Clone ID: MRT4577_63662C.1
tcggttattcttgggctacctctgactaccaagaaaatttgattatcgttctttcctatcttataaaacatacaataggttaccttcaaccatgtgtctgcagtgagaccgctgttgcatttgccaaagcatggaggttgacatggttttagattgctgatgatatgtgatggagccatgcggtaccgtgctaccgtgcatggtggaacgtaaacatattgaggtatgtgtgaagaaggtatcagggctcacaccagctagctggctgaatggtagtagttgttgctgctgtaaataagcaggagagttcaaagctgtcagcccgcgt

SEQ ID NO: 144932 - DNA, 759 bp, Zea mays
  Clone ID: MRT4577_63663C.1
attgggtccctcgaggccggccgggtacgatcacttgcttcagatgaccttgcggaaacacgaacccaactcgccaatgcttcacaaaacctcattacttcactagtacctgtacatccttttgcgcatctaccatgtttgttggaaataagacctggtgcaggcggatcagaagctgccattttcgccggcgacctatttcgcatgtaccaggcctattgtaatcgcaacggcttcaggaccaacatcctaaaatacgaaaacgtaaacggcacgacagaagccgggataccactttcggaagctatcatcgaagtagaagatgaaaacgcatacggtgttttcagatgcgaagctggtgtccaccgtgtgcaacgcgtgcccgctaccgaaaccaaaggccggacacacacgagcgccgcatccgtccacgtgctccccagtctacaagaaaactcggccgaagaacaagatttcgacgacccagaaagcgactactacatcgacccaaaggaagtcaaagtcgaagtcatgcgcgccagtggtgcaggaggccaacacgtcaacaagaccgaatctgcagtccgtctaacccacacacccacaaacaccgtagtcgcaatgcaagactcgcggtcgcagcataagaacaaagaaaaagcctggactctgctgcgctcccgcatcgcccaaatccgccgcgaaaaacgcgaggaagaaatggcgaatatgcgtcgtagcgtcatcggcgtggcgaaa

SEQ ID NO: 144933 - DNA, 351 bp, Zea mays
  Clone ID: MRT4577_63664C.1
ttttaccttaataaattcaatgctacacaggcggccactaatagaactggatgaccccggtaacctttctagctgagacgaacacatgacactaaaaattattcccactttcagaatggatgtgatggctccattatatatctatttctcctactacatgtatcctgaactgaacaaatttgaggctgcacatgatggactgactgaaaaaaggaccttccttaaatccaagccgcatctgcacaagcatgcaacatgggtgaagcataggcagagatgagacgacgcggcaagagaccttgacgacgggtcacttgtgaaacggctcggccgctctaaaggattcaagct

SEQ ID NO: 144934 - DNA, 589 bp, Zea mays
  Clone ID: MRT4577_63665C.1
actgggaagggaccagggatgtcccattccgtacgtttatccgaagagtcatgcacgcatctagcactagcagaagatgtatctccatggcatagctagctagagtagcgcactagcgctagtgcagtttcttctccaagacgaggaagacgttggtgaggtcgtccttgtttctgctggtgttgctgcggtagtactcctctagccggaggctgtacctgcagaagagtccgtccatggcttccaagccgaagtgcgctcgcagcatgggctccacgaccgccctaacggtgcttgtcgtctccatggctagccactgcggcaagtcgtcgtcatcgtccgacgccgactggaggaggaggcagcggcgcgagatgtcaaagagctgcatggttctgacggtgaaggagccttccctggcgatgaccttggctaggtcgtcgaggcaggggccgtagaagggcacgttgaaggcgtggacctgctcctcgtcgacgaggccatcggcggccatgtccatgagggcgtcggcgaggaagtcccagaggtagcagtcgtgcgcggtggggcgggcggttctcctggcgac

SEQ ID NO: 144935 - DNA, 314 bp, Zea mays
  Clone ID: MRT4577_63666C.1
acataaaatacaaaacatgccaaaaattgtggaacaccaacacgaaacaaaagcccaaccataggtctgccaacaaagccacaaaagttgcacacaggaagccacatggggatccatacaacataaaaactcaaaccttagaaacaaatccttcaaagggacacacgaagcatgcctggatgggttgtgcaccctaaccatggaacactaattgagagccagcctcagctccagcaccttgaacttctaacttaagaccgggataacccccatctgatccatgccggacgccaaaagcttttgcaaaaactttt

SEQ ID NO: 144936 - DNA, 705 bp, Zea mays
  Clone ID: MRT4577_63667C.1
gcgacgaaggaacagagtcatagactgggcagaagaaacgagaagaggatgacggtggatgctactagatggaacgggaagaaggaggagaagaaggcagcagggcgacgaaggcagagagtcagagactgggcggaagaaacgagaagaggatgacggtggatgctactagatggaacgggaagaaggaggagaaaaaggcagcagggcgacgaaggcagagagtcagagactgggcagaagaaacgagaagaggatgacggtggatgctactagatggaacgggaagaaggaggagaagaaggcagcagggcgacgaaggcagagagtcagagactgggcagaagaaacgagaagaggatgacggtggatgctactagatggaacgggaagaaggaggagaagaaggcagcagggcgacgaaggcagagagtcagagactgggcagaagaaacgagaagaggatgacggtggatgctactagatggaacgggaagaaggaggagaagaaggcagcagggcgacgaaagcagagagtcagagactgggcagaagaaacgagaagaggatgacggtggatgctactagatggaacgggaagaaggaggagaagaaggcagcagggcgacgaaagcagagagtcagagactgggcagaagaacgagaagaggatgacggtggatgctactagatggaacgggaaga

SEQ ID NO: 144937 - DNA, 314 bp, Zea mays
  Clone ID: MRT4577_63668C.1
cctgaacaaccgggttgtcccacgcgattgcttacccccgggcggacgccagggcggaggcggggtttcggaaacaaacccggtttcttccccaaccctccgagaaagacagaggcaaacagcacataaaacacccgaaaccaccaagacacccgcatctcgaccaacgcgcccgaccacataagaaaagatcaggatccaaggccatacagacctgacccaaaaaatcaaatggacactaacaggacggataaccacactacaaccgaacaccggaggacccggcggcgcaagcactacccggcacaaagaac

SEQ ID NO: 144938 - DNA, 378 bp, Zea mays
  Clone ID: MRT4577_63669C.1
tcgtatccctcccagaccaattcattcagcacctcattacaagcagactaccatttggtcgcattctattggcacacaacatcagggcacaacaactacaacaacttgtgctagcgagccctgctaccttcttgacacaaccacagctgttgccgttctaccaccacgctgctcctaacgctggcaccctcttacaactgcaacaatagctgccattcaaccaactagctgtgacaaacctagcagcgttctaccaacaacccatcattggtggtgccctcttttagattacttatgaggaatagtacaataataatagaatttgtctgatgatggtggctgcccaccaataataaaatacatctctagtagaataat

SEQ ID NO: 144939 - DNA, 429 bp, Zea mays
  Clone ID: MRT4577_6366C.1
gcgcccacgcgtccgcccactcgtccagaaaactattcccttactatatccagcaaataaatatcggctttgttctcaaacccaagtatacacgcacacatatcaaacagacactcacccaataactccatactactacagggccatgtctactaccctcgacataacattgtcacctgctacctactaatgatcaactccatatctcccaccatccttgttacaaatctcaacttaataatgctctgcttcacactgccgagctgagaacacagtcaatctactacacccatcacactgccttgaatgtagccaccgcatcctctacactaaacacactcgtccaactctacaatctaaagcacgctgcacaatgacgaccccacaaaaacactcgacatggctgatctcttactcgtcactcaccta

SEQ ID NO: 144940 - DNA, 392 bp, Zea mays
  Clone ID: MRT4577_63670C.1
atcagattcagttaccactcatagaccgcggctcgcctcccctccgctccaccgtcccttgcatttcttcgccgattcctcctcgtcgccctcccctcccctggcgacctaccagcgccgcccagccaccgccgtgccctggcacagcctcgccgccggcggcctcgctccccatacccctccctccccccgcctcccacgcgtatccgtcgcctcctccgcctcccgcatcgacgcgaccccgaccgatcccgagcttgtttgagcatccgttcatacaatatgacggagaagacatctgatgagacgactggtcaggagaggcctgaaggagatgtttctgatgtgaaagtggaaactgccgaccagaataaaggaaatgagatgccatc

SEQ ID NO: 144941 - DNA, 157 bp, Zea mays
  unsure (1)..(157): unsure at all n locations
  Clone ID: MRT4577_63671C.1
agtgagtcgtattaaacnngnnctgntcanagcaggtacctgccagcgggacacactgaagtgtagcccgtgcgcatctgccacaagataccctgaaccagggtgcggtagaagaagcaggtgacttgttctgccagcggggggtggcccatcaccc

SEQ ID NO: 144942 - DNA, 685 bp, Zea mays
  unsure (1)..(685): unsure at all n locations
  Clone ID: MRT4577_63672C.1
ccgatggggtgcattggcttgggatcacctcggcatctcgcctgggatctgctagcttgatctctcctagtcctagcccattcgcttctcctgttcgtcgctcttaatttgcttgctcgatccctggcagtggcagctgctgcaatggcttccggtggcgcgtcgtcactggccttggccgcgctgctcctcgtgagctgcgcctcggcggcggtggcgaccaagtacaccgtcggggacgcgtccggctggacgaccaccggcgactacgccacctgggccagcggcaagaagttcaaagtcggcgacagtctcgagttcaaatacgccggcggggcgcacacggtggacgaggtgagcgcggcggactacgccgcctgctcctccagcaacgcgctcagcaccgacagcgccggcgccacgaccgtgaccctcaagacggccggcaagcactacttcatctgcggcgtggcgggccattgcagcagcggcatgaagctcgtggtggacgtggccaaggcggtggccgccccggcgccggccccagccgcggccccggccccggccgcggacaccgccccagacgcccccgacaccacgccgtcgaccccgacgtccccctcgagctccggcggccgcacgcccaagagcccagacacgacggnccctctcgccgccggacaaa

SEQ ID NO: 144943 - DNA, 669 bp, Zea mays
  Clone ID: MRT4577_63673C.1
tttttttttttttttttcctacacttatctgggtctttattccctagatcaggacgtgtttccgtttgaccgtctgtggccttgaaacatcgaggttcaccgcttgatgcacgcaaccctttgttacagttacatacatgaactgccgattccacctctgaagactctgtttgtgtttgggggagaaacatattgctgatgaatgtttgataagcacgcctggcggcaatcgtcacaattgtcggctgggttgagtagtctccatgacgatcttgggcatgaggctgtttgggtatcagttgacaagcatcgatgcatgctcttaaacattctcggcgttggtcttcaccctgtcggactcaacggttgcatatgcttatcgagttgaactgactcttccatgccatctcggcattgatcctgatcatagtggtacactgccctatcctcacatcacatcaccttttattcttacattccccccaacgtaataccccaaaacgccacagatgcaacaattcattatcattgtcccccgcccctcggcctatccttcgccgcaagtccatgtatcctctcccccctctgctccatctccttctgcctcgacagccgcacgtgctcgggcaatccccaccactcccgcataaactcctcctgggcctgtgc

SEQ ID NO: 144944 - DNA, 274 bp, Zea mays
  Clone ID: MRT4577_63674C.1
ggcggcccttttttttttttttttaaaacaaacattgattaattcagtgatgctgtataaacaagctagggtaaagggtgatgcatgtacaaaccggaaatcagactttctgcatctatcataggatacaatagcgcagttctagctggatagcccatgtttgtgagagccaatgctagtaggtggcccattgccaatgctaaatgggagaaaaatatcatgtgccatgatggcacagagccagagggatagatgaactacatgaattaacatc

SEQ ID NO: 144945 - DNA, 719 bp, Zea mays
  unsure (1)..(719): unsure at all n locations
  Clone ID: MRT4577_63675C.1
gccggccgggcctgggnnnnnnnnaaaaaaaaaaaaaaaaaaaaaaaccaaaaaaaaaaaaaaaaaaaggaaaaaaaaaaaaaaaaaaaaaaaaaaaaaaaaaaaaaatacccttttttttggaaaccagcaagcaacataaaaagaaaaatcctttaccaacaaaaaagcaacaagggggaccaaaaaatttcccccccttaggcccctggctttttcaacaggggtggcaaacgcgacaattttccctcaagggtcaaaagctccaaaagtttccctttttcccccaaaccttccataagttatagtttcagaaggggaaaacccagttcttcaaccatataggtttcaacaagaaatcgcagaaagaaacatacctttatcgcccttgtggtttaaaaaatcgccagccctattttgggggcagtcttgggaaaaaaccatcggggaacaacaggggcagaaactcgggttacctctgatcaaccaagaagtttgggaaaacttttctccctactctcagaaaaaaaaattttttccattcaaccaattgtttacactgaacccggctgtttattggcagaaacaactattaccatttagccggttagttacggcctactctcagaaaaaacaattttttccattaaaccaattggccgcactgaaccccgttgttaatttgcggcagcaaatactactaccttttagccagttag

SEQ ID NO: 144946 - DNA, 227 bp, Zea mays
  Clone ID: MRT4577_63676C.1
tttaacaataaaagtctgcaagtttttattgttttcaggggaaaaaaggggggaagagaattctatttcaaagggagaacatgcattttctctaaagtatagccagcccactacttttttttttattgggtatcaaagaaacaagttgcttcaaaactgcaacacgatgttctaaggagggagatattttctaaaggacatcgagggcggggtaaggttctgaaata

SEQ ID NO: 144947 - DNA, 240 bp, Zea mays
  Clone ID: MRT4577_63677C.1
acaacccaaaaatatccaaggtaaacccctttaggcataatgcaaaattcttacagctatcacaaaaactgagacattgttccaccatagtacggggcaacaacccatccgttctgaaacacatgttcttttccaatctaaagcccagtagacagataaacaacggcaataactcttgggggccttgtcagccttgggggctttggtagcattttgaccccggagcctttcagtcctttt

SEQ ID NO: 144948 - DNA, 292 bp, Zea mays
  Clone ID: MRT4577_63678C.1
cggctcgagggagcatgtccgggagcagcaggcccaagtcgagaaagaagacttcagtgacatggtggcggacatgctgccaaacagaagcaaaagaaacggaaagctcagccccaggacagtcgtgggggcagcaagaaatacaaggagttcaaattttaggtccttctcacatacctggccttcctttaggccctttgtatgtctgggctttctatgtgggttcctgaagctagttctgtactcactaggcttgtcacttcctgttcttattttagacttgtcttgtaaa

SEQ ID NO: 144949 - DNA, 603 bp, Zea mays
  Clone ID: MRT4577_63679C.1
gccggccgggccgggcccgaataccctagtgacggcggcggagatggacgaccgaggcggcggcggggaggccaagaggtggccgtggtgggctgcggcgagcgcggcacaggccgcggccgggatcgcgttgttccgacggggcaggagcggagcggcagtggcgatgccgttcaaggcattcggcatcgcctccctcttcgtcggctccggcgccaccgccgtcgccgctggggtgcttgccgcgggcgtcggatcggtggaggagatgaagggcgtgggcgcgagcatccggcggtggatgggagctcctcctcgccgagcgggaggtagtgactaaccctcgcactgcaactgtggtctgtctgaacctctgaggatttctcagctctggtaggaaactacagaatgagtgctgtagtgtgggctgcttcacgtttcagagctatgagagagtgtcattctgaattcatagccagaatgcagggcagtaataagattactgttgtaacctgtattgtatcacaagcttttgatccctcaaaatttatttccacagagcacatactccgaaaaaaataaaacaaaaaaaaaagatgattg

SEQ ID NO: 144950 - DNA, 1104 bp, Zea mays
  Clone ID: MRT4577_6367C.1
cggacgcgtgggcgacgacgaggaccttctgtactgcgtgccggtgttcgaccctatgctcgccgagttctacaaccccgtggccgacgagggggagcagaagccggcctgcctgatgctgcctctcgtggaaacatcgccggagttcgcctccggcggcttggcagaggcggacgggctctccggcttcgacgtcccggacatggatctcgctagcttgggcggacatggagagcctcctcatgggagtcgacgacgggtttgacgatctgggtttcttggacgaacagaatcctcaggtgaacgcggacgtggacttggaggccatggcggcgccggagcctgaacgagaggacaagaaaaggaagcgggacggctttgattatctgggtttcttggacgaagagaagccacaggtgaacgcggacgtagacttggaggccatggtggcgccggagcctgaacgagaggacaagaaaaggaagcgaacagatatgatactcaagctgaactacgagggcgtcatcgcctcgtgggttcgtgacggcggatcaccgtggtaccacggcgagcgtcctcacctcgacgatccttacgagctatggttggagttcccggcaacgggaagccggggacttttcggcggcaccatgacagcggtgaccggcggcgagcgtgaggcacgggtgtcccggtacagggagaagcggcggaggcggctgttcgccaagaagatccggtacgaggtgcgcaagctcaacgccgagaaacggccgcggatgaagggccggttcgtgaagcgcaccacgctcccgccgctgccgaggccgccgccgccgtcacagcagcaacagaagaagaaacaactgccacgcgcattgccacacgtgggcatggtgctcgcgccacctccaggagcggacgggcgcttccggttttgaatctttgagatcacgcacggaagcatggaaggctcggtatcaggtgcacaacggagggatagtgcacaaatgcacaaacttgatcctggccttccatctcccaatgaacggtcaccgtcaaaattgcaagaaggcccctccgcacctcctcctcctttaaaaa

SEQ ID NO: 144951 - DNA, 259 bp, Zea mays
  Clone ID: MRT4577_63680C.1
acaatgaaagctgaaaatttcccttgatgcagaagaacctagcacaattcactagtatgcagaagaacaaagggcgaaagcgtctccagcagttaaaattatacagtcgaaacatcgatcggctaaggatcacccgcctaaccaagtatacgtgtatcccttcccccctaatgttaggcttgtgcactgcacactgagaggacgatgcactgaatgccacgagatccccgatagtgctgaggtgataatgctagtcatg

SEQ ID NO: 144952 - DNA, 349 bp, Zea mays
  Clone ID: MRT4577_63681C.1
tgagtttcgagtttgttctcctcctttttttcccccccgccctcctgaacctccagggcggttacacaaagaagatcagggctacgcacaggcatcttgattatggcctggtctaggggatcggataaaaatgggcacgaaggtataccttatcaggttcacgggaacgtggctgcccataggatgactagcacgatgtgggggctcgagtagcggcaccgctcgctgcaactggacggtgatcggtcgcgagactcaggcgcggtactacacgttgagccgtctgttgacaagcaaccagataccgtcataggcggagcgcctgacctgcacggaagaagaggacgcg

SEQ ID NO: 144953 - DNA, 2026 bp, Zea mays
  Clone ID: MRT4577_63682C.1
ctctgccgaggacctcgctctccaccaagaggcggtcagcgctgcccgacggcaccgtcgcctctagggcatcgaacaccgtcgagtagtagcccatcgccgcggtcacccgctatggcaggtcatcggagcagtcgtcgctgccggtgctgttggcttccttctcaacgatggtcaccacggcggggttcatggatttaacccacttcaggaatgtaccttgacttcgtccgggagaagcagaaactggcactacaagctgtgcgttggccgttggctcgtcctccccgcctccccggcgacgtcgcgggggcagcaaccgtactaccacggcgcatatgcggagtccgggtccgaccgcttccactatgcgtgccagcgcgctggtagctccacagcatcggcgctgaggctgcgcatgaggggcgcgatgtccaaccgtaacatcacgctgtcagtcagcgcgcacaccaacctccttgccggcaacgaggaagggaacggtgaagtggaaatagtgggtggcagcagtgaggaggatgaggcaaaggagtggagacggcgtacatcctccttgtcgggtgccatgcgagggtgaaatgggatctgcaagcctacatgggccctgattgttctttccttcttcttttttcaagtacatcggttcgattcaatctcagtaccaagaaatgaatttgcgaatctgatgagccatcatgtggttttccctacctgtcgtgacatggtctctgcagaatctgacattcctgtttacagtacatgtacttactgatcgactctggttcagatggcttgatatttttaacgctgacaaaatttaccaggtctcgtgaatccttctaagctcctgaccagcattgacgaacagatagcggaaagccagggaggagccgtccaggagagaaatcatggagaagataacaagtggctgctggcttgcgaggaagagaaatggctggatgagtacaatatggtaggtataaattgtgggtttggatacatcgaacactaatttcaaatgtggaagacagataaagaccaggcaaactatattgaatgggagaggataaagcatatcaacaaatgagagggatatctcaaggtcatagctggtgtggataaaaacatcaatgtgacatcaaagggtggagatgatgagttctcagagctatatacattcaaatggactaccttattgatacctcctaccacctcgcttctattgaacttcattggtgttgttgttggcattttgggtgattgcattacctcccgaggcactgaggtcgttctcaatttatttggtagtgttgacttgatccttggcggcaacccctggactggtctttgagttgcagcagagcgttgtcactaggaacgccatgatacacgagtatgcgtgcgacaacgcggaggcgcaggagtgggcgttggagttgtttagtgcgatgcaggcggaagggttggcacaatagagtgagattatgttgcccatgttgtgctgtgttgggctggctccagggcgagactggctggtggagctttttaacgcgatgcaggcggaagtttgctcggaaggtgatagcatgtgcatatggactatacgcgatggattggataggtgaatcaattctgataagtgttggagcacaagagtggaattcaagtgtacacaatgtacatcaaaatggcgaacaatctatgtgacatcattttaacaagtgatccagaactcatttgactgacagacggtgccagcaaaggtgttatgcaaatgctgaacaccaacactagaaaataaggatggggaaataattgttctttaaaaagatggaatggcagggtaagatatgctaaagggaaaacatgatgtggctaaaagaaatagccctttggactttgtaatgcaaaacttcatttcacaaacaatcatttccttgttgaacatatgttgtttgagattttggtttagtgcattatttataggttcagcatttaaggtagc

SEQ ID NO: 144954 - DNA, 549 bp, Zea mays
  Clone ID: MRT4577_63683C.1
tgaataagcaggcagaaagacccatatatgtctgggtaattctaggaatagagaggatcttctgtataccaccacgatcaacaaagagtgcagcaaattttcgatgggcagccaatgcacaaattaatttaaggacatcagggagttgagcaaagtggtcacatccctcctggtctttcatgctcatttgcaataatgtgaggcaaacatcaacacctttttcatggagaacaggacccaaagcttcaacatactctcccaaaatctgtagacactggatgctatatttttctctaagttgtaagagctgtgatttgtcactgataacaaaattttccaaatcctggtcttcgctggtttgtacagcttcttccgctgcacgttcttcaccaacttgatttgtgcttcgtgagacactagtcgacactgcagcctctacaactgcagatgcagctttctctgccgctactataaccgcatcactattattttcggctttccaaacctccaaagcagcagatttcaccgacagcaacggcgacagcaacg

SEQ ID NO: 144955 - DNA, 237 bp, Zea mays
  Clone ID: MRT4577_63684C.1
ggagctaccatatgagcttgcagttactgaagtggtgtgagagagaggatggtgcagcggcgggctgctccctgctggccctggggccgtgagcctggccgtggagatccaggccgccgccggctacggctacggctgcgggtacaccccgacgccgacgccggacaccccgaccccgaagcccgagaagccccccaccaaggggccgaacccggacaagccgaccaaggagcacgg

SEQ ID NO: 144956 - DNA, 351 bp, Zea mays
  Clone ID: MRT4577_63685C.1
gcttataggaatcatggattcagacgggacagaggccatgtacacagttgctgcaccaattgatgcggccaaaggatggtccatagataagcgaggtatatcacacctttgacttctgagtgagggcttaaaacagtcaaaccccggaatttggaacactctcactttgtactactagttgaggagccacctgatgcctttaatcatcatgtcgccatctacctcgcttgagtcattcgccattatgtgttctccatcacacctactggctgttgaagcgagcatcccgttatctaggggcgcaaagatgtggactggtatttcagttgccgcgtggggcttccgacatta

SEQ ID NO: 144957 - DNA, 236 bp, Zea mays
  Clone ID: MRT4577_63686C.1
ggcgagaaaagcaatagttgatcgcctttattgacaaggacaattttgtcataaaagcatggacgccttttcaccgtttaccgagaaagatacatgggaacaggccacgagcagaaaaagaagcgcaatggcgttggtcgaatcctggttgagcaggtgtcctaagcagctaaccgggccacctaattctaagcgacgggcaccggcggtgggcttggccatgccctggggatcgc

SEQ ID NO: 144958 - DNA, 388 bp, Zea mays
  Clone ID: MRT4577_63687C.1
cctccttttttttttttgttttttttttatttttttctcgctctttctcttacaaaaaataaaaccatgggctcgccctaacaaaaaaaacctttagctcattacagagtttaaccacacaatcgcgcggtcctccatgtccaccctggggggggctgatccctgcagatgggcattccattaccagacatacccaaagtacaaaagaacatgcctttggggggggatacaaaggaaccaccattgtgccactccttaatttattattgccttcaaaactagaaaattctaggaaggtctgctgcacaaatttaccaatggttatgcggagccacactcgatggggaccaaatatgttccccagaaatattttaaagctgccacccac

SEQ ID NO: 144959 - DNA, 311 bp, Zea mays
  Clone ID: MRT4577_63688C.1
gacctgcttgcgctctacaacctacagggaagccaccaacaaacacgggggtgccttcagctttattggcagcaaaaagtccgccctttggcatccaagatctataagacccttgcccacacaaaagatatggtctggtcggcataaaaatagccggcactaggagatcagacttgcacctcaagcactaatggatggcggtgccatggcaaccattattaaccatatggtcttcctgctagcccatacaagagcggaccacctcaagtacaaggaccccaaacagggcggcccttctataataaacaacc

SEQ ID NO: 144960 - DNA, 207 bp, Zea mays
  Clone ID: MRT4577_63689C.1
cccacgcgtcgggacggagcgcactgcgaaggacgagtgcgggatcttaatgacctacactagggtgaactgacatcatcacatcatcctcctagtactgcactctggtcttcatacacgacggtggctcaccaacagccggcacctgcatcgtgccgactgtgccatccagcacaaccgcttccataactccactcctacctgacc

SEQ ID NO: 144961 - DNA, 1704 bp, Zea mays
  unsure (1)..(1704): unsure at all n locations
  Clone ID: MRT4577_6368C.1
ttctgtgctcgctcggnnctccgccctccgcccccctgcnntccgtccgatcgccgcgccnnccctcgccgccggtngatcnngctggggagnnccgacgaggccggnacgccggnagggttctcgctcccttcctctnngtgtctcccttcctcccgcgccgtcccgcctgcntcgtcgcgtggncctcctgctcgggggttcctgctcgccgcgngaatttggcatgtngacgtggggncgatggccaacgatggcgcatgcccggcggcggcgtggggnttgattggttaactggatttcgagattgttttgtctggattttttttccgagggaagcgcgcgctccaggtgactgcattttaggttcatttccaaaatggtttgcatggtggggaattttaaaatgtcttctgtgttgaagcttgtaatgatggaaaatcacgcaacaccagatgacgtgatccatgagatgactgctgcacaggtcctacagaagcaactgtttgatgcacacgaaccaaatttactggatgaaaatgatatgcatatatttggatcaaaaccgatggccgacccattggacttggtctgctgtagtacttgcaagaagccagtcaaagccagccaatatgcaattcatacagggcaatgtagttcagggaaggtaaacacaaatggttcagtgggtgtggatcatgccaatcctacaaagcccctgaagaagggcagaaaaataaagttgataagtaatggaaatcaaaaagtgcacataaaagtgaaagcaaaatctcaaactgaaagcaagaacattgccaatagtttcgagttggacaatggacatgtcactaaagtacaacctatagattccacagggctgggcctgtctgttgatagttcagctactatcaatgtgcctaaaaatcatcccagagatgcgccagttcctcttgcaacaaaaatgtatcattcacagggcaactaccgtcttcgatttgagcttggccagctttatcgcgaatcatgtgtgcagcatttgagtggccacacaactccaaacgtgtcacatgagaatggattgatggcatcatcacggttttcttcttgtggcaactcagcattgcctactcagaagagccttgttcctcaaacaaagcctctcgcagaccctcagcaattagcagcaagcaggcctaaccagtcacaaggaacaaaaactgatagagcaagtgcacaagcatctgcaattaaaaatgaaggttcacgatccagatgcaataaagctaccattccccattcgagaaacaaaggcagcaagaagacgcaacagcaacctaatggacgtgttcatgcgatcaagttcccagtagagtagcccattcgtaggtaatttattggttaagtggaagtgtctcttctggtgaacagtctcttcttttctcctttccaaatgaaattggttattgtcaggattgttctaatttggactgtcccgatccgaggttttggttcgccggccattggtactagaagctaacagcactagttgtagcactgacgatgaacttacctgtaaatatggccacagaggccttggcttcttcctgccgaaggtcgtggacctgatgaacattttgaatgtagccttcatcttttgggcattgagttctagttgattgatgttttgtgtttgattcttgccct

SEQ ID NO: 144962 - DNA, 381 bp, Zea mays
  unsure (1)..(381): unsure at all n locations
  Clone ID: MRT4577_63690C.1
ctctanaacaccccccttggtgggttgtggtttttttatttttttttttttccagcaacccatctaatatctttcaataattgaaagtattgtccatataaaatacaaattgtacactacctagacccaaaattcccgtaccactttccaaacctgagcctattcctcccaaagaggggagcagtattttttttccacactaacaaggcaaaacccccaacattaaacagcctaatacaaaaacaaaatgtcaccctttttaacagttgctctggctcttaccccccccagtccacataaaaaccaaatcgtcgccaaactcactctgcgcttagaacccttgcactctaaggaacctcgccgctggctttcccggcacca

SEQ ID NO: 144963 - DNA, 168 bp, Zea mays
  Clone ID: MRT4577_63691C.1
acgcgtacgcgtgggctgactcattagcagacacatgggcagactaccttaccaggcaggggctaggaatcattctgaatagcattcactgatgttgtcacatctagtctgatgagttgacagacttactaaggatacatgaacttgaacttccaacaatctgcaatg

SEQ ID NO: 144964 - DNA, 526 bp, Zea mays
  Clone ID: MRT4577_63692C.1
accagggagcctcaattcgtccttgtccaattgatggttccattgtccaaagctgagacagaggcggatggtgcacggttctgccggttccgcatcccgccagattgggacaaattcggcatcggctccaccaaaggctccacggattcggcatcggctccacggattttcggtacccatgctttgtttagccagtgattttggtgctggtaggattttggtaatagtccatggtggaaaaagttatagctgaaaagctctattttcagttttccatcgaacatcattttgataggttgaagagccaaggctgacatatttgtctaaaaatgagaattatatatgtcaaaataaatattgctttactagcctgaaatatccgaaatgtcacactacaccataataaagaacagagcttaacaaagcaagaacacattaataaccaagagttattatttgcagctcctttaggctacagaggggggcaaagtcatgttatattttaaggtaacgaaagaaaacaaaa

SEQ ID NO: 144965 - DNA, 415 bp, Zea mays
  Clone ID: MRT4577_63693C.1
cacgtaatgtacaaaaaagcacgatgcgtccggtcacacgtaattacagggcagctatagtaaaggctctgtagctgacattgttacacttgttacaagggcaaactatcttcctagagggggacaccctgtccagaaaatgacacggattgcttttatagcaaacttcaaggggcggtaggcggagcgacagctagggatcgctatgatgatgtgcaactatcacaggcttgtatatggtgctggacatatctgtcggactctctgcaatgagacataaagaaggctggcttactatacatgtacagaaaccaaggaaataagtgcatactaatgcctgcaggagcgatatggtttaatcccgagatagctactcgagcgctgacacctttatatataaagttgagaattaggt

SEQ ID NO: 144966 - DNA, 265 bp, Zea mays
  Clone ID: MRT4577_63694C.1
aggaaacatatttttcgggttaattcatttttcaattgcctagaacggcaggaggcactacacgcaaagaattttgacgggcatacgcgaaacctatatgcacagggtgctacttagaactccacacgtctgtaacaacagaccgcttggacggaatatgtgatggggactacacagtatcaataacttgcgttagatataataagacacggcggccgtaacctagcagacgttcacaaaagggcttacttaaaacaccctggat

SEQ ID NO: 144967 - DNA, 741 bp, Zea mays
  Clone ID: MRT4577_63695C.1
attaatcttgtcgcttcgccgccggcacaagcgatcggagcagcggcccgtcggcagcgatgggggaccacgaggcgcgcggtgacgacacggagaggaaggcggataagaagctctccggctgggggctcttcggctccaagtacgaggacgccgccgacctatacgataaggccgccaactttttcaagctttcgaagaactggaacagagctgcatctgtgtatatcaagattgctaattgccatctgaagggtgatagtaagcatgaagctgcctcagcttatgtggaagccgcaaactgctacaaaaaattctcacctcaggaagctgcgcaagcgctagaccaggctgttaatctttttctggaaattggtagattgagcatggctgcaagatactgcaaggacattggtgagatttatcagcaagagcaagatttggagaaggcttcagattacctagaaagggccgctgatcttttcgacagtgaaggacagacatctcaatcaaacaccattaagcagaaagttgcagaaattgctgcgcagttggaacagtacccaaaggcaactgagatttttgaagaaattgctcgtcaatcaattaacaacaatctgctgaagtatagtgtcagaggcatcctccttaatgcagggatctgccaactatggtagagctgatgctgttgctatacaaaattcattggagagataccaggaaatcgacccgactttctca

SEQ ID NO: 144968 - DNA, 461 bp, Zea mays
  Clone ID: MRT4577_63696C.1
gtatgactactagtccttctttttttttagatcaccgcaaaactgcgaacaatgctaggcaccctaaaaaccaccagattggttgcgctgaccaacacagtgcaaggggattatgaggagacaccggacgtggcatagctctgatctggttgggctgctgattggaaaacaaccagaaggacccgcccttgtctacaaccccgagcatgacgggcggtatccccccaaacatgcccttgaaccttttacaaattttacgtggggggggcaaatagagaccatttcccacagcacccttcttgggctgcaaaatgcaacggaaagtgaacatattgaacccggccagggccttttgatctcgggtgaacgggaaatccagacggaagaagcccctcgccctctattggatcttatacagataattctagcacattaggctttaggtgggggcaaagcccacc

SEQ ID NO: 144969 - DNA, 671 bp, Zea mays
  Clone ID: MRT4577_63697C.1
atagatataacactggtcgacatactcactcactcacagtcgccgatgctgccagtgcacactgttcgacgttataggaatctgagagagagaggacaaaggtcgaaggaggcgcagggagagatgatctccccttactccctccccgccgcgatggagctcgtgatcctgggcctgctcgtcgaatgccatcgacatgaggatccaggtcgatgcgcagaacgccggcgagaagaacttcaacaccagcgaaggcggctgtgcactagctgtccctagtgagaatggccggtgcaactgacacggctcagcccaacggttgcggacctggacaacaactgtgatcgcagtgcgggttcaatgacaacatacagtaccctttcatgtccatgggatcctgtggaaaccaaccattgtgcaaggacgaaaagggatggggctcctgactacaatagtcaagtgaaagaaggaacctgcctgctccgcgcagtaggaaacttggatcatcatcgacatgaactactacccggcgcccaagcaccacttctacctcagcaacacggtgtgcgctaggctgcccaatcccggactcaacgactagctactacactcgagaatcatcgacatcgagtctcagcataccgccgcgcgagatccctgacctcaagatc

SEQ ID NO: 144970 - DNA, 246 bp, Zea mays
  Clone ID: MRT4577_63698C.1
gctgcatagctgcagcattagggtttttcatctgcttcaatggggaagtgaacagggagatttggtaagagaaggcacaagactcacactctctgtgtgaggtgtggccgccgcagctttcatctccagaagagtcgttgcgccgcttgtgctttccccgccgcacgcactaggaaatataactggagcgtcaaggcaatccgcagaaagaccaccggaactggcaggatgaggtacttgcgtaac

SEQ ID NO: 144971 - DNA, 241 bp, Zea mays
  Clone ID: MRT4577_63699C.1
accatggatgaaaaaaaaactgtgttaaagagatccctgacttgctcactagggaatacatgggttgcgaaaagcatggagcctattgtgaccaatgaatcacgtataccgactgatattgcaggatggatatcaaaaagcagattaattatttgtgacagagctaaagacacatgaataccttcatgccgtgtatcaaatctatcccttgtgagcccattacatctccggtggattgacc

SEQ ID NO: 144972 - DNA, 138 bp, Zea mays
  Clone ID: MRT4577_6369C.1
aaaagtttgaagccgaagaaaaacgtatctaacatagcaaagcacgtgatgacttccttgcagtgtagctagaacgcattgcgcttagattatcaacgagacggccccaggcgactctcatcttggacgctgcctcct

SEQ ID NO: 144973 - DNA, 1599 bp, Zea mays
  unsure (1)..(1599): unsure at all n locations
  Clone ID: MRT4577_636C.1
ctgtggttaatgttccttcctgacccacatggtgtttatttgtagttacttgatgattgttgccgcacttgtgtgactgcattacttgttcttgcatcacttgttcactagtcactacacatgaacattgagataagagtatagttactaagaaagatgcaataaatgttctgtcctgtcttccatgctgcacctgtttcacattacaccagcacgttttaaacaatatacaaggattatgtcccacagtgctcatgaaggacataatggatgagaatattttatttcaacttctgctgttatgtctttctataatcttttaaactagtctcacttgctctatattcttaaaagctgctagcgatgtgtatcatctttattggttcttgacacctctaagctgcgtattttgtagtgtgatctggtggccacttggaaagcatgataaactaattagcattgatgaccgaaatatttttctttggaacgtagacatgtcaaaaaaaatagctaaggtgatctcacagggatcaactgacatgcttccaaatttacgtggtggagcttgggatccacacaatcataatttagttgctgcaatatctgattcatcacttcagttgtgggatctacgttctatggaaaaatcaactgcaattgaacatgcacatatacgggatgtggattataaccccaagaagcaaaacattgttgcaacagcagaagaggaatttggaattcgcttgtgggatctcagaatgcttaagtatcctctaaaagatctccctgggcactcacattggacatgggctgttcggcacaatcctgcgtatgatgagctgcttctgagtgctggaacagattcaactgtaaatttatggttggctaaagttagcagtgacgattctgaatctgatagcccttctggtttacccaatagacaagaagtaccattactcaactcatatactgactatgaagacagcatctatggtattgcatggagctcccatgatccatcattattcgcttctttgtcctatgatggaagggttgtcttggaatcagtcaagccctacttgcagagaaaatgaatcttgctggtctaacttttggattgtaagccaatggcagaaaaaacataataaggatgttgcagaaatctgatcctgcttgacatcaggtcttcaaccctcttgattgaagccagcaatggctccaaaacactcagatctagcttcagttgagatattacagcacagttgagattgtcagcagtttcctttcctgtatcttcaaattttgtccactaggatttcatgttcagttgctagaaatttggctgtgaagatctgatctgtatgttaataactgttgcccatctgtctgaaatagttttctatacttgattcttaggatgttgtatatttgaaaagtgttcacaaaaagatattgcggtatatgatgaggtggagttggactgaatttgtnaaaaaaaaaaaaaaaaaaaaaaaaaaaaggaaaaaaaaaaaaaaaaaaaaaaaaaaaaaaaaaaaaaaaaagggagaaaaaaaaaaaaaaaggggggggttccttttg

SEQ ID NO: 144974 - DNA, 388 bp, Zea mays
  unsure (1)..(388): unsure at all n locations
  Clone ID: MRT4577_63700C.1
gcggccgcgcacacgggcacgnggcaagctcgcaacgcgttttctccaccgatcccctgaccgactccggggcccttctgtgccggctgcctgcctaccacatcaaacagtgcgaccatacaccacattcacatgacggaccacgccatcctgctgctgccggcgctcgccgtcgtactgctctgctaccccctcgcgcaatgcgggcagtagaactacaacctcatgttcagctacggcgactcgctcacacacactctcaacctgctcgtgtccagcccgctcttcaaccacatagaaggccgctacctatacggcatgacctacttacacccacccaccgggcgtttcttcgaccgccgactcattgtcaaatttctaacccaag

SEQ ID NO: 144975 - DNA, 197 bp, Zea mays
  Clone ID: MRT4577_63701C.1
aaccgaggggataggccttaacttgcactgatcgcaacattctttaggcacaggccctaaggtggacagcatgagctcaaaagatcacactacagcggagaggctcggctcccaaagatgaccacacaatgggtgcaagtcccaggagtcacccaactgtacagggcttatcaagatcgcacattcaatgtggatag

SEQ ID NO: 144976 - DNA, 129 bp, Zea mays
  Clone ID: MRT4577_63702C.1
atgcactcaaagtaaaggtgaacaccgtgtttctgaggcttcgttctgtctgtcttggaggtcagatgggtacaagactcaaatagtgtgcccagggcaatatttacacaatgtgtcaagggtgggtgt

SEQ ID NO: 144977 - DNA, 1563 bp, Zea mays
  Clone ID: MRT4577_63703C.1
caactgcacaattggaccgttaattgtaggtatatatatcggcaatgcactattgtatcttgaaaaataaaacataatggtagatcttcctttcttttgtggataccaacccactaacaggtaatgattcctacaaacaatctctctcataactagtcttctttaccaaattcaccaaagcaatcccaattgtgggttacccaaacaatcctagcctaagccttaactcctacctcttttaacccatggctctctcttaccagcaacgcaagcccatccttcacctcaacgctcttctccgtgaccgctgcggcagccttctccacctcttgcttcctatacatccaggcctctgagggaggcgtcgtgatcaccctgacatcagtgccaccagcattgatctcaagcacttcaggcagcccgttcccacatccccttgacagccccacatccaccctcaccgcctgtgcgctacacactgcattgatccccactgtctgaattgtgtgccccatcaccatcctcttggccccggggatcatcccaagcaccccctccagcctcttgcagtcacaatcgaagccgtcggagaacctcctcagccagaccacggcgtcccggcctcgcacatactcgggcgccctggcattgtctccaccctcgccgcggatccactcgctgacctccgcattgatccgctccaggccgtactcgacgttggcctcgaggagccccccatggacgaataccgagtcgcccactacaagcacggtagggaggtcggccaggaaccggcgcgcaatgggcccgtcgggtcggagggcggcgaggcgggaccgcatcccgtcccagaactccggcttgacgccggggaaggacttgggcacgccgagaaaggggttcctcggctgcgggtcgaggtgctcgccgcagcggcgcttgatggcgagccccgcgcggtaccaccctgcccaggcggagaattcctgaaaaccctgcggcgtggcgaagcggaagtcgccggagacgttcatgacctcgtggttgccgaggatggggaggaacgcgcctccgcggctctctgcggagagggagaggcggcgaagtaggtataggaggcggagctcgtcgccgccgcggtcgaggatgtcgccgagctggacggcgagggtgggccccgcggcccatgaggaggaggcggagggggagtcgggggtgcaagacgggggcacgaggccggcgaggcggagcgcggagagggacttgggcaggtccccgtggaggtctccgatggcgacgagccgggatggggaagggaggaaggtggtcggagtcttcgggcgaggagggggcgaggaggaggacgggaaggtcgggaagaagatgccggacacggcaaagtccacgaacgcgtcggcgaaggcggatacggcagccgggaggtcgctgcaggcggggacggagggggacggggccggggccggggccgacgccatctttctctatttgtgctccggcagggattccggattcgtttttgcggcgtgcgcgggtcccggccgg

SEQ ID NO: 144978 - DNA, 542 bp, Zea mays
  unsure (1)..(542): unsure at all n locations
  Clone ID: MRT4577_63704C.1
actggacgcccttttttttttaaacttttaagcatttccacggactgaggatagatatgtctgacgacccaaacatacagaccacatactgtctgttatgactattcgaccaaaagactaggcgagccctaaaacgcgcactgcaacagaacaaggttaccagcatgccgggttaattaatacacatcccgcccataatatttacagaactgaagcacacctctcaggaacctaaggcaggggaaaagggcatcttatcaagaaactcacccaaaaaactgtttccaaggcccaataaagggatacccatgctgtagtccatgaccccntcctaatnttcacttaaatcgtgggggggggaggggcgaccactggtgctaactcctttcctccccataccaggaacctgcggtgcggatctattcgtgaacaaaactctaaattaacctcttcttctaattcctttcctgactctgggggtgggggggggggtccttgttggggttcttttaccaacactaataccttttgttcactgaatg

SEQ ID NO: 144979 - DNA, 295 bp, Zea mays
  Clone ID: MRT4577_63705C.1
tatgaacgagcaaggacgatgcacgcacgcgtacgctagctaggaattcggctcgaggggcgcatcgctcgaaggctggccaggctggttggtcacaagagctccgtggggggcccaaaaatagcgtactgcgtcccctgggacgagtcctacgactatctcgacagctccatcaactcgctcagcaagcacaagctatccggcatcctgtcagctgcgtacacgctggacgtctacttcaagaatgccacggagaagaacggggcgccaactccgtatacacagtctgcgccgt

SEQ ID NO: 144980 - DNA, 546 bp, Zea mays
  Clone ID: MRT4577_63706C.1
gagaagcaaaggaagagagattagaagaagagcaacggttcccctctttcctgagagaggatcgacgatgcatccaagaagcgcggccacggtgcggctctgccttgtatgccttgctctcctgctgctgacccgagatgtccgctccaggaatctcgtaggggcggtggtgcagaaggagaggcacaagcagagccatggcggccacggcggagccaccccggaaccgcccgttgaggaaggcagcgacgcaggtgccaagaggggacagctgcagcgtgatctgacgagatgggaggagatccacacggactacatctacacccaagacgtcaaacacccgtgacactatgagtcgctcgtgtttagtagtagtactagctcctggggtcgtttggacaagacggattagtctgggatttgtccttcagttttgggcctttgagccaaatcacaaactaatccctcctctgttagaagcatgtagtcagtggcgcactgtataattacttcagtctagctttggcacaccctttatttacttag

SEQ ID NO: 144981 - DNA, 226 bp, Zea mays
  Clone ID: MRT4577_63707C.1
cccacgcgtccgcggactcgttggatttttttaatttaatataaaagctaaaccagagcaggttttaaatattattgacccaacaatcttaacatacactacttagcacttcacaatcgaatatctcaatactcttatatacatcctcactctagcatctaaattatccatattcctatattactaacgactctatacacaatgctatttacactattaatcattt

SEQ ID NO: 144982 - DNA, 186 bp, Zea mays
  Clone ID: MRT4577_63708C.1
aacttgtgaaggtccatggtccagagacagttgcttctactttttctggaccctgtgccgtttcttgtaacagcacctaggccgggcccgttcttcctggcctgcccgcctctctcgtgcgggtggcgggcccctgctctttcttctgcgttctgcgtggtggctgtcctgcttgccctcttggtg

SEQ ID NO: 144983 - DNA, 321 bp, Zea mays
  unsure (1)..(321): unsure at all n locations
  Clone ID: MRT4577_63709C.1
ctcgagggcggcggntcccgtgctagacttctgctgcagcgcctccgacgccgccgccgcatctaacgcagctccctccgccgcagcccgaggcaagatgcctctccagaacgacattgacctgctcaacccgccggccgacctcgacaaggtcaagcacaagacacagagactcgcccagtccccccactcctacttcctggatgccaagcgccacccgcgctccaccataaccactgatttcccgcactcccacactgttgccgcgcgccctgacagccaaactgacctctgccacgccacaggaggaaaggcaaggca

SEQ ID NO: 144984 - DNA, 448 bp, Zea mays
  Clone ID: MRT4577_6370C.1
ccagactgtcatctctgcattggcatacttggtacattttcttgatgggtaccagcaatattggttgaggacagcctggggttttgataacgaagttagtttttattacatatgtggtaaactgcttaatcctttctttgttactactttcacctgtttttgcatgcctgatcgataaaaaatcatgccctgatttctatgatacctattgtattcatggattcttggaactcattaattgaatgggaattatttaagtttttaaattaatgtgaaaaatgatatgagtaaataataaggaaaagagcattaaaattatgtgttttttgtcagaataaaaatgcaattattgggagttaacgtgcaaggtgccatgaaaagttttgcttgcaacttaaacatctatccatggcctagattaatgagtgtttgctattcttacagaagt

SEQ ID NO: 144985 - DNA, 653 bp, Zea mays
  Clone ID: MRT4577_63710C.1
cgaggagacgtttttgcaccgtgccacctctgttgctgataattacaaagtcacaaacgcctgcattaacaacgcacaggggtcaccgaagcctatagcataagcattttcctagggaaagaagaaatcgactgaacaaagatcttaagatacactctgggccttgcactcatcatataaaccaacgatcttctgcgctcgaacaaactgtgtactctctgtccagacccaaggtagttttgacagacaccgatgaagatgattcctttgtctacaaactccttgtcacctcgaagcagaatgtgtgctgcatatacactaactggactaggaggatccgtgcccaccagaccctaaaggtgtaacagcatctcttgtttgttgtcagacgcctgatgcatcattggtgctcactgggcgttggaccaccacacaccctgcattaactagctggcctcctcgtcaatgaaaccttgctgcacgaatttctcgggagcgtggccaacaaatctttggctcttgcgagggcacggctactactcgaacatgaaggagccctttgtaacgtttaacaaacccttttggtttttctcaaaaatgcccttgatgctgggaccgcacttatactcatcccatgggatcattgcgcatta

SEQ ID NO: 144986 - DNA, 422 bp, Zea mays
  Clone ID: MRT4577_63711C.1
gggtttttaatatttataaataaacagtaattatatttgaataaatatctcaaaacatatttatctatactactctattaagaacataatgtaggcacctggtgctaccacaacttcaccctccatgctgacactctgggcccgccccacgcgccccgactggttctcccgtccctctttcagttactgcactgtggaccccagcgccaatgcagccagctactgcgcctgcttagcacccgaccccacccacgcagctaccacatcgtgaaaaaaaatgcagagcgagcactcgaatccacacctccagcttcggaaatttggggctaaccaccagaccacacgtgtcttagtgtttagaaataaacaataattatatttgaataaatatcttaatacctatttatatcggacgcctgggt

SEQ ID NO: 144987 - DNA, 312 bp, Zea mays
  unsure (1)..(312): unsure at all n locations
  Clone ID: MRT4577_63712C.1
cttctatcagtaccatcaatcatctttcatcttagtagtataggcaccaagtggggtctgcaacatcaattatctaactccaaaaaccatgaagctggtgcttgtggttcttgctttcattgctttannatcaagtgcctacttgtacacagacaggcggctgcagatgaggacaacttcatttgtctttagccacatcattttttcacatctctttttttcattatatcatatacattaacctccaccacttcttttccatttcttgttatctcacttttcaactagtttcctctctttttcataatcttt

SEQ ID NO: 144988 - DNA, 671 bp, Zea mays
  Clone ID: MRT4577_63713C.1
ctgaaaaatcgactttgaaccctaatgctaaggaattcaagctaaatcctaatgccaagagtttcactccgtcagcatctctgaggccaccacaccctacatcatctgatgcatcatattactatcctaataacatgccggcggtgccacttggacccggtttgcctgtgggcatggggttcccaccggcatatggcgcccagcctgtcatgtacaatactcaacctggagcatcaccgcacggttatatgcatcctgctggtccacaggagatgcaacaatacagaggaagaaacttttagatataccattctgaactgctcttagatggaagtcgctgcaatccccacaagtgggattttgaccagcaaaaaccgctattacaatggaaaaaactggtcctgttgtgttgctcggattggttggacaaaaaagcgcaccgactttgtgttgctcggattgcctggtcaaaatgctcttcattgtcctgtatcagtgttgctcggaagcaggttcactggaatttcatattatttttgtcagactattgatgttgtaaattgaattgcgggtcatctgttcgacccggaaatgacattcataaatgtgtgaggttgccccatgtaacatttatgtgttccttaacgttgttctgatgtaagatttggacg

SEQ ID NO: 144989 - DNA, 2909 bp, Zea mays
  Clone ID: MRT4577_63714C.1
cattgggtacctcgaggccggccgggccggtgggtcccgattcattcggatttccttccgccttccgacagcggctgtctcggcgacccaaccccagcctgaccccacctcccgccgccgccgccgccgccgccgcgccttcgtcgtcaggagaagggtcccggtggctgcgtctctctcccctgcccccctgctccacactcggttcacgcgtcggctcgctaccgcaggccctcgactcgtacgcccgtccccggcggcgatccggccggcaccgtaaccctaggactccgacggagcaggaatgatgagtcatgaacaacaaattgtccctcctagtaagggttctgtgaatgggttcccccatagaaaactggataaggagggcagtggaacgcaaagtagaataaatttggtgaggtcatcctctggtggttttactaattcagaaaatggcatcaaactagggcatggaagccattccagggaccggctaatctatgttctaacacaacttattgggcatcatgtggacgtgcatgtgaataacggctctataatctctggaattttccatgcaacaaaccctgacaaagactttggcgtcgtcttaaaaatggctcaggtcataaaggatggttctgccagaggacaaagatatcctgctgttcttgtaaagaaacctgagactatgataataccggcaagggagcttgtacaagtttttgccaaggacatagaacttggcggcgagctgccaaaagttcctggcaatgacaaaaggaaggacttgctgattgattctgctattacccgctatcattatctcgaagagagggaacttgagcgctgggcaccagatggaggagattcagagtgtattgaactggagaagtatgaccggaagggaaataggagctgggaccagtttgaaaccaatgcagcattatttggggtaaagactactttcaatgaagaaatttataccacaaagcttgagagaggtcctcacatgagagagcttgaaaagcatgcttcgagaatagctagagaaatagagggagaagataccagagatattcaccttgcagaggagagaggcttattcctgggtgatgacctggaccatgatgaagagataaaatattcagcagtgcgtagagacaccgataacagcaagtacaagccaccatttactaaggtcccaagcagtacatgccatgttgattcgtttaacaggacagtcaatattgatccgaatgattcactggcatgttcatcaacaatggacaaagaatcatcatcccacatatttgatgacactgatgcatctgccactatccatacaaatagcgttagccagccaacatctgattatctgtcagatagacccttgtccaatgatgaaaacaggttggacagaaagctgaacaaagagagtaatgaaaacatggataacagaaagttgcaacatgaggataatttacctgatggtgccagacctcttatttcggaagcgttggatgggcgatcctcaagttcacatgcatatgaaccgtctttttctggtcaaggattcaaatctccagaaacacccgattcgacagtgcctgtcaagcatccttctgcgatggaacctgtgacttcctctcaaagacctggcagctcaacatcgtcaacatcagagcgcattggtgcaaactcagccacgggtgctcctggcttgtcaccaagctcttcaataggatctcttaccgctgaaaaatcgactttgaaccctaatgctaaggaattcaagctaaatcctaatgccaagagtttcactccgtcagcatctctgaggccaccacaccctacatcatctgatgcatcatattactatcctaataacatgccggcgatgccacttggacccggtttgcctgtgggcatggggttcccaccggcatatggcgcccagcctgtcatgtacaatactcaacctggagcatcaccgcacggttacatgcatcctgctggtccacagtatgggcaacaaatgacgattggggggcagactcgtcctgtttattattatgcgcctgagatgcaacaatacagaggaagaaacttttagatataccattctgaactgctcttagatggaagtcgctgcaatccccacaagtgggattttgaccagcaaaaaccgctattacaatggaaaaaactggtcctgttgtgttgctcggattggttggacaaaaaagcgcaccgactttgtgttgctcggattgcctggtcaaaatgctcttcattgtcctgtatcagtgttgctcggaagcaggttcactggaatttcatattatttttgtcagactattgatgttgtaaattgaattgcgggtcatctgttcgacccggaaatgacattcataaatgtgtgaggttgccccatgtaacatttatgtgttccttaacgttgttctgatgtaagatttggacgaaatggatcaaattgctgacctatctgctcgtttatacccagctggagtagcaagcatggaggggacgtagagtcttactagcgtttgggatggagacctaaaaattgttagggcttacgtttataatttgcgaaccagggtggttataagattgttgccattatcgtgtagtcactggattgaaaggtgttggtgggcattgacatctgatgtggttcatgtgttggtaatggacggcggtattatagggaagtaggtagtgtttggtttaccatgggtaatggtatcgcaatggaagttaaaaagcggtggatttcaaatcaatgaataccattgcatgttttgcttggttgagttttgtaatacttttttattccaatacactgtttgttttggaaaccaatgtaacgtaatgaaattaag

SEQ ID NO: 144990 - DNA, 390 bp, Zea mays
  Clone ID: MRT4577_63715C.1
tgacgcgctctgctacctccacaccagctccgtaccgccgatcgtccactgcgacgtcaagcccagcaacgttctcctcggcgaggacatgagggcggtggtgggcgacttgggccttgcgaagctgctacatgagtccgggagccatgacacttgcaacgacacaagcacagttggcttgagaggcacggttgggtatatcccgccagagtacggcacgacagggaaggtgtccacgcacggcgacgtctacagctttgggatcacgctgctggagattttcaccgggaggtcaccgacggacgacgcgttcaaggacgggctgacgctaatggagttcgtggccgcgtcgttcccagacaagatcgagcaagtcctcgaccgggccct

SEQ ID NO: 144991 - DNA, 248 bp, Zea mays
  Clone ID: MRT4577_63716C.1
acgctcacgcgttctaaagctacttgttcagctatatgacctcagaagcaatgaacaagatgggcttgatgtaaatggagacctaatgaagcagctgcaagatacaaggtcagagaacgcgacttgtgtagtactgtaacgaaagcgtgcacactgtcgcaagtgtgaatgtgatctatccttataaacggctatttcagcgactgtacaacgtttcttatctgtaattgccataccatcatcatgtc

SEQ ID NO: 144992 - DNA, 414 bp, Zea mays
  Clone ID: MRT4577_63717C.1
cccacgcgtccgcccacgcgtccgcccacgcgtccgggctcccagttcttcatctgcaccgttgctacctcttggctcgacggcaatcacgtcatcttcggccaggtcgtcaagggcatggacgtcgtcaaggccatcgagaaggtggacacccgcaacggcttcacctacaaggtggtcaaagtcgctgactgctgacagctctgctagatctctctgatctggtatgttcggacaacctaccttcgtcatcgtctactactcctgcgtccattcctttggatctgaataatatggtggtaatctgaatggtggtattagtttatcatgtatcgctcgcagtataatatatcggtttaggtgatgatctttgaaaaataataaaattttgattcgaaacaacaacacaaactt

SEQ ID NO: 144993 - DNA, 2108 bp, Zea mays
  Clone ID: MRT4577_63718C.1
ctcaatgtctcatacactttgacggaccacagcagccatgctggcatgccgtcgcgagccgctatccgcatgaagcccccttccttctcggtgtccttaaccacggcgtcccagctccacgacgccatcgaccgcctcctatcgctcctacgcgccgacgcctcccacgcccccgccgctcgcgcgattgccgcggccgtcgcctcgctccggccgccctccactctcctgtccaaccgcatcctccatctcctctcctcccacccggccactctcccggacgcgctcgccctcctctcttctctcccaagcaccgatgtatgctcctacaacaccctcgtcgcagcgctcggccgatccccacgcggcctcgcctccgcgcgcgcgctgttcgaccgaatgcctcggagggaccacttctcttggtccgccatcgtctccgcccacgtgcgccacggccagcctcgcgccgcgctcgcgatctaccgccggatgctgcgggagccggggggctccggcgcggacaacgagttcaccgcgtccagcgcgctcgccgcggccacggccgcccggtgcgcgcgcgcggggagggagctgcactgccacgtggtcaggcgagggatcgacgcggatgccgtcgtctggagcgctctcgcagacatgtacgccaagttcgggcgcctggacgacgcgaggagcgtgttcgataggatgcctgttcgggacgtcgtgtcttggacggccatgctggacaggtattttgatgccgggcgcgatggcgaaggcttcaggctgtttgtgcgcatgatgaggagtggcattctacccaatgagttcacatacgccggggtactgcgtgcttgcgcagaattcacctccgagaagctcgggaagcaggtgcatggtcgaatggcaaagagcaggacaggggactcatgctttgcagggagtgcgcttgtgcacatgtactccaagtacggggacatgggaactgcaatgcgtgtctttagggggatgccaaagccggacttggtgtcgtggacggccatgatctctggctatgcgcagaatgggcagccagatgaggcattgcattgcttcgacatgttattgagctctggattcaggcctgatcatgtcaccttcgttggcgttctatctgcatgtgctcatgctggcctggtcgataaaggtctgggcatcttccattcgataaaggacaaatatggtattgagcacactgctgatcattatgcttgtgtaattgatctcctcagccggtcaggcctgtttgagcgagcagaagatatgatcaacacaatgcctgtaaagcctaacaagttcctatgggcgtccttgcttggtggctgccgtattcataagaatgtgcggcttgcatggtgggcagcagaagcactgtttgaaattgaacctgaaaatccagcaacatatgttactctagccaatatttatgcatccgttggtttgtttgatgaagttgagaatatgagacggaccatggaattaaggggcataactaaaatgccagcctcaagttggattgaagttgggacaagagtgcatgtgtttctggttggggataagtcgcatcctcaagctgaagaaatatatgcgcttctgaagaagctgtatgtgaaaatgagggaagaagggtatgtggcagacaccggatttgttctccatgatgtagaagacgagcagaagcagcaggacattggttatcacagcgagcggcttgctgttgcatttggaatcattgccactccgaagggttctcctatcaaggttttcaagaatctgcgcatttgtggggactgtcataccactattaagttaatatcaaagattgtgcaaagagagatcattgtcagggactctaataggttccatcacttcaagaacgggagttgttcttgcagggattattggtgatctgtgctgaatatacaagaaaattgttttgactttttaagactggaaatgactaaggtcaatgtacggaagtactgatattgtggcattatctgggaatttaacttttttgctgcacctatgcaaattgcaaaaaaaaaaaaaaaaaagcggcc

SEQ ID NO: 144994 - DNA, 266 bp, Zea mays
  Clone ID: MRT4577_63719C.1
cactagaggaaatatgcagaattgtgcctggtggtgctctagtgttttttcctagctacaagttgatggacaaattgcaagtgcgctggtctcagacaggtcaatgggcacggcttaatgctcaaaaacatgtgtttgttgagcctaagggaagtagtgaggaactggatcctgttttaaaagggtactatgacgcaatccttggtaaagctcctgtcaagaaaggcagatgtggttcaaaacaaatagcgaagattcgagtgaca

SEQ ID NO: 144995 - DNA, 299 bp, Zea mays
  Clone ID: MRT4577_6371C.1
cccgactaacccacagccagtgctgcagcaacagcaagaccatactataacaagcgagcaaatctggctccggagacggtggacatggcgctgcaccagctagtatcatgcatagcgcctgaatgatatggttaccggagcttcttagcagacaccacgggggggagatccatcatagccaacgcgaacccgcatgggggtgaaggtagacggctccttcacaggctgcctgcaataggtagaaccagactccagagagccccgtccccgggggaacctcccaaggccacctcccctgg

SEQ ID NO: 144996 - DNA, 349 bp, Zea mays
  Clone ID: MRT4577_63720C.1
attcggctcgagccccggtcagattgcaggtgttgcgatggattgcggtccccccatcccccactagcataatagctagccaagtactgtactacggattgctgatttccctgccccgtcatgataccttgcagcatggagtactggcctgacccactgcgggggatcaaggaagcatacagggtcttgaggctcgttgggctagctagcttacgtgattggcccaatgtacccagccttctggctatcccgcttcttcgccgacatgtgggcgctctttcccaaagaggaagagtacattgagtcgttcaagaaggctgggtttaaggatgtcaagctgaaaaggatc

SEQ ID NO: 144997 - DNA, 638 bp, Zea mays
  Clone ID: MRT4577_63721C.1
cattgggtacctcgaggccggccgggatctttcctcgcacacgacctcgcctgaggtcttcgaaacctccgtcacgtggagcctagtaatgtcccccttctgcagatagcacaccatgtgtacacaactaaaaagatgtctacataggctccctcggccccagagcatcgctatggctgctagaagattgcactgagatcttggtcccaagccatctccaggatcctcgcagacaaggtaatgacagaccaccgagccccttcatgaggtcactatgtctcgatgaccgtgctgatctacagtacatgccatttcgatactgtacgtcaaggcaagcccgtgccagatagaccaaggatggacaagactatatctacacgtgcctcaaggcatggatgccctcttccctgccactagacgcaatgagaactaacacattgatgttagcgagaccatgatacggttccaccttcacccagtcatgacataacttatgctagcgctgcagcctatgactacgtaggcgtggtccgcttgtgccaaaagggcatcctcgttatctgaactggtatgaatgacgcatcatacgttaccatgaacccgtaatctcaggcaactgactcgatatgacctcatct

SEQ ID NO: 144998 - DNA, 642 bp, Zea mays
  Clone ID: MRT4577_63722C.1
ctaccccctctcgttccctccacagacactacaaagaaatggaaacgttatgttcatatggttcttctattctatgaaatgtatgtacatagtacatacgattctcaaaagttgaaggtatttttttttacaacgtgcagggttcacggttgcttccatttgctacctgcagttttttccactaccatctgatgaaaatggtatgcttctaattctgtcctgattaaattctgcttaatcttctggtcatctttgctgatctcaaattatagtggatacttggttgggggtgtctatcctcggtttacttgaagttgtttcagtaatgtgaaaactatcaagcttggacttgaaagataaataatctcactcggtgtttatgtataatttctgaggtgccataggttcggtgagtggtggcagccatgctgtgcaatgaactaatcacccaatttttacaaaaggaagagtttcatttttatcaaaaaattggtataatgccctttaatataaacctaccgcagctggactaaatccctgaaaaatgtttttaactaaataattgggggctttgcgaaagcactcctagcctgcataaaaatgctaccgatcaggatcctttgctatctaccaaccgaaata

SEQ ID NO: 144999 - DNA, 659 bp, Zea mays
  Clone ID: MRT4577_63723C.1
ggccgcttttttttttttttttttctttttttttttttttttttaactgaaacctttttgtttattttttaacaaagcacaaaagaacaacaaacttgcgaattcgttacaggacggcaaaagaactaaaaatcgcaaaaagacagcggggccgaaaccagtatggaaacaacaaaaaggggcaccgtccaaaaccattctggttctagtcaaccggggcacagggcccgttacctaaggccattggcgaccacccaagatgggggggcacaaaaggaccttgggaccaacccaccgggggggggacaaatggtgtttcaggactaccccaccggggctggaaccccacgcggagcaggaccacgagacgggcttggtgaaccgaccggttggggcacccccggactaggcggaaaaaatggtcgacctggggaaaccggggctgggggtggaaaacagatcccccgccacgaacgccaagatacccgggaacgggcccccacaagcgggctcaaaagataccctggagggggcccaggaagcccgccttaagagcctgacagagaggcctacaaggggccccttcacggtgggaacccgggaggacatgccagggagctcgccggggggacacgaagaagcctaccgacaggcttggc

SEQ ID NO: 145000 - DNA, 2103 bp, Zea mays
  Clone ID: MRT4577_63724C.1
tttcgaggcctgagcgggagcatcgtgctataaataggtccctccgcctccgagtaccaccaaaccctagatctcgcaccggcggcagccatgtccaagccatggggtggcgtcggcgcgtgggcgctggatgccgagcgcgccgaggaggaggagcgcgagcaggtcctggccttcccggcgcccgagccacccgcggccgcgggcggcgccgccagcttcccgagcctccgcgaggcggcctctgctggcggcaagggcaaatcgaagaagaagaacaagggcaccacgctgtccctgtccgagttcaccaccttcggcgcggccgcggcccagcggcgcgcggcgcccgtcgagcccaagggcctgacccacgaggagatgatgctgctgcccacgggcccccgggaacgctcggccgaggagctggaccgctctcgcgggttccgctcctacggcggcggcggcggcttcggcgcaggcgctggaggggagcgccgcggcgggttcgacgacgagggccgccgcgggccgggcagaagctccgatcttgacatgacctcccgagcggacgaggctgacgactggggcgccactaagaagttcaccccggctcccgccgactccggccgccgcgataggttcggtgggccttcccctctcggccgcgctgatgatattgacgactggtcgcgcgacaagaagccgctcccggcgcgctaccccagccttggttctgcaggtggcttccgtgactcgccgggcttccgcgactcatcagcttcttctgatgctgaccgttgggtccgtggagccacccctatgccacacaacggccagggggcgggggagaggccacgcatcgtccttaatccacctaaacgtgacccgtcagctgcctctaccccacctgctgaggtggctcgcaaccggccaagcccttttggggctgcaaggccccgggaggatgtgctggctgagaagggggtggattggaagaagtttgagaatgagattgagcagaagaccagccgccctaccagttcgcactccagcaggccgaatagtgctcattcctcccgccctgggagccctgggtcacaggtttcggccgttgggagtgaaggagcaccgagggcacggccaaaggttaacccatttggtgatgccaagccaagagaagtggtgttgcaggagaaagggaaagactggaggaagattgatgttgagctcgagcatcgtgctataaataggccggagtctgatgaagaaagaaatttgaaagaagaaatcaacctcctgaaggtggatcttaaagaaatcgagggaaagatgagtaatggttctgagcagacatcggtagatgcaaaagatttgtctgagaagatatctatgttggaaagccagcttgagcagctttcaagggagttggatgacaagattcgatttgggcaaaggccacgttctggtgcaggcagggttacagcacttgcacccactagtttaggggaggaaccacaggctacagtggtggacagaccacgttctcgtggtggtatggaaccacccccaaggcaggaagaaagatggggatttcaaggaagcagagaaaggggctcgtttggtggaagcagaaattcagacaggccaatggcaaggcagagatggtgaaattgggacaacaagcatctcttagggacatttctggatcccagtccctttttttgttctgaaaagatgggcaaaataagtcgtacttatttgtttgtcgtgtttgcttggtctagaagattgttgaggatggagataactccacatgaagttattggtttgtcaactctatgccgtaggatgttttgcatttccctttttgccatctaccatgtcaaaacgatatcttagcaacctccgatactaactgttatgcttactggattccagttcagcatatgtcactagttgattatttgtgcactgcttagtggaaaccttggatttgcacttttactgatgctatgtcacctttctgttagtgttttttttaaaaaaaaaaaaaaaaaaaaaaaaaaaaaaaaagggaagccgctcgcgatctagaactag

SEQ ID NO: 145001 - DNA, 893 bp, Zea mays
  Clone ID: MRT4577_63725C.1
ggcacgagcaaggttaacccatttggtgatgccaagccaagagaagtggtgttgcaggagaaagggaaagactggaggaaaattgatgttgagctggagcatcgtgctataaataggccggagtctgatgaagaaagaaatttgaaagaagaaatcaacctcctgaaggtggatcttaaagaaatcgagggaaagatgagtaatggttctgagcagacatcggtagatgcaaaagatttgtctgagaagatatctatgttggaaagccagcttgagcagctttcaagggagttggatgacaagattcgatttgggcaaaggccacgttctggtgcaggcagggttacaacacttgcacccactagtttaggggaggaaccacaggctacagtggtggacagaccacgttctcgtggtggtatggaaccacccccaaggcaggaagaaagatggggatttcaaggaagccgagaaaggggctcgtttggtggaagcagaaattcagacaggccaatggcaagacagagatggtgaagttgggacaacaagcatctcttagggacacttctggatcgcagtcccttttttgttctgaaaggatgggcaaaaataagtcgttttctgtttgtcgtgtttgtttggtcttagaagattgttgagggtggagataactccacatgaagctattggttgtcaagtctgtatgccgtaggatgctttacatttccctttttgccgtcttccatgtcaaaacaatatctggcaacctccgatactaactgttattcatgggtcactgaattccggatcagcttttgtcataggtcgtttatttcagcattgagtaatggaaaccttgaatttgcacttttactaaaaaaaaaaaaaaaaaa

SEQ ID NO: 145002 - DNA, 676 bp, Zea mays
  Clone ID: MRT4577_63726C.1
gtaccggcgccctccctcgagtttttttttttttttttttttttttttttttttttttttttttttttttttttttttttttttttggggaaaaaagcccctttaatcccttcccttaccaactaaaaaaaaaaaaacctggggggttttttttttccccccctggggccccttaacggaaaaaaaaacccaccgggccttgggggggcccccttgggcccaaaacaaagggttaagggtttcccagggccggttcccttgggaccgggaaccaacttgggaagcccttaggggaataaaaaaaagggggccaaagaaaaaacctctggtttttagaaggggcccaatggggaaaaccggggggaataagttaaaaaacccccccaggccctggttaaaagccaatctttccaaaaaaacccctaacccccgatttggaaaaaccaccccccttttgtttggaaggcgggcggacttaaaaaagggccttggggttgggacccccggcgggggggcccaaaaaaggacaaaaaggggtcccccttttacaaaacccccaagaaggacctcccaggggccctttaacccaagggggggggccctttttaatattttcccagtaaacgggggggagaacaccccccccccggggggaaaaaccaaacgggggaggggg

SEQ ID NO: 145003 - DNA, 508 bp, Zea mays
  Clone ID: MRT4577_63727C.1
agacttccgcacaacctccacaacccgaaacactctccgacgatcggcttcggacaatagaagcaaatcaaagatgttatatcggcttcgctcctgatcaagcccgagcaaggaggctgcgtaccaccatgtggagacgcacatcatcatcatgaacacctgcttctacgtcatccgcgccacccctgacatcctccatatcctcgcccgtgacaacgacttccacgaactcaagttcgatctgtacgtccgtccgctgctgcaccacctccacagtggctacgaagggaaccggtactgcgaggccactgcaaggtaatatgcaggtagcgagtacagtgcctgcttacaccccttggctgctgcaagcgtaatgataaactgacaatgtggtatcaactgtgttgtgctgggaccagcatttcgtgattgcctatctggatgtactaatcattgtgtgcagtggtgcatttacagacatgttatcattcaacaatgttctgagccc

SEQ ID NO: 145004 - DNA, 575 bp, Zea mays
  Clone ID: MRT4577_63728C.1
caactcggcggcattagcccacgggcccgtcgtcctcaggtcttgcgacacctcgtacaccccccgaaacccaactacacccagggccaactggacgctaccttgcgcaactcgaccacgatcacagctgcccctttacccagaggaacgcttacccggacctttagcccactggagtgagaacttacctacacagacaggtcctacgggatatgacctaccttaagataaagaccctttagaagttgaagaccgacgatacggtcacatagaaggagtttaagacgactctcgtgaacaaggttgaacagatgctctagaacgtgacgctcaagatgaacggcacccaggtttccacgaagttaacattcctctaacccttaaaggactaggtcctttgttagactctaagcgacatctacgaggaaacccttatgcaggtattacacttgaacgaatagtacttccgaacaaccaaggtggactttgacacccttctcattgtggagacgacggtgcaggtgctgacactccaacaccctctgctaaagagtttgatgcacgtgaaactccca

SEQ ID NO: 145005 - DNA, 241 bp, Zea mays
  Clone ID: MRT4577_63729C.1
ggccgtggcgcccacgctgcgcgcctcggtgctggccgcgctgcccccgtccgaccgctgggtggtcttcgtggggccctacgagcaccactccaacctgctcacctggcgggagagcctcgcggaggtggtggaggtcggtctgcccgcccctgattgcatcggttgtcctgggcttgtgaaaacccaatttttcaaccctatagtattcaacatgtaatgtgagggggcattttatctt

SEQ ID NO: 145006 - DNA, 519 bp, Zea mays
  Clone ID: MRT4577_6372C.1
atggaggagaaacgaaacgagagattggcttgctttcgaaaaaccaagaatggtgtgatcaaacagataggtggggcaagcacgtccagcaagaaggttcaaggagaattgcagggtaagcgtgtagaaaatctttcatatgcgcctagatatagcagagcagctgcgcataatgatgtaaaccaaactgttaatgagaggagtggggattctgtaatgaactttaacctacagcagccatattatcagagtatggcatatgggccatctattccacctatagggaatatgatcccacaaggatttgttccaaatgattacaggattggggagcagaaatcactgttatcagcatcgggagtcacacatacagcatgtgagggtgagagatctgagggtgttagagaacaattggcaaggactctcaaggaatttggttttgagcccaaagggcatactaggtcatataggaagccctatcctgaattttttgacactgccatatcctcgaggttttag

SEQ ID NO: 145007 - DNA, 706 bp, Zea mays
  Clone ID: MRT4577_63730C.1
ccgggatttaggtgacactggcgaaccggccgggacaggttgcagcgcttcgaccctcctccggagtaatccacagcagcggtgggagcaacagggacggtggagacatggaggagccgctaccgaagcccgccccctcggcagccgcggaggaggtggcggagcggttcaggtcgctcgtcgaccccgatgatgtcgcctccatcaggcagacgcagcacctcataatggggcgattgcaagatagcaatgcagttctcacacattttaatgagtattccgaacgatgctttgtagaagtgtctggtgattttgctagtaaaactcgccttctcaagtctatgaaggctgatctcgaccatattttcacaaagctaagagagatgaaagctaggctagcagctacctatccagacgctttccctaatggtgcaatgtcaaagacgatggaccagagaccagaccttgaaagtcctttagattagtgcgtctaacatcaaaattccgcatattagtgacgacatctgttgtcataccaaagatttatttaattcctcattaggcttgaagcgacatatatctgttgccaaaaaaaaaaaaacgagtgacctgtgcttccgcatctctgtgtattagaactgggcttaaatgcttaatatatcatcatctttgttgtgttgaaaaaaaaaaaaaaaaaagacaccta

SEQ ID NO: 145008 - DNA, 327 bp, Zea mays
  Clone ID: MRT4577_63731C.1
caccatgtggacctgctggggagtacagaatacttactgacgactgctgactaaatggagagcagacccactatgcttgatggagctgatatagagcaagctcctgcgggagggttctggcgtaggtcccagctgcaggaaaactcagagacggtgcagaagcacataggaacactggaggcagagcgcacccatggcgaaaggcacgctatcctcaattcttggagtaatagaatcaggggaatggaggactgcagtgtatgccgatacaaactgccttgacagtgctacgtggtaccacactgcgatggggtatggacaagaacg

SEQ ID NO: 145009 - DNA, 277 bp, Zea mays
  Clone ID: MRT4577_63732C.1
catatatctagaagtaatactacttaaataatccttatttctttaatttcttagctctatagctagaaacatgttttttggcaactacaaacaattttcgagctatacagctaacacccctcttgtttggcttaaccgatagcgataggctcattggtgagggtggcaccaactagccacatgtcaacactgagagggccacctacagtcttaagcgcctcatcttgcgagagtttcatgattaggaagtccacatggacatgcaaccttgcccctt

SEQ ID NO: 145010 - DNA, 241 bp, Zea mays
  Clone ID: MRT4577_63733C.1
ttggtttttgtgtactaacatgttgggcggagtgttagaatgagaggaagggcaattgaaaaagagtggctcgtagcaaccaagactctgctcagtctgggtgcaccggactgtccggtggtgcaccgtactgcgtccggtgcgcccacctgtaaacgcttacctagctattctacggactttctcccaatcttacgtattacattcaccttgctgtccgttagatcaccgcactttccat

SEQ ID NO: 145011 - DNA, 184 bp, Zea mays
  Clone ID: MRT4577_63734C.1
ggaaaaccggccgacccacgcgtcgacaatctacaacaggtcaaccaatattgtttggcaacacacaaccaggggggatgttttctcaacatgctactcaaaagcgttgcaatctgacagacacaataccacataatgtcggttgaccactcatactccaaataatccatgcacacaatgacat

SEQ ID NO: 145012 - DNA, 393 bp, Zea mays
  Clone ID: MRT4577_63735C.1
agcacgaacttgagtggatcctgcgtggctttgggcagaatttcagagaccaaggaagaaatggccaagctaaaatcacagggacgtacgtatgcagagaaggctggggatccgaatttcggcgcacctttcctggattgaagcttgcggcggcaattggagccgcgagcacagtgaaggtcacgaggcacaggccgccgaggcggaggaagaaggaccctgggctcagctccgcccacgagtagagggcgctatccttgagagcagagtactcgttcacctgcaccaaaacaaaaacaaaaaaaaaaaaacgtttggaaatatgaaataatgtccacaaatcagtcatctgaattactagacatagcatctggggttaccggtctttgctcg

SEQ ID NO: 145013 - DNA, 191 bp, Zea mays
  unsure (1)..(191): unsure at all n locations
  Clone ID: MRT4577_63736C.1
cctcgagggccggccgggatgagtgtctctgtcatttcgctgatcaacagtgtgcattaatccaagaacagtgattgctctgtcatccatgtcttcaaagttggaactccatgactgaagctacgtcttcaattcaacggacaagccaatntccaggaggccagctcgttccantcagcgttcccccccgc

SEQ ID NO: 145014 - DNA, 463 bp, Zea mays
  Clone ID: MRT4577_63737C.1
caatgtttcatgcatcatcataacccatttgaaatttgcttatttttttaccaagctaatttattttattactacttgaccatacctgtccgtatgttgtttcaggaatttacagagaattacttaacagggccttcgccatcgttccttcttccttggagaattgactgctttgcaacagatgtgagatagatttaaaacttaaattactccatgatctggataacatcgaaacctaaacctaattcttctcccttcatcaacacacaaggtcgctttctggcaatgcattatcaggaagtattcctaaggagctggggaaccttgtcaatctcataatcctgtaagaaatggactttgtagtgtcatgacctatctgataagaaatatagatttacaaaaaacgtgtcctcaatttaactcacgtgcatgtacatatcacaactattcaggtgtgtaatca

SEQ ID NO: 145015 - DNA, 141 bp, Zea mays
  Clone ID: MRT4577_63738C.1
gtcacagaggtgatacgatcctgtgctgcaaaagtcaacaaaaatctctcaatcacttcaccaccaccaggccctgcaaagaagccaagggtgaaacagtcattcgtgctgaccaccgatcagatcatacatcagtttgga

SEQ ID NO: 145016 - DNA, 518 bp, Zea mays
  Clone ID: MRT4577_63739C.1
aaatccgtcgagcagaaccaatccgtcacgactccacgagcactcgagcagggcaacacagattcgcgcagcccacctcgtcgagcattccccatcagatctgatcgaatccggcggcggcggcgatggcggcggagaagccggccccggcgaaggtgctctactgcggcgtctgcggcctccccgcggagtactgcgagttcggccccgacttcgagcgctgcaagccgtggctccgcgcccacgcgcccagagtctaccccgacgagctcgtggcctcctcctccggtggcgatgataaggacgtgggcaaggtcggcgagcgcctccagggcgtcagcatctccaccgccgacggctccacaagcgcagggggtgcttcggcatccaagactgaagaggtgaaacgactgccgggtggtaagctcaagaaaaaggacaagcaagaggttattattgagaagattgtccgcaacaagcgcaagtgtgtactgtggtgaaaggcctggatttgtttg

SEQ ID NO: 145017 - DNA, 320 bp, Zea mays
  Clone ID: MRT4577_6373C.1
attcggctcgagcttgatcctcctcgacagtattctttccaccccgaaacgtctccttgtcgagcccctccacctgcgagcaccgagtgaagccttggtctggcagtgcccaatcttcaaggtggtgttgttgaggatggtcacccacccgctccttaacatggtctacctgtctgtgcgattgcctactcgatctgtacatctgcccgatgctggtttgcttctgatgctacaagaaacttgggctgcaatgggggttcgagcatctaattccgtgcctcacgcatactcgcttgccgctttcgctgccaggttgagtt

SEQ ID NO: 145018 - DNA, 537 bp, Zea mays
  Clone ID: MRT4577_63740C.1
ctcacgtatggtttagcctagggtgtcagcggcgccgaaacagcacatggatctgtacatctctgtcttggtcgcagtcgtgcaggccgaggacgcggcgaagctctcgaaccggttgacctaccactatacctaggacaacgatctctcgatcaacgactacctgaatgactatgtggctaagaatgcgacattcctggcgaacttcgtggcgcgctactccaagaagtacttcaagaaggcgcagcgcacggtgcactagcgcatcaccaactgcctcatgatgtacgtgctcatcaacggccacaacgtcatggacaaggtcatgatcaagcacatcatgaagatcatccagctgatcactgacgtcaatactatccacgaggtcatgcacgccattatcaacagcagactacacgaggatgccacccaggttgccactgctgttgttgctagaaggcatgctagaaatatctcacccgatatatgggtgaaccaaacgatgtacctggtcatcaatgttgtcagcgagagcgc

SEQ ID NO: 145019 - DNA, 320 bp, Zea mays
  Clone ID: MRT4577_63741C.1
cgtccgcgtgcaggtgcataacgagttggtgagacatacagtggacacatgatgccaaatgtggacttgacattttggctgaattgggccagcgctggggaaaagcgggatgatactcctgaatatactatttttgtaggggattaggatgctgatgatacagattacttgctacatgagacattcagggatcattatccctatgtcaagggggcagaagctgtgattgatcaattgacactgcttacacagggtgatggatttgtcatatacggtgaccctacagagaaggcttgtgcaaggaccgtgatgaatggcat

SEQ ID NO: 145020 - DNA, 239 bp, Zea mays
  Clone ID: MRT4577_63742C.1
ggacaagaagattcacgtgtacggctattccatggcctatggtcctgcccagcacgccatttcaactgagaaaatcaaagccaagtaccccgactacgaggtcacctgggctaacgacggctactgagcactcccagcccggggcctgctgcctccagcagccacttcagagcccccgcctttgcctgcactcctcttgcaggggctggcctgcctgctcctgcggcaagctctggtga

SEQ ID NO: 145021 - DNA, 213 bp, Zea mays
  Clone ID: MRT4577_63743C.1
cccagccactgtggaggaggccaacaccgagtcgatgccgggctatacggacaagatcaggtccgcggctgccggcacaacggagtacggcaagcagctggcgagcaccgtgtacgagaaggtcgccagcgtccgcacagccgtggcgggcaaggttcagcaagccacgcagtcggcccgcacggcgactcccggggtccgcgcgcaccggga

SEQ ID NO: 145022 - DNA, 423 bp, Zea mays
  Clone ID: MRT4577_63744C.1
attcgactctcgagaacgaatatctcgagctctctgatcgatgatcaacgtatcaaatgtcatacctgaaagtgaattgcaaaatcccacggaccatccagccatggaacgcgagctgaacacgaatccttctggcgaaaagcacgacagcctgggtgtcacggcatcacaattcactccactcatcttttcacgaatacaacctctaaaatgtcccccactcgccaggagcaacagcacctgcacccatgaaccccaccacagccgacagcaagaggaacaactgtgcggccgtacgaaaccgagctgcccgcagcaacaacacatggacacggaccagtcacggccgcactgcagttccccgtactgcgaatatcacgctaccctgagaagggccgatactcgcagaccgcgtgcactggc

SEQ ID NO: 145023 - DNA, 755 bp, Zea mays
  Clone ID: MRT4577_63745C.1
gggtacctcgaggccggccgggcttggggtgacgagcaccacaaggtccgcccaccccttccttagccttgcttgctgttgtagtgttctgcgaaaccgagcacccaaacggccaaaccccaacttaagctatttgtattcggatctaatatagctacaattgtatacagccattgtgtctactaatttcggttttcgttttaaaaattatgcggctgttctttactggatcggccccagtattcgtgctgctttggtctttgcgtcctggagcattaatttcccttctgatttgggtagaggatgatgcttctcgccaagctcggggcgccgagcgttccaggttgtgtcatggacagaaggaaactgctgttggtccctgcgattagtatggccattgcctcctttcagtacacttttgtcaagggaatagcaaaagctgaatttgctgatatgcctgcacttcgcggtaaagattatggaaagacaaaaatgcggtatccagattacactgaaacggaatcaggcctccagtacaaggacttgcgggttggtgatggcccttctccaaaaaaaggggagactgttgttgttgattgggatggctatacaattgggtactatggtcgtatctttgaagctcgaaacaagaccaaaggaggttcatttgagggtggtgacaaagacttcttcaagttcaaagttggatcaggacaggtcataccagcttttgaggaggctatatcaggcatgga

SEQ ID NO: 145024 - DNA, 1454 bp, Zea mays
  Clone ID: MRT4577_63746C.1
cccacgcgtccccggacccggacggcgtgggtccacaaggtccgcatacccctttcccccgcgccctttatccctgcagcaacgacttggggtgacgagcaccacaagtattcgtgctgctttggtctttgcgtcctggagcattaatttcccttctgatttgggtagaggatgatgcttctcgccaagctcggggcgccgagcgttccagggaagcgtcgagttgaagaagatgctataagttgcagaatagaaacataccatggttgtgtcatggacagaaggaaactgctgttggtccctgcgattagtatggccattgcctcctttcagtacacttttgtcaagggaatagcaaaagctgaatttgctgatatgcctgcacttcgcggtaaagattatggaaagacaaaaatgcggtatccagattacactgaaacggaatcaggcctccagtacaaggacttgcgggttggtgatggcccttctccaaaaaaaggggagactgttgttgttgattgggatggctatacaattgggtactatggtcgtatctttgaagctcgaaacaagaccaaaggaggttcatttgagggtggtgacaaagacttcttcaagttcaaagttggatcaggacaggtcataccagcttttgaggaggctatatcaggcatggccccaggaggtgttaggaggatcattgtaccaccggatcttggatacccagataatgactacaacaagttgggtccaaaaccaacgacattctcgggacaaagagctcttgattttgttctacgtaatcaaggcttaatagataaaactctcctgtttgacatcgagcttctcaagataattccaaatcagtagtgtgagattctaatgattacctttgaagaaaaaagctcatgttattcaggtccgtcgaagatcagcagtaaatgtatgcaattgaatatgaaaatatttttttaggcatacgcacatacaacatgatgtgaacacatctacctacatctccattaactacgcctcttttaaaagatgccattgtgtgcatctgcggtttctacagaagctctattagatacgtctgtgatcatacctcgactgctgagcaaatagagaatgaccaaatggcgaattgttgaaatgaaggcattctagttggaaatgttgtaaataccccaaatattgcctgtctgtcgtaatagttcatttgggacgtctggggggtgcatggtttcttttggtgattggtcgccccagacaaatcagaactctctactttaccagaaggtaccatcgccgcgaccactcaatccagttttagtgaatgttcaatatgttttagtaaataatgtaaaaacggctttttattgctccaaatatgtaattcaggtttctaattttaaatcccatttaagaaatattttcgaaaaaaaaaaaaaaaa

SEQ ID NO: 145025 - DNA, 607 bp, Zea mays
  Clone ID: MRT4577_63747C.1
aaaaaaaaaaaaaaaaaggagatatcagttttagtgcacccgcattccgagacagtgacaaaggggtttgtttgaaaattattcaggttttgggtgggattctggtgtgtgttgagggattaaagaggatatcatttctttctgcaacttaggccctgtttggaaacacctagtttttaagaaactgttttatagaaattgaggtcgttccaaacatactagtttatgactcagtttatagaaattagatgctcagtttttttaaaaaaccaataagctggcctcttctagcttaaagataaaaactggtttcttaaaaactgggttgcttccaaacagggccttagtcacattcttctgtttataagacatgctttgcagctacagtttagttcatcctgtttgcagcatttacggttgttcatttgatcttgcactggctgtactgctcaattaattagcttgtaaatgagaaactgccatggttggtttgcggtttcgttgaaaaaatattcaggtttttggatgctattccgttctagagcttccagaatccaaggagatattgttttccctgcatcccctgtttggactataagacgtactt

SEQ ID NO: 145026 - DNA, 399 bp, Zea mays
  Clone ID: MRT4577_63748C.1
gatcggtaatttatggcgggggttatatttttaaattttgggcatgggcttatttcatgtatattattttgatgtttaatcaaacccaaaaattataaaattatacgactatgaaaaaacaaccgagaagcaaaattaacggtacattctgagagagaacgagggggtaaaactttgttcgtccttttgcccagtaggggaaaatggccaaaaataaaaaaaactccccttacattgttaaaaaaccccaaaaaggaagagcggagttgtgtttgaaaaaaacacaaacggggaaaacatgccggtaaaaaaaactacttgggtgccccacaaccttgaaaaacatcaccaccccggtaaaaattccaaaagttccacctttttgacgtcccccagaag

SEQ ID NO: 145027 - DNA, 270 bp, Zea mays
  Clone ID: MRT4577_63749C.1
ggggggggcacttaaataaatggaaaaccctgatgggaacaaggaaaatggaaagacacatgtttaaaacaaaaccacgggatgggggggggtttaaggggaatcttgaacttggaggaccgggcaaccgaattggggggggacccccccaaaaatgtccaaaaattaaataaagcaggcccccccccaaaaaaaggaaccaacagggggggggagccgcaccaggtagggaccctaaaaaaaaggaaggaaacagggctttggggaaaa

SEQ ID NO: 145028 - DNA, 934 bp, Zea mays
  unsure (1)..(934): unsure at all n locations
  Clone ID: MRT4577_6374C.1
gtccggaaacccccgggntcgacccacgccgtccgcccacgtcgtccgctaggacccacaggccggaccgaaccctccttttttcttcacacctcttcagaatggcttctagcaagctctttgcggttggcctcaccgtcttactaagcattattggactgtgcaatgctattagggtggtaaaccacgccaccgcagatggacaaggcggtggaggtggtggaggcggcgggagcggaaccagctatggctccggatccggctccggctacggcgatgccgaggcctatgacggcagtgcccagtccccaacctctggccacgcatatggcagtggatccggggacggtggtggcgtttggcaaggtgacgacgagtgcgcgtccggttacggggcgggcggcgcatccggtgaaggccatggcgactcaggtaactccaacaccgatggcgctgcgaatgcgagcggagctggcggcgggggcggttctggtgggagcaatgggaatggcagcggatctggtggcggcagtggagttggagaaggcgaaggcgataactatggtccctatggttcgagctacgcaaatagcggtggcgccggaaggggaagcggaggcggtcgtaatggtggattcggcggcggttccggtggtggagcggggagcagtggtggtgccgcgtcaggttatgatgatggcagctacaacggatcaacaccttaattatgttcatttgtttgtaccacactgtcaagcaaccgacacgtactgatagggtttttctgtgcttgtgaaataatttggcctttctgagcgatgcagaagtttgttctactcatgtaataagccactgccatttctctgtatacgccatgtttgggctatagatgtcggttagtagacgttcttttgctatcaatcggtgtcatttc

SEQ ID NO: 145029 - DNA, 192 bp, Zea mays
  Clone ID: MRT4577_63750C.1
ggggccggcccgacggacacgaggaccttgccgcgctagagagaggcatacctactccttgcaataactgctctcaggcgtaaacccaagcttggctagaggagcctggaaacttatccacctggacgcttgaggttatcgaagtgcttgtcgttactcagggccttgatgaggccttgaggagcttgccgt

SEQ ID NO: 145030 - DNA, 253 bp, Zea mays
  Clone ID: MRT4577_63751C.1
catatacactaactcccattacgttttaaataacacatctgcccacaacggaagtgtccaatctaaaagattggactgcctacaaacagctttctcttcaactcatactccatgaaccaagtgtacccatacaatctattccaacaaatttcagactcttcactttactcctctctttcacaagaacccgacagcaaaattacctgtcaaaccttatacaaaacgaactacattattctttttcactaaatca

SEQ ID NO: 145031 - DNA, 225 bp, Zea mays
  Clone ID: MRT4577_63752C.1
gcggttggcttttccttccccttcggttcaggttcggattcacgaggttctccggtgttccgtttcgtgggtgagcggatcgagattgcggcatcagatgttgagtaccgttgattaagtacgtggtcttgtctggggcacagacgaacactctcttcacaaagtctttatcacctacagctaggttcttgagatcaataacattcttaattgggagacagcata

SEQ ID NO: 145032 - DNA, 256 bp, Zea mays
  Clone ID: MRT4577_63753C.1
ttaggcacggacgttctatcaagttatgggctttgagctctacccatgaccagagaacactcaataacatcgcatatagttctacgtttactctttctgcagggaagcgacaatcaggaaggtttagcatgaaatatcccagtcaaggatatgcatgttttttcacatgaaacaaaactatttacattactagcagaactgatatccgtctagaatgctcatcccacaccctaaatagaatcaaaaaatgaggttc

SEQ ID NO: 145033 - DNA, 432 bp, Zea mays
  Clone ID: MRT4577_63754C.1
ctatccggagtattgggtactcctgcaggccggtcgagggtcttaggctcttcatagatctaactaccgcccctaccccgatgccctccttcacctcttcacccgccaacgctggcaaatcgctgttccagggatgccacaagttcctaggaaaggcgggtaagatgctgggacccggcgcctccacccagtaccgaaccaccataccctgccgcgcttcaatgcaccgctacagtgcccgtccagcgggacttaccaccgaaacgagggcgtcacgcccacatcctaatcttacacagtctaccacatcatagcacctcacccggaatcacagccgctaaccgttggcccgtgcatctcaccctgctccgcccccccgacctccaccgctacatggccaccaaaacccttgacctccccgaggacttcctc

SEQ ID NO: 145034 - DNA, 714 bp, Zea mays
  Clone ID: MRT4577_63755C.1
cattgggtacctcgaggccggccgggaggaagacagccgtctattgaacgacatctgttgctagcagtcatcggtgacttggaacctacattgatctgatgactgccatttgcttctgtctatgagcagaccagattcttctaacaccccctcccagttcctcccatcagagataatcaatatgagatgaggtccgcccagcacctccgacctgaatcgtgagacagagctctgatcttccctctgggtctctgatgtgtacctctataggagggtcgctgggctgctcctggtatcaatactctggttcactcaacttgatgacaccttcctcgctgactatcccaactgggaacttcataggcatctttggtatctggtgggtctcgcaccacgatgtgtaatgagtctatctgctcccccatctacttttccatggagctgcttctccctgcatcctgtacgtgatcatgggtaatcattggaagaacctccatctagaactgtacccactccgccaccgataatgactacgttattgaaaactctcattcacaatggaacatcgcttctagaacgatgttactgatccgaacgacggaggttgcctacatgcgctatatgactggatatgctataccgggagctgtccgagatcgccgagaaggccaagagacgagctgagatctcaaggtttaggtacctcacaccctc

SEQ ID NO: 145035 - DNA, 1353 bp, Zea mays
  Clone ID: MRT4577_63756C.1
tgggaccctcgaggccggccgggaagaagccggacgcgtgggcgagcacgcaccagcatccttggcagcgatctgcttgcttctcccagctagcgcgcgcggccaagctaggggatccatcagatatccacgccggccatggccgccgccgcctccaccacgtcgaggaccaactcgcgggtgaactactcgaacgagatccacgacctctccaccgtgcagagcggctccgccgtccccaccttgttctacccggacaagtccatcgccgacatcttcccgccgcaccttgggaagaaggtgatctcggaggtggtggcgacgttccttctggtgttcgtcacctgcggggcggcgtccatctacggcgaagacaacaggcgcatctcgcagctggggcagtcggtggccggcgggctcatcgtcaccgtcatgatctacgccaccggccacatctccggcgcgcacatgaaccccgccgtcacgctctccttcgcatgcttccggcatttcccctggattcaggtgcccttctactgggcggcgcagttcacgggggcgatgtgcgcggcgttcgtgctcaaggcggtgctccaccccatcgccgtgatcggcaccaccacgccgtcggggccgcagtggcacgcgctcctcatcgagatcgtcgtcaccttcaacatgatgttcgtcacctgcgccgtcgccaccgactccagggcggtgggtgagttggccgggttagcagtcggttccgcggtttgcattacttccatcttcgcagggccggtgtcgggcggatcgatgaacccggcgcggacgctggcgccggcggtggccagcaacgtcttcacgggcctctggatctacttcctcggccccgtcatcggcacgctctccggggcgtgggtctacacctacatccgcttcgaggaggcccccgccgccaaggacacgcagaggctctcctccttcaagctccgccgcatgcagagccagctcgccgccgacgagttcgacaccgtctaaattaaaacgcccacacgcgcatccacaacactgtcagcctgcaggtcaactcttcgcgcgtacgtacgctggacgctggctgagagagtgagtgagagagagagagagtactgtactactgtgtgctcgctcgctcgctctgttcaaagacctcatcatatcaggtgggagctagagagatagagctgcgtgtatgtatgtgtgtgtgtgtacgtgcttggtgtaccctacctagcgggtgagagcagctagcgtgatgtttatgtatcttcgtcagtgttgcaaaagttaattgatatgcagctgatgtgtctggctttgctggtt

SEQ ID NO: 145036 - DNA, 1322 bp, Zea mays
  unsure (1)..(1322): unsure at all n locations
  Clone ID: MRT4577_63757C.1
cagcgagcacgcaccagcatccttggcagcgatctgcttaattgcttctcccagcgcgcgcggccaagctagtaggggatcgatcagatatccacgccatggccgccgcctccaccacgtcgaggaccaactcgcgggtgaactactcgaacgagatccacgacctctccaccgtgcagagcggctccgccgtccccaccttgttctacccggacaagtccatcgccgacatcttcccgccgcaccttgggaagaaggtgatctcggaggtggtggcgacgttcctgctggtgttcgtcacctgcggggcggcgtccatctacggcgaggacaacaagcgcatctcgcagctggggcagtcggcccccctcgggctcatcgtccctccgctgatcttgtccccaaccagcaataacaggccctgccctgccctgcccggcccgcttggacggcctggtgcgcgcgccccccgtgcaccgatcgtgcccttctactgggcggcgcagttcacgggggcgatgtgcgcggcgttcgtgctcaaggcggtgctccaccccatcgccgtgatcggcaccaccacgccgtcggggccgcactggcacgcgctcctcatcgagatcgtcgtcaccttcaacatgatgttcgtcacctgcgccgtcgccaccgactccagggcggtgggtgagttggccgggttagcagtcggttccgcggtttgcattacttccatcttcgcagggccggtgtcgggcggatcgatgaacccggcgcggacgctggcgccggcggtggccagcaacgtcttcacgggcctctggatctacttcctcggccccgtcatcggcacgctctccggggcgtgggtctacacctacatccgcttcgaggaggcccccgccgccaaggacacgcagaggctctcctccttcaagctccgcgcatgcagagccagctcgccgccgacgagttcgacgtctaaattaaaacgcccacacgcgcatccaatgtcagccgcaggtcaactcttcgcgcgtacgtacgctggacgctggcnnnnnnnnnnnnnnnnnnnnnnntgtactactgtgtgctcgctcgctcgctctgttcaaagacctcatcatatcaggtgggagctagagagatagagctgcnnnnnnnnnnnnnnnnnnnnnnncgtgcttggtgtaccctacctagcgggtgagagcagctagcgtgatgtttatgtatcttcgtcagtgttgcaaaagttaattgatatgcagctgatgtgtctggctttgctggtttgcaaaagnnnnnnnnnnntgttggaactc

SEQ ID NO: 145037 - DNA, 388 bp, Zea mays
  Clone ID: MRT4577_63758C.1
acgctgcccagctaccgcgccaacccctgtggcgtcttcgctgccattccgccctactactgattcatgatatttgggaaatctcctctatccatctctctctatctatatatgtaataatgcagtaagacgacacacattatcatgggagggatgaccaataaaatatgcacggccaaaaaaaaaaggaaggagaaacttgctccaaaaaaaaggaaaaaaaaaaaaaaaacccacttgggaaaaaaaaaaaaaaaaaaaaaagacccctttaaaaaaaaaaaaaaaaaaaaaaaaagtcttgtccctggcccgcacccaccctaagggcaatttctggaattccccataaaattggcggcccctcggccttccttttaagggcccc

SEQ ID NO: 145038 - DNA, 1028 bp, Zea mays
  Clone ID: MRT4577_63759C.1
cactccatagggcgattgggttcctcgaggccggccggggtcccacaacgcacgcgaggtccatcgctcctcctctccgtcaccgagaaaatgtcggtctcctccccggccatggcctcgccccctctcgccgcgcccggcactcaccgcggcccctgcttctcgaccctctgccgcttaccgtcgccttcctgctacccgcctctttcggcttcctcctcaccggctatctccaccgtctccgcattcgctgtcctcaaacacaagcccagagttcgtaactacgtttcaggtctgggactaaggtgccaggccgcggaggaggcaccaccgccggcgcggggtaagacttcgctcaaggtgatgatttcgggagctcccgcctcgggaaaaggaacgcaatgccgcatgatcgtcgagaagtatggtttagttcacatatcaactggtgatcttctgcgagctgaagtatcttctggcacagaaattggcaagaaagcaaaagaatacatggacaatggaaagcttgtgccggaccaagttgtgacagatatggtggtatcacgactgtcacaaccggatatacaagaaagagggtggcttcttgatggttacccaaggagcttcagtcaagcacaacaccttgaaaatttgaaaatattcggctctatattcattgtgctagaagttcctgatgatgttctaatcgacagatgtgttggaagacggctggatcctgtgactggcaagatttaccatttaaaaaactaccccccggagaatgaggagatttctgcccgacttattacacgttctgatgacacatttgagaaggttaaatcacgtcttgatacgtacaagcaaaattctgaagctattcttcctacatactctgatttgcttaataagattgatggaaactgcccagccgaagttgtttttcaggcgatagatttcctgttacagaagatctgtgagaacacttcagcgagcaagttgaccaaaacaaatggaaaacgaccagattt

SEQ ID NO: 145039 - DNA, 388 bp, Zea mays
  Clone ID: MRT4577_6375C.1
ggaaagcttggcacgcctgctagagttccgatcctgtatagccggctcgactccacgcgttcgcgtgctttacttctgctcacaatattcctattttctgcgacaaaactcatttttgataatagctaaccggaaacagcccgtgtgaacaggatgggtgaggagaagagggggaacagagagagaaatcatgtgggcattattctagaaaccatgcagttgtaggtgctacatccctagaccagttgaactgatcttacttaagtgctcatgagctcttctccgtggctaatgactgcttattagacttctggttctacaaccgcatgctagtcggttatgtaggtcacagttgatcacaggctgatggctagtaaggatctatttt

SEQ ID NO: 145040 - DNA, 778 bp, Zea mays
  Clone ID: MRT4577_63760C.1
aacaagcacacagcgagcacgcaccagcatccttggcagcgatctgcttgcttctcccagctagcgcgcgcggccaagctaggggatccatcagatatccacgccatggccgccgcctccaccacgtcgaggaccaactcgcgggttaactactcgaacgagatccacgacctctccaccgtgcagagcggctccgccgtccccaccttgttctacccggacaagtccatcgccgacatcttcccgccgcaccttgggaagaaggtgatctcggaggtggtggcgacgttcctgctggtgttcgtcacctgcggggcggcgtccatctacggcgaggacaacaagcgcatctcgcagctggggcagtcggtggccggcgggctcatcgtcaccgtcatgatctacgccaccggccacatctccggcgcgcacatgaaccccgccgtcacgctctccttcgcatgcttccggcatttcccctggattcaggtgcccttctactgggcggcgcagttcacgggggcgatgtgcgcggcgttcgtgctcaaggcggtgctccaccccatcgccgtgatcggcaccaccacgccgtcggggccgcactggcacgcgctcctcatcgagatcgtcgtcaccttcaacatgatgttcgtcacctgcgccgtcgccaccgactcccagggcggtggggtgagttggccgggttagcagtcgggtccgcggtttgcattacttccatcttcgcaggggccggtgtcggggcggatcgatgaacccg

SEQ ID NO: 145041 - DNA, 233 bp, Zea mays
  Clone ID: MRT4577_63761C.1
tccacgcgtccgcccacgcgtgcggatctagagcgcgagcggacgcccttccgtgtattccacgctgctctaggaatctagcccaaaaatgtgccgcgcggagctgtaagacaagggggcaatcgcaggagtctttaccacaacaacaccggtagctccacaacggcaaaagacgcggcgtacaaaaaacaaaaaacgcttggtaaagaaaaagtaaacaaaaacggggggaa

SEQ ID NO: 145042 - DNA, 514 bp, Zea mays
  Clone ID: MRT4577_63762C.1
aaaaaaaacaaaaaaaaaaaaaaaaaaaaaaaaaagagctccaacctctaaatcctgttgttgagggccaatgagggcgcattggcgcgctcgcgggcataatggttggctggtgtgtactgtctgtatgatatatatttctcacaatatcacacaccatacgtacaaggccgcatacactgagaggcctgctgagcgtgctaactgagttagctaacgttgatttcattgccctctctgaaccgccttaaacccgggaaaccaactcgactagctaattgaataaatcacgccagcgagcgggcaggggcagtgggcgtttttaccgttcttccttactgtcttcattgactcgctcggttggctcgttcgagcggattaagctgactcaatgtcgctcattcgcggtattcacggctatccacagaaacaggcggaaacgacactgagagaacaagcacgccaacagcccgccaacggccagaaaggccgccgtaggtcgggttgctgcata

SEQ ID NO: 145043 - DNA, 1745 bp, Zea mays
  unsure (1)..(1745): unsure at all n locations
  Clone ID: MRT4577_63763C.1
ttggcgcgcacggggaccgcgggccggcccggaaggacagaccgagcacgcaccagcatccttggcacttggcagcgatctgcttgcttctcccagcgcgcgcggccaagctagtaggggtctaggggatcgatcagatatccacgccatggccgccgcctccaccacgtcgaggaccaactcgcgggtgaactactcgaacgagatccacgacctctccaccgtgcagagcggctccgtcgtccccaccttgttctacccggacaagtccatcgccgacatcttcccgccgcaccttgggaagaaggtgatctcggaggtggtggcgacgttccttctggtgttcgtcacctgcggggcggcgtccatctacggcgaagacaacaggcgcatctcgcagctggggcagtcggtggccggcgggctcatcgtcaccgtcatgatctacgccaccggccacatctccggcgcgcacatgaaccccgccgtcacgctctccttcgcatgcttccggcatttcccatggattcaggtgcccttctactgggcggcgcagttcacggggggcgatgtgcgcggcgttcgtgctcaaggcggtgctccaccccatcgccgtgatcggcaccaccacgccgtcggggccgcactggcacgcgctcctcatcgagatcgtcgtcaccttcaacatgatgttcgtcacctgcgccgtcgccaccgactccagggcggtgggtgagttggccgggttagcagtcgggtcccgcggtttgcattacttccatcttcgcagggccggtgtcgggcggatcgatgaacccggcgcggacgctggcgccggcggtggccagcaacgtcttcacgggcctctggatctacttcctcggccccgtcatcggcacgctctccggggcgtgggtctacacctacatccgcttcgaggaggcccccgccgccaaggacacgcagaggctctcctccttcaagctccgccgcatgcagagccagctcgccgccgacgagttcgacaccgtctaaattaaaacgcccacacgcgcatccacaacactgtcagcctgcaggtcaactcttcgcgcgtacgtacgctggacgctggctgagagagtgagtgagagagagagagagtactgtactactgtgtgctcgctcgctcgctctgttcaaagacctcatcatatcaggtgggagctagagagatagagctgcgtgtatgtatgtgtgtgtgtgtacgtgcttggtgtaccctacctagcgggtgagagcagctagcgtgatgtttatgtatcttcgtcagtgttgcaaaagttaattgatatgcagctgatgtgtctggctttgctggtttgcaaaagatgcatgcatgtgttggaactcggaacacaaatatatatatgggtttttttttccctaggatatactagtggtccgtagtcatggtctatgtctatgtgtcgctcttctctcgatccatgcacgtccgtggcccggtgtggatgggctcgctctgtcaaatgtgccaatgagctggagcttaattttgggacgaacactgtgccgtgtgctgtgtgcagccagtcgtactcgtacctctcctgctatcacttgttccaaaagctcttggtgcttacataaagatcatctgtgccttgcccgataaaaaaaactattcttgaaaaaaaaaaaaaataaaannnnnnnnnnnnnnnnnnnnnnnnnnnnnnnnnnnn

SEQ ID NO: 145044 - DNA, 1493 bp, Zea mays
  unsure (1)..(1493): unsure at all n locations
  Clone ID: MRT4577_63764C.1
ttgggtacctcgaggccggccgcgagcgggcagcacacagcgagcacgcaccagcatccttggcagcgatctgcttaattgcttctcccagcgcgcgcggccaagctagtaggggatccatcagatatccacgcgccatggccgccgcctccaccacgtcgaggaccaactcgcgggtgaactactcgaacgagatccacgacctctccaccgtgcagagcggctccgccgtccccaccttgttctacgacccggacaagtccatcgccgacatcttcccgccgcaccttgggaagaaggtgatctcggaggtggtggcgacgttccttctggtgttcgtcacctgcggggcggcgtccatctacggcgaggacaacaagcgcatctcgcagctggggcagtcggtggccggcgggctcatcgtcaccgtcatgatctacgccaccggccacatctccggcgcgcacatgaaccccgccgtcacgctctccttcgcatgcttccggcatttcccctggattcaggtgcccttctactgggcggcgcagttcacgggggcgatgtgcgcggcgttcgtgctcaaggcggtgctccaccccatcgccgtgatcggcaccaccacgccgtcggggccgcactggcacgcgctcctcatcgagatcgtcgtcaccttcaacatgatgttcgtcacctgcgccgtcgccaccgactccagggcggtgggtgagttggccgggttagcagtcgggtccgcggtttgcattacttccatcttcgcagggccggtgtcgggcggatcgatgaacccggcgcggacgctggcgccggcggtggccagcaacgtcttcacgggcctctggatctacttcctcggccccgtcatcggcacgctctcccggggcgtgggtctacacctacatnccgcttcgaggaggnccccgccgncgctagctagctactttctcctcttgttgcttgctttgcctctcgctgcccctcccggacgcgttgttcttggtgtggctttgattttgttttggctgcaggtgggtgagttggccgggttagcagtcggttccgcggtttgcattacttccatcttcgcagggccggtgtcgggcggatcgatgaacccggcgcggacgctggcgccggcggtggccagcaacgtcttcacgggcctctggatctacttcctcggccccgtcatcggcacgctctccggggcgtgggtctacacctacatccgcttcgaggaggcccccgccgccaaggacacgcagaggctctcctccttcaagctccgccgcatgcagagccagctcgccgccgacgagttcgacaccgtctaaattaaaacgcccacacgcgcatccacaacactgtcagcctgcaagtcaactcttcgcgcgtacgtacgctggacgctggctgagagagtgagtgagagagagagagagtactgtactactgtgtgctcgctcgctcgctct

SEQ ID NO: 145045 - DNA, 229 bp, Zea mays
  Clone ID: MRT4577_63765C.1
gcctcgacaaacacgaagatagcacggaattcggcacgaaggcgccggacgtgcttgatgcatcatcaacccaagtacgtgacctccgctaccggaacaaccgaacgatacacgcaaccatgtcgaggaggaagaccagggagcccaaggaggagaacgtcaaccttggacccactgtccgtgaaggagagtatgtctttggtgttgctcacatctatgcatccttcaa

SEQ ID NO: 145046 - DNA, 327 bp, Zea mays
  Clone ID: MRT4577_63766C.1
gccacctagaaagatcaaaagcgcactaacgttcgtacacaagctatcaagacatcttgcgctcgggggcttttttgcatgtgctgatacgctgatactgttaccatattgctcacaagctcacatacttctattgcttccctcgtacctctgaacatctgagcatcggggttttgaaaacccgaaaattcaattcttcaagattccacgagccaacacgccatgcctgctagcattataactctattaccctcgacaatcctacaatcatttacactatttccccatggagcatttatgggttcataggctcaaggcattacggct

SEQ ID NO: 145047 - DNA, 408 bp, Zea mays
  Clone ID: MRT4577_63767C.1
tttgtttgaacaacatgttttatactagaaggataacagataacaagaacagactgtgaaacagagtaccatctagctatacgacagactcattgcctggccctaaggagaaaccggactgcgacggctctttcaaacaacaggggaaactgctgaccggctcataaagtatggatagacgacggggacccgaagcttaaacaacctcttgcgtcttgcttttgacgggggcatcctccagcggaggcatctcagggcacggccccaacagactggtcctcatcgatgctcagaccgcgctttatcatgcgaaggatccgggtgccaaacgtggggggggcatccaagctgaagccggagggcaggagaagtgacttgaacagcaacatcacaagaaccttgactgag

SEQ ID NO: 145048 - DNA, 782 bp, Zea mays
  Clone ID: MRT4577_63768C.1
ccggccgatctgatcccccctcctccccggtgaccggcgccgggcggccgttctagagaaccgcaggcgcagcatgaggcgcgtcgtgaggtggctccggcagctactggctggcaggaaggacgagcgcggaggaggactcgaggtgagccatgtcggtagcggctggagcgacgggccggagaaggagaagaagaggtggagcttcgcgaagcagaggaagagcggaggcggaggcgcgcggtcgtcgggtccggacgccgtcgctcctgctgccgcggtggaacggtcgcagctggtggggaggccaggggaggacgcgagggctcgagaacaccgtgccgcgatcgccatccagaaaaccttcagaggctacctggctaggagagcgctccgagctctccggtcgctcgtcaagatccaggcgctggtacggggctacctggtgaggaagcaggcgaccatgacgctgcacagactgcagacgctcatgcggctgcaagccgactccatcgccgtcaagaatgcatcgtaccggagatccatggaacaagaagtaacccacatggagagggtctatgctcgggacgtccaggtgaagccgctcgcgacggcgccggtgcaccgccggatgctgtctgacagctcggactccatctacgagcgcagcccgcggatcgtggagatggacacttgccacctccgctcccggtcctcacggatcaccagcaggtacaacaagtacaagtacaacccggatggcttaccagagtaccaccacc

SEQ ID NO: 145049 - DNA, 217 bp, Zea mays
  Clone ID: MRT4577_63769C.1
gttgaggccggaggcgaacactaccgcgctgaacagaatcattacaacggaaccgaaagacgatatgatagagcatggccatgcgatctagagaagttacagcataatgggggacagcccatagatctacatgattttgtggcaggaaatgtaataaggcatatgtgagtcgttgatacaatgtgagtccatgaacttttgcaacttggcatgacta

SEQ ID NO: 145050 - DNA, 1269 bp, Zea mays
  Clone ID: MRT4577_6376C.1
gcacacccggcccagggtttcccctgtcggagagaggacgccttttggtgctgtccctgtacttctcctttcgaaggatctctctgcgcgccggggcggcgatggcggcggcgccggcgcccctgccggcgcccgtcgcagactggtgggagcgcgtcaacggctcgccggcgtggcaggacgggatcttctgggccctcgccgtcctctacggtgccatcgctactgcctcattcatccaagttgccaggatacagtgcagagtccctgaatatggatggacaacccaaaaggtcttccagttcctgaatttcgtggtcaatggggccaggtgctctatctttgctttccgtcgccaagtgcaacaagtgaaccctccggtttggacgccttaactttgtcctatctttcagcatgttattcttgatcttcctgggcttgcattcttcactacctatgcactgttagcgcttttctgggccgagatactttaccaagcacgtggaataatgactgatcgacttcgatcaggtttctacatcattaattgtgttgtttatgcattgcaggtctttcttttttcactgccttgggttttctgatctatggaggaaggcttttcatcatgctgaaatattttcctattgagtcaaaagggaggcaacaaaagctgagagaagtcggcagagttgccaccatatgtttctgttgtttctcggcgcgatgcataatgatgtgcttcaatgcatttgacgaggaagctgacctcgatgttcttgaccatccagttctgaatttgttctattacctgcttgtggagattctcccttcatctcttgtcctgtacattctaaggaggattcctgcaaagctacggctatcccagtatcaccccgtcagcagcagctagagacgaggcattaccatctgctgagccaaaaatggtgactgctgtcaagctatgaaaaatcaactgcaacgccctctatataatatttgtattggtagcctctctgcaaaatatatatagggataagacttgcctcggttatttcttttctagaccctactcacatggaagccatccaatatttttccgtagctcacctattgctaaccctgttagttcaatctgctaattttatgatttttagtgtttgagcataatgaaggaaagcaccattgtaaaactgaactacatgaaaagttgaacatagattttttttcctggagatgagtttaacagcgagttaccctttggaatcgttg

SEQ ID NO: 145051 - DNA, 183 bp, Zea mays
  unsure (1)..(183): unsure at all n locations
  Clone ID: MRT4577_63770C.1
agtatctaaattnctgaatctatcttaagtttgttcataaaagnngntgncattgcttgctctttttaggtgactgtttatggcaaacaggnattnnatgtgactgacatttgagttctgcgnggaaaactgatnatcaatggatgaatttttttttttttggngcaaaaacactcatttttt

SEQ ID NO: 145052 - DNA, 801 bp, Zea mays
  Clone ID: MRT4577_63771C.1
gtgaagctaaaaaaggcactataaatggtttttttaagatcccagaacacaatatcacaatacaactactggggcaagtatacattcatggctttacaaaacttatgattttttgacaataaatggtaattgagcaggtttatctggacatgaatggtcatccaatgtagtcgggagtaagatcaatcaggtgaaattctcccttcatgcatctttctctccagccggcctatcctcgacggaggccagattatgtgcgtaacccgcccttgaactagacctaagggaatcggaccgaatgccctagaatcccagctacgagtagagttatcaccttcaacccagcaatgcccttctgggatcttagtagggttaagggacccagggagctgtatcttctcaccaggaagcccaatcaacctcttcacaagcatctccttatgattgctagggcacttgaacaaaatcacatcaccatgtgagaacttgcactgctcaaggcacctcttttctgctaaaacgaaatcacctccccagaagctattggcggccgtaaacgtaggatacatggattcgccagtcacccaagtgaaattcgcccaacggtcagaaatggagacgccaattacaaacgccattgcactcctcttggtcgtcgaccaaagatggctataggttctcatgttcaattatccaacctccgaagaggcgcccaacaagaacagcgggacgcctttgtcgtcctcggcggcggcgcggagctgtggttggacagttgcggacgcgtgggcggacgcgggg
